United States Patent Application Publication US 2013/0332133 A1 - sequence listing, part 9

SEQ ID NO: 116907 - protein, 714 aa, Unknown
  Bacterial polypetide isolated from the Sargasso Sea
MKKITINNLKIDENLIKFINDEAIPGTGLDSDHFWKEFSNVVHELAPKNKNLIKKREEIQKKIDDWHLSNKDSALDKNKYTEFLKSINYIVEEKDNFKINTSNVDEEISSIAGPQLVVPVDNARYALNAANARWGSLYDAIYGTDVISENKAETWDKQRAIEVINYVREFFDKIISIENTSWKNISKIKIESNNLVFVVDDKKYNLKNKNQFVGFSGEKNNPKSILFKNNNLHIDVIIDENSKIGKTDKAGISDIIVESAISTIVDNEDSVAAVDSTDKVKCYRNWLGLMKGDLKTEVNKNGKTFVRKLNSNRSYIGADGSKITLHGRALLLNRNVGHLMTNPAIILKDGSEIPEGIMDAFISTLCAMHDFKLKNNSRKESVYIVKPKMHGPEEVDFTNNLFSRVEDALKIKKYSIKVGIMDEERRTTVNLKECIRKVKERVVFINTGFLDRTGDEMHTSFEAGPMIFKGDMKKSTWLNTYEDWNVDIGLACGFSGKAQIGKGMWAMPDKMSDMMKQKINHPKSGANCAWVPSPTAATLHATHYHYFDVFKKQDELKNKKRAKLENLLEIPKADRPNWSLDDINKELENNVQGILGYVVRWIDQGVGCSKVPDINNIGLMEDRATLRISSQHIANWLHHNICSKDQVMKVLKKMAKIVDEQNSSDKKYEPMSINFEKSKAFITACDLIFKGRVQPSGYTEPLLHKRRLEKKSIH

SEQ ID NO: 116908 - protein, 604 aa, Unknown
  Bacterial polypetide isolated from the Sargasso Sea
MNYINKNDLKINSTLFEFINKEAIPGLDIKSEDFWKNFSKIVHELAPINKSLIEKRETIQKKIDDWHKKDENKDFNKEKYINFLKSISYIVEKKEDFKISTSDVDKEISSIAGPQLVVPVDNARYALNAANARWGSLYDALYGTDVIPGEKGKGHNKERANKVISYVREFLDQVFPLNNGSWKEISKIQIEGSDLVLLIEEKKNYIKDKKQFVGFNGEKTKPHSILLKNNNLHIDIIIDPKNMIGKDDKANISDFIIESAISTIIDNEDSVAAVDGEDKVKCYRNWLGLMKGDLKTSMEKNGKKFVRKLNPDRNYISKDGSKIQLHGRALLLNRNVGHLMTNPSIILKDESEIPEGIMDAFISTLCAMHDFKNKKNSRTKSFYIVKPKMHGPEEVAFTNILFEKVEDALGIKRFSIKVGIMDEERRTTINLKECIREVKDRIVFINTGFLDRTGDEMHTSFEIGPMIFKGEMKKSTWLNSYENWNVDIGLDCGFSGKAQIGKGMWAMPDKMKDMMDQKIGHPKSGANCAWVPSPTAATLHSMHYHKVSVFNEQEKIKSRKKAKLEDLLEIPKADRPNWSVEDINRELENNAQGILGYVVRWIDQ

SEQ ID NO: 116909 - protein, 525 aa, Unknown
  Bacterial polypetide isolated from the Sargasso Sea
MTSKLKIMNPLSEAEKQILNPITVSLIESLHENFENRRQELLENRRIIQKELDDGRFPEFLNHTAAIRESDFVVAPIPKDLQDRRVEITGPPDRKMVINALNSPVKTFMCDFEDSCSPTWNNVIQGHLNVRDAVEESIEFTRESDGKVYRLNDDIATLIIRPRGWHLDEKHITINDQPISGSLFDFGVYLSNNFEALSKKGTGPYFYLPKLENHLEARLWNDVFLHAQDFLNIDRGTIKATVLIETITAAFEMDEIIFELKDHSAGLNCGRWDYIFSFIKKFRNHEEFLLPNRTEVKMERHFLKSYVDLLIQTCHKRNVHAMGGMAAQIPIRGDEEQNQIAMDKVASDKSREANAGHDGTWIAHPGLSDVAMNAFNQAMGASANQISNKRNDVSVCAQDLIKVPNGSITEEGLRQNISIGIQYIEAWLSGNGCVPIHNLMEDAATAEISRSQIWQWIHHAAKTTDTNKAITEEYFFKTLDEEMDLMIVSRGFESDYLQPAINLFKEMSTDSEFDEFLTLPAYKHL

SEQ ID NO: 116910 - protein, 483 aa, Unknown
  Bacterial polypetide isolated from the Sargasso Sea
EIFWNAFEEILYEFTPKNKALLEKREILQKQIDEWHISKKGTDFDKEAYKDFLKEIGYLLEEGDDFSIETENVDPEISKIAGPQLVVPVMNARFALNAANARWGSLYDALYGTDVIPEENGAEKGGSYNPIRGDKVIEFSKKFLDETFPLVTGSFADVTAFQIKAGKLQITLADQSQVSLSDESKFEGFSGSEDNPKGILLKNNNLHMEIQIDRSDSIGSQDPAGIKDVLVESAITTIQDCEDSVAAVDGDDKAQVYENWLGLMKGDLAETFQKNDQSMTRVLNEDRDYIRPKGESFSLPGRSTLLVRNVGHLMTNPAILDKDGNEVFEGIMDAMFTIAIAKHDILNTGSKVNSKTKSIYIVKPKMHGPEEVKFTCDLFAAVESALGLEPLTAKIGIMDEERRTTVNLKECIRIAKDRVIFINTGFLDRTGDEIHTSIEAGPMIKKSEMKQQTWINAYENWNVDTGLETGFKGKAQIGKGMWA

SEQ ID NO: 116911 - protein, 305 aa, Unknown
  Bacterial polypetide isolated from the Sargasso Sea
PTPIKVGLMDEERRTSTNLKECIRALSKRLVFQNTGFLDRTGDEMHTSMEAGPMIKKGDMKSSKWIQAYENNNVDLGLKCGFSGVAQVGKGMWAAPDEMKKMLEEKIGHLKAGATTAWVPSPTAASLHALHYHQIDVFDVQKKLVTRSPAKLDDLLTIPIANRPNWSVDEINSEISNSAQTLLGYVVRWIDQGVGCSKVPDISNTFLMEDRATLRISSQHIANWLHHGITTKIQVMEIMKQMAKIVDKQNESDEKYVKMSDDFDNSIAFKAACDLIFKGKDQPSGYTEPLLHLNRLEKKLLRTRI

SEQ ID NO: 116912 - protein, 714 aa, Unknown
  Bacterial polypetide isolated from the Sargasso Sea
MEKINISNLSVDENLVKFINNEAIPGTNVDVKKFWDSFSEVVNKLAPKNKSLIQKRAEIQKKIDEWHISKKESIFDKKEYINFLKSIGYIVEEKSDFKISTSNVDQEISSIPGPQLVVPVDNARYALNAANARWGSFYDALYGTDVIPGKTNKGYDDERAKKVINYSREFLDNIFSITDASWKDITKIKLEEKNLALFINEKKFYLKNKNQFVGFNGEAENLNSILLKNNNLHIDILIDPKSAVGKNDKAGISDIIIESAISTIVDNEDSVAAVDSKDKVKCYRNWLGLMKGDLKTEVQKNNKKFTRKLNPDRVYKSPDGSKITLHGRALLLNRNVGHLMTNPAIVLKNGSEIPEGIMDAFFSTLCALHDFKNKKNSRTNSVYIVKPKMHGPEEVDFTNEIFENVEKVLNLKKNTIKVGIMDEERRTTVNLKECIRKVKDRVVFINTGFLDRTGDEMHTSFEAGPMIFKADMKKSTWLNSYENWNVDIGLSCGFSGKAQIGKGMWAMPDRMSDMMQQKINHPNAGANCAWVPSPTAATLHATHYHKVDVFKKHGEISERAKADLKNILEIPKADRPNWSVEDINKELENNAQGILGYVVRWIDQGVGCSKVPDINNIGLMEDRATLRISSQHMANWLHHNICTEEQVMKVLKKMAAIVDHQNSKDKNYLPMSQNFEKSFAFSAACDLIFKGRSQPSGYTEPLLHKKRLEKKSSH

SEQ ID NO: 116913 - protein, 360 aa, Unknown
  Bacterial polypetide isolated from the Sargasso Sea
GIMDAFITSAACLHDLNKKGNSRTGSIYIVKPKMHGPEETAFTDLIFSKVEEALNLEKYTCKIGIMDEERRTSANLKECIRSLKNRVFFINTGFLDRTGDEIHTSMEAGPMIKKGDMKKSDWISAYENNNVDIGLECGFSGVAQIGKGMWAMPDKMSDMLDQKIDHLNAGANCAWVPSPTAAALHSLHYHKVDIFEKQKKLAKREKAKLDNLLSIPIANRPNWSMDEINSEISNSAQTLLGYVVRWIDQGVGCSKVPDINNIGLMEDRATLRISSQHIANWIHHGVTTKMQVIEIMKQMARIVDQQNLNDPNYEKMYDNFENSLAFKTACDLIFEGKKQPSGYTEPLLHLNRIKKKSNQN

SEQ ID NO: 116914 - protein, 589 aa, Unknown
  Bacterial polypetide isolated from the Sargasso Sea
MQEKYININKLKVSESLSKFVKDELLKDTNISSDDFWLGFEKTVEELEPKNRQLINFRETLQKKIDAWHIKNKSNEFNLTEYKKFLVEIGYLKEEGPDFSIDTKNVDDEITKIAGPQLVVPIMNSRYALNAANARWMSLYDSLYGTDVIEQSEDSVSERYDPLRGEMVIKYGRDFLDKYFPLKDMSWSKITTVAVKEGSFKTLKGIETFDLVDEEKFIGHRGEADNPSAIILKNNNLHIEILRDRRAFSAQQDYAGISDIILESAVSTICDNEDSVAAVDAADKVICYRNWLGLMKGNLKTQFEKGGKLLERKLNPNRSYISKEGKGLKLHGRSLLLIRNVGHLMTNPSIILSNGNEVPEGIMDAFITVAAALHDLKNKNNSRTGSIYIVKPKMHGPEETAFTDLIFSKVEEVLGLEKYTCKIGIMDEERRTSSNLKECIRTLKNRVFFINTGFLDRTGDEMHTSMEAGPMIKKGEMKSSKWILAYENNNVDVGLKCGLSGKAQIGKGMWAMPDKMKDMMEQKTGHLKAGANCAWVPSPTAAALHALHYHEIDIFDQQKNIIKREKAKLDDLLTIPVANRPNWSIEEIN

SEQ ID NO: 116915 - protein, 399 aa, Unknown
  Bacterial polypetide isolated from the Sargasso Sea
KGLKLHGRSLLLVRNVGHLMTNPSILLSDGSEIPEGIMDAFITTAAALHDIKNKNNSRTGSVYIVKPKMHGPDETAFTDLIFSKVEEVLNLPKYTCKIGIMDEERRTSANLKECIRSLKNRVFFINTGFLDRTGDEMHTSMEAGPMIKKGDMKSSKWINAYENNNVDIGLSCGFSGKAQIGKGMWAMPDKMKDMMEQKTGHLKAGANCAWVPSPTAAALHALHYHEINIFNEQKKLIDREPAKLDDLLTIPIADRPNWSVEDINKEISNSAQTLLGYVVRWVDQGVGCSKVPDINNIGLMEDRATLRISSQHIANWIHHGITTKIQVTEIMKEMAKIVDDQNKDDPLYVKMSSDYENSIAFQTACDLVFKGKEQPSGYTEPLLHLNRLKKKSNLSSKPN

SEQ ID NO: 116916 - protein, 452 aa, Unknown
  Bacterial polypetide isolated from the Sargasso Sea
MNQLNTEKRVTIGSLSIDPSLEALVREEIMPGLGLDAEDFWNSFSQILNDLTPRNRELLEKRDRIQQQIDEWHLNRKGKPRDPQAYQEFLRSIDYLVPEGPDFKITTTGVDPEISQIPGPQLVVPVSNARYALNAANARWGSLLDAAYGTDVIPETEGAEKGISYNPRRGEKVFEFVHGVLDASAPLAEGSFSRITGFSLDQGRLRMILEGGHETGLQNQEQFAGFNGSPENPDSILLKKNGLHLDIQLDRNHPVGKDHPAGICDILLESAVTTIQDCEDSVAAVDASDKVHVYRNWLGLMKGDLSAKLDKGGKMITRTLNPDRKYKTPEGSEIVLPGRSLMLVRNVGHLMTTDAVLDEQGNEIFEGMLDGMMTALISLYDIRGLGTFQNSRRGSMYIVKPKMHGPEEVALSVELFGRIEKALGMEEGTLKIGIMDEERRTTRHLKECIRAA

SEQ ID NO: 116917 - protein, 408 aa, Unknown
  Bacterial polypetide isolated from the Sargasso Sea
NKFEDFNLDNYKNFLKDIGYLKEEGPEFKIETKNLDTEISSIAGPQLVVPIMNARYSLNAANARWMSLYDSLYGTDVIESEESGGEKYDPLRGEQVINYARDFLNKHFPINGISWREISGFEVNDGNLKIKKDKDLFNLKHNEKFTGFRGEVLKPTAIILNNNNLHLEIIINPKAFSAAQDAAGISDIIIESAISTICDHEDSVAAVDAEDKVACYRNWLGLMKGDLVSIFEKQGKQLKRKLNPDRSYISNSGKNMKLHGRSLLLVRNVGHLMTNPSIILNDGSEVPEGILDAFITSAACLHDLKRKGNSRSGSIYIVKPKMHGPDETAFTDVIFGKVEEVLELEKNTIKCGIMDEERRTSANLKECIRTLKHRVFFINTGFLDRTGDEMHTSMEAGPMIKKGDMKKS

SEQ ID NO: 116918 - protein, 480 aa, Unknown
  Bacterial polypetide isolated from the Sargasso Sea
MLEHMMGEMIERNGLRVAAVLSKFVDDEALRGTGIDSEVFWKGFDALVHDLAPKNRALLAERDRLQTELDQWHRANPGPVRDLKAYRAFLEGIGYIVPASAAVKATTENVDTEIAEQAGPQLVVPLSNQRYALNAANARWGSLYDALYGTDAIPETDGAVRTAYYNVVRGARVIARARAFLDEAAPLANDSHVDAIAYRVECGKLAVTLKNGSSALKVPAQFIGYQGDAGSPSAVLLKHHGLHFEIQIDATHPIGKTDAARVKDVLMEAAVSTIIDCEDSVAAVDAADKVQLYRNWLGLAKGELTEQVTKNGKTFTRRLNADRTYTAPDGSTVKLHGRSLLFIRNVGHLMTNPAIVDRDGHEIPEGILDAVMTSLGAMHDLQNKLNSRTGSIYIVKPKMHGPAEVAFANELFGRVEDLLGLPRHTIKMGIMDEERRTSVNLPACIAAASARVAFINTGFLDRTGDEMHSVMEAGPMMRKG

SEQ ID NO: 116919 - protein, 465 aa, Unknown
  Bacterial polypetide isolated from the Sargasso Sea
HFEIIINPGAFSAAHDIAGISDVIAESAISTICDNEDSVAAVDANDKVVCYRNWLGLMKGDLRIEFEKNGKILERKLNPDRSYISKDGKGLKLHGRSLLLIRNVGHLMTNPSILLKDDTEIPEGIMDAFFTTIAAVHDLKRKKNSRKGSIYIVKPKMHGPEETEFTNLIFTKVEEVLNLKKFTCKIGIMDEERRTSANLKECIRTLKNRVFFINTGFLDRTGDEMHTSMEAGPMIKKGDMKSSKWIQAYENNNVDIGLKCGFLGKAQIGKGMWAMPDKMLEMMKDKINHLKAGANCAWVPSPTAASLHALHYHQINIFDEQQKILKREQAKLDDLLTIPIADRPNWSVDEINKEISNSAQTLLGYVVRWIDQGIGCSKVPDINNVGLMEDRATLRISSQHIANWIHHGVTTKMQVIEIMKEMAKIVDKQNKNDKNYSEMSNDFDNSIAFQTACNLIFKGKNQPSG

SEQ ID NO: 116920 - protein, 600 aa, Unknown
  Bacterial polypetide isolated from the Sargasso Sea
MQEFALNATNARWGSLYDALYGTDVISEEGGALKEGAYNEIRGNKVIDFSKEFLDQCFPITDFSYKDITNISVRDQRLLFHTEQDQITYLKNENQFKGFNGSPENPSEVLLVNNNLHLEIQIDPNHPVGKTDKANIKDIVLESAVSTIQDCEDSVAAVDAEDKVIAYRNWLGLMKGDLSETFEKNGKQLTRVLKEDRKYLDANGNSFSLPGRSLLLVRNVGHLMQNPSVILENGDEVFEGILDAMFTICIALYDLNKLNTLSNSRNKSMYIVKPKMHGSEEVAFTCDLFDAVERLFNLEKHTVKVGIMDEERRTTINLKACIEKAKERIIFINTGFLDRTGDEIHTSMEAGAMVPKSEMKAQSWINAYEDWNVDIGISCGLSGKAQIGKGMWAMPDEMKDMVETKIAHPLSGATCAWVPSPTAATLHAMHYHHVDVLSKQEELSSREQADLDKILTIPLLKEHLDKQTIRNEIANSAQGILGYVVRWIDQGIGCSKVPDINNVGLMEDRATCRISSQHISNWIHHGICSEEEVIDIFKEMALVVDEQNKDDSNYQKMGSNFSGFAFQASLDLAIKGVSQPSGYTEPLLHKWRLEFKKNIR

SEQ ID NO: 116921 - protein, 242 aa, Unknown
  Bacterial polypetide isolated from the Sargasso Sea
SSKWIQAYENNNVDLGLKCGFSGKAQIGKGMWAAPDEMKKMLDEKIGHLKAGANCAWVPSPTAASLHALHYHQIDVFELQKKLISRSPAKLDDLLTIPIADRPNWSVDEINSEISNSAQTLLGYVVRWIDQGVGCSKVPDITNTFLMEDRATLRISSQHIANWLHHGITTKIQVTEIMKQMAKVVDKQNEGDKDYVKMSDNFEKSIAFKAACDLIFKGKEQPSGYTEPLLHINRLEKKATQN

SEQ ID NO: 116922 - protein, 369 aa, Unknown
  Bacterial polypetide isolated from the Sargasso Sea
EGSDFKIETKNVDDEITQIAGPQLVVPIMNARYTLNAANARWVSLYDSLYGTNIIESEEGGSERYDPNRGQEVIKYVREFFDKYIPIDGTSWKNISALKIKDKNLIILKEDKEYKLKDENKFVGHRGDVNKPSAIIIKNNNLHFEIIINPKAFSAAHDIAGISDVIAESAVSTICDNEDSVAAVDAEDKVACYRNWLGLMRGDLKVQFEKNGKKLERKLNPDRSYISKEGKGLKLHGRSLLLIRNVGHLMTNSSIILNDGSEVPEGIMDAFITTTAALHDFKKKKNSRTGSIYIVKPKMHGPDETAFTDSIFSKVEELLGLPKYTCKIGIMDEERRTSANLKECIRTLKNRVFFINTGFLDRTGDEMHT

SEQ ID NO: 116923 - protein, 348 aa, Unknown
  Bacterial polypetide isolated from the Sargasso Sea
ALHDFKNKKNSRKNSVYIVKPKMHGPEEVEFTNNIFGEVEKVLGIPKYSIKVGIMDEERRTTVNLKECIRKVKERVVFINTGFLDRTGDEIHTSFEAGPMIFKGDMKKSSWLNTYEDWNVDIGLSCGFSGKAQIGKGMWAMPDRMSDMMQQKVGHPNAGANCAWVPSPTAATLHVIHYHQLNVFKKQSELKSRKKAKLENILIIPKSERPNWQVENINKELENNAQGILGYVVRWIDQGVGCSKVPDVNNIGLMEDRATLRISSQHMANWLHHKICTKDQVMETLKKMAAIVDKQNSGDKNYLPMAPNFDKSLAFTAACNLIFQGREQPSGYTEPLLHKIRLEKKISH

SEQ ID NO: 116924 - protein, 263 aa, Unknown
  Bacterial polypetide isolated from the Sargasso Sea
MHTSMEAGPMIKKGDMKSSKWINAYENNNVDIGLSCGFSGKAQIGKGMWAMPDKMKDMMEQKTGHLKAGANCAWVPSPTAAALHALHYHEINIFNEQKKLIDREPAKLDDLLTIPIADRPNWSVEDINKEISNSAQTLLGYVVRWVDQGVGCSKVPDINNIGLMEDRATLRISSQHIANWIHHGITTKIQVTEIMKEMAKIVDDQNKDDPLYVKMSSDYENSIAFQTACDLVFKGKEQPSGYTEPLLHLNRLKKKSNLSSKPN

SEQ ID NO: 116925 - protein, 406 aa, Unknown
  Bacterial polypetide isolated from the Sargasso Sea
VREKLQKKIDDWHKDTKGEEINLKKYSNFLRKIGYLTKTGKDFKIKTTNVDKEISSICGPQLVCPVSNARFLLNAANARWVSLYDSLYGTDVIPETRGALRGKTYNPIRGKKVIDYSRELLDKFIPLQKKSWKDLKKIPEVINNKLDLKLKNPKQFAGYNKKSNKLSSLLFVNNNLHIDILFDQDGNMEINNPDGNQDKIKIHDIILESAISTICDHEDSVAAVDAEDKVLGYQNWLGLMRGDLKEEFVKNGKKILRKLNSDRNYISTIGKKFKLHGRSLLLNRNVGHLMTNPAVLLKDGRECPEGILDAFIVSTACIHDFRKKGNSRCNSIYIVKPKMHGPDETSFTNLIFEKVERALNLKRFTIKCGIMDEERRTSLNLKECIRSLKNRVFFINTGFLDRTGDE

SEQ ID NO: 116926 - protein, 586 aa, Unknown
  Bacterial polypetide isolated from the Sargasso Sea
GSLYDALYGTDMISEDDGADRGGAYNPVRGDKVIDFSKNFLNDYLPLTEGKYQDVVSFQISNGVLEISLSDQSKTSLKNDSAFVGFKGDESNPESILLKNNDLHVEIKIDRNDSVGSTDPAGIKDVFLESAVTTIQDLEDSVAAVNGEDKTDVYKNWLGLMKGTLAETFEKGGSTLTRSLNEDLSFLSPDGKPMTIAARSLMLVRNVGHLMTNPAVLLDGKEIPEGIIDAMFTIAIGKHDLDQTGSVQNSKTGSIYIVKPKMHGPEEVQFTCDLFSDVESALGLEKNTVKIGIMDEERRTTVNLKECIRVAKERVIFINTGFLDRTGDEIHTSMEAGPMIRKAEMKQQPWILSYEDWNVDNGLSSGFKGKAQIGKGMWPMPDMMLDMFNTKTMHPKAGANCAWVPSPTAATLHAMHYHQISVSSEQSDLLKRERASLDDILTIPLLEDAGSLSADEIQAELDNNAQGILGYVVRWIDQGIGCSKVPDINNIGLMEDRATCRISSQHMANWLHHGLCSEEQIIETMKKMALVVDEQNAGDPEYVNMAPSFDGVAFKAACDLVIKGRVQPSGYTEPILHEKRQEFLGG

SEQ ID NO: 116927 - protein, 418 aa, Unknown
  Bacterial polypetide isolated from the Sargasso Sea
MNNFIHINQLKIDSNLFNFVNTEILPGIDIQQDQFWKNFSTIIQELDPINKTLLEKRKNLQLKLDNWHETNKGKEIDIHEYKQFLSDINYLVEEKEDFKINTENVDDEIAKISGPQLVVPITNARYALNAVNARWGSLYDALYGTNVIGEISKTSQYDPKRGLKVIEYAKDHLDQIAPLKDSLWKEITKIKIENKKIKFFYSENSFTTLINENQIIGVRYENQYEIKELILLKNNLHIRVLIDPNHQIGKNDSANISDILIESAISTILDCEDSVATVDADDKIVSYRNWLGLMKGDLKSEFLKNKKLVNRTLNKDIEYVSLSGERKFLKSRSLMLIRNVGHLMTTPAILNNDDQEIGEGLMDAIITSLIALHDIKKQDGMINSLKKSIYIVKPKMHGPEEVEFTVSLFEKTEKLLKP

SEQ ID NO: 116928 - protein, 236 aa, Unknown
  Bacterial polypetide isolated from the Sargasso Sea
AYEKNNVDIGLKCGFSGKAQIGKGMWAMPDKMKEMMKDKINHLKAGANCAWVPSPTAASLHALHYHQINIFDEQKKIIGREQTKLDDLLSIPIADRPNWSVNEINAEISNSAQTLLGYVVRWIDQGVGCSKVPDINNVGLMEDRATLRISSQHIANWIHHGVTTKIQVMEIMKEMAKIVDKQNEADPAYKKMSDDFKNSIAFKTACSLIFEGTDQPSGYTEPLLHKNRILIKASQN

SEQ ID NO: 116929 - protein, 307 aa, Unknown
  Bacterial polypetide isolated from the Sargasso Sea
MENYIKRGNLNIHNALDRFLSDEMLSGLDLTSDEFWKKFEGLLEEFHQRNKDLLARRSLLQDQISTWHKNNDFNLSEYKKFLQEIGYLEEVPEDFTIKTMNTDPEISSIPGPQLVVPIMNARFSLNATNARWGSLYDALYGTDVISEDGGASKEGAYNEIRGNKVIDFSKQFLDNCFPITDLSYKDITNISIVDQRLLFHAEQDQITYLKNEDQFKGFNGSPENPSEVLLVNNNLHLEIQIDPNHPVGKTDKANIKDIVLESAVSTIQDCEDSVAAVDAEDKVIAYRNWLGLMKGDLSETFKKNGKQ

SEQ ID NO: 116930 - protein, 524 aa, Unknown
  Bacterial polypetide isolated from the Sargasso Sea
KVIEKYSPVNKKLLEKRDYLQDQINDWHKRQKSKEIDLTTYKKFLYEIGYLVEEKEDFKIQTSGVDPEIGMVSGPQLVVPVTNARYAINAANARWNSLYDAVYGSDVLGDAPPPGPFSSERGERVISFSKSHLDSLAPLENGLWSNISKIAIHANELALFEKDEQIKLKDPEQFVGHIKEHDVGSLEIILIKNGLHCRIEINPNGTIGAKDIASINDIQIESAITTIIDFEDSVATVDAEDKIMAYRNWLGLMKGNLSAKFKKDGQHIERYLNSDLEITDRKGVKTFLKGRSLLLARNVGHLMTTPFVLDEYGEEVGEGLVDAICTVLIAKHNIDLISGPKNSIHDSIYIVKPKMHGPEEVRLANDVFSEVEQMLQLPRNTIKIGIMDEERRTSINLKECIREAKSRLAFINTGFLDRTGDEIHTSMEAGPMVTKKDMKITRWIDAYENNNVDVGIACGLPGKAQIGKGMWAMPDLMADLFEQKIGHPRAGANCAWVPSPTAATIHALHYHLVDVAKVQETLGT

SEQ ID NO: 116931 - protein, 387 aa, Unknown
  Bacterial polypetide isolated from the Sargasso Sea
MKIFSKFLKSSTSKASTSKERKINEITLDISDNLKEFVKDELLPGLNISPEYFWSSFQEILNSYSKKNKELLDKRKDLQEKIDHWHIENKDFEIEQYKKFLTDIGYLHPRSNNFSIKTSNVDPEIRKIAGPQLVVPVMNARFALNATNARWGSLYDALYGTDMISESEGAIREGGYNPIRGDRVIAFAKNFLDETFPLENGTFNKATNFEFIDSEIVITLNDGSKTHLLNKDQYIGYMDKGEGAYGLLFKNNNLHIEIQIDRSHPIGQDDLAGIKDILVESAITTIQDCEDSVAAVDDEDKIIVYRNWLGLMKGDLKRSFNKNGKYMTRELNGDRRYLLKNGKMILLPGRSLLLVRNVGHLMTNPAIKDENGNEVPEGIMDTFLLLR

SEQ ID NO: 116932 - protein, 484 aa, Unknown
  Bacterial polypetide isolated from the Sargasso Sea
VPISKIKWSQITKFKLEDNKLVLLVKNEKHFLKNYDQFIGFQGDKNNPKSILFKNNNLHIEIVIDPNSKIGKMDLANISDVIIESAISTIVDNEDSVAAVDGKDKIKCYRNWLGLMKGDLTANIEKKGKSFVRKLNPNRNYISKDGKKISLHGRALLLNRNVGHLMTNPAIILQDGSEIPEGIMDAFVSTLCAIHDFKNKNNSRTGSFYIVKPKMHGPEEVAFTDNIFGKVEFVLGLKKNTIKVGIMDEERRTTVNLKECIRKVKERIVFINTGFLDRTGDEMHTSFEAGPMIFKGAMKKSVWLNTYEDWNVDIGLSCGFSGKAQIGKGMWPMPDRMADMMQQKINHPKSGANCAWVPSPTAAILHATHYHRESVFQKQSEIKSRKKAQLENLLIIPKADRPNWSVSDINKELENNAQGILGYVVRWIDQGVGCSKVPDINNVGLMEDRATLRISSQHIANWLHHNICNKDQVMSVMKKMARIV

SEQ ID NO: 116933 - protein, 525 aa, Unknown
  Bacterial polypetide isolated from the Sargasso Sea
MEILDTSVPGIEKVLTEECLEFIYDLEKNFGHKRKELLKIRAEKQKEYDAGKLPDFPSETEEVRNSDWKVAPIPKDLQDRRVEITGPVDRKMVINALNSGAKTFMTDFEDSMSPTWNNVINGQINLYDLWRNQIDFLDPNNGKEYKLNPDPAVLIVRPRGWHLEEAHIEIDGVRISGGIFDFAVYLFHNHEKLKENGTGPYFYLPKMETYLEARLWNEVFVYAQEKLGIENGTCKATILIETLPAAFQMDEILYELKDHIVGLNCGRWDYIFSYIKRLALNPNYILPDRSQVIMGDAFLNSYSLLLIKTCHKRGAFAMGGMAAQIPVKNNDEENDKAFEKVRNDKEREVNNGHDGTWVAHPGLVPVAMEIFDNQLSGDNQLDVSLDNVTITQDDLLEVHKGQRTEEGMRECIKVGVQYIEAWLAGRGAVPLYNLMEDAATAEISRAQIWQWLKHATKLDDGRTVNEELFKDILTSEIDNLKNVLGDDVWAKGKYEKAVEIFEKMSISPVCEEFLTLPAYEEIVSS

SEQ ID NO: 116934 - protein, 467 aa, Unknown
  Bacterial polypetide isolated from the Sargasso Sea
AGPQLVVPINNARYALNAVNARWGSLYDALYGTDVINNEGGAEAGKSYNPVRGAKVVAKAKDYLDSMIPLAKGSHADVTEYKIESGKLAITLVDGDETTLANTEQWQGYQGDISAPSSLLFAHNGLHFEIQLDPTHPIGESDPANVKDVLVEAALTTIMDCEDSVAAVDAEDKTLVYSNWLGLMKGSLSIEMTKGGKQLVRAMHDDRSYQPSKHVSQDKLKDGELVLSGRSLMFVRNVGHLMTNNAMLFDGEEVPEGIMDGLVTSLIAKHDLLGNSKFKNSREGSIYIVKPKMHGPEEVAFSNALFGAIETIIDVPANTLKMGIMDEERRTSINLQACIAEATSRVVFINTGFLDRTGDEIHTSMLAGPFAEKAALKSMAWIKAYETANVAVGLRCGLSGKAQIGKGMWPIPDEMQNMMTAKIGHPKAGANTAWVPSPTAATLHALHYHDVNVFDVQKSLDENFSGL

SEQ ID NO: 116935 - protein, 514 aa, Unknown
  Bacterial polypetide isolated from the Sargasso Sea
FKGFNGSPENPSEVLLVNNNLHLEIQIDPRHPVGKTDKANIKDIVLESAVSTIQDCEDSVAAVDAEDKVIAYRNWLGLMKGDLSETFKKNGKQLTRVLKEDREYLDTNGNSFSLPGRSLLLVRNVGHLMQNPSVILDNGEEVFEGILDAMFTICIALYDLNELNTLSNSRNKSMYIVKPKMHGSEEVAFTCDLFDAVERLFNLEKNTVKVGIMDEERRTTINLKACIEKAKERIIFINTGFLDRTGDEIHTSMEAGAMVPKSDMKAQSWINAYEDWNVDIGLSCGLSGKAQIGKGMWAMPDEMKDMIETKIAHPLSGATCAWVPSPTAATLHAMHYHEVDVLSKQDELSSRQHADLDSILTIPLLKQDLDKQTIRNEIANSAQGILGYVVRWIDQGIGCSKVPDINNIGLMEDRATCRISSQHISNWIHHGICSEEEVIDIFKEMALVVDEQNKDDSDYQKMGSNFSGFAFQASLDLAIKGASQPSGYTEPLLHKWRLEFKKNTPRKKLNFFYI

SEQ ID NO: 116936 - protein, 308 aa, Unknown
  Bacterial polypetide isolated from the Sargasso Sea
MIHLENKFGIQISTDFIDFIEQEVLPDTSISADKFWFGLAKMVKELTPTNKKLLERRTYFQRQINEWHRAHKGKEFNFADYKNFLYSIGYIVPEKEPFSIDTKQVDPEISKIAGPQLVVPIMNARFALNAANARWGSLYDALYGTDAIEPVDKTTAYCKKRGQKVIQWGRKFLDDAFPLINGSWSKVTEVAVKGGCLDLSGKQLKSENSFVGYVGKPSQPTCLVLRNNNLHVRIEFDRNSEVGQSDLASISDIVIESAISTIMDCEDSISAVDASDKITAYRNWLGMMKGNLTEEISKGDKTFTRRLN

SEQ ID NO: 116937 - protein, 716 aa, Unknown
  Bacterial polypetide isolated from the Sargasso Sea
MGDSFIKINTLSVSKNLIDFVKNELLTGLDVNEKDFWDGFDKSINELAPINKKLLEVRETLQSEIDLWLKKNRNGEFNHQEYKNFLKEIGYLKEEGNDFKIDTKKLDSEISSIAGPQLVVPIMNSRYTLNAANARWVSLYDSLYGTDLIESEETGSQKYDPLRGQEVIRYAREFLNDHFSINEIHWKDINGFKIKGSDLKILKDDKEFELVDKNKFIGYRGEPNNPTTIILENNNLKIEIIINPKAFSAVQDAAGISDIIIESAISTICDNEDSVAAVDSEDKILCYRNWLGLMKGTLKSVFEKDGKTLERKLNPDRSYISKDNKKEKLHGRSLLLIRNVGHLMTNSAIILEDGSEVPEGIMDAFITTAAAIHDLKRKGNSRTGSIYIVKPKMHGPEETAFTDKIFTRVEEVLKLEKNTIKCGIMDEERRTSVNLKECIRTLKSRVFFINTGFLDRTGDEMHTSMEAGPMIKKGDMKKSKWIAAYENNNVVVGLKCGFSGVAQIGKGMWAMPDKMKDMIDQKISHLEAGANCAWVPSPTAASLHAMHYHKLNIFEKHKKLNENKINYIDNLLTIPIADRPNWSKEEINNELCNSAQTILGYVVRWVDQGIGCSKVPDINNVGLMEDRATLRISSQHIANWLHHGICSNRQVLEILKKMAKIVDKQNQGDPEYQNMSPNFDKSISFKAACELIFHGKSQPSGYTEPLLHLNRLIKKS

SEQ ID NO: 116938 - protein, 724 aa, Unknown
  Bacterial polypetide isolated from the Sargasso Sea
MKTKNLKEYTSVGSLYVSKELLKFVNNEVLKGTKIKPKNFWSGFEKSLHILKPKNEKLIDIRESIQKKIDDWHIQNKDNEFNLAAYKKFLYSINYLKKEGKNFKIQTENVDEEISKTPGPQLVVPISNARYALNAANARWGSLYDALYGTDAIGSEKLDNRYNPVRGGKVINYCRDFLDEIFPLKNASWKKLSELKIVKHKLILKIGKKTISLKDKKQFKGYRQDKKGLKGVLLINNGLHVELIINPYAFHANNDPIGLSDLVIESAVSTIIDHEDSVAAVDASDKVLGYRNWLGLMKGNLQVKFEKLGKKYKRVLNSDRNYISQNGKKFKLHGRALLLNRNVGHLMKNPSILLSDKSEVPEGIMDAFIISAACLHDFIKKGNSRKNSIYIVKPKMHGPDEVAFADEIFTHVENVLKMKKNTIKIGIMDEERRTSANLKECIRNVKRRVVFINTGFLDRTGDEIHTSMESGPVIKKGDIKNSDWIKAYENNNVVVGLECGFSGKAQIGKGMWAAPDRMADMLNEKIGHPSSGANCAWTPSPTAATLHATHYHKVNVFKVHKKLSNKRKFDLDNLLKLPIIRGPNWSMDEIKTELENNCQGILGYVVRWIDSGVGCSKVPDINNIGLMEDRATLRISSQHIANWLHHNICTPNQVLETLKKMAKIVDDQNKNDPEYKNMSDNFDNSIAFKTACDLVFKGKDQSSGYTEPLLHLNRSIKKNLSPSR

SEQ ID NO: 116939 - protein, 203 aa, Unknown
  Bacterial polypetide isolated from the Sargasso Sea
GNMMDQKIGHPKSGANCAWVPSPTAAILHSMHYHKVSVFKVQNEIKSRDKAKLEDILEIPKADRPNWSMEDINRELENNAQGILGYVVRWVNQGVGCSKVPDINNIGLMEDRATLRISSQHIANWLHHGICKEEQVMEVMKKMAKIVDNQNKNDPSYQKMSDNFNDSIAFSAACDLVFKGRVQPSGYTEPLLHQKRLERKTSN

SEQ ID NO: 116940 - protein, 149 aa, Unknown
  Bacterial polypetide isolated from the Sargasso Sea
MSDLLTLPITNKPNWTNEEINIEISNSAQTILGYVVRWIDQGIGCSKVPDINNIGLMEDRATLRISSQHIANWLYHGICSRKQVLEIMKKMAKIVDKQNIHDKSYESMSPNYDKSIAFKTACELIFQGKNQPSGYTEPLLHLNRLIKKN

SEQ ID NO: 116941 - protein, 498 aa, Unknown
  Bacterial polypetide isolated from the Sargasso Sea
MKKKEKFVKILDLSVSQVLLSFINKELLPGTKISKDHFWREFNKSVHELAKKNKELIDIREKIQKSIDSYHLGKKGKKINLNDYKSFLKKINYLKKNGPDFKIQTKNVDKEISSICGPQLVCPVSNARFLLNAANARWVSLYDILYGANIIPETKGALKGKTYNPIRGGKVIDYAREVLDKYIPLKDQSWKNLKKTPYINKGKLSIKLKNPNQFVGFRKQKGKVFSLLFINNNLHLDILFDQKGNLEVNNPDGNQDPLKIHDIFIESAISTICDHEDSVAAVDAEDKVLGYRNWLSLMKGNLTSKFKKNNKTIIRKLNQDREYFSLKGKKFKLHGRSLLLNRNVGHLMTNPAILLKDGSECPEGILDAFVTSAACLHDFKRKGNSRTNSIYIVKPKMHGPEECEFTNKIFEKVEKVLKLKKNQILCGIMDEERRTTINLKECVRVLKKRVFFINTGFLDRTGDEIHTSMEIGPMIKKGDMKSSKWISAYENNNVDVGL

SEQ ID NO: 116942 - protein, 716 aa, Unknown
  Bacterial polypetide isolated from the Sargasso Sea
MREQYIKIHNLSVAKNLADFVKNELLLDTNVGPDEFWKGFDKVVHELAPKNKKLLEIRETLQQEIDLWHKKNRDHEIDYNKYKNFLEEIGYLKKEGEDFKIATRNLDEEISNIAGPQLVVPIMNSRYSLNAANARWVSLYDSLYGSNIIESEESGSEKYDPLRGQEVIKYTRNFLNKYFPINDLDWKDITGLAVNNKKLSIYKENQEYNLSDLEKFIGHRGDATKPNAIILKNNNLHLEIIINPRAFSAARDAAGISDIIIESAVSTICDHEDSVAAVDAEDKVICYRNWLGLMKGNLKSIFEKNGKELERKLNPDRSYISLNGEKLKLHGRSLLLVRNVGHLMTNPAITLNDGSEVPEGIMDAFITSAACIHDLKRKGNSREGSIYIVKPKMHGPEETEFTNLIFTKVEEVLKLEKNTIKCGIMDEERRTSANLKECIRTLKDRVFFINTGFLDRTGDEMHTSMEAGPMIKKGDMKESKWIKTYEDNNVDIGLKCGFSGVAQIGKGMWAMPDKMNEMMEQKIGHVNAGANCAWVPSPTAAALHVMHYHEVNVFEKQKEILKREPSKLSDLLTIPIANRPNWSVDEINTEISNSAQTILGYVVRWIDQGIGCSKVPDINDIGLMEDRATLRISSQHIANWLHHGLCSNRQVLEILKKMAKVVDKQNEDDSHYESMSPEYDKSIAFKAACELIFHGKSQPSGYTEPLLHLNRLIKKS

SEQ ID NO: 116943 - protein, 586 aa, Unknown
  Bacterial polypetide isolated from the Sargasso Sea
MSNSFIKINTLSVSKDLADFVKNELLPGLDINEKDFWDGFDKSINELAPINKKLLEIRETLQSEIDLWLKKNRNGEFNHQEYKNFLKEIGYLKEEGNDFKIDTKKLDSEISSIAGPQLVVPIMNSRYTLNAANARWVSLYDSLYGTDLIESEETGSQKYDPLRGQEVIKYARNFLNDHFSINGIHWKDINGFKIEASNLKILKDNKEFELVDKNKFIGYRGEANSPTTIILENNNLKIEIIINPKAFSAVQDAAGISDIIIESAISTICDNEDSVAAVDSEDKILCYRNWLGLMKGTLKSVFEKDGKTLERKLNPDRSYISKDNKKEKLHGRSLLLIRNVGHLMTNSAIILEDGSEIPEGIMDAFITTAAAIHDLKRKGNSRKGSIYIVKPKMHGPEETAFTDKIFTRVEEVLKLEKNTIKCGIMDEERRTSVNLKECIRTLKSRVFFINTGFLDRTGDEMHTSMEAGPMIKKGDMKKSKWIAAYEDNNVNVGLRCGFSGVAQIGKGMWAMPDKMKDMIDQKISHLEAGANCAWVPSPTAASLHAMHYHKLNIFEKHKKLNNNKINYIDELLSIPIADRPNGVKRR

SEQ ID NO: 116944 - protein, 498 aa, Unknown
  Bacterial polypetide isolated from the Sargasso Sea
MDKRIETNNLKINESLYDFINTEVLKGIGISKEFFWEGFSKIIYELSPINRKILDKRKIIQNQINTWHKENKTGDFKLNEYKLFLKKIGYIIDEGKDFKIETTNVDPEISTICGPQLVVPITNARYALNAVNARWGSLYDSLYGTNTLGELPKTKLYDEERGKQVVKYAKLHLDNFAPLISQSWENIINIELDEKNLKFFIDKKNFTTLKEPDQIKGFKKYENKKINELVLVKNNLHCRIVIDPNNKIGKMDKASISDIILESAISTILDCEDSVATVDAEDKILAYKNWLGLMKGDLEAKFLKNSQKINRSLNKDIELININEENFTLKGRSLMLIRNVGHLMTNPAIIDKNGNEIYEGIMDAVISSLIALYNFDNKNYKNSIFNSIYIVKPKMHGPEEVDFTCNIFSKIENLLNLPLNTIKIGIMDEERRTSVNLKECIRSAKNRIAFINTGFLDRTGDEIHTSMYAGPLLKKGEMKNSKWIKSYEDRNVRIGLQC

SEQ ID NO: 116945 - protein, 190 aa, Unknown
  Bacterial polypetide isolated from the Sargasso Sea
MQAQICAWVPSPTAAALHVMHYHEVNVFEKQKAILKREPSKLSDLLTIPIADRPNWSVDEINTEISNSAQTILGYVVRWIDQGIGCSKVPDINDIGLMEDRATLRISSQHIANWLHHGLCSNRQVLEILKKMAKVVDKQNKHDSNYESMSPEYDKSIAFKAACELIFHGKSQPSGYTEPLLHLNRLIKKS

SEQ ID NO: 116946 - protein, 428 aa, Unknown
  Bacterial polypetide isolated from the Sargasso Sea
NWLELIKGNLNSEFIKNGKKYKRKLNPDRKYYSPSGKELKLHGRSLLLNRNVGHLMTNPSILLKDGSEIPEGIMDAFITSAACIHDIKSRKNSRKGSIYIVKPKMHGPEEASFTNLIFSKVEEVLKLKKNTIKCGIMDEERRTSVNLKECIRALKNRVFFINTGFLDRTGDEIHTSMEAGPMIKKEEMKKTKWISAYENNNIDVGLECGFSGIAQIGKGMWAMPDKMADMMKQKISHLESGANCAWVPSPTAAGLHSLHYHEINVIKKQSELKKRKPAKELDLITIPIADRVNWSLEEINDEISNSAQTILGYVVRWIDQGVGCSKVPDINNIGLMEDRATLRISSQQIANWLHHGICSKKRVLEIMKKMAKVVDKQNENDSKYEKMSPNFEKSIAFKAACELIFHGRKQPSGYTEPLLHFNRLLKKN

SEQ ID NO: 116947 - protein, 435 aa, Unknown
  Bacterial polypetide isolated from the Sargasso Sea
MKIIEKNGLKISSVMFDFVNNEAIPGTGLDPDQFWAKFSEVVHEMAPTNKYLIEKRETIQKKIDDWHKSNKGKEFNKTEYIKFLKSLDYLIEEKNEFKIETSNVDEEISSIAGPQLVVPVDNARYALNAANARWGSLYDALYGTDVIPGEKKKDYDVKRATEVVNYVRDFLDENFPLKQKSWKEISKIYLENNQLILSADEEKDQLKNDHQFIGYKGDKLKPNSILIKNNNLHIEIVFDPNSMVGKNDKASISDIIMESALSTIVDNEDSVAAVDAEDKVKCYRNWLGLMKGDLISKFEKNGKKITRKLNPDRKYTSKNGEKITLHGRALLLNRNVGHLMTNPSIILKDGSEIPEGIMDAFISNLCALHDFKNKNNSRTGSVYIVKPKMHGPEEVAFTNTLFEKVEETLGMKKYSIKVGIMDEERRTTVNLKECI

SEQ ID NO: 116948 - protein, 437 aa, Unknown
  Bacterial polypetide isolated from the Sargasso Sea
EDKIIVYRNWLGLMKGDLKRSFDKSGKFITRELSEDRKYLLKDGKMILLPGRSLMLVRNVGHLMKNPAIKDQNDNEIPEGIMDAFFTSCIAIHDIIGNGKYKNSKTKSIYIVKPKMHGPEEVQFSCDLFSEIENVFKLPKNTIKIGIMDEERRTTLNLKECIEVAKDRVIFINTGFLDRTGDEIHTSMEAGPMVTKAEMKNQKWIQAYENWNVDVGLETGFKGNAQIGKGMWPMPDEMLEMYKTKTIHPKSGANCAWVPSPTAAVIHSIHYHQINVQSEQEKILERENANLNDLLDIPLLTSNSLTNEEINDELENNAQGILGYVVRWVDQGIGCSKVPDINNVGLMEDRATCRISSQHISNWLHHGLCSEEQVIEIMKKMAKVVDGQNKNDVNYKNMAPSFDGIAFKAACDLAIKGKDQPSGYTEPILHEMRLKRK

SEQ ID NO: 116949 - protein, 446 aa, Unknown
  Bacterial polypetide isolated from the Sargasso Sea
MKEKYLKIKNLSVSENLANFINKELLPGTKINKKKFWTGFDKYIHELAPKNIKLLQKRERLQKAIDTLHIEKKNDKLNLRKYTKFLIKIGYLKKPGPNFKIKTKNIDKEISSICGPQLVCPVSNARFLLNAANARWVSLYDSLYGTDVIPETSGAVKGKTYNPIRGKKVIEYSRMLLDKFVPLKKQRWQDLKKIPEIKNNQINLKLKNPNQFVGYNKKFNKISSLLFINNGLHIDILFDQDGKMEINNPEGNQDKIKIHDIFLESAISTICDHEDSVAAVDAEDKVLGYKNWLGLMKGDLKVEFIKNGKKKSRKLNLDRNYISTKGKKLTLHGRSLLLNRNVGHLMTNPGILLKDGSECPEGILDAFVTSLACLHDFKKKGNSRVNSIYIVKPKMHGPEECDFTNLIFEKVEKVLNLKKNQILCGNMDEERRTSINLKECIRVFKK

SEQ ID NO: 116950 - protein, 379 aa, Unknown
  Bacterial polypetide isolated from the Sargasso Sea
LFDQKGNLEVNNPFGNQDPLKIHDIFLESAISTICDHEDSVAAVDAEDKVLGYRNWLSLMKGNLTSKFKKNNKNIVRKLNPDREYISKRGKKFKLHGRSLLLNRNVGHLMTNPAILLKDGSECPEGILDAFVTSAACLHDFKRKGNSRTNSIYIVKPKMHGPDECAFTDKIFKNVEEVLKLKKNQILCGIMDEERRTTINLKECIRVLKKRVFFINTGFLDRTGDEIHTSMEIGPMIKKGDMKSSKWIKAYENNNVDIGLDCGFSGKAQIGKGMWAMPDLLKEMMEQKISHPMSGANCAWVPSPTAAAIHAMHYHAVNVFSIHQKIKFRKSAKLDDLLTIPVDNKKKWSKEDIEKELKNNAQGILGYVVRWVDQSVGCS

SEQ ID NO: 116951 - protein, 717 aa, Unknown
  Bacterial polypetide isolated from the Sargasso Sea
MKYGNLTVAKELDEFLRREVVDGIDVDADNFWKALEVILDDFGPRNKELLQKRKDIQDQIDQWHLSRKDKPHNPEAYISFLKEIGYLLEEGEDFEISTDNVDDEIKTIAGAQLVVPVMNARFSLNAANARWGSLYDALYGTDMISEEEGAERGGAYNPIRGSKVIEFSKNFLDDSVPLSSGSYAEVTGFRINDNNLDITLTDQSTVSLADKEKFVGFIGDPDNPSGILLKNNNLHIEIQVDKEDSVGKDDPAGIKDVMVESAVTTIQDLEDSVAAVDAEDKTIAYRNWLGLMKGDLKETFVKGDHEMTRSLNPDREYSSPEGDRLTLAGRSVLLVRNVGHLMTNPAVLDKEGNEIPEGILDAMFTICIAKHDLMQTGNLSNSRTGSVYIVKPKMHGPEEVQFTCDLFEAVEKALDIKPLTVKVGIMDEERRTTVNLKECIRAAKDRVIFINTGFLDRTGDEIHTSMEAGPMIPKALMKQQPWINAYEDWNVDVGLETGFSGKAQIGKGMWAMPDEMLGMYENKSMHPEAGANCAWVPSPTAATLHAIHYHQVLVSERQSTIKSRTKADLNDILTIPLLDDVSSLSEQDIQEELDNNCQGILGYVVRWVDLGIGCSKVPDINNVGLMEDRATCRISSQHIANWLHHDICTEEQVIETMKKMAIIVDKQNEGDSEYTNMSPSYDGIAFSAACELAVKGRTQPSGYTEPILHSKRLIYKS

SEQ ID NO: 116952 - protein, 555 aa, Unknown
  Bacterial polypetide isolated from the Sargasso Sea
MENYIKRGNLNIHNALDRFLSDEMLSGLDLTSDEFWKKFEGLLEEFHQRNKDLLAKRSLLQDQISTWHKNNDFNINEYKKFLQEIGYLEEVPADFTITTRNTDPEISSIPGPQLVVPIMNARFALNATNARWGSLYDALYGTDVISEDGGASKEGAYNEIRGNKVIDFSKQFLDNCFPITDLSYKDITNITIVDQRLLFHTEQDQITYLKNEDQFKGFNGSPENPSEVLLVNNNLHLEIQIDPNHPVGKTDKANIKDIVLESAVSTIQDCEDSVAAVDAEDKVIAYRNWLGLMKGDLSETFEKNGKQLTRVLKKDREYLDTNGNSFSLPGRSLLLVRNVGHLMQNPSVILDNGEEVFEGILDAMFTICIALYDLNKLNILSNSRNKSMYIVKPKMHGSEEVAFTCDLFDAVERLFNLEKNTVKVGIMDEERRTTINLKACIEKAKERIIFINTGFLDRTGDEIHTSMEAGPMVPKSDMKAQSWINAYEDWNVDIGLSCGLSGKAQIGKGMWAMPDEMKDMVETKIAHPLSGATCAWGPITTAATLHAMHYHEVDV

SEQ ID NO: 116953 - protein, 496 aa, Unknown
  Bacterial polypetide isolated from the Sargasso Sea
LLFVNNNLHIDILFDQEGDLEINNPDGNQDKIKIHDIILESAISTICDHEDSVAAVDAEDKVLGYRNWLGLMKGNLKVEFKKKGKKITRKLNPDRSYTSPQGKKFKLHGRSLLLNRNVGHLMTNPAILLKDGSECPEGILDAFITSAACLHDFEKKGNSKKNSIYIVKPKMHGPEECEFTDLLFKKVEKNLNLKKNQILIGIMDEERRTSVNLKECIRTLKNRVFFINTGFLDRTGDEMHTSMEVGPMIKKAKMKSSKWISAYENNNVDIGLSCGFLGKAQIGKGMWAMPDLMKEMIKEKIAHPKAGANCAWVPSPTAATLHAMHYHQIDVQQIQKDIMSKGERGKLEDLLTLPLLNRQNLSDEDINSEIENNAQGILGYVVRWVDQGIGCSKVPDINNIGLMEDRATCRISSQAIANWLEHGIVNKEQILNTLKKMAVVVDKQNKEDPNYISMAPSFDTMAFNAAKDLIFDGIMQPSGYTEPILHKKRLEFKKKV

SEQ ID NO: 116954 - protein, 495 aa, Unknown
  Bacterial polypetide isolated from the Sargasso Sea
WHLSNKSVDFDKKKYFNFLKSIGYIVDEKEDFKISTSNVDEEISSIAGPQLVVPVDNARYALNAANARWGSLYDALYGTDTIPGNIDKTYSQNRGKKVINYVRELLDNITPLEKGSWKEISKIEVEKNNLLFLIDKKKEKLKNKDQFVGFVGEKSSPKSVLLKNNKLHIDIIIDPNSNIGKNDKSGISDVMIESAISTIIDNEDSVAAVDSADKVKCYKNWLGLMKGNLEAEIKKNGKKFIRKLSPDRKYTAPDGSKILLHGRALLLNRNVGHLMTNPAIILSDGSEIPEGIMDAFVSTLCAMHDFKNKKNSRTNSVYIVKPKMHGPEEVEFTNNVFKKVEEVLGLKKYSIKVGIMDEERRTTVNLKECIRKVKERVVFINTGFLDRTGDEMHTSFEAGPMIFKGEMKKSKWLNTYEDWNVDIGLACGFSGKAQIGKGMWAMPDKMADMMKQKIGHPRSGANCAWVPSPTAATLHATHYHRLDVFKKQSELKSRK

SEQ ID NO: 116955 - protein, 734 aa, Unknown
  Bacterial polypetide isolated from the Sargasso Sea
MNFLNKFIKKFQSSEKNLEQSATNNLKISPNLDEFVKKELVPGLNISSDYFWKTFEDIVERFSERNRELLNERENLQSKIDDWHIQNKDFNLEEYKNFLTDIGYIHPRSSDFKIKTWNVDPEIRKIAGPQLVVPVMNARFALNATNARWGSLYDALYGTDIISDSNGAEREGGYNPIRGDKVIAFSKEFLDNTIPLQFGKYENVINFEFVDSEILMTLNDGKKVNLKEKEKYIGYMDKGEGAYGLLFKNNNLHFEIQIDKNHPIGQEDPAGIKDILMESAITTIQDCEDSVAAVDDEDKIIVYRNWLGLMKGNLKRTFEKSGKSITRELNPDRKYLLKNGRMILLPGRSMLLVRNVGHLMTNPAVRDKNGNEVFEGIMDAVFTICIGIHDLVGNGKYKNSKTKSIYIVKPKMHGPKEVKFTCDLFAAIEDAFNLPMNTVKVGIMDEERRTTVNLKECIEVAKHRVIFINTGFLDRTGDEIHTSMEAGPMVTKTRMKQENWINAYENWNVDIGLETGFKGNAQIGKGMWPMPDEMLEMYKAKSVHPRSGANCAWVPSPTAATIHAIHYHQIYVQSEQDKILNRDKASLNDLLKIPLIKSYEMPSAEEIQEELDNNAQGILGYVVRWVDQGIGCSKVPDLNDIGLMEDRATCRISSQHIANWLHHGLCSEKQVIETMKKMAKVVDLQNKDDVNYKKMSPAYDGIAFKAACDLAIMGRTQPSGYTEPILHEMRLKRK

SEQ ID NO: 116956 - protein, 716 aa, Unknown
  Bacterial polypetide isolated from the Sargasso Sea
MAEKYINIHNLSVSEILYTFINDEVLPGTEINKSNFWSGFDKAVHELTITNKKLIKIRERIQIDIDRWHLDNKDKKFNQKNYQKFLKEINYLKEDQGNFKIITKNVDDEISKIAGPQLVVPIMNSRYVLNAANARWMSLYDSLYGTDVIESEESASERYDPERGLEVIRFTKKFLDNHFSLSNMSWKDVTEIKVDKNNLNLSYGNKITNLKDEEKFIGFRGDLKKPSAVILKNNNLHVEIIINPNAFSAKSDAAGISDIILESAITTICDHEDSVAAVDAKDKVIGYRNWLGLMKGNLVARFEKNGKKLIRKLNPDRKFKLKNGNESKLHGRSLLLNRNVGHLMTNPAILLKDGSEIPEGIMDAFITSLCSLHDFQTCKNSKKNSIYIVKPKMHGPDETSFTNEIFNKVEDVLGLKKNTIKCGIMDEERRTSANLKECIRSLKERVFFINTGFLDRTGDEMHSSMEAGPMIKKGDMKSSTWINAYENNNVDIGLECGFSGVAQIGKGMWAMPDKMADMVNQKIVHLEAGANCAWVPSPTAAALHALHYHKISVFKKHQELKKRKKTPLSQLLTIPVVNNPKWNIEEINKEISNSAQTILGYVVRWIDQGIGCSKVPDLNNIGLMEDRATLRISSQHIANWLHHGVCSRKHVLEIMKKMAKVVDKQNEKDKNYQNMSPQYDKSIAFKTACELIFQGKSQPSGYTEPLLHLNRLIKKN

SEQ ID NO: 116957 - protein, 334 aa, Unknown
  Bacterial polypetide isolated from the Sargasso Sea
KGQFILVKPKMHGPEETEFTNLIFTKVEEVLKLEKNTIKCGIMDEERRTSANLKECIRTLKDRVFFINTGFLDRTGDEMHTSMEAGPMIKKGDMKASKWIKTYEDNNVNIGLKCGFSGVAQIGKGMWAMPDKMSEMMEQKIGHVNAGANCAWVPSPTAAALHVMHYHEVNVFKKQKEILKREPSKLSDLLTIPIANRPNWSVDEINTEISNSAQTILGYVVRWIDQGIGCSKVPDINDIGLMEDRATLRISSQHIANWLHHGLCSNRQVLEILKKMAKVVDKQNEDDSNYESMSPEYDKSIAFKAACELIFHGKSQPSGYTEPLLHLNRLIKKS

SEQ ID NO: 116958 - protein, 347 aa, Unknown
  Bacterial polypetide isolated from the Sargasso Sea
MTETLKYGNLTVAKELDEFLRTEVINGIDVDADHFWNSLETILDEFGPRNKDLLQKREDIQDKIDQWHLSRKDELHDQEAYISFLKEINYLLDEGDDFEITTANVDDEIKTIAGAQLVVPVMNARFSLNAANARWGSLYDALYGTDMISEEGGAERGGAYNPVRGDKVIEFSKNFLDETISLSSGSYAEVTGFKVSANNLDITLTDQSTVGLKDEGQFVGYLGDPDNPSGILLKNNNLHIEIQVDKEDSVGKDDPAGIKDVMVESAVTTIQDLEDSVAAVDAEDKTIAYRNWLGLMKGDLKETFVKGDQEMTRSLNADREYSRSDGESLTLPGRSVLLVRNVGTSHD

SEQ ID NO: 116959 - protein, 311 aa, Unknown
  Bacterial polypetide isolated from the Sargasso Sea
MRSYLNLEKNTIKIGIMDEERRTSINLKECIRAAKSRVAFINTGFLDRTGDEIHTSMFAGPFVTKGEMKNSTWIKAYESRNVTIGLKCGLQGKAQIGKGMWAMPDLMKEMIDQKINHLEAGANCAWVPSPTAATLHALHYHHLNIIDVQNDIMKKEEKNTIDDLITLPLLNRQNLSDDEINSEIENNVQGILGYVVRWVDQGIGCSKVPDINNIGLMEDRATCRISSQALANWLKHEIISEKQVVNALMKMSKIVDNQNVNDSNYKSMSENFDSLSFKAAKELIFDGTDQPSGYTEPILHEKRLEYKKINN

SEQ ID NO: 116960 - protein, 355 aa, Unknown
  Bacterial polypetide isolated from the Sargasso Sea
DLEDSVAAVNGEDKTDVYKNWLGLMKGTLAETFEKGGSTLTRSLNEDLSFLSPDGKSITIAARSLMLVRNVGHLMTNPAVLLDGKEIPEGIIDAMFTITIGKHDLDQTGSVQNSKTGSIYIVKPKMHGPEEVQFTCDLFSDVESAIGLEKNTVKIGIMDEERRTTVNLKECIRVAKERVIFINTGFLDRTGDEIHTSMEAGPMIRKAEMKQQPWILSYEDWNVDNGLSSGFKGKAQIGKGMWPMPDMMLDMFNTKTVHPKAGANCAWVPSPTAATLHAMHYHQISVSSEQSNLIKRDRASLDNILTIPLLEDAASLSADEIQAELDNNAQGILGYVVRWIDQGIGCSKVPDINNI

SEQ ID NO: 116961 - protein, 638 aa, Unknown
  Bacterial polypetide isolated from the Sargasso Sea
FNFADYKKFLYSIGYIVPEKEPFSIDTKQVDPEISKIAGPQLVVPIMNARFALNAANARWGSLYDALYGTDAIKPIDKTKTYNKNRGQKVIQWGRKFLDNAFPLINGSWSKVTEVAVKDGRLELSGNQLKSENSFIGYVGKPLQPTCLVLRNNNLHVRIEFDRNSEVGQSDLAGISDIVIESAISTIMDCEDSISAVDASDKIIAYRNWLGMMKGNLTEEISKGDKTFNRKLNDDFSYCLPCGNNATLKGRSLMLVRNVGHLMTTPTVLDQNGDEVFEGLLDAMCTVTIALHDINRIGGNSSVGSVYIVKPKMHGPDEVAFACRTFGLVEDILGLPLNTVKLGIMDEERRTSVNLSECIRAAKSRVVFINTGFLDRTGDEIHTSMQAGPMLRKSDMKTTSWIQAYENRNVEIGLKCGLQGRAQIGKGMWAMPDQMSDMLRQKVQHPLAGANCAWVPSPTAATLHATHYHKIDVKNRQDEIRSLAVQSSLDDLLQIPLQSGGKLTESEIQSEIENNCQGILGYVVRWVDQGIGCSKVPDIHNVQLMEDRATCRISSQSLSNWLCHNFVDHDLVFNTLKKMAAIVDSQNADDMNYRPMSPTFDTEAFLAAYDLIFSGESQPSGYTEPILHSWRLELKRKM

SEQ ID NO: 116962 - protein, 439 aa, Unknown
  Bacterial polypetide isolated from the Sargasso Sea
EISNICGPQLVCPVSNSRFLLNAANARWVSLYDSLYGTDIIPETQGALKGKTYNPIRGKKVIEYARGLLDKYVPLKNKSWEDLEKIPKIKNNKLILKLKKPNQFVGYKKKSNKLTSLLFVNNNLHIDILFDQIGNNKTDNTESQRIKDKLKIHDIFLESAISTICDHEDSVAAVDAEDKVLGYRNWLGLMKGTLKIEFTKNGKKVFRKLNVDRNYISSTGKNLILHGRSLLLNRNVGHLMTNPAILLKDGSECPEGIIDAFITSLACLHDFKKKGNSRTNSIYIVKPKMHGPEECAFTNLIFQKVEKVLKLKKNQILCGIMDEERRTSVNLKECIRILKNRVFFINTGFLDRTGDEIHTSIEMGPMILKGDMKSSKWISAYENNNVDIGISCGFSGKAQIGKGMWAMPDLMNNMMREKINHPLSGANCAWVPSPTAAGL

SEQ ID NO: 116963 - protein, 462 aa, Unknown
  Bacterial polypetide isolated from the Sargasso Sea
IRDSEWKVREIPEDLLDRRVEITGPVDRKMIINALNADVKVFMADFEDSLSPTWENVALGQRNMYDAVRRTITFENPTNNKKYELNDEIATLMCRVRGLHLKEKGIDINGENPYGCLCDFGLYAFHNAKELINRGTGPYFYIPKLQSHLEARLWNEIIDYSEDYLNLPRGTVRVTCLIETLPAVFEMDEILYELRDHIVGLNCGRWDYIFSYIKTFQNHANKLLPDRSQVGMNQPFLNAYSRLLIKTCHRRGAFAMGGMAALIPSKDPEENETIIEKVMGDKLLETSNGHDGTWIAHPGLSDIANNVFSNAFDVGKTNQMHVMREEDDITQADLITPCEGDFTEDCFRSNIRVSLRYITAWLHGIGCVPIYGLMEDAATAEISRSSLWQWVKHGVTMDTGTVATKKSFEKMLDEEYNVVQEEVGQNSLDSDKLVEAKKLLKKLVISAELTDFLTLPAYRSIK

SEQ ID NO: 116964 - protein, 474 aa, Unknown
  Bacterial polypetide isolated from the Sargasso Sea
RLDGGRFPEFLNHTAAIRESDFVVAPIPKDLQDRRVEITGPPDRKMVINALNSPVKTFMCDFEDSCSPTWNNIIQGHLNVRDAVEESIEFTRESDGKVYRLNDDIATLIIRPRGWHLDEKHIRINDQPISGSLFDFGVYLSNNFEALSKKGTGPYFYLPKLENHLEARLWNDVFLHAQDFLNIDHGTIKATVLIETITAAFEMDEIIFELKDHSAGLNCGRWDYIFSFIKKFRNHEKFLLPNRTEVTMERHFLKSYVDLLIQTCHKRNVHAMGGMAAQIPIRGNEEQNQIAMDKVASDKSREANAGHDGTWIAHPGLSDVAMNAFNQAMGTSANQISNKRNDVSVCAQDLIKVPNGSITEEGLRQNISIGIQYIEAWLSGNGCVPIHNLMEDAATAEISRSQIWQWIHHAAKTTDTNKAITEEYFFKTLDEEMDQMVASRGFESDYLQPAINLFKEMSTDSEFDEFLTLPAYKH

SEQ ID NO: 116965 - protein, 214 aa, Unknown
  Bacterial polypetide isolated from the Sargasso Sea
QIGKGMWAMPDEMLGMYENKSTHPEAGANCAWVPSPTAATLHAIHYHKVSVSERQEELASRPRADLKDILSIPLLENPESLTPEVIQTELDNNCQGILGYVVRWVDLGVGCSKVPDINNVGLMEDRATCRISSQHIANWIHHNLITENQVEETMKKMALVVDQQNAGDPEYIAMGPNFNGISFSAALDLAVKGRTQPSGYTEPILHSKRLQVKS

SEQ ID NO: 116966 - protein, 506 aa, Unknown
  Bacterial polypetide isolated from the Sargasso Sea
KITQKDFWEKFDSFAHELTPENRKLIKIREKMQMDIDSWHIENPNIIKKEYQKFLNDIGYLVKPGTDFKIDTKNIDYEISKVAAPQLVVPIMNSRYALNAANARWMSLYDSLYGTDIIQSDESASERYDPERGEEVIKFTKKFLDKHFTLKKKSWSQVSKIIIEKKNLVLNLINDSTSIKDSNKFIGYRGKKDKPTAIILKNNNLYVEIIINPEAFSAKSDPAGISDIILESAVTTICDHEDSVAGVDAHDKVLGYRNWLGLMKGDLKAEFDKNGKKLIRKLNPDRKFILKNGELSYLHGRSLLLNRNVGHLMTNPSILLSDGSEIPEGIMDAFIISVACLHDLKIRKNSRNGSIYIVKPKMHGPKEAKFTDLIFSKVELAIGLKKNTIKCGIMDEERRTSVNLKECIRALKSRVFFINTGFLDRTGDEMHTSMEAGPMIKKGDMKTSSWINAYENNNVDIGLACGFSGLAQIGKGMWAMPDKMSDMMKQKISHLEAGANCAWVHR

SEQ ID NO: 116967 - protein, 234 aa, Unknown
  Bacterial polypetide isolated from the Sargasso Sea
MHDYNLWMVPAYLRELRPDLRIAFFHHTYFPSADVFNVLPWRRQIVGSLLQCDYIGFHIPRQVENFVDVARGVFPLKTLERQSCAPRFITYGCAVGLERMTTALDTGTRQVKLGAHPVGLDIDRVRNALEAPKIKELMGQLREEMKGVKLILSVERLDYTKGILEKLNAYERLLADNPELIGKVTLVTVCVPAAREMRVYDELQTQIEQAVGRINGRFARIGWTPLQFFFRSLP

SEQ ID NO: 116968 - protein, 224 aa, Unknown
  Bacterial polypetide isolated from the Sargasso Sea
MRVRQRLIIAANRLPISAQRKPDGKWGLNQSAGGLVSALSGVGNNYEMLWVGWPGVFVEEGPDRDALTQLLLRRSCLPIYLSRSEVDLYYNGYCNNVLWPLFHYVPIAFESKLSETQNMGLQWTAYQEANELFARVILNAYQPGDAVWCHDYHLMLLPTRLKEEYPSMKVGWFLHTPFPSSEIYRMLPVREELLLSVLAADLIGFHTYDYARHFVSACSRILGF

SEQ ID NO: 116969 - protein, 276 aa, Unknown
  Bacterial polypetide isolated from the Sargasso Sea
LELKGLGFKDWSSLQIDASDKDGGVNFKSYPGLYGMYQPDTISSFSWKGANFIVSANEGDAREYFFDTTDEADCIAKGGVDFDEDDGCLAYIDESRVEDLTLAANFDYLNNDDNDIGRLKVTTVKGDNNNDGQYESLYAYGARSFTIWDSNGLVVFDSGDDIGRITASVHGEAFNNNEDENKGDTRSDDKGAEPEALTIGTIGERTFAFIGLERMGGIMIYDITNPYDVQFEDYFYNRGLIAGAEITGDLAPEGMTFITREQSATGEPLLIIGNEI

SEQ ID NO: 116970 - protein, 312 aa, Unknown
  Bacterial polypetide isolated from the Sargasso Sea
HTFWERASFVEDHWNVFCEVNRKFAEQTAKEAAEGATVWLHDYNLWMVPAYLREIRPDLNIAFFHHTYFPSADVFNVLPWRKEIVGSLLQCDYIGFHIPRQSENFIDVAKGVMPFEVSEKSGCAPRFLTYGCAVGLDEMTTEIKVNDRTIRLGAHPVGLDLKRVDSALEKPEIQNRMKELREELHGIKLVLSVERLDYTKGIPAKLEAFERLLEDHPELHGKVTLVTVCVPAAKEMTVYNELQNEIEQAVGRINGRYAHVGWTPVQFFFRAVPFEELVAYYAMADVMWITPLRDGLNLVAKDTLPLRVKLKA

SEQ ID NO: 116971 - protein, 262 aa, Unknown
  Bacterial polypetide isolated from the Sargasso Sea
DGGAVTRGGEEAEARDAARARERAEREARDAEAREAEREREAERERERAKVEVRECRERLNIVMVASECAPFSKTGGLGDVVQSLPKALAARGHRVMVVVPRYREYEEVYDTDVRVTFNVLGHQTEIGYFHSYRDGVDYVFIDHGAYHHVRDSIYAGERSDVMFRNSMLCQAALEAVWHVPCGGVPYGDENLIFVANDWHSALLPVYLQAFYRDHGRFEYARSCFVVHNMAHQGRGPLDEFYALQLPEQYKDHFVLNDPMGG

SEQ ID NO: 116972 - protein, 512 aa, Unknown
  Bacterial polypetide isolated from the Sargasso Sea
MVHSPALCVGVAKLLNIRCLQPDYVPSSFVLVYHRSPFDEVIDANGNRSWQDQKSPNGIIPTLRNLFRDHPSGTWIAWRQEEDDDCADETTVIEEPLPIRLRRIPLQQEQISSFYHVTSKESAWPILHTFPSHFNVNNADWATFQEVNRRFAEAACNEAAPGACIWVHDYNLWLTPGYIRQQRPDVKVGFFHHTPFPSADVFGILPWREEIISSLLACDVVGFHIPRYAENFSRAASSLLAVERGPREKVSTHFLHHGSALAQPDCTPWLRYQGRTVRLVSTPVGTSPDVIKALRDSEPVQSLIHDIERDTKKGRKLIISASRVDYTKGNEELLLAYERLLERRPEMHGDVVLMLACVAANTGMKVYEDTQRSIEETVGRINGRFGRIDWVPIRLTTQRIPYEEIVAWFAASDICWITPLRDGLNLVAKEYVAARKGQGGSLVLSEFTGASVVVDGAILTNPYSHRRMDEAIDTALTMPVEEQRERMERMVRAVDTLSVANWANEQLQALEP

SEQ ID NO: 116973 - protein, 215 aa, Unknown
  Bacterial polypetide isolated from the Sargasso Sea
MTSSQPLDLRLPTPGCYNDPERAGLDAKSVFDGMTEHLFFTLGKLAPTASRHDLYMALSYAVRDRLMMRYLATTEAMRAHPQKSVAYLSAEFLIGPQLNNNLLNLGIQKEAEAALRNFGIESLQQILDVEEEPGLGNGGLGRLAACYMESLASLKIPATGYGIRYEFGIFDQLIRDGWQVEITDKWLKGGWPWELPQPDEACFVGFGGRTRELHR

SEQ ID NO: 116974 - protein, 216 aa, Unknown
  Bacterial polypetide isolated from the Sargasso Sea
MFTHVESFKSAFLEKLETMYGKSFKDSTTRDQYNTLGYMVREYMNSQWIATNESYRSGERKQMYYLSIEFLLGRLLGSNILNLGIRDVCEQGLSELGISLQQLEEVEADAGLGNGGLGRLAACFLDSLASLNLPGHGCGIRYKHGLFDQKIVDGYQVEFPEQWLLHENVWEVRRHDQAVEVSYFGNVEPLYIDGRLEFRHTNAEVIMAVPYDVPVV

SEQ ID NO: 116975 - protein, 33 aa, Unknown
  Bacterial polypetide isolated from the Sargasso Sea
ITPSSVAYTNHTLLPEALEKWDLVYSIISFLGI

SEQ ID NO: 116976 - protein, 257 aa, Unknown
  Bacterial polypetide isolated from the Sargasso Sea
KCRIFIHSEVSVGRKRAMEKFGAEVIRVKGNYDDSLKECINEANKNNWQIISDTSYQGYMEYPRFIMAGYTVLAREIVNQLSKKTLPTHIFLQAGVGGFAAAMCTIFLNEWGGENIKIIVVEPNYAPCLIESAIDGEPKVFDIKKETIMTGLSCGEPSILAWEILSECTDLFMTISDDKIPELMRIMANGYENDIGVEAGECSVSGLAALSALKNNDYLVNKLDINDKSRVLLIGTEGATDPDIYESIIQNSQIRKN

SEQ ID NO: 116977 - protein, 212 aa, Unknown
  Bacterial polypetide isolated from the Sargasso Sea
MGLKKTKYELATLAAEVEVDILKRSMGKQDHFPAAYGNLNIINFLSDERVEVEPVLCNKEKISQLENNLMLFYTFQSRDASKVLKSQIKETKNKFDVLTEMKNLAVPLSKCLSEDRSLKEFGKLLHQNWILKQSLTNQISNKEIEKYYQLGLDSGAIGGKLLGAGGGGFLLFYVEPEKKETLINALSDLYPLSIKFDTSGSRLTYYDRSDEN

SEQ ID NO: 116978 - protein, 257 aa, Unknown
  Bacterial polypetide isolated from the Sargasso Sea
NHLKIHSQFSICEGSIKLDDLKDISKDNKLKAIGLCDTSNLCGALEFAEKLSKSGSQPIIGTQINFKLGDTIGLIPLFALNEDGYKTIIKLSSLSFLKNDVLSEPHLDFDELLNKNEGVAIFSGTVNGFFGQLFNKGKFEEIQEIFLKLKNCYGDRFYIEIQRHGDLNEKEFEKFNLTSSKTLDIPLIATNEVFYIDKDMHEAHDALICIKNKTYVNEKNRVRFTNQHYLKTNSEMVDLFTDLPEALENNYNFPFRC

SEQ ID NO: 116979 - protein, 283 aa, Unknown
  Bacterial polypetide isolated from the Sargasso Sea
KFNHLKIHTQYSICEGAAKIDDLQEFSKNNKIKSLGLCDTSNLCGALEFAEKISKAGTQPIIGTQINFKIDDLIGLLPVFALNEAGYKNIINLSSTSYLKNNELSDPYVEFKDLLDNSEGVAIFSGTVFGLFGKLFDKGKFTDIQNHYKQIKKYFGDRFYIEIQRHNDINEVGFEKFNLKQSFKLEIPIIATNEVFYLSKEMHEAHDALICIGNKTYVNEKNRLKFTDQHYLKTNSEMSELFVDLPEALENNYNFPLRCNFRPMFSNPILPNISSDKDGNADE

SEQ ID NO: 116980 - protein, 293 aa, Unknown
  Bacterial polypetide isolated from the Sargasso Sea
KDFFGFIPLIAKNIEGYKNIIELSSKSYLENSEVTDPHCNFDELLNNSSGIVVFSGSIRSLIGNLFIKGLFQELEDIISKLSKIFKNDFYLEIQRHNDANEKEFENFNLNISKKFDLPIIATHEVYYLDKNMFEAHDALMCIGNKTYVNDTNRLKLSDQHYFKSSDEMVELFKDLPEALENNFNLPFRCSFRPLPSNPILPNISSSNVDANDLLRNDSNEGLNNKFKKIFKIEEKDLNKNDKYLIYKERLNHEIKIIVEMNYAGYFLIVSDYIKWAKINNIPVGPGRGSGAGS

SEQ ID NO: 116981 - protein, 215 aa, Unknown
  Bacterial polypetide isolated from the Sargasso Sea
MSKTVAYTNHTVMPEALEKWPLELMQELLPRHVEIIMRIDEEFCESVKKAYPDATEEEMAAKLGAMRILENYLTPEEEAALAAEKAAAAKAKAAAKAAAAKDADADAEEEEEVEEEAPPAPMVRMANLCCIAGFAINGVAAIHSEIVRTFTFKDFAELYPDKFQNKTNGVTPRRWMAFCNPELSEIITEAIGTDEWIKDTSLLEKLAPLAKDEAL

SEQ ID NO: 116982 - protein, 235 aa, Unknown
  Bacterial polypetide isolated from the Sargasso Sea
YFSSGINGILKKKNQFDLIFDTTNAKSNLKHYKLIKDKYFINLTPSGIGEFYIPYIDEQKKLKTRSFNLITCGGQSTIPIIYEINKLIKKINYVEVVSAISSKSAGLATRLNVNEYLEITSNAIKKYTKIKNVKVILNINPGSPPVNMSNSIYFQLKKDLSKKQIFELKKILQRVNKKMKNYAKGFQCNYIGNTGNKIYKITLSVTGNGDYLPKYSGNLDIITNMASLIINKIYK

SEQ ID NO: 116983 - protein, 243 aa, Unknown
  Bacterial polypetide isolated from the Sargasso Sea
MSIKVSTEDGVLSLTLNRPDKKNALNKQMYQQLVQQLQQAAQDDAVKVVLLQGSAECFSSGNDLADFLQSGELNDTHPTVMFLYEMAKFPKPVVAAVAGLAIGIGTTVLLHCDLVYSTADCRFQLPFTQLGLCPEAGSSLLLPLLIGHQRASSLLLLSEAIDGNEAWRIGLVNQLVAKEEVLEFALNKARKLAALPTDAVQSSKRLMKAGGAVQQTIALELVDFSRLLQGPDCQKVIQQFFRG

SEQ ID NO: 116984 - protein, 216 aa, Unknown
  Bacterial polypetide isolated from the Sargasso Sea
TEAGQELRLRQEYFLVSASLQDLLERHLRLHDGLQCLPQQVAIQLNDTHPAIAVVELMRLLVDEHRLPWAASLATDGRYHLLHQPHAAAGSAGVLASSADGASAAAAPANHLPDQRRAYRCAACQGHPRLSPAARGVADRGRPRPPRAHGQPGFSRRAQHQRRFRAAYATDARHGISRSAPALSRPGEQQDQWRDLPPLAVSGQSGADASAGRRSR

SEQ ID NO: 116985 - protein, 435 aa, Unknown
  Bacterial polypetide isolated from the Sargasso Sea
KLSFTAPAVRADLTTGGSFYQAQFDYEQNKQWKGTLKRTKIDQNGVLYPNDKSNWSAADLLPAPDKRKIWTELSGADYKTDLNNFVEANDTEINSLFTLTGNNVPKYHNINESYTVNSTQYSNPKNTTRCKNAAGVRDDNEDDVKGLINFVRGKDYFDYDADCNLTETIHNPLGDIYHSEMIVVGAPNAETAFVGTNQEAYFRSIKGYDSWAASLAKRDEVVYVGANDGMLHAFDAKTGVEKWGFVPPFVAANMPTMVNVNLNRTSVGGSNAIYGVDGSPVSHDMYFKGPYDNAKRWHTILMIPYGRGGAGFSVLDVTEPNAPRHLYSIFNDTTKYRVHVMDHNANINSYDYIASSYPIASFQEAQLVTDNAELGEGTTKCDETGDNQCYQSKTWTIPVDGLGQNDIEVLMGGLTYRGRVVSKGSVFRNRNNHNF

SEQ ID NO: 116986 - protein, 443 aa, Unknown
  Bacterial polypetide isolated from the Sargasso Sea
NERLFIEIQRSNNNNQSVENKLIDIAYDSGIPIVATNDIFFEARADHEANDILQCITNADVISNPNRKKISQESYFKNQEEMLSLFEDLPEALENSVSISMRCTYRPTTLNPILPMYVQEGSEAEAKEKENHLLVDMANKGFQDKISKFGTAENYHKSFYQDRLDNELSIILDMDYAGYFLIVSDIINWSKNNNIPVGPGRGSGAGSLVAWSLGITDLDPIKFNLVFERFLNPHRISMPDFDIDFCPIRRDEVINYIKQRYGNDRVAQIITFGKLQARAVIRDVGRVMEIPYNQVDSLCRLIPNNPANPMTLSDALSEIKEIGLIRKSDETIDRLLKLSLSLEGLYRHASTHAAGVVISNGKLEEYVPLYMDQKTNSLVTQFNMKWVEQAGLVKFDILGLKTLSVISECCKQLEAIGKGVDITSIDFQDEKTLKLFRDGETSG

SEQ ID NO: 116987 - protein, 263 aa, Unknown
  Bacterial polypetide isolated from the Sargasso Sea
MTFSQPLDLRLPTPGCYNDPERAGLDAKSVFDGMTEHLFFTLGKLAPTASRHDLYMALSYAVRDRLMMRYLATTEAMRAHPQKSVAYLSAEFLIGPQLNNNLLNLGIQQEAEEALKNFGIESLQQILDVEEEPGLGNGGLGRLAACYMESLASLKIPATGYGIRYEFGIFDQLIRDGWQVEITDKWLKGGWPWELPQPDEACFVGFGGRTESYIDDKGIYRSRWIPAEHAIGIPHDVPVLGYRVNICDRLRLWRADATESFDF

SEQ ID NO: 116988 - protein, 238 aa, Unknown
  Bacterial polypetide isolated from the Sargasso Sea
MANPMNSNEPFDLRLPTPGCYLDPEKAGMDSDAVFQGMTAHLFYTLGKLATSASPHDLYMALSYAVKDRLMTRYLASQEVIRKKPQKTVAYLSAEFLIGPQLSNNLLNLGITQEAEDALKRFGIESLSTILEVEEEPGLGNGGLGRLAACYMESLASLQVPAVGYGIRYEFGIFNQLIRDGWQVEVTDKWLKGGWPWELPQPDESCFVGFGGRTESYRDDKGNYRSRWIPSEHAIGVP

SEQ ID NO: 116989 - protein, 262 aa, Unknown
  Bacterial polypetide isolated from the Sargasso Sea
MKKTSSKAKASVAIADLPSTEELKNSIIKHLHGSLGTDVNKASPQAWWRATCAAVNEYVYDGLRNTQRTHYQQNTRAVHYFSLEYLMGRLFSNNLHNLGVYDAAKDALAQLGLNIADLEDQEEDMALGNGGLGRLAACFIDSMATLNYPAIGYGIHYEHGLFKQEFSDGRQIERPDSWREYGNPWEICRPESIQEISVYGYVETTYDLQGKMKKVWHPGRIIKGVPWDIPVVGYQGSSVNVLRLWESRASDFFNWDVFNSGG

SEQ ID NO: 116990 - protein, 137 aa, Unknown
  Bacterial polypetide isolated from the Sargasso Sea
HRQWISSQDVLAVPYDVPIPGYKNNIVNTLRLWKSEATDEFNLTEFNAGSYSEAVAQKNLAEQITMVLYPNDSSENGKELRLRQQYFLSSASIQDVLTQWIEQYGNDFTEFAQHHVFQLNDTHPSIAVAELMRILVD

SEQ ID NO: 116991 - protein, 142 aa, Unknown
  Bacterial polypetide isolated from the Sargasso Sea
MNVPFSYASPTLSVEALKHSIAYKLMFIIGKDPAIANKHEWLNATLFAVRDRMVERWLRSNRAQLSQEVRQVYYLSMEFLIGRTLSNALLSLGIYEDVNSALEEMGLNLEELIDEENDPGLGNGGLGRLAACFLDSLAALGL

SEQ ID NO: 116992 - protein, 259 aa, Unknown
  Bacterial polypetide isolated from the Sargasso Sea
MREQRQRAAAHRRPCGVRREHPRVKDRLMTRYLASQEVIRKKPQKTVAYLSAEFLIGPQLSNNLLNLGITQEAEDALKRFGIESLSTILEVEEEPGLGNGGLGRLAACYMESLASLQFPAVGYGIRYEFGIFNQLIRDGWQVEVTDKWLKGGWPWELPQPDESCFVGFGGRTESYRDDKGNYRSRWIPSEHAIGVPHDVPVLGYRVNTCDRLRLWRADATESFDFYAFNIGDYYGAVEEKVASETLSKVLYPNDGTDEG

SEQ ID NO: 116993 - protein, 115 aa, Unknown
  Bacterial polypetide isolated from the Sargasso Sea
MSQEPLAREAEVAAFRDAVLTKLTYAVGKDPDHAFDHDWFEAIALAARDQMVDHWMDHTRRIYRKGQKRVYYLSLEFLIGRLLYDSLSNLGVLEIAREALSELGVDLERIRLLEP

SEQ ID NO: 116994 - protein, 266 aa, Unknown
  Bacterial polypetide isolated from the Sargasso Sea
RNARVRKVNYISMEWLPGRVMYNNITNVCQLDLVKRVTKILGRDFSKIMRSEPDPGLGNGGLGRLASCFLDSLATLKYPARGYGLRYQYGIFEQKLWSGVQIEKPDNWLLTEFPWEMRRDESAKTVVFGGQLVDHKNKHGETIHSLVNFDDVRALAYDVPIIGYGKNSDYSALTLRLWTTKESPRNFKLARFNAGDLTDATKNTALTDVLYPNDKNSLGLSMRIKQEYLLVSSTIQDIMHEYHKEYDTIDEFHDKVRIQINDTHPA

SEQ ID NO: 116995 - protein, 324 aa, Unknown
  Bacterial polypetide isolated from the Sargasso Sea
MANPMKSNEPFDLRLPTPGCYLDPEKAGIDSDAVFQGMTAHLFYTLGKLATSASPHDLYMALSYAVKDRLMTRYLASQEVIRKKPQKTVAYLSAEFLIGPQLSNNLLNLGITQEAEDALKRFGIESLSTILEVEEEPGLGNGGLGRLAACYMESLASLQVPAVGYGIRYEFGIFNQLIRDGWQVEVTDKWLKGGWPWELPQPDESCFVGFGGRTESYRDDKGNYRSRWIPSEHAIGVPHDVPVLGYRVNTCDRLRLWRADATESFDFYAFNIGDYYGAVEEKVASETLSKVLYPNDGTDEGRRLRLQQQHFFVSCSLQDMLRSL

SEQ ID NO: 116996 - protein, 103 aa, Unknown
  Bacterial polypetide isolated from the Sargasso Sea
MTAVDLEFDQLNSTVDALRRSISNRMMYGVGKDAVTAHPHDWLHAAALAVRDRLVARWMKTTRLQYEQDVKRVYYLSMEFLIGRTFTNALLALGIHDQMKEAL

SEQ ID NO: 116997 - protein, 330 aa, Unknown
  Bacterial polypetide isolated from the Sargasso Sea
PFAEVARAESISRVLYPADSTEAGQELRLRQEYFFVSASLQDLLRRHKNMHGSVLSLGEHAAIQLNDTHPSIAVAELMRQLVDLHDVPWEAAWDVTVETLSYTNHTLLPEALETWPVGLMERMLPRHMQIIYLINAQHIDSLRAKGIHDFDVLRAVSLIEEDNGRRVRMGNLAFLGSHSVNGVSGLHTQLMRSTVFSELHKLYPERINNKTNGITFRRWLYQANPKLTDMLVEALGPDILDQPEQRLIELEPFAEKPAFRKAFAEQRLHSKRALAQIIHERLGIAINPAAMFDVQVKRIHEYKRQLLNLLHTVALYQAIRAEPGIDWVPR

SEQ ID NO: 116998 - protein, 315 aa, Unknown
  Bacterial polypetide isolated from the Sargasso Sea
RKVASETLSKVLYPNDGTDEGRRLRLKQQHFFVSCSLQDMLRSLEKRSIPVTEFPKHWTVQLNDTHPAIAVAELMRLLIDQYQIGWDKAWNITTSSVAYTNHTLLPEALEKWDLGLFNDLLPRHLEIIYEINWRFLQQLRLRYPGDDKILQKLSIIDEEGSKSVRMAHLATIGAHHINGVAALHSDLIKRQLLPEFAKLWPEKFTNVTNGVTPRRWVALSNPSLSSLLEKEVGPNWITNMELLKKLEGKKDDNNFLQKFEETKLNGKRKLSSFIHSKTGILVDPSSLFDVQVKRIHQYKRQHLNALQIIAQYLRI

SEQ ID NO: 116999 - protein, 265 aa, Unknown
  Bacterial polypetide isolated from the Sargasso Sea
NALQIIAQYLRIKNGTNKYEVPRTIIFGGKAAPGYFMAKLMIRFINGIADVVNSDPDMDGLLRVVFLPDYNVKLGEIVYPATDLSEQISTAGKEASGTGNMKFAMNGALTIGTLDGANVELRDLVKKENFFLFGKTESEIMDLKNNNYSPKTFIDQSPELKEVIRLIEIGHFSNGDKELFKPLLNSLTGHDPFFVMADFEDYLNKQDVVSECWNNKNSWNKMALLNTARSGYFSSDRSIREYCKSIWKVSPMPVEITCDVEELTS

SEQ ID NO: 117000 - protein, 252 aa, Unknown
  Bacterial polypetide isolated from the Sargasso Sea
YPNDASENGKELRLRQQYFLSSASLQAILKRWVHHHGHDFSEFAAKNVIQLNDTHPSIAVPELMRLLVDEYGLEWDAAWAITSQTMAYTNHTLLPEALERWPVRMMALMLPRILEIIYEINARYLDLVAHHWPGDGAKLASMSIIQDGPDPHVRMAYLAIVASFSVNGVAALHTQLLKSGLFKDFYSLWPEKFNNRTNGVTPRRWLAHCNPALAKLLTSHLGKGWVTDLSQLTALNALTQDASFIQKWREVK

SEQ ID NO: 117001 - protein, 285 aa, Unknown
  Bacterial polypetide isolated from the Sargasso Sea
ELLKKLEEKKDDNNFLQKFEDTKLNGKRKLASFIHSKTGILVDPSSLFDVQVKRIHQYKRQHLNALQIIAQYLRIKNGTNKYEVPRTIIFGGKAAPGYFMAKLMIRFINGIADVVNSDPDMDGLLRVVFLPDYNVKLGEIVYPATDLSEQISTAGKEASGTGNMKFAMNGALTIGTLDGANVELRDLVKKENFFLFGKTESEIMDLKNNNYSPKTFIDQCPELKEVIRLIEIGHFSNGDKELFKPLLNSLTGHDPFFVMADFEDYLNKQDVVSEFWNNKKSWNKM

SEQ ID NO: 117002 - protein, 311 aa, Unknown
  Bacterial polypetide isolated from the Sargasso Sea
MGFSLFNNLLPRHLEIIYELNWRFLPQLRLRYPGDDKILQKLSIIDEEGSKSVRMAHLATIGAHHINGVAALHSDLIKRQLLPEFAELWPEKFTNVTNGVTPRRWVALSNPSLSTLLEKEVGPDWITNMELLKKLEGKKDNTSFLQKFEETKLNGKRKLASFIHSKTGILVDPSSLFDVQVKRIHQYKRQHLNALQIIAQYLRIKNGTNKYEVPRTIIFGGKAAPGYFMAKLMIRFINGIADVVNSDPDMDGLLRVVFLPDYNVKLGEIVYPATDLSEQISTAGKEASGTGNMKFAMNGALTIGTLDGANG

SEQ ID NO: 117003 - protein, 265 aa, Unknown
  Bacterial polypetide isolated from the Sargasso Sea
FYSLCPEKFTNRTNGVTPRRWLAHCNPALAKLLTSHLGKGWVTDLSQLTALNALTQDTSFIQKWREVKQANKVQLAEMIAKECGVEFDPTMLFDVQVKRIHEYKRQLLNILHVIHLYHQIQQGHTEHLVPRCVLIGGKAAPGYFMAKLIIKLASNVAHMVNCDPVVAPYLRFAFLPNYNVSAMEKICPGTDVSEQISTAGKEASGTGNMKFMMNGALTIGTLDGANIEMLEEVGEDNFFLFGLNAEQVTQMRCDYQPQRIIAESH

SEQ ID NO: 117004 - protein, 306 aa, Unknown
  Bacterial polypetide isolated from the Sargasso Sea
WTVQLNDTHPAIAVAELMRLLIDDRHMDWDKAWDITSRSVAYTNHTLLPEALEKWDLNLFGNLLPRHLELIYEINRRFLQQLRLRYPGNDAIQRKLSIIDEDGSKAVRMAHLATIGAHHVNGVAALHSDLVKTDLLPEFAELWPEKFTNVTNGVTPRRWVALANPELSTLLNEHIGEDWISNMENLRKLEERQDDQGFLEHWGNTKLSVKRKLASYIHRNTGVLVDPSTLFDVQVKRIHEYKRQHLNALQVITQYLRIKNGRADGMAPRTVIFGGKAAPGYYMAKLIIRFINGIAETVNADPDRTA

SEQ ID NO: 117005 - protein, 273 aa, Unknown
  Bacterial polypetide isolated from the Sargasso Sea
DGDPPLPAHAYGIRYEFGIFEQIIERGEQKETPDNWLSQGYPWEIPRWEVLYPVQFYGYVQSRWDDEGREWRQWVGGESVLAMAYDVPISGFQNRTVNNLRLWSARAPRAFDFQIFNRGDYMQAVEEKQRSETISKVLYPNDQGFSGKELRLKQQYFFVSASLQDIIRRFKAHHSDFSTFHQWVAIQLNDTHPSIAVPELMRLLVDEEGLEWFEAWEVVVQVFGYTNHTVLPEALERWSSSMLGHLLPRHFEIIHEINRRFIQKVRISHPGDE

SEQ ID NO: 117006 - protein, 207 aa, Unknown
  Bacterial polypetide isolated from the Sargasso Sea
ASNKTFQKQFMKVKLEYKELLAEEIRKSLDIEVDVNAIFDVQIKRLHEYKRQHLALLNIMALYRRILENPDYDMHPRVFVFGAKAAPGYKLAKDIIYAINKVADKINNDPRVNNKIKVAFLPNYRVSLAEKMIPAADVSEQISTAGKEASGTGNMKLALNGAVTIGTLDGANVEIAEEVGDDNIFIFGLTVEEVNELKANGYNPHDY

SEQ ID NO: 117007 - protein, 315 aa, Unknown
  Bacterial polypetide isolated from the Sargasso Sea
THPAIAVAELMRLLIDQYQIGWDKAWNITTSSVAYTNHTLLPEALEKWDLGLFSDLLPRHLEIIYEINWRFLQQLRLRYPGDDKILQKLSIIDEEGSKSVRMAHLATIGAHHVNGVAALHSDLIKRQLLPEFAALWPEKFTNVTNGVTPRRWVALSNPSLSNLLEEEVGPNWITNMELLKKLEEKKDDNNFLEKFEETKLNGKRKLASFIHSKTGILVDPSSLFDVQVKRIHQYKRQHLNALQIIAQYLRIKNGNNKYEVPRTIIFGGKAAPGYFMAKLMIRFINGIADVVNSDPDMDGLLRVVFLPDYNVKLGE

SEQ ID NO: 117008 - protein, 198 aa, Unknown
  Bacterial polypetide isolated from the Sargasso Sea
PDYNVKLGEIVYPATDLSEQISTAGKEASGTGNMKFAMNGALTIGTLDGANVELRDLVKKENFFLFGKTESEIMDLKNNNYSPKTFIDQCPELKEVIRLIEIGHFSNGDKELFKPLLNSLTGHDPFFVMADFEDYLNKQDVVSECWNNKKAWNKMALLNTARSGYFSSDRSIREYCNSIWKVSPMPVEITCDVEELTN

SEQ ID NO: 117009 - protein, 287 aa, Unknown
  Bacterial polypetide isolated from the Sargasso Sea
HFFVSCSLQDMLRSLDNRGLPVEDFPNYWSVQLNDTHPAIAVAELMRLLIDDRHMEWDKAWDITSRSVAYTNHTLLPEALEKWDLNLFGNLLPRHLELIYEINRRFLQQVRIRYPGNDAMQRKLSIIDEEGSKAVRMAHLATIGAHHVNGVAALHSDLVKTDLLPEFADLWPDKFTNVTNGVTPRRWVALSNPGLASLLDEHVGKDWISNMESLRKLEERQNDQGFLELWGETKLSVKRKLAGYIHKNTGVLVDPSTLFDVQVKRIQEYKRQHLNALQVITQYLRIK

SEQ ID NO: 117010 - protein, 299 aa, Unknown
  Bacterial polypetide isolated from the Sargasso Sea
LEKRSIAITEFPKHWTVQLNDTHPAIAVAELMRLLIDQYQIGWDKAWNITTSSVAYTNHTLLPEALEKWDLGLFSDLLPRHLEIIYEINWRFLQQLRLRYPGDDKILQKLSIIDEEGSKSVRMAHLATIGAHHINGVAALHSDLIKRQLLPEFAALWPEKFTNVTNGVTPRRWVALSNPSLSKLLEEEVGPNWITNMDLLKKLEEKKDDNNFLQKFEETKLNGKRKLSSFIHSKTGILVDPSSLFDVQVKRIHQYKRQHLNALQIIAQYLRLKNGTNKYEVPRTIIFGGKAAPRLLYGK

SEQ ID NO: 117011 - protein, 178 aa, Unknown
  Bacterial polypetide isolated from the Sargasso Sea
QLNDTHPSIAVPELMRLLVDEYGLEWDAAWAITSQTMAYTNHTLLPEALERWPVRMMALMLPRILEIIYEINARYLDLVAHHWPGDGAKLASMSIIQDGPDPHVRMAYLAIVASFSVNGVAALHTQLLKSGLFKDFYSLWPEKFNNRTNGVTPRRWLAHCNPALAKLLTSHLGKGWVT

SEQ ID NO: 117012 - protein, 274 aa, Unknown
  Bacterial polypetide isolated from the Sargasso Sea
NFGIESLQQILDVEEEPGLGNGGLGRLAACYMESLASLKIPATGYGIRYEFGIFDQLIRDGWQVEITDKWLKGGWPWELPQPDEACFVGFGGRTESYIDDKGNYRSRWIPAEHAIGIPHDVPVLGYRVNICDRLRLWRADATESFDFYAFNIGDYYGAVEEKVGSETLSKVLYPNDGTDEGRRLRLKQQHFFVSCSLQDMLRSLDNRGLSIEDFPNYWTVQLNDTHPAIAVAELMRLLIDDRHLEWDRAWDITSRSVAYTNHTLLPEALRSGTS

SEQ ID NO: 117013 - protein, 296 aa, Unknown
  Bacterial polypetide isolated from the Sargasso Sea
TDKWLKGGWPWELPQPDESCFVGFGGRTESYRDDKGNYRSRWIPSEHAIGVPHDVPVLGYRVNTCDRLRLWRADATESFDFYAFNIGDYYGAVEEKVASETLSKVLYPNDGTDEGRRLRLKQQHFFVSCSLQDMLRSLEKRSIPITEFSKHWTVQLNDTHPAIAVAELMRLLIDQYHIGWEKAWNITTSSVAYTNHTLLPEALEKWDLGLFNDLLPRHLEIIYEINWRFLQQLRLRYPGDDKILQKLSIIDEEGSKSVRMAHLATIGAHHINGVAALHSDLIKRQLLPEFAELWPE

SEQ ID NO: 117014 - protein, 298 aa, Unknown
  Bacterial polypetide isolated from the Sargasso Sea
WRVRNLAEQITMVLYPNDASENGKELRLRQQYFLSSASLQAILKRWVHHHGHDFSEFAAKNVIQLNDTHPSIAVPELMRLLVDEYGLEWDAAWAITSQTMAYTNHTLLPEALERWPVRMMALMLPRILEIIYEINARYLDLVAHHWPGDGAKLASMSIIQDGPDPHVRMAYLAIVASFSVNGVAALHTQLLKSGLFKDFYSLWPEKFNNRTNGVTPRRWLAHCNPALAKLLTSHLGKGWVTDLSQLTALNALTQDASFIQKWREVKQANKVQLAKMIAKECGVEFDPAMLFDVQVKRI

SEQ ID NO: 117015 - protein, 302 aa, Unknown
  Bacterial polypetide isolated from the Sargasso Sea
NNKHFFVSCSLQDMLRSLEKRSIPITEFAKHWTVQLNDTHPAIAVAELMRLLIDQYQLGWDNAWNITTSSVAYTNHTLLPEALEKWDLSLFSDLLPRHLEIIYEINWRFLQQLRLRYPGDDKILQKLSIIDEDGAKSVRMAHLATIGAHHINGVAALHSDLIKRQLLPEFAELWPEKFTNVTNGVTPRRWVALANPSLSNLLEKEVGPDWITNMELLKQLEKKKDDANFLQQFEETKLLGKRKLASFIHTKTGILVDPSSLFDVQVKRIHQYKRQHLNALQIIAQYLRIKNGTSKYKAPRTV

SEQ ID NO: 117016 - protein, 204 aa, Unknown
  Bacterial polypetide isolated from the Sargasso Sea
LRVVFLPDYNVKLGEIVYPATDLSEQISTAGKEASGTGNMKFAMNGALTIGTLDGANVELRDLVKKENFFLFGKTESEIMDLKNNNYSPKTFINQCPELTEVIRLIEIGHFSNGDKELFKPLLNSLTGHDPFFVMADFEDYLNKQDVVSECWNNKKSWNKMALLNTARSGYFSSDRSIREYCKSIWKVSPMPVEITCDVEELTN

SEQ ID NO: 117017 - protein, 284 aa, Unknown
  Bacterial polypetide isolated from the Sargasso Sea
MVDPASLFDVQVKRIHEYKRQHLNALQVITQYLRIKNGQTDGMAPRTVIFGGKAAPGYYMAKLIIRFLNGIADTINADPDMDGLLRVVFLPDYNVKLGEQVYPASDLSEQISTAGKEASGTGNMKFAMNGALTIGTLDGANVEIRELVGSENFFLFGKTVEEITALQQNGYRPGDVIATLPELQEALRLIEMGHFSNGDGELFRPLLDNLTGHDPFYVMADYADYLRAQEAVSHAWSDRMHWNRMSLLNTARTGFFSSDRSIGEYCNNIWAVDPLHVEITCDVR

SEQ ID NO: 117018 - protein, 313 aa, Unknown
  Bacterial polypetide isolated from the Sargasso Sea
AVEVTDKWLKGGWPWELPQPDESCFVGFGGRTESYRDDKGNYRSRWIPSEHAIGVPHDVPVLGYRVNTCDRLRLWRADATESFDFYAFNIGDYYGAVEEKVASETLSKVLYPNDGTDEGRRLRLKQQHFFVSCSLQDMLRSLEKRSIPITEFPKHWTVQLNDTHPAIAVAELMRLLIDQYQIGWDKAWNITTSSVAYTNHTLLPEALEKWDLGLFNDLLPRHLEIIYEINWRFLQQLRLRYPGDDKILRKLSIIDEEGSKSVRMAHLATIGAHHINGVAALHSDLIKRQLLPEFADLWPEKFTNVTNGVTPRR

SEQ ID NO: 117019 - protein, 266 aa, Unknown
  Bacterial polypetide isolated from the Sargasso Sea
WITNMELLKKLEEKKDDNDFLEKFEDTKLNGKRKLASFIHSKTGILVDPSSLFDVQVKRIHQYKRQHLNALQIIAQYLRIKNGTNKYEVPRTIIFGGKAAPGYFMAKLMIRFINGIADVVNSDPDMDGLLRVVFLPDYNVKLGEIVYPATDLSEQISTAGKEASGTGNMKFAMNGALTIGTLDGANVELRDLVKKENFFLFGKTESEIMDLKNNNYSPKTFINQCPELKEVIRLIEIGHFSNGDKELFKPLLNSLTGHDPFFVMAD

SEQ ID NO: 117020 - protein, 250 aa, Unknown
  Bacterial polypetide isolated from the Sargasso Sea
SQLTALNALTQDASFIQKWREVKQANKVQLAKMIAKECGVEFDPAMLFDVQVKRIHEYKRQLLNILHVIHLYHQIQQGHTEHLVPRCVLIGGKAAPGYFMAKLIIKLASNVAHMVNCDPVVAPYLRFAFLPNYNVSAMEKICPGTDVSEQISTAGKEASGTGNMKFMMNGALTIGTLDGANIEMLEEVGEDNFFLFGLNAEQVTQMRCDYQPQRIIAESHALSEVMALLKSGHFNLLEPGIFDPIIASIE

SEQ ID NO: 117021 - protein, 301 aa, Unknown
  Bacterial polypetide isolated from the Sargasso Sea
PDQAVFVGFGGRTEGYTDEHGRYRSRWIPAEHAIGIPHDIPVLGYKVNTCDRLRLWRATATESFDFYAFNIGDYYGAVEEKVGSETLSKVLYPNDGTDEGRRLRLKQQHFFVSCSLQDMLRNLEQRKIPVTEFPQHWAVQLNDTHPAIAVAELMRLLIDDKNLDWDVAWDITSRSLAYTNHTLLPEALEKWGLPLFASLLPRHLELIFEINRRFLQQVRLKHPGDDAILRKLSIIDEEGQKAVRMAHLATVGSHHVNGVAKLHSDLVKSSLMPEFAQLWPEKFTNVTNGVTPRRWIGLCNP

SEQ ID NO: 117022 - protein, 302 aa, Unknown
  Bacterial polypetide isolated from the Sargasso Sea
MNVPFSYSSPTLSVEALKHSIAYKLMFIIGKDPAIANKHEWLNATLFAVRDRMVERWLRSNRAQLSQEVRQVYYLSMEFLIGRTLSNALLSLGIYEDVNSALEEMGLNLEELIDEENDPGLGNGGLGRLAACFLDSLAALGLPGRGYGIRYDYGMFKQNIVDGRQKESPDYWLEYGNPWEFERHNTRYKVRFGGRIQQEGKHSRWVETEEIIAEAYDQIIPGFDTDATNTLRLWSAQASSEINLGKFNQGDYFAAVEDKNHSENVSRVLYPDDSTYSGRELRLRQEYFLVSATVQDILSRHY

SEQ ID NO: 117023 - protein, 276 aa, Unknown
  Bacterial polypetide isolated from the Sargasso Sea
KNRWPDDEQRIREMSIVGDGQVRMAFLSVVGSHSVNGVAALHTKLLKDRLLRNFAELYPDKFNNKTNGITPRRWLLGCNPELSELITSVVGDGWVTDLSLLRGLEAVADDSSFQERFMEIKRTNKVVLTDMISSNMDLRVDPDALFDSQIKRLHEYKRQHLNLLHILTLYRRLLHDPELDISPRVFVFGAKAAPGYHLAKVIIHAINLVGKRINADSRINGKLKVAFWPNYGVSSAERIIPATDLSEQISTAGKEASGTGNMKFALNGALTIGTLD

SEQ ID NO: 117024 - protein, 322 aa, Unknown
  Bacterial polypetide isolated from the Sargasso Sea
LSLGIYDDVKNALEGMGLDLEDLIDEENDPGLGNGGLGRLAACFLDSLATLGLPGRGYGIRYDYGMFKQNIVDGRQKESPDYWLEYGNPWEFKRHNTRYKVRFGGRIQQEGKKTRWIETEEILAVAYDQIIPGYDTDATNTLRLWNAQASSEINLGKFNQGDYFAAVEDKNHSENVSRVLYPDDSTYSGRELRLRQEYFLVSSTVQDILNRHYQLHKTYDNLADKIAIHLNDTHPVLSIPELMRLLIDEHKFSWDDAFEVCCQVFSYTNHTLMSEALETWPVDMLGKFCRAICKSFLRLTTTSLKRCRSSIRPIPVCWGRRR

SEQ ID NO: 117025 - protein, 272 aa, Unknown
  Bacterial polypetide isolated from the Sargasso Sea
SLFDVQVKRIHEYKRQHLNALQVIAQYLRIKNGQADGMAPRTVIFGGKAAPGYYMAKLIIRFINGIAETVNSDPDMDGRLRVVFLPDYNVKLGQRVYPASDLSEQISTAGKEASGTGNMKFAMNGALTIGTLDGANVEIREQVGAENFFLFGKTTPEIEELRACGYRPWELLAELPELEAVLHLVEQGHFSNGDTELFRPLVDNLRGQDPFFVFADFAAYMDAQDQVSQAWADRQHWNRMSLLNSARMGYFSSDRSIREYCDNIWKASAFPV

SEQ ID NO: 117026 - protein, 275 aa, Unknown
  Bacterial polypetide isolated from the Sargasso Sea
EIKSGEQIERPDSWRHYGNPWEIARPESIQEVSLYGYVETKYGDNGRVLKEWHPGSIVKGVPWDIPVVGYEGKTVNVLRLWQSEASGYFNWDVFNAGGYVDAQRENVSAETISKVLYPNDETEAGKELRLIQQYFFCSCSLKDIIRRYKRAHGDDWSRFADQVVIQLNDTHPAISIPELMRILVDRAELGWDEAWGICTKVFAYTNHTLLPEALEKWPARMIEKILPRHLEIIYEINHRFMAEVDKKWPGDNAMKAKLSIIEEGNEKMVRMGHLS

SEQ ID NO: 117027 - protein, 307 aa, Unknown
  Bacterial polypetide isolated from the Sargasso Sea
EGGWPWELPQPDEACFVGFGGRTESYIDDKGSYRSRWIPAEHAIGIPHDVPVLGYRVNICDRLRLWRADATESFDFYAFNIGDYYGAVEEKVGSETLSKVLYPNDGTDEGRRLRLKQQHFFVSCSLQDMLRSLDNRGLSVEDFPKYWTVQLNDTHPAIAVAELMRLLIDDRHMDWEKAWDITSRSVAYTNHTLLPEALEKWDLNLFSSLLPRHLELIYEINRRFLQQLRLRYPGNDAIQRKLSIIDEDGSKAVRMAHLATIGAHHVNGVAALHSDLVKTDLLPEFAELWPEKFTNVTNGVTPRRWVA

SEQ ID NO: 117028 - protein, 287 aa, Unknown
  Bacterial polypetide isolated from the Sargasso Sea
AIGVPHDVPVLGYRVNTCDRLRLWRADATESFDFYAFNIGDYYGAVEEKVASETLSKVLYPNDGTDEGRRLRLKQQHFFVSCSLQDMLRSLEKRSIPITEFPEHWTVQLNDTHPAIAVAELMRLLIDQYQIGWDKAWNITTSSVAYTNHTLLPEALEKWDLGLFNDLLPRHLEIIYEINWRFLQQLRLRYPGDDKILQKLSIIDEEGSKSVRMAHLATIGAHHINGVAALHSDLIKRQLLPEFAALWPEKFTNVTNGVTPRRWVALSNPSLSNLLEEEVGPNWITNM

SEQ ID NO: 117029 - protein, 266 aa, Unknown
  Bacterial polypetide isolated from the Sargasso Sea
PRRWMGLCNPQLRGLLDEVIGQNWLHNLDELKQLERFQDDSGFLERWDQTKLESKRQLASYIHRHTSVLVDPASLFDVQVKRIHEYKRQHLNALQVIAQYLRIKNGQGDGLAPRTVIFGGKAAPGYYMAKLIIRFINGIAETVNSDPDMDGRLRVVFLPDYNVKLGERVYPASDLSEQISTAGKEASGTGNMKFAMNGALTVGTLDGANVEIREQVGADNFFLFGKTTPEIEALRKSGYRPWELLEELPELQDVLHLVEQGHFSNG

SEQ ID NO: 117030 - protein, 301 aa, Unknown
  Bacterial polypetide isolated from the Sargasso Sea
GGLGRLAACYMESLASLQVPAVGYGIRYEFGIFNQLIRDGWQVEVTDKWLKGGWPWELPQPDESCFVGFGGRTESYRDDKGNYRSRWIPSEHAIGVPHDVPVLGYRVNTCDRLRLWRADATESFDFYAFNIGDYYGAVEEKVASETLSKVLYPNDGTDEGRRLRLKQQHFFVSCSLQDMLRSLEKRSIAITEFAKHWTVQLNDTHPAIAVAELMRLLIDQYQIGWDKAWNITTSSVAYTNHTLLPEALEKWDLGLFNDLLPRHLEIIYEINWRFLQQLRLRYPGDDKILQKLSIIDEEGSK

SEQ ID NO: 117031 - protein, 281 aa, Unknown
  Bacterial polypetide isolated from the Sargasso Sea
WIPAEHAIGIPHDIPVLGYKVNTCDRLRLWRATATESFDFYAFNIGDYYGAVEEKVGSETLSKVLYPNDGTDEGRRLRLKQQHFFVSCSLQDMLRNLEQRKIPVREFPQHWAVQLNDTHPAIAVAELMRLLIDDKNLDWDVAWDITSRSLAYTNHTLLPEALEKWGLPLFASLLPRHLELIFEINRRFLQQVRLKHPGDDAILRKLSIIDEEGQKAVRMAHLATVGSHHVNGVAKLHSDLVKSSLMPEFAQLWPDKFTNVTNGVTPRRWIGLCNPQLRGLL

SEQ ID NO: 117032 - protein, 276 aa, Unknown
  Bacterial polypetide isolated from the Sargasso Sea
KWLKGGWPWELPQPDESCFVGFGGRTESYRDDKGNYRSRWIPSEHAIGVPHDVPVLGYRVNTCDRLRLWRADATESFDFYAFNIGDYYGAVEEKVASETLSKVLYPNDGTDEGRRLRLKQQHFFVSCSLQDMLRSLEKRSIPITEFPQHWTVQLNDTHPAIAVAELMRLLIDQYHLGWDEAWNITTSSVAYTNHTLLPEALEKWDLGLFNDLLPRHLEIIYEINWRFLQQLRLRYPGDDKILQKLSIIDEEGSKSVRMAHLATIGAHHINGVAALH

SEQ ID NO: 117033 - protein, 274 aa, Unknown
  Bacterial polypetide isolated from the Sargasso Sea
MNDTHPAIAVAELMRLLIDQYQIGWDKAWNITTSSVAYTNHTLLPEALEKWDLNLFNDLLPRHLEIIYEINWRFLQQLRLRFPGDDKILQKLSIIDEEGSKSVRMAHLATIGAHHINGVAALHSDLIKRQLLPEFAVLWPEKFTNVTNGVTPRRWVALSNPSLSNLLEEEVGPNWITNMELLKKLEEKKDDNNFLQKFEETKLNGKRKLASFIHSKTGILVDPSSLFDVQVKRIHQYKRQHLNALQIIAQYLRIKNGTNKYEDPRTIIFGGKAA

SEQ ID NO: 117034 - protein, 266 aa, Unknown
  Bacterial polypetide isolated from the Sargasso Sea
MGYQVTGYFAPSSRYGSPAVNGVAALHTKLLKNTVFRDFYKLFPERFFNRTNGITPRLWLMQANPELAELISSRFGHDWGKNLEELCGLETFQEDETFRKEWRELKQMKKQQLIRWLEKKNGYFLNPDSMFDVQIKRIHEYKRQLLNLLYTVYLYNKLRRDQDFKPEPRTVILAGKAAPGYFAAKLIIKLAHDIAGVINKDPPTSARLQLVFVENYGVTVAEKLIPATDLSQHISTAGTEASGTGNMKFSLNGALILGTLDGANIE

SEQ ID NO: 117035 - protein, 295 aa, Unknown
  Bacterial polypetide isolated from the Sargasso Sea
RDGWQVEITDKWLKGGWPWELPQPDEACFVGFGGRTESYIDDKGTYRSRWIPTEHAIGIPHDVPVLGYRVNICDRLRLWRADATESFDFYAFNIGDYYGAVEEKVGSETLSKVLYPNDGTDEGRRLRLKQQHFFVSCSLQDMLRSLDNRGLPVEDFHKYWTVQLNDTHPAIAVAELMRLLIDDRHMDWDKAWDITSRSVAYTNHTLLPEALEKWDLNMFGNLLPRHLELIYEINRRFLQQLRLRYPGNDAIQRKLSIIDEDGSKAVRMAHLATIGAHHVNGVAALHSDLVKTDLL

SEQ ID NO: 117036 - protein, 283 aa, Unknown
  Bacterial polypetide isolated from the Sargasso Sea
KLEAKKDDTNFLQKFEETKLNGKRKLANFIHSKTGIIVNPSSLFDVQVKRIHQYKRQHLNALQIIAQYLRIKNGTNNNEVPRTIIFGGKAAPGYFMAKLMIRFINGIADVVNSDPDMDGLLRVVFLPDYNVKLGEIVYPATDLSEQISTAGKEASGTGNMKFAMNGALTIGTLDGANVELRDLVKKENFFLFGKTESEIMDLKNNNYSPKTFIDQCPELKEVIRLIEIGHFSNGDKELFKPLLNSLTGNDPFFVMADFEDYLNKQDEVSKCWNNKKSWNKWHY

SEQ ID NO: 117037 - protein, 837 aa, Unknown
  Bacterial polypetide isolated from the Sargasso Sea
MSHNSELSPNTSGVTPKKRSTKTVETKKKPAHEPCEPCDALPASFTRHVRYGLSRGEGARGELFQALALSVKEQMLDDWRETRIKDSCYDNKQVAYLSLEFLMGRTLGNALLNLELEQDSREALSHYSVSLEEIEEAEHDAGLGNGGLGRLAACFLDSCASMDLSVTGYGIRYEYGMFAQKIVDGYQVERPDRWLREGNPWEVRVPHHNVTVKFFGHTESYVDKQGRRHMIWVDTQDVLAVAYDMPVPGYRNGRVNSLRLWKAEATDDFDLAEFNQGDYTEAVARKNLAEQITMVLYPNDASENGKELRLRQQYFLSSASLQAILKRWVHHHGNDFTHFAEKNVMQLNDTHPSIAVPELMRLLVDEYGLEWDAAWSITSQTIAYTNHTLLPEALERWPVRMMALMLPRILEIIYEINARYLDLVAHHWPGDGAKLASMSIIQDGPDPHVRMAYLAIVASFSVNGVAGLHTQLLKSGLFKDFYSLWPEKFNNRTNGVTPRRWLAHCNPALAKLLTNHLGKGWVTDLSQLTALNALTQDPSFIQKWREVKQANKAVLAKMIAKECGVEFDPSMLFDVQVKRIHEYKRQLLNILHVIHLYHQIQQGHTEHLVPRCVLIGGKAAPGYFMAKLIIKLASNVAHMVNCDPVVAPYLRFAFLPNYNVSAMEKICPGTDVSEQISTAGKEASGTGNMKFMMNGALTIGTLDGANIEMLEEVGEDNFFLFGLNADQVAQMRCDYQPQRIIAESQALSEVMALLKSGHFNLLEPGIFDPIIASIESADDQWMTAADFDSYRLAQEAVAKAYKDPKKWTQMSIRNTAASGRFSSDVTIAGYRDEIWKL

SEQ ID NO: 117038 - protein, 182 aa, Unknown
  Bacterial polypetide isolated from the Sargasso Sea
PASDLSEQISTAGKEASGTGNMKFAMNGALTIGTLDGANVEIRELVGAENFFLFGKTVEEIKALKEQGYRPGDFIAAIPELQEALRLIEMGHFSNGDGELFRPLMDNLTGNDPFFVMADFGDYVRAQEAVSLAWTDRMHWNRMSLLNTARTGFFSSDRSIAEYCKNIWNVDPLNVEITCDVR

SEQ ID NO: 117039 - protein, 550 aa, Unknown
  Bacterial polypetide isolated from the Sargasso Sea
ESFDFYAFNIGDYYGAVEEKVASETLSKVLYPNDGTDEGRRLRLKQQHFFVSCSLQDMLRSLEKRSIPITEFPKHWTVQLNDTHPAIAVAELMRLLIDQYQVGWDKAWNITTSSVAYTNHTLLPEALEKWDLGLFNDLLPRHLEIIYEINWRFLQQLRLRYPGDDRILQKLSIIDEEGAKSVRMAHLATIGAHHINGVAALHSDLIKRQLLPEFAKLWPEKFTNVTNGVTPRRWVALSNPSLSSLLEKEVGPDWITNMELLKKLEGKKDDTNFLEQFEETKLNGKRKLASFIHSKTGIIVDPSSLFDVQVKRIHQYKRQHLNALQIIAQYLRIKNGTNKYKVPRTIIFGGKAAPGYFMAKLMIRFINGIADVVNSDPDMDGLLRVVFLPDYNVKLGEIVYPATDLSEQISTAGKEASGTGNMKFAMNGALTIGTLDGANVELRDLVKKENFFLFGKTESEIMDLKNNNYSPKTYIEKCPELKELIHLIEIGHFSNGDKELFKPLLNSLTGYDPFFVMADFEDYLKKQDEVSKCWNIKTLGINGTIKYCKI

SEQ ID NO: 117040 - protein, 507 aa, Unknown
  Bacterial polypetide isolated from the Sargasso Sea
QKTVAYLSAEFLIGPQLSNNLLNLGITQEAEDALKRFGIESLSTILEVEEEPGLGNGGLGRLAACYMESLASLQVPAVGYGIRYEFGIFNQLIRDGWQVEVTDKWLKGGWPWELPQPDESCFVGFGGRTESYRDDKGNYRSRWIPSEHAIGVPHDVPVLGYRVNTCDRLRLWRADATESFDFYAFNIGDYYGAVEEKVASETLSKVLYPNDGTDEGRRLRLKQQHFFVSCSLQDMLRSLEKRSIAITEFPKHWTVQLNDTHPAIAVAELMRLLIDQYQIDWDKAWNITTSSVAYTNHTLLPEALEKWDLGLFSDLLPRHLEIIYEINWRFLQQLRLRYPGDDKILQKLSIIDEEGSKSVRMAHLATIGAHHINGVAALHSDLIKRQLLPEFAALWPEKFTNVTNGVTPRRWVALSNPSLSNLLEEEVGPNWITNMDLLKKLEEKKDDNNFLQKFEETKLNGKRKLSNFIHSKTGILVDPSSLFDVQVKRIHQYKRQHLNALSIYCQY

SEQ ID NO: 117041 - protein, 349 aa, Unknown
  Bacterial polypetide isolated from the Sargasso Sea
IYPSLSNLLEEEVGPNWITNMELLKKLEEKKDDNHFLERFEETKLNGKRKLASFIHSKTGILVDPSSLFDVQVKRIHQYKRQHLNALQIIAQYLRIKNGTNKYEVPRTIIFGGKAAPGYFMAKLMIRFINGIADVVNSDPDMDGLLRVVFLPDYNVKLGEIVYPATDLSEQISTAGKEASGTGNMKFAMNGALTIGTLDGANVELRDLVKKENFFLFGKTESEIMDLKNNNYSPKTFIDQCPELKEVLRLIEIGHFSNGDKELFKPLLNSLTGNDPFFVMADFEDYLNKQDVVSECWNDKKSWNKMALLNTARSGYFSSDRSIREYCKSIWKVSPMPVEITCDIEELTN

SEQ ID NO: 117042 - protein, 410 aa, Unknown
  Bacterial polypetide isolated from the Sargasso Sea
MTVATTSYTNHTLLPEALESWPVALMERLLPRHLQIIYLINAEHIDALRAKDIHDFRLLRAVSLIEEDHGRRVRMGNLAFLGAHSINGVSALHTRLMRDTVFRDLHRLYPDRVNNKTNGVTFRRWLFQVNPGLTHLLVDALGEQVLHRPEDHLQALEAFAERQDFRDEYALCRQRNKELLAERVRHVLGISLDTTAIFDVHVKRIHEYKRQLLNLLHTVALYQAIRNDPTTDWVPRVKIFAGKAAASYRQAKLIIKLANDISRTINGDPTVRGLLKVVFIPNYNVSLAETIIPAADLSEQISTAGLEASGTSNMKFALNGALTIGTLDGANVEMCERVGEDHMFIFGMTAQQVAARRRLGLEMSDVVADSERLEAALGAIRGGVFSPDDPARYVGLVDSLLYEDHFMVCA

SEQ ID NO: 117043 - protein, 486 aa, Unknown
  Bacterial polypetide isolated from the Sargasso Sea
MRILVDRAELGWDEAWGICTKVFAYTNHTLLPEALEKWPARMIEKILPRHLEIIYEINHRFMAEVDKKWPGDNAMKAKLSIIEEGNEKMVRMGHLSVIGSFAVNGVAEMHSRLVKSSLFPEFDELYPGKLTNVTNGITPRRWLKACNPALSKLIDKKIGDDWPRDLDKLQGLAKFASNKTFQKQFMKVKLENKELLAEEIRKSLDIEVDVNAIFDVQIKRLHEYKRQHLALLNIMALYRRILENPDYDMHPRVFVFGAKAAPGYKLAKDIIFAINKVADKINNDPRVNNKIKVAFLPNYRVSLAEKMIPAADVSEQISTAGKEASGTGNMKLALNGAVTIGTLDGANVEIAEEVGDDNIFIFGLTVEEVNELKANGYNPHDYYYKDPEIKAVLDWLETDYFTPGKPGALVSIKQSLLDNGDPYMVLADFRAYSDAQIAVDAAYRDKARWAEMAIINTAKMGKFTSDRSIRDYVERVWKLSPCKIES

SEQ ID NO: 117044 - protein, 296 aa, Unknown
  Bacterial polypetide isolated from the Sargasso Sea
FIHSKTGILVDPSSLFDVQVKRIHQYKRQHLNALQIIAQYLRIKNGTNKYEVPRTIIFGGKAAPGYFMAKLMIRFINGIADVVNSDPDMDGLLRVVFLPDYNVKLGEIVYPATDLSEQISTAGKEASGTGNMKFAMNGALTIGTLDGANVELRDLVKKENFFLFGKTESEIMDLKNNNYSPKTFINQCPELKEVIRLIEIGHFSNGDKELFKPLLNSLTGHDPFFVMADFEDYINKQDVVSECWNNKKSWNKMALLNTARSGYFSSDRSIREYCKSIWKVSPMPVEITCDVEELTN

SEQ ID NO: 117045 - protein, 848 aa, Unknown
  Bacterial polypetide isolated from the Sargasso Sea
MANPMNSNEPFDLRLPTPGCYLDPEKAGMDSDAVFQGMTAHLFYTLGKLATSASPHDLYMALSYAVKDRLMTRYLASQEVIRKKPQKTVAYLSAEFLIGPQLSNNLLNLGITQEAEDALKRFGIESLSTILEVEEEPGLGNGGLGRLAACYMESLASLQVPAVGYGIRYEFGIFNQLIRDGWQVEVTDKWLKGGWPWELPQPDESCFVGFGGRTESYRDDKGNYRSRWIPSEHAIGVPHDVPVLGYRVNTCDRLRLWRADATESFDFYAFNIGDYYGAVEEKVASETLSKVLYPNDGTDEGRRLRLKQQHFFVSCSLQDMLRSLEKRSIPITEFPKHWTVQLNDTHPAIAVAELMRLLIDQYQIGWDKAWNITTSSVAYTNHTLLPEALEKWDLGLFNDLLPRHLEIIYEINWRFLQQLRLRYPGDDKILQKLSIIDEEGSKSVRMAHLATIGAHHINGVAALHSDLIKRQLLPEFAALWPEKFTNVTNGVTPRRWVALSNPSLSNLLEEEVGPNWITNMELLKKLEEKKDDNNFLEKFEETKLNGKRKLSSFIHSKTGILVDPSSLFDVQVKRIHQYKRQHLNALQIIAQYLRIKNGTNKYEVPRTIIFGGKAAPGYFMAKLMIRFINGIADVVNSDPDMDGLLRVVFLPDYNVKLGEIVYPATDLSEQISTAGKEASGTGNMKFAMNGALTIGTLDGANVELRDLVKKENFFLFGKTEREIMDLKNNNYSPKTFIDKCPELKEVIRLIEIGHFSNGDKELFKPLLNSLTGHDPFFVMADFEDYLNKQDVVSECWNNKKSWNKMALLNTARSGYFSSDRSIREYCKSIWKVSPMPVEITCDVEELTN

SEQ ID NO: 117046 - protein, 329 aa, Unknown
  Bacterial polypetide isolated from the Sargasso Sea
MELLKKLEEKKDDNIFLQKFEETKLNGKRKLASFIHSKTGILVDPSSLFDVQVKRIHQYKRQHLNALQIIAQYLRIKNGTNKYEVPRTIIFGGKAAPGYFMAKLMIRFINGIADVVNSDPDMDGLLRVVFLPDYNVKLGEIVYPATDLSEQISTAGKEASGTGNMKFAMNGALTIGTLDGANVELRDLVKKENFFLFGKTESEIMGLKNNNYSPKTFIDQCPELKEVIRLIEIGHFSNGDKELFKPLLNSLKGHDPFFVMADFEDYLNKQDVVSECWNNKKSWNKMALLNTARSGYFSSDRSIREYCKSIWKVSPMPVEITCDVEELTN

SEQ ID NO: 117047 - protein, 631 aa, Unknown
  Bacterial polypetide isolated from the Sargasso Sea
SATGYGLNYQYGLFRQSFADGQQMEAPDDWHRGSYPWFRHNEALDVQVGIGGKVSKEGHWEPGFTITGQAWDLPVLGYRNGVAQPLRLWQASHAHPFNLTKFNDGDFLRAEQQGIDAEKLTKVLYPNDNHTAGKKLRLMQQYFQCACSVADILRRHHLAGRKLHELADFEVIQLNDTHPTIAIPELLRVLIDEHQMSWDDAWAITSKTFAYTNHTLMPEALECWDEKLVKALLPRHMQIIKEINERFKTLVDKTWPGDAEVWAKLAVVHNKQVRMANMCVVSGFAVNGVAALHSDLVVKDLFPEYHQLWPNKFHNVTNGITPRRWIKQCNPALAALLDKTLKKEWANDLDQLINLEKYADDAKFRQQYRDIKLANKERLVKFIKARTGIEITTNAIFDIQIKRLHEYKRQHLNLLHILALYKEIRENPQADRVPRVFLFGAKAAPGYYLAKNIIFAINQVAQTINNDPQVGDKLKVVFLPDYCVSAAEMLIPAADISEQISTAGKEASGTGNMKLALNGALTVGTLDGANVEIAEKVGDENIFIFGHTVEEVKVLKAKGYDPVKWRKKDKVLDAVLKELESGKYSDGDKHAFDQMLHSIGKQGGDPYLVMADFAAYVEAQKQVDVLYLTRK

SEQ ID NO: 117048 - protein, 383 aa, Unknown
  Bacterial polypetide isolated from the Sargasso Sea
DLIKRQLLPEFAALWPEKFTNVTNGVTPRRWVALSNPSLSKLLEEEVGPNWITNMELLKKLEEKKDDNNFLQKFEETKLNGKRKLASFIHSKTGILVDPSSLFDVQVKRIHQYKRQHLNALQIIAQYLRIKNGNNKHEVPRTIIFGGKAAPGYFMAKLMIRFINGIAEVVNSDPDMDGLLRVVFLPDYNVKLGEIVYPATDLSEQISTAGKEASGTGNMKFAMNGALTIGTLDGANVELRDLVKKENFFLFGKTESEIMDLKNNNYSPKTFIDQCPELKEVIRLIEIGHFSNGDKELFKPLLNSLTGHDPFFVMADFENYLNKQDVVSECWNNKKSWNKMALLNTARSGYFSSDRSIREYCQSIWKVSPMPVEITCDVEELTN

SEQ ID NO: 117049 - protein, 309 aa, Unknown
  Bacterial polypetide isolated from the Sargasso Sea
MSSTYLHNDVGSLQRSLVRHVEYTLARRRYKFDKGSFYQATAHSVRDRLIERWTDTQQYSAKKGAKKVYYLSLEFLIGRSLGNAVSNLGLRGSYAEALRQIGYNLEDIMSEEKEPALGNGGLGRLASCFLDTLATQNYPAWGYGIRYKYGMFEQRIINGKQAEFPDYWLTDGNPWEVERLDVQYPVRLFGHVREVQDSNGNTLRAWEGGEVVMAQAYDTPIPGYGTYNTNNMRLWSSKPSHEFDFASFNAGNYYGAVEAKERCESITSVLYPNDTTEEGKRLRLKQQYFFVSATLQDIYRRFKKNVGRG

SEQ ID NO: 117050 - protein, 567 aa, Unknown
  Bacterial polypetide isolated from the Sargasso Sea
AVEEKVGSETLSKVLYPIDGTDEGRRLRLKHQHFFVSCSLQDMLRSLDNRGLSVEDFPKYWTVQLNDTHPAIAVAELMRLLIDDRHMDWDKAWDITSRSVAYTNHTLLPEALEKWDLNLFGNLLPRHLELIYEINRRFLQQLRLRYPGNDAIQRKLSIIDEDGSKAVRMAHLATIGAHHVNGVAALHSDLVKTDLLPEFAELWPEKFTNVTNGVTPRRWVALANPELSTLLNEHIGEDWISNMENLRKLEERQDDQGFLEHWGNTKLSVKRKLASYIHRNTGVLVDPSSLFDVQVKRIHEYKRQHLNALQVITQYLRIKNGRADSMAPRTVIFGGKAAPGYYMAKLIIRFINGIAETVNADPDMDGRLRVVFLPDYNVKLGEQVYPASDLSEQISTAGKEASGTGNMKFAMNGALTIGTLDGANVEIRELVGAENFFLFGKTVEEINELKQSGYNPGEFINAMPELQEALRLIEMGHFSNGDSELFRPLLDNLTGNDPFFVMADFADYLRAQEAVSLAWTDRMHWNRMSLLNTARTGFFSSDRSIGEYCKNIWNVDPLNVEITCDVR

SEQ ID NO: 117051 - protein, 162 aa, Unknown
  Bacterial polypetide isolated from the Sargasso Sea
MYQATAQSVREGLVDRWNETYAHFHKKNPKQAYYLSMEYLQGRALTNAIGNMGLTGEYSDALRSLGYTLEDVMSVERNAGLGNGGLGRLASCFLDSIATLDLPAWGYGLRYKYGLFKQGVDKATGEQLEFADDWLEVGNPWEIPRPQVSYPISFYGSVVDGK

SEQ ID NO: 117052 - protein, 384 aa, Unknown
  Bacterial polypetide isolated from the Sargasso Sea
KAKTAKTAVVEEEEEEEEEPAMVRMANLCCISGMAINGVAAIHSEIVKDVVFNDFYKLFPEKFQNKTNGVTPRRWLAFCNPELSAVITKWVGSDKWITDTDELRKLADNASNPELQAEWKAAKLARKQICKDYIKKVTDIDVPIDSMFDIQVKRIHEYKRQFLNILGIIYRYKQMKAMTPEERAKCVPRVCVFGGKAYATYLQAKRIVRLINNVGNVVNNDPEIGDLLKVVFVPDYNVSLAETLIPASELSQHISTAGTEASGTSNMKFQMNGCLIIGTLDGANVEIRECVGEDNFFLFGITDPEVEPARAERAAGKFIPDPRFTETCEYVRSGVFGDKFEELLGSLEGNEGFGRGDYFLVGKDFASYLDAQERVDAAYTESAG

SEQ ID NO: 117053 - protein, 479 aa, Unknown
  Bacterial polypetide isolated from the Sargasso Sea
MANSMNTNEPFDLRLPTPGCYLDPEKAGMDSDAVFQGMTAHLFYTLGKLATSASPHDLYMALSYAVKDRLMTRYLASQEVIRKKPQRTVAYLSAEFLIGPQLSNNLLNLGITLEAEEALKRFGIDSLSTILEVEEEPGLGNGGLGRLAACYMESLASLQVPAVGYGIRYEFGIFNQLIRDGWQVEVTDKWLKGGWPWELPQPDESCFVGFGGRTESYRDNKGNYRSRWIPSEHAIGVPHDVPVLGYRVNTCDRLRLWRADATESFDFYAFNIGDYYGAVEEKVASETLSKVLYPNDGTDEGRRLRLKQQHFFVSCSLQDMLRSLEKRSIPITDFPKHWTVQLNDTHPAIAVAELMRLLIDQYQIGWDKAWNITTSSVAYTNHTLLPEALEKWDLGLFNDLLPRHLEIIYEINWRFLQQLRLRYPGDDKILQKLSIIDEEGSKSVRMAHLATIGAHHINGVAALHSDLIKRQLLPEFAAL

SEQ ID NO: 117054 - protein, 218 aa, Unknown
  Bacterial polypetide isolated from the Sargasso Sea
IADVVNSDPDMDGLLRVVFLPDYNVKLGEIVYPATDLSEQISTAGKEASGTGNMKFAMNGALTIGTLDGANVELRDLVKKENFFLFGKTESEIMDLKNNNYSPKTFINQCPELKEVIRLIEIGHFSNGDKELFKPLLNSLTGYDPFFVMADFEDYLNKQDEVSKCWNNKKSWNKMALLNTARSGYFSSDRSIREYCQSIWKVSPMPVEITCDVEEITS

SEQ ID NO: 117055 - protein, 837 aa, Unknown
  Bacterial polypetide isolated from the Sargasso Sea
MSHNSELSPNTSGVPPKKRATKAAPSKPKATLEPCEPCDALPATFNRHVRYGLSRGEVAHGELFQALALSVKEQMLDEWRETRIKDSCYDNKQVAYLSLEFLMGRALGNALLNLDLEQDSREALSQYSVSLEELEEAEHDAGLGNGGLGRLAACFLDSCASMDLSVTGYGIRYEYGMFAQKIVDGYQVERPDRWLREGNPWEVRVPHHNVTVKFFGHTESYVDKQGRRHMIWVDTQDVLAVAYDMPVPGYRNGRVNSLRLWKAEATDDFDLAEFNQGDYTEAVACKNLAEQITMVLYPNDASENGKELRLRQQYFLSSASLQAILKRWVHHHGHDFSEFAAKNVIQLNDTHPSIAVPELMRLLVDEYGLEWDAAWAITSQTMAYTNHTLLPEALERWPVRMMALMLPRILEIIYEINARYLDLVAHHWPGDGAKLASMSIIQDGPDPHVRMAYLAIVASFSVNGVAALHTQLLKSGLFKDFYSLWPEKFNNRTNGVTPRRWLAHCNPALAKLLTSHLGKGWVTDLSQLTALNALTQDASFIQKWREVKQANKVQLAKMIAKECGVEFDPAMLFDVQVKRIHEYKRQLLNILHVIHLYHQIQQGHTEHLVPRCVLIGGKAAPGYFMAKLIIKLASNVAHMVNCDPVVAPYLRFAFLPNYNVSAMEKICPGTDVSEQISTAGKEASGTGNMKFMMNGALTIGTLDGANIEMLEEVGEDNFFLFGLNAEQVTQMRCDYQPQRIIAESHALSEVMALLKSGHFNLLEPGIFDPIIASIESPDDQWMTAADFDSYRLAQEAVAKAYKDPKKWTQMSIRNTAASGRFSSDVTIAGYRDDIWKL

SEQ ID NO: 117056 - protein, 294 aa, Unknown
  Bacterial polypetide isolated from the Sargasso Sea
HSKTGILVDPSSLFDVQVKRIHQYKRQDLNALQIIAQYLRIKNGTNKYEVPRTIIFGGKAAPGYFMAKLMIRFINGIADVVNSDPDMDGLLRVVFLPDYNVKLGEIVYPATDLSEQISTAGKEASGTGNMKFAMNGALTIGTLDGANVELRDLVKKENFFLFGKTVSEIMDLRNNNYCPKTFIDKCPELKEVIRLIEIGHFSNGDKELFKPLLNSLTGHDPFFVMADFEDYLNKQDVVSECWNNKKSWNKMALLNTARSGYFSSDRSIREYCKSIWKVSPMPVEITCDVEELTN

SEQ ID NO: 117057 - protein, 824 aa, Unknown
  Bacterial polypetide isolated from the Sargasso Sea
MATKKKTDQDLQLDKDQLKASIVRHLRSTLGTSEQKASPEAWWKATAAAVNEQVYERLTRTQQTHFKKDTRAIHYLSAEFLMGRLTSNNLHNLSLYKICEEALGELGLELTDLCEQEPDMALGNGGLGRLAACFIDSLATLNYPAVGYGIHYEHGLFRQEIQDGRQIERPDSWREYGNPWEICRPESVQEIPLYGYVETVFGDNGGLKKVWHAGRKIKGVPWDIPVVGFGGHTVNILRLWESRASEFFDWDVFNAGGYIDSQAEKAQAETISKVLYPNDETDAGKELRLIQQYFFCACSIKDIMRRYKRVHGADFSNFAAQIAIQLNDTHPTVAIPELMRVLVDEEGLTWDAAWAISYQVFSYTNHTLLPEALEKWSVSLFEKVLPRHLEVIYEINARFLSELVEPKWPGNDAIKAKLSIIEEGDVRKVRMGNLCVIGSSKVNGVAEIHSKLVKEDLFPEYAELWPQKMCNVTNGVTPRRWLLACNPELAELYNEVVGKEWPLQLDKLRSVVKFADDKAFQQQFMTIKRHNKEKLVKVIKAETGIEVSSEAIFDVQIKRLHEYKRQQLNLIHIMALYRRLLANPDYDMHPRVFIFGSKAAPGYKLAKDIIYAINKLAERVNNDARIQGKLKVVFMPNYRVSLAEKLIPAADVSEQISTAGYEASGTGNMKMALNGAITIGTLDGANIEIAEEAGAENCAIFGLNVDEVKALKGRGYNPYDFYYANSELKAVLDWFDTDYFTPGRPGELSSIKRSLLEGGDPYLTLADFASYSEAHKLIDSWYRDPALWAKKAIINSATMGKFNSDRSIQDYVDRIWQLKPCSIG

SEQ ID NO: 117058 - protein, 501 aa, Unknown
  Bacterial polypetide isolated from the Sargasso Sea
MNDTHPAVAIPELMRILVDRAEMSWDEAWNLCQNVFAYTNHTLLPEALEKWSVRLFEKVLPRHLEIIYEINRRFLVEQVDVLWPGDNEKKRKLSIIEEGHEPMVRMGHLSVVGSFRVNGVAEIHSELVKSDLFPEMVALWPDKFTNVTNGVTPRRWLKACNPRLAKLLDETIGDEWPRDLKQLNKFAAFADDPAIQDAFMAIKQQNKADLATVVKKLTNISIDPHAIFDIQIKRLHEYKRQHLNLLHILALYRRILQNPDYDMVPRVFLFGAKAAPGYKLAKEIIYAINKVAEKINNDKRVKNRLKVVFMPNYRVTLAEKMIPAADVSEQISTAGKEASGTGNMKLALNGAITVGTLDGANIEIAEEVGPDNISIFGLTVDEVKSLQAKGYHSWDYYYQDAEIKAILDWLETDYFTPGKPGELSAIKRSLLEGGDPYLVLADFQSYVKAQEKVDGWYRDQAGWAKKAILNTALMGKFTSDRSIEDYVEKVWKLDSCKISQQ

SEQ ID NO: 117059 - protein, 256 aa, Unknown
  Bacterial polypetide isolated from the Sargasso Sea
SVGRNIPNEGMLFYGPIQQGNDNWNATFFCGSCAVIRRKALDDIGGFAVETVTEDAHTALKFQRLGWKSSFLDIPLAAGLATERLVVHVIQRTRWARGMTQIFRLDNPLLGRGLTFQQRLCYLSAMLYYQFALPRVVFVTAPLAYLLFNLNIIYSSASLIVSYALPHLFLAIYVGSRMNGRYRYSFWGEIYDIVLAFHLVLPTLVTMIFPKRGKFNVTDKGGLLDVGYFDFTVVRPHLVVACLLAVGVIVGIVRAI

SEQ ID NO: 117060 - protein, 302 aa, Unknown
  Bacterial polypetide isolated from the Sargasso Sea
GNDFWNAAFFCGSCAVIRRSAIEEIGGFAVETVTEDAHTALKLQRRGWNSAFLALPLAAGLATERLALHIGQRARWARGMLQILRLDNPLFGRGLSLPQRLCYLNAMLHFLFSLPRIVFLTAPLCYLLFGQNIIDASPEMILAYALPHLFFTTYTNSRLQGKFRHTFWGEIYEAVLSFHLVLPTIATLINPRKGKFNVTEKGGLLENGYFDYDMVKPHLFTLVLLLCGFLSGIVQLIWSEHYQVEPKVLLLNLFWAGFSCIMLFASVAVAREMKQVRQTVRLDVSLPVVLHLETGHTLKTKS

SEQ ID NO: 117061 - protein, 563 aa, Unknown
  Bacterial polypetide isolated from the Sargasso Sea
TIYAALALDYPAEKISIHVLDDGRRPEFKAFCEEVGVNWTIRTHNRHAKAGNINEALKITQGEYLAIFDCDHIPTRSFLQIGLGWFLRDKLLSMLQTPHHFFSADPFERNLGTFRKVPNEGELFYGLVQDGNDLWNATFFCGSCALLRRSMVEEIGGIAVETVTEDAHTALKLHRLGYTTAYLAIPQAAGLATESLSGHIGQRIRWARGMTQIFRIDNPLTGKGLKIGQRLCYLNAMMHFFYGIPRLVFLTAPLSYLFFGAHVIEAAASTIAIYALPHMMHASITNSRMQRSFRHSFWAEVYESVLASYITAPTLLALINPKLGKFNVTAKGGQIEKNYFDWSISRPYLFLLLLNLIGFVVGIVHIYLNWHIRSVVNTTILNLGWTTYNMLILGASVAAASERRQIRAVHRVAMQMPVMLKFSTGRTLACETIDYSEGGVGVALPGKIEVPIHERVTVSLFRGDEEYTFPATVGFTEPGRVGLRFATLTREQEYEFVKTTFARADAWTGWAEGRQQDTPLRGLSHVLSVGARGIVGLFEHLYADLRSSMKSRPVDVKKLKTKD

SEQ ID NO: 117062 - protein, 863 aa, Unknown
  Bacterial polypetide isolated from the Sargasso Sea
MGRYVAGGRRRRSPWSGAMNAGFALRLRALGRRAADWLARGIGLPAQRTLVDWVVRLFFHAPPPGRPDHVRRWVRVASLRLAQEWGVLQPLSPREWLWRAIVRAPRAADGRPARDPLAWFDKYVVPVYVAGRAVGRRIDAMLARLPWVRWGGWLDARANGVGRRRWLAPLLLVAGALLWAAAGMSPLMPGAQFAFFAIVAVLALALRRLPGHLPTLALASLALLATLRYMWWRTSQTLDFRSPVEAVAGYLLYGAEAYTWMILLLGFVQTAWPLDRPIVPLPDDPDTWPTVDIYIPTYNEPLSVVKPTVFAAQSIDWPSAKLRVYLLDDGKRPEFEAFARAAGIDYVTRDDNRHAKAGNINRALPKTHGEYIAIFDCDHVPTRSFLQTTMGVFLRDPKCALVQTPHHFFSPDPFERNLGTFREIPNEGNLFYGLVQSGNDLWNATFFCGSCAVLKRSALEEVGGVAVETVTEDAHTALKLHRRGYTSAYLPTVQAAGLATESLAGHVKQRTRWARGMAQIFRIDNPFLGRGLGLIQRICYGNAMLHFFYGIPRLVFLTIPLAYLFFHLYFINASALALASYVIPYLVLANVANSRMQGRYRHSFWAEVYESVLAWYIALPTTVAFFSPKHGKFNVTDKGGKIDEGYVDWSTSKPYLVLFGLNVLAILAGLWRLAVDQGDEASTILITLGWTVYNLAMLGAALAVARETRQVRVTHRIAMRVPAMLLLADGSTAACFTSDYSTGGLGLEAVPGLPLAVGDTLTVCVTRGDRPFPFPVRVSRVTPTHVGVSFDELTLEQERQLVQCTFGRADAWLDWNEGQRVDTPLGGLKEVLRIGLDGNVRMWKGAARGLLAMLAPKLDRARD

SEQ ID NO: 117063 - protein, 299 aa, Unknown
  Bacterial polypetide isolated from the Sargasso Sea
YNLDDILKVGSQYNPHLNPVICQDLVKCDPDIGPLARDKSPLILAIENNLITVFDIDHVGNNTNRILTPVFGKKNIQKGESIVIKNSYTDTLEGLPILHGRCLLNRKMAKGFFTKQLGPRYSGWKSMPLERRAFLAIATLFMKGVDSGGVAESIKLQRQINEDFSLKKVKNLNYLDESKIDEILSENEDLKPFQALVNSHSFELTLITGFMEAARKKGKLYTSHMYWIKHTDRSLWFTLENCGSQMPYCEAAAVRAHYLREENVQMGLDHPEIESAIDGLEKFLGETEGWLAKVVKEDV

SEQ ID NO: 117064 - protein, 257 aa, Unknown
  Bacterial polypetide isolated from the Sargasso Sea
RRRSTSGTSPRRASFPRPPPRTPGAPACSSRARAGNRPACCAGCRSTSGTSPRRASFPRPPPRTPGAPACSSRARAGYRPARCARRRSTSGTPPRRASSPRPPPRTPGAPASGSRARAGYRPACCARRRSTSGTSPRRASSPRPPPRTPGAPACSSRARAGNRPACCAGCRSTSGTSPRRASFPRPPPRTPGAPACSSRARAGYRPARCARRRSTSGTSPRRASSPRPPPRTPGAPACSSRARAGYRPARCARRRST

SEQ ID NO: 117065 - protein, 305 aa, Unknown
  Bacterial polypetide isolated from the Sargasso Sea
QGSAGGLAVGVLGALKAAGGLWFGWSGDTDNEDKPLKKVTRGNITWASFNLSEQDYEEYYCQFSNAVLWPAFHYRLDLVQFQRSAWEGYQRVNALLVDKLLPLLGDDDIIWIHDYHLLPFACELRKRGVNNRIGFFLHIPFPTPEIFNALPPHLALLEQMCDFDLLGFQTENDRQAFLDCLAAQTRVSTHKDKQHLAWGKAFRTQVYPIGIEPDEIARQASGPLPPKLAQLKAELKNVQNIFSVERLDYSKGLPERFQAYEALLEHYPQHHGKIRYTQIAPTSREEVQAYQDIRHQLETEAGRIN

SEQ ID NO: 117066 - protein, 259 aa, Unknown
  Bacterial polypetide isolated from the Sargasso Sea
AELFYNGFCNNVLWPLLHYIPLSMLEGQAQVAEEQWRGYKAANEAFADEVLALTRSIDADSPQPLVWVQDYHLMLLPRMLREAQDDLHVGWFLHTPFATSEMYRTLPHREEILRGVLGADLIGFHIYDYARHFHSACLRVLGSGGSEGVTEGNEGLFDHAARRSIAVDAFPIGIDPERFRQCLLQGTVKDKVIDLQRRFDGKKVLLGIDRLDYVKGIPHKLKAVEKFLQMYPSMANKIVLVQIAVPSRVDVPGYQKLRS

SEQ ID NO: 117067 - protein, 266 aa, Unknown
  Bacterial polypetide isolated from the Sargasso Sea
EVQEHIRELRERFRGRKVMLGVDRLDMIKGIPHKLLAFEKFLNENPEWKDKVNLIQIAVPTRSDVPEYQRLASQVHEIVGRINGRFGSIGSVPIQHLDCTMQFPELCALYAVTDVMLVTSQRDGMNLVSYEFVSCQTEDNAGVLVLSEFAGAAQSIGAGALLVNPHNVTDVANAIKEALIMPEAEKIERFHSSFSHVSVHTSQAWADTFISELNDTHVEAELRQKRIPPHLKPHVMVKSFENARKRLIILGYNATLTDPMENRTKV

SEQ ID NO: 117068 - protein, 293 aa, Unknown
  Bacterial polypetide isolated from the Sargasso Sea
NNLWIGWPGLAIEKAKESEVHSKLIKQHMKPVFLSNEEIEDFYEGFSNETLWPNFHYFNQYTVYKEEHWRAYQRVNQKFAKIVAEDLEDDDTVWINDYQLLLLPQMIRIMSPNSTIGFFLHIPFPSYESFRRLPWRRELLNGMLGSDFLGFHTYDDMRHFLSSVNRLAGLGNSNGTIKVKNRLVKADALPMGIDYEKYANSAQDPKTLAREARYRESIGDVRLILSIDRLDYSKGIPQRLRAFELFLLKYPDFIEKVSLFMVVVPSRDSVSKYKQLKEEIDLLVGRINGQFSK

SEQ ID NO: 117069 - protein, 462 aa, Unknown
  Bacterial polypetide isolated from the Sargasso Sea
MSRLIIVSNRVAPISEGGPAAGGLAVGVYDALKETGGMWFGWSGDVLSSGQPQIKVEERGPVTFATIALMRRDYDQYYRGFSNATLWPAFHYRADLLQYDRHDFGGYCRVNAWLAQQLVPLLREDDVIWVHDYHLIPFAQALRAAGVKNRIGFFLHIPFPASQVLLAVPPHRELVEALCSFDLLGFQTAPDLRAFCDYIVNEANGTVDVSASGPLTVHAFGRTLRAAAYPIGVYPDEIAELAKAGERGKPVRTMKATLHSRKLIMSVDRLDYSKGLVERFRAFERLLEHSAAQRNKVSFLQIAPPTRADMHAYQDIRLQLEGESGRINGRFAELDWTPILYIHKQYERSVLAALFRTAHVGYVTPLRDGMNLVAKEYVSAQDPENPGVLVLSRFAGAAQELGGALIVNPVDIDGMAEALASALAMPLAERQARHRDMMAQLRENNVSVWRDNFMRDLQRAQG

SEQ ID NO: 117070 - protein, 476 aa, Unknown
  Bacterial polypetide isolated from the Sargasso Sea
MSRLIVVSNRVAPIQEGRPAAGGLAIGVLDALKETGGVWFGWSGETVSEPSSPVIEKQGNVTYATVGLTKRDYDQYYRGFSNATLWPTFHYRNDLSRYDRQEYAGYQRVNATLARQLKELLKPDDIIWVHDYHLLPFARCLRELGVKNPIGFFLHIPFPVPEVLRTIPPHEELVKAMCSYDVVGFQTEADRQSFVDFIERGQHGTSSEDGMVHAYNRFLKVAAYPIGIYPDAIAKAAEQFTDRKPVRSLRDGMRGRKLIMSVDRLDYSKGLVERFQAFERLLLNAPGWHGRVSLVQIAPPTRADVQTYQRIRQTLEGEAGRINGRFAQLDWTPIQYLNRKYERNLLMALFRQSQVGYVTPLRDGMNLVAKEYVASQDPADPGVLVLSQFAGAAEQLPGALVVNPFDLSQMAEALERALSMPLAERQARHADMMAPMRENNLSVWRDTFLDDLRNIATASSVTAKAVKLADVTASSS

SEQ ID NO: 117071 - protein, 469 aa, Unknown
  Bacterial polypetide isolated from the Sargasso Sea
MVSRLVVVSNRIADPRKAAAGGLAVAVKDSLQESGGVWFGWSGRLRGGDDQPAHGDEVQIQNVGGIQLATIDLDPQDYDAYYLGYSNNVLWPVFHYRLDLAQFDRRFADGYRRVNQLFARKLRTLLRPDDTIWVHDYQLIPLAAELRAMGCRNPIGFFLHIPMPPPPIMAAIPEHEWLMRSLFAYDLVGFQTESDLLHFEHYVEAEAGAARLPDGRLRAFGRTLSAGAFPIGINVDEFESLARDRDGLDMFDRMRDEYSRRQLLVGVDRLDYTKGLPQRVNAFRQLLEQYPENRNRATLIQIAAPSREDLGAYDDLRREMDSLCGAINGDYGELEWMPMRYIHRTVARKRLPGLYRASRVALVTPLRDGMNLVAKEFLAAQDAADPGVLVLSRFAGAAEQLKSALLVNPYDTQGTAQAIQRALAMPLEERRQRHAALMAIVRATDVHWWRTRFLDALTEAAEVAAATES

SEQ ID NO: 117072 - protein, 120 aa, Unknown
  Bacterial polypetide isolated from the Sargasso Sea
YGVKYKDEIHAVMCFAFTNKIPKSVRELDLLSKDAFLQSAQRDQNVGKIAIAYTVWSKKKGGGKLIVKEVFKMIKKSNHLNRLVTLSPLTEMARNFHLKNGAVEVQINEDTQNFEYKVIK

SEQ ID NO: 117073 - protein, 171 aa, Unknown
  Bacterial polypetide isolated from the Sargasso Sea
KGKSEIKKNVQSFFGWIKGAELIELKECDISKDPVRPELDNDFRTSYGRKIYGVKYKDEIHAVMCFAFTNKIPKTVKELDLLSKDAFLQSAQRSQKIGKIAIAYTVWSTKKGGGKLIVKEVFKVIKKSNHLNRLVTLSPLTEMARNFHLRNGAEELQVNETTQNFEYKIIK

SEQ ID NO: 117074 - protein, 170 aa, Unknown
  Bacterial polypetide isolated from the Sargasso Sea
RKGKIDIKKNVQNFFGWIKGAELIQLKECDISKDPVRPELDNDFRTSYGRKIYGVKYQEEIHAVMCFAFTNKIPKTVKELDLLSKDAFLQSTHRGQKVGKIAIAYTVWSTKKGGGKLIVKEVFKVIKKSNHLNRLVTLSPLTDMARKFHLRNGAVEIQVNKDTQNFEYKI

SEQ ID NO: 117075 - protein, 148 aa, Unknown
  Bacterial polypetide isolated from the Sargasso Sea
ELKECDTSKDPVRPELNNDFRTSYGRKIYGVKYKDEIHAVMCFAFTNKIPRNVKELDLLSKDAFLQSAQRGQKIGKIAIAYTVWSTKKGGGKLIVKEVFKIIKKSNHLNRLVTLSPLTEMARNFHLRNGAVEVQINETTQNFEYKVLK

SEQ ID NO: 117076 - protein, 48 aa, Unknown
  Bacterial polypetide isolated from the Sargasso Sea
MLKEENKIFKNLYNEQGWDLENALKRDDWLDTKKIIEKGRDWIINEIK

SEQ ID NO: 117077 - protein, 233 aa, Unknown
  Bacterial polypetide isolated from the Sargasso Sea
MAIEGDAVTFSKYEERTFAIAGLPGEASGQIGNDGEMTMANSSNTTNQSGTASIDAGNKQYSSLSLKEKSLITDLENALKNIKSVDGKVSVSPLTMTVFVKDRPSVVASIERIINEFNDEITKGISFDIVLLDVIYSSNQRQAFDMSMAANLFNGKALLKSNNSSPFISGSGATPAPSQFDIEIVGGDFSGTQLFIDALKKQGDISRKFQVPVQISNGTQMKVMSVDSTNVYC

SEQ ID NO: 117078 - protein, 237 aa, Unknown
  Bacterial polypetide isolated from the Sargasso Sea
DLENALKSFSFIVGSEVCFRDEGVSHFGLENGLFEINGNFIEVVSPFKQDTTAERFMSKMNGDAGYMLIFECENADLYRQKADELDIRSIWSTDLENGVKATHYHPKDIGGLIISVDSMNKKNWYDKNSYWQWAGDDWQSKTNNQCSISSISMSCKNPSKLANKWGSFLDLSVNESGDRHVIKGDDFKIFFTHDDVKGIDYLSKLTLKINNSEHNDKIFQQYKENEIEICGTKIDLI

SEQ ID NO: 117079 - protein, 302 aa, Unknown
  Bacterial polypetide isolated from the Sargasso Sea
SDELLQNQNLVASLKHQNKAISEEVYKYQDKRRILLSRRDVVSIGVEDKRKEMRSRAEKRHLLELDVQRSLAEEHTWTANAEREREAINKTSELIAENQAILKRMKEPEQKLRADLENALKSRVTTQDSLSSSQKEIEASAKNLKTTENERLKASSVLKAREEELDRTNLDLRALEARLQELDSRFNQQKVDLQEQLKKLTEHDSLETLDAKIQSTERKIARLGAINLAAIDELAQFSDRKDYLDKQHADLSTALSMLGDAIRKIDIETKTRFKETFDKVNNGIQKMFPILFGGGHAYIELT

SEQ ID NO: 117080 - protein, 132 aa, Unknown
  Bacterial polypetide isolated from the Sargasso Sea
MSEAPQRLRYRHEFLRVARGGKKCAMPGLVLQVRKQQILENKQNLKNIRIGFTVSKKIGNSVTRNRARRRLRSVADIVMQKSAASGNDYVIIGRKSTTKREFCALVKDLENALKMLGKARLDGFSKNEGHAK

SEQ ID NO: 117081 - protein, 110 aa, Unknown
  Bacterial polypetide isolated from the Sargasso Sea
YTGDDKTSMSDMLDGFSGNISVTANVVPDQMHKMCMYALDGNEEKASMINNKIDKLHDILFIESNPIPVKWCLYKMGLIKKGIRLPLTWLDEKLETDLENALKNAGVSFE

SEQ ID NO: 117082 - protein, 1082 aa, Unknown
  Bacterial polypetide isolated from the Sargasso Sea
MWIVRLALRRPYTFVVLALLIFIAGPLALLRTPTDIFPNIDIPVVSIVWSYNGFSAEDMAKRITSNYERALTSDVDDIEHIESQSLNGVSVVKIFFHPGADINRAIAEAASNAASILRILPPGTLPPNIITYNASTVPILQLGLSSNTLAEQQLYDLGNSFIRTQLATVQGAAVPLPFGGKIRQIVVDLDTRALQAKGLAPIDVVNAINAQNLILPGGTAKIGTHEYNVQMNGSTQTVAALNDLPVKTIGGNVVYVRDVAHVRDGYAPQTNIVRADGKRAALLTVEKTGSTSTLTIIDQVKAMLPKIAAGLPKALHIAPLDDQSVFVKAAVQGVVREALIAACLTALMILLFLGSWRATLIIAITIPLAVLTSLLALAVLGQTINIMTLGGLALAVGILVDDATVAIENITHHLELGAPLEEAILTGAGEIAVPTFVSTLSICIVFVPMFLLTGVARYLFVPLAEAVIFAMIASYFFSRTLVPTLAMALMRAKGSGRPPRGVFAPLVHVARFQAAFEHRFEAVRLRYRALLSAAIARRRRFAAAFLLACVASTGLYAFAGQDFFPSVDTGEIRLHLRAPTGTRIEETARLTDEVEAKIRNVIPANELAGVLDNIGVPVSGINLTYDSSDPIGTEDADVLVTLKPNHASTATYVAKLRNVLAQAFPGVTFAFLPADIVSQILNFGLPAPIDIQIVGNKLDQNRAVANALLAKLRGVRGLVDARIQQPGDEPAINVNVDRTKAIQAGLEQRDVAQNLLIALSGSSQTTPNFWLDPRNGVSYPVLVQTPQYTVNSLQSLANVPLPAGTARSPQTPAGGPAAGAPAQNLLGSLGTFSRATQQAVVSHYNVQPVLDIFASVQGRDLGGVTADVTKLVDEARAQLPPGSSIVLRGQVQAMHESFTGLLGGLVLAIALVYLLMVVNFQSWLDPLVIVGGLPASLAGIAWMLFVTRTTLSVPALTGTILCIGIATANSILVVNAARELLAAGESPWQAALDAGFSRFRPVLMTALAMLIGMLPMALGLGDGGEQNAPLGRAVIGGLAFGTISTLLFVPVLFGFVHAWLAQRRDAAAARRARPTSDTPALG

SEQ ID NO: 117083 - protein, 248 aa, Unknown
  Bacterial polypetide isolated from the Sargasso Sea
MRLRQICFVAKDLENALKNFSFIIGSEVCFRDEGVSHFGLENGLLEIDGNFIEVVSPFKQDTTAERFMSKMNGDAGYMLIFECENADLYRQKAEKFNIRSIWKTDLENGVKATHYHPKDIGGLIISVDSMNKKDWQDKNSYWQWAGDDWQLKTNNQCSISSISMSCKNPSKLANQWGSFLDLSVNESGDIYIIEGTDFKIFFMYDDIKRIDYLSQLTLKINNSELKDKIFQKYKENEIEICGTKIELI

SEQ ID NO: 117084 - protein, 193 aa, Unknown
  Bacterial polypetide isolated from the Sargasso Sea
MQTLNLTLFSAINAGVAPQPGVARLAIFAADWLVYALPAMLLLTWIFGARPTRRQAIEAGLGVCVALALAQVIGHFWFSPRPFMAGVGTQLIPHAPDSSFPSDHMTFAWSMAVGLMLGGTTRFTGFVMAAMAAVIAWGRIYAGVHWPFDMAGGVLVGTAGALAAHLYGQRVTALLERLGDSVHAAVTGHRHAP

SEQ ID NO: 117085 - protein, 293 aa, Unknown
  Bacterial polypetide isolated from the Sargasso Sea
DRVPAWATRATVEQGVMGAGYDGVFWNPEEKYEFKHSSPKKPEASRIYEAHVGMSSNDPKVNSYREFADDVLPRIAASGYNTVQLMAVMEHAYYGSFGYHVTNPFAVSSRCGTPEELKYLVDKAHGLGVRVLLDVVHSHASSNVNDGIAGFDFGQKDVDSYFGVGDAGYHWLWDSRLYKYDNWEVLRYLLSNLRYWVEEYNFDGFRFDGVTSMLYHHHGLQMEFSGEYDQYFSTATNVDGVVYLMLANEMLHSLYPEIEVIAEDVSGMPTLCLPVSKGGVGFDARLAMSIPGL

SEQ ID NO: 117086 - protein, 170 aa, Unknown
  Bacterial polypetide isolated from the Sargasso Sea
MIETNQTDWIKSEAINLENCCNDNPLKILGPHFHEEQWVIRVWMPDADEVTINFKNKTYKAETINHKWLFEATLPENPNSNYKINISRGGIAHTQHDPWSYREEWMGEVDRHLFAEGNHHHIWEKMGAHLIENKNQKGVMFCIWAPNAKSISIIGDINSWDGRHHPMQKR

SEQ ID NO: 117087 - protein, 289 aa, Unknown
  Bacterial polypetide isolated from the Sargasso Sea
LAASAKAKEKSGYRLSLDIPSYLPVMQYCNNRELRRELYEAYVTRASALSPSGTQWDNGPLMVEILQLRQELAQLLGFANYAEDSLASKMAPSCDTVLNFLGELADASRPVAERELAELKAFAADLGQAELAAWDVPYFSEKLREKQYAVSQEELRPYFPAERVLDGLLTVTGELFDLSFAPREAPLWHADARCFDVLRDGEVIAQFYLDIYARANKRGGAWMADCRGRRQLADGLVQRPVAFLVCNFTPPTESRPSLLTHNEVTTLFHEFGHGLHHMLTPGGLPVGVG

SEQ ID NO: 117088 - protein, 112 aa, Unknown
  Bacterial polypetide isolated from the Sargasso Sea
SVVSFMRRDEKEGNWVVVVCNFTPEGHGNYRIGVPVDGFYTELFNSDGARYGGSNQGNLGGKFSDDWGMHSYGQSLDLCLPPLTVMVFKHDPNRQREAAKDEAAAKLGGSLG

SEQ ID NO: 117089 - protein, 192 aa, Unknown
  Bacterial polypetide isolated from the Sargasso Sea
MTQAQTYFYDGSDVALLNGQYTDVFSLLGMHSINESKALVVRCFLRNAQKVDVISLKDGRKVASLERVNEAGLFAGTLGRRVKPFLYALRVTYPLCELDIIDPYQFGSLLDSQDLYLFGEGSSEQAYRFLGANWRQVDSVEGVHFCVWAPNAKRVSVVGDFNHWDDTRHVMRQHLANGLWEIFLPDVTEGAH

SEQ ID NO: 117090 - protein, 302 aa, Unknown
  Bacterial polypetide isolated from the Sargasso Sea
VAKSSMEDAGYADSENEILDSTGVILGVTAGMKLLGSLTSRLQYPVWEKVLRRSGISETDTKQIIEKIKKAYVPWEENSFPGMLGNVIAGRIANRLNLGGTNCTVDAACASSLSAMKMAISDLLEYRADMMIAGGVDADNSPMMYMCFSKTPAFTSGENPRPFDQDSGGVMIGEGLGMVVLKRLEDAQRDGDRVYALIKGIGASSDGKFKSIYAPRSSGQAKALKRAYEDANVEPLSIGLLEAHGTGTDAGDLAEFEGLKEIFNSDKAKKSGFPNYQHIALGSIKSQIGHTKAAAGVAGLIK

SEQ ID NO: 117091 - protein, 245 aa, Unknown
  Bacterial polypetide isolated from the Sargasso Sea
SISQEEVRAWFPVDKVLSGLFAIVQKLYGIEIRELKDFDTWHPDVRLFEISENGQHVGRFFFDLYARANKRGGAWMDGARDKRRDAQGKLIAPVANLVCNFTPPVGGKPALLTHDEVTTLFHEFGHGLHHLLTRVEHAGASGINGVAWDAVELPSQFMENWCWEPEGLALISGHYETGEALPQAMLDKMLAAKNFQSGLMMVRQLEFSLFDFELHASHGDGRSVLDVLEGVRAEVSVLRPPAYNR

SEQ ID NO: 117092 - protein, 39 aa, Unknown
  Bacterial polypetide isolated from the Sargasso Sea
PGARLLTYAELADRLIPYVKERGFTHIELMPITEHPFDG

SEQ ID NO: 117093 - protein, 246 aa, Unknown
  Bacterial polypetide isolated from the Sargasso Sea
GKRGGAWMTNFKGQYRNGDDDHRPHVAIVCNFTKPTETKPSLLTFGEVLTFFHEFGHSLHGILADGQYESLSGTNVYWDFVELPSQIFENWAFEKECLDIFASHFETGEKIPFEIIQKIKESSNFHEGRNTLRQASFAILDMAWHNQDPESIEDVGDFEKRVLKDTLLLPHVDGTNISCAFSHIFNGGYSAGYYSYKWAEILDADAFELFKEKGIFNREVAKSFQENILSMGGAEHPMVLYKRFRG

SEQ ID NO: 117094 - protein, 197 aa, Unknown
  Bacterial polypetide isolated from the Sargasso Sea
MANLKFNGVSMFATTTTATGGTNGVFSNLAQDLTLDNTVSVYVSAEGTAGPIVSVNKALLLSALTIDASNVGTSTSYTNGRNTTFAGGGSQFMTFAAEDASRTIDLTDISVGVFTQAIQNLATLRADNAASVSRLRFAGDEMALQKTNMEAANGRIIDVDIAEESTRLAKYNVLVQASAAMLAQANSNSDVALMLLR

SEQ ID NO: 117095 - protein, 292 aa, Unknown
  Bacterial polypetide isolated from the Sargasso Sea
IGSGMIGTTMAYDLSQDHDIVVGDFNDSSLAKLKALNPNIITKKIDVTNSLELKDFIQVADIVLLAVPGHLGFATLKTIIKSGKNVVDISFSNENFLELDVLAKDRGVTAAVDAGLAPGIPNFLLGYHDSEMKINSFEYYVGGLPKNPEPPFFYKAPFSPVDVIEEYTRPARMMVNGKIVTKPALSEIEIMNFDNIGNLEAFNTDGLRSILFTMNHITNMKEKTLRYSGHAALMANYRNAGKFDKDQISKTSDELFTAWKLEENEPELTVMKIIIDGDSECITYDLFDEFDS

SEQ ID NO: 117096 - protein, 459 aa, Unknown
  Bacterial polypetide isolated from the Sargasso Sea
MFIGFDYGTSNCAVAVMEQGSPRLLNLSGAHYLPSTLHAPHRDAIAGLLAEGLAPAQQSEYLKLRGPVVTRAQAVRRQMREEGLIDELSFGAAALERYLEEPDDGYYLKSPKSFLGAYGLKAPQIALFEDIVCAMMLHVRREAEQQLGAPIRRAVVGRPVNFQGLAGEESNRQAIAILSEAARLAGFEQVEFLYEPVAAGFEFEARLTEDAVVLVVDIGGGTTDCSVLRMGPSHRDRLDRDGDLLGHSGQRIGGNDFDIRLTVEGMMPLLGMHETLKTGKPLPHPLFWDAAAINDVSAQSRFYSLETARQLQDLQLDSQPGSKLGRLASLRAHKLSHQLVWRAEQGKIALSTQESNHQSLSELEKGLEAELTREQLANASALLLEKIGELMDEAITAAGVQPDRVFITGGSARSPLIQAFIRQKLPQVPLEGGDDFGSVASGLARYAERLFGSGQPTQF

SEQ ID NO: 117097 - protein, 333 aa, Unknown
  Bacterial polypetide isolated from the Sargasso Sea
MTKLTAIAITLTAIVASSYAVAAEPIEVISPAKITEPEKVELGKMLFFEPRLSKSGFISCNSCHNLSTGGVDALPTSIGHHWQEGPINSPTVLNADFMLAQFWDGRASDLKEQAAGPIANPKEMGFTHELATETIASMPAYRARFAKVYGDEKVDIDRLTDAIAAFEKTLVTPNSPFDQYLLGKQDAISSEAKAGYQLFKDKGCVSCHNGPAVGGTMFMKMGLIKPFHTNNPAEGRKGVTGKDADKFVFKVPTLRNIELTYPYFHDGSVWTLEEAVNTMADIQLGQKLTDKETKEMVAFLNSLTGEQPQITLPILPPSNKETPRPVPFATGAK

SEQ ID NO: 117098 - protein, 271 aa, Unknown
  Bacterial polypetide isolated from the Sargasso Sea
MKFNKNLFTLKKPLLVGICNFTPDSFSDGGKTFSRTSALNHINSMVKDGAQIIDIGAESTRPNSEPITYKEEIRRLSKILPYLNYKKYLVSLDSYKPETQEYALNKGVHIINDINGGSEELFKLTKKYNAGLFLMHKRGTPKDMQKKLNPRANMVKEFDKFIEKRLKILDKMKFNLKKVWFDPGIGFGKTLNQNLQLMRSLSKYSYKNLQILLGSSRKSWINFIDPSNADQRIGGSLASITHALQQNVNTFRIHDVQETNQMIKVLKALNK

SEQ ID NO: 117099 - protein, 252 aa, Unknown
  Bacterial polypetide isolated from the Sargasso Sea
MIVDTHCHLYFEELNKDLDGVLSRANDLGVNTFICVGTNLSDSYESLNLAQKYKSIYATAGIHPHDSKDAAEDDLQELRKLLDNEKIVAVGEMGLDYFRNISNPDIQKIVFKDQLKLAEEINKPIVFHNREADEDIINILSDFPNVIGVAHCFSSSYETAIKLIEMGFFISFSGNLTFKNSHLPEVAKKLPLDRLLVETDSPFLSPVPFRGKTNEPGRARYVAEKLAEIFNSDIDQIASITTANAKNLFNLV

SEQ ID NO: 117100 - protein, 332 aa, Unknown
  Bacterial polypetide isolated from the Sargasso Sea
MDSQSTPITLHIPNATQGELSFCGSGLPAFSQWAKSLPMANTGEASRRLYQAIRELNALSCPAAQRFELLEVIRPYIHSVCKVLNKHFLQSSVSLNDKQLKIANLSQALQGHLATGYKMVVAHSVDLLGAGDRPPKHFAPAIHRAIVDSSQIILRAYQLYFQPPDRTWLDVNQIYLMAEARRLENITIEDQQARYVYKSTIRDAFARIHLLGTAKPSNLRQQDLAQLYEVCEYWAPHAELTPADDESALFIINLHRDRPGQYRQHLRDNQKINFRSLNTQKLVQALKLYASAGSDGRITVPDKTSETLIAHAIQSWGIHWQRSFRRVPTDGQ

SEQ ID NO: 117101 - protein, 181 aa, Unknown
  Bacterial polypetide isolated from the Sargasso Sea
NTRALLAYMWTHPGKKTIFMGMEFGQRQEWNVWDDLQWDLLNYEPHKGIQKLVDDLNDLYKREPALWRNDFDEYGFQWIDCDDNKNSVISFMRREKTDGEWLVIVANFTPQNHSNYRIGVPVDGFYEEIFNTDASQYGGSNLGNMGGKSTDLYNIHGYENSIDLCLPPLSVLVLKHKSKKN

SEQ ID NO: 117102 - protein, 333 aa, Unknown
  Bacterial polypetide isolated from the Sargasso Sea
MIKLTAIAISIMAMLGGHYAVAAEPIEVITPAKITEPEKVELGKMLFFEPRLSKSGFISCNSCHNLSTGGVDALPTSIGHHWQEGPINSPTVLNADFMLAQFWDGRASDLKEQAAGPIANPKEMGFTHELATETIASMPAYRARFAKVYGDEKVDIDRLTDAIAAFEKTLVTPNSPFDQYLLGKQDAISSEAKAGYQLFKDKGCVSCHNGPAVGGTMFMKMGLIKPFHTNNPAEGRKGVTGKEADKYVFKVPTLRNIELTYPYFHDGSVWTLEEAVNTMADIQLGQKLTDKETKEMVSFLNSLTGEQPQITLPILPPSNKATPRPVPFAAATK

SEQ ID NO: 117103 - protein, 114 aa, Unknown
  Bacterial polypetide isolated from the Sargasso Sea
MHSYTRTPMRMTEYCNFTPALARPRLRSVRINGLATCLRLEEVYWRIIEEIARQKSMSVGKLISQWAREIDLTQETVCNFTGLIRIICVTQLLDKKHPINLEAIDPDAMGNPPQ

SEQ ID NO: 117104 - protein, 422 aa, Unknown
  Bacterial polypetide isolated from the Sargasso Sea
MTNKELLERRKLSMGSSPLFYKEPIHLVKGEGIWLYDDSNNKYMDCYNNVPCVGHCHPHVIESLSKQAGQLNTHSRYISKVVVDYSERLMNLHTNPLSVLQMGCSGTEAIEIAIKMARLATGGKGIICSNATYHGNSHETIRMTIGPFEPDFKRVPFPEKFRPLKEGLSENELCDLYLEEIKRAINEFSEANIPLAGMLFCSIFANEGLPSIPEGFLPKAAKLIRDAGGLVILDEVQAGFCRTGSWWGYEVNDCVPDIVAMGKPMGSGYPISGVGTNEEIAKTFHSKSYYFNTTASTPLQAAVGNAVLDVIEEENLKENVNSVGEYLKDKVSSFVDKFDKVGDVRGQGLFIGIECIEGNGNSEPNKELAVEFVERMKQKGFLISNAGQFRNVLKIRPPLVFQKEHADSLYEVLEETLDEFHN

SEQ ID NO: 117105 - protein, 494 aa, Unknown
  Bacterial polypetide isolated from the Sargasso Sea
MQLWIGVHLPLLCLEVFRPKWSRDTHDAPGAAQGLAVLEKERVIASDAIARAAGVCTGMRRGGVLTLAPAAVMHERDGAAELNAVREVATGLLNLSPQVVIAEESTVLVDVSASLRLFGGIRSLRRMARRVADAIGVTATISVAPTGQAAWLLARFGGGAALSHDSLSRSMASLPVSLPPPARRHLDWLTGIGCETVGQLMRLPRAGLKKRCGTALLDLLDRASGDAPEVYEWFETPPTFQARVELPDRIEHAEACLFAARRLVVQLTGWLSQKQLAVTRIVLLLEHERGRDAIEPTTIEVALAEPTWREDHLVRLLKERLTRVELAAAVIALQLVVQEVREAEAASDSLFPEPGGTASDHARLLELLVARLGAENVLRPAPVADHRPEVAARWVSVTDKTKYVAPATDTPRPTWLLEAPIKLLMRGERPFYGTPLRTVSSGERVEAGWFQGEPVTRDYFVAEADDHICYWIFRERIGAVDDDEPRWYLHGLFG

SEQ ID NO: 117106 - protein, 178 aa, Unknown
  Bacterial polypetide isolated from the Sargasso Sea
MSKHAVFWIRDDFRIKNNPALSYATNNHESVSAIYIYNNLKFDQKREAQKWWISKSLKEFSKDLQKFNINLEIFNSDEIKFFSKIKKEKGLSIYWNKIYEPDELDIDKKLISYFEKEKINFKFFKGNVLNEFNKVNKSDGTPFKVYSPFWRNAERIYLEKVPEKSSNVKKIKKAKNFF

SEQ ID NO: 117107 - protein, 101 aa, Unknown
  Bacterial polypetide isolated from the Sargasso Sea
MFDQTTNTEVHQLTVGKIETANGTIKPQLLRDAVKRAVTNFFAQLDGQEAQEVYEMVLSEVEAPLLDIIMQHTRGNQTRAANMLGINRGTLRKKLKKYGMN

SEQ ID NO: 117108 - protein, 101 aa, Unknown; identical to SEQ ID NO: 117107
  Bacterial polypetide isolated from the Sargasso Sea

SEQ ID NO: 117109 - protein, 161 aa, Unknown
  Bacterial polypetide isolated from the Sargasso Sea
MGMEFGQRQEWNVWDDLQWELLEFEPHKGIRNLIDDLNVLYKNEPALWKNDFDPYGFQWIDCNDKSNSVISFMRRENDTNEWLVVVANFTPNTHGSYKVGVPVEGFYKEIFNSDGSRYGGSNKGNMGGKETINYNIHDYQNALELALPPLSVSIFKHQSKK

SEQ ID NO: 117110 - protein, 162 aa, Unknown
  Bacterial polypetide isolated from the Sargasso Sea
FMGMEFGQRQEWNVWDDLQWELLEFEPHKGIRNLIDDLNVLYKNEPALWKNDFDPYGFQWIDCNDKSNSVISFMRRENDTNEWLVVVANFTPNTHGSYKVGVPVEGFYKEIFNSDGSRYGGSNKGNMGGKETINYNIHDYQNALELALPPLSVSIFKHQSKK

SEQ ID NO: 117111 - protein, 275 aa, Unknown
  Bacterial polypetide isolated from the Sargasso Sea
MALATLDWMTQDAERLAQCSHAHPLAVLGPQQLEDGRWVVRVWMPEADRVVLLHAGGELLLQNPHHPWIFETELPGDLGSGYRLRVERAGITHEQHDPYAFRHEWMGAMDRHLFAEGNHHHIWKRMGAHPHQQDGVAGVQFCLWAPHARSVSIIGDCNNWDGRHLPMQQRTGGIWELFVPGLGTGAHYKYEIHTQEGHCYEKADPYGFQHEVRPKQASLVADLNQFEWSDDGWLKERDGRNALEQPISVYEMHMGSWMHGSWDEPFIEADGSVRP

SEQ ID NO: 117112 - protein, 306 aa, Unknown
  Bacterial polypetide isolated from the Sargasso Sea
DQKKWDNSDNIKEILAIRKEISELVGFNNYAEYSLATKMAETTADVFEFLYDLANKTKSTALNEIEMIEQFAGQKLQPWDVSYYLEKYKQENFSVSDDELKQYFQKSTVQNGMFDVAKSLFDITLEINPNIPVWHESVEFVEVKNLNGEIIGGFYIDLFARNGKRSGAWMDECVIRKNINDNKMLPIGYLVCNFTPPNEKGISLLTHNDVITWFHEFGHMLHHLLTKVDLPSISGINGVPWDGVELPSQFMENFAWNYQVLKDCSKHHITGQYFPKSIFRKLQKARNFGSGLAMLRQLEFALYDLS

SEQ ID NO: 117113 - protein, 242 aa, Unknown
  Bacterial polypetide isolated from the Sargasso Sea
MIETIQADWIKSEAINLENCCNDNPLKILGPHFYEEQWVIRVWMPEADEVKINFKNNTYKAENINHKWLFEAILPENPNHNYEINISRGGITHTQHDPWSYREEWMGEVDRHLFAEGNHHHIWEKMGAHLIEEKNQKGVMFCIWAPNAKSISIIGDINSWDGRHHPMQKRLGGIWELFMPTMQEGDTYKYEIRTQQGHIYEKADPYGFLHEIRPQNGSIVSKLKNFNWNDSSWISNRDSSSQ

SEQ ID NO: 117114 - protein, 211 aa, Unknown
  Bacterial polypetide isolated from the Sargasso Sea
MGRVIRQLLAQVPHHDPQVVAVLGMGWPPDVLEQLLLGNHPPRVACQLRQHCVFLASQRHFGTVQQNAAIGQVDRQRAKTQGGFLGFSGRCLAQQRTHPGKKLLDAERFGHVVIGATVEGLDLLTFAGPHRQHQHRHARPLAKLTQHLLAVHVGQAQVEYQQIRFAQGRLRQAFVACAGFDYLIALGSQADAQEFADLRFVINDKNRRGLA

SEQ ID NO: 117115 - protein, 273 aa, Unknown
  Bacterial polypetide isolated from the Sargasso Sea
MPPVEGDGFGVCALDPALEGHKGHLGHRFEKFKHLRAAIEEHEGGMEKFSRGYEKMGFTRTAEGITYREWAPNATAACLRGDFNGWDLGENGKWMTKDDYGVFSVFLPNNEDGSPAIPHGSRVKIHLQIPNGEPVDRIPAWIQYAVQAPGEIPFDGVYWDPPKEDSYEFKYARPDAPSELRIYEAHVGMSSTEPKINSYVEFADDVLPRIKDLGYNAVQLMAVQEHAYYASFGYHVTNFFGVSSRCGTPEELKYLVDKAHSMGITVLMDLVHS

SEQ ID NO: 117116 - protein, 175 aa, Unknown
  Bacterial polypetide isolated from the Sargasso Sea
MGGAAVLDWMVQDGERLANCRHDHPFAILGPQPSDAGWTVRVWMPEAHSVTLLECGRETAMTAPNHPWVFETTLSHDPGSNYRVRVERGGITHEQHDPWAFRDDWMGDMDRHLFAQGNHHHIWQRMGAHLTQRDGISGVMFCLWAPHALSVSILGDLNSWDGRHHPMQQRMGGIW

SEQ ID NO: 117117 - protein, 292 aa, Unknown
  Bacterial polypetide isolated from the Sargasso Sea
VKYLKERSDEQWSVFDMVSTLCNRRYTEKAIAYVESHDQSIVGDKTTAFWLMDAEMYSGMSALSEPSIVIQRGIALHKMLRLVTASLGGEGYLTFMGNEFGHPEWVDFPREGNNWSHEYCRRRWDLADADHLRYQHLLSFDKAMMALDDEYAYMGASHQHVSTADDGRQILVFERGPLVFVFNFHPSNTYEGLEIGVPEPGKYRLALDTDASDFGGSSRCGFGVDHFTSPEAPPSWVGPYEQTPRAAKMRVLSPSRSAQVYYRVHEPSAAPPTEPSVGEIVREIDSDASSAR

SEQ ID NO: 117118 - protein, 265 aa, Unknown
  Bacterial polypetide isolated from the Sargasso Sea
LIEEKDQKGVMFCLWAPNAKSISIIGDINSWDGRHHPMQKRLGGIWELFMPIMKEGDIYKYEIRTQQGHIYEKADPYGFLHEIRPQNGSIVSKLKNFNWNDSSWISNRDSSSQINKPISVYEMHLGSWLHESTDNKYLEDNGEPRDPVPAADLKPGTRLLTYPELTKKLIPYVKERGFTHIELMPISEHPFDGSWGYQVTGWYAPTSRFGTPNEFREFVNKCHEEGIGVILDWVPGHFPKDKHGLAFFDGCHLYEHGDSRIGEHK

SEQ ID NO: 117119 - protein, 267 aa, Unknown
  Bacterial polypetide isolated from the Sargasso Sea
FDGTHLYEHGDPRIGEHKEWGTLIFNYSRNEVRNFLVANLVFWLEQFHIDGIRVDAVASMLYRDYLRPDGEWLANEHGGRENTEAVRFLQQANHVMFQHFPGTLSIAEESTTWPMVTQPTDMGGLGFNLKWNMGWMHDMLDYFELDPWFRQFHQNNITFSIWYTYTENFMLALSHDEVVHGKSHLLHKMPGDDWQKYANTRALLAYMWTHPGKKTIFMGMEFGQRAEWNVWGDLQWDLLNYEPHMGIQRLVDDLNVLYKAEPALWRD

SEQ ID NO: 117120 - protein, 277 aa, Unknown
  Bacterial polypetide isolated from the Sargasso Sea
MFCLWAPHAKSVSVIGDLNSWDGRHHPMQKRLGGIWELFIPGLSEGDLYKYEIRTEKGHCYEKADPYGFQHEVRPAKSSVVSKIDSFQWNDQSWISDRDNRDPLEEPISVYEMHLGSWMHASSDDPFINSNGEHRVPVPAADMKPGSRLLTYKELANKVIPYVKDRGFTHIELMPISEHPFDGSWGYQVTGWYAPTSRYGSPDEFRAFVDSCHKEGIGIILDWVPGHFPKDQHGLAYFDGSHLYEHSDPRIGEHKEWGTLIFNYSRNEVRNFLVANL

SEQ ID NO: 117121 - protein, 296 aa, Unknown
  Bacterial polypetide isolated from the Sargasso Sea
HLGSWRRHTDNNFWLSYRELADQLVPYAKWMGFTHLELLPVNEHPFDGSWGYQPTGLYAPTRRFGTREDFRYFLNAAHAAGLNVILDWVPGHFPSDDFALASFDGTALYEHSDPREGYHQDWNTLIYNYGRREVSNFLVGNALYWIERFGIDALRVDAVASMIYRDYSRKEGEWVPNEYGGRENLEAIEFLRNTNRVLGEQTPGAVTMAEESTDFAGVSRPSSTGGLGFWFKWNLGWMHDTLDYMKLDPIYRRHHHDKMTFGMLYNYTENFVLPLSHDEVVHGQKSILDRMPGDAW

SEQ ID NO: 117122 - protein, 263 aa, Unknown
  Bacterial polypetide isolated from the Sargasso Sea
FDGCHLYEHGDSRIGEHKEWGTLIFNYSRNEVRNFLVANLVYWFEEFHIDGIRVDAVASMLYRDYLRPDGEWIPNENGGNENTEAVKFLQQANHVLFQHFPGALSIAEESTTWPMVTKPTDMGGLGFNLKWNMGWMHDMLDYFEIDPWFRQFHQNSVTFSITYNYTENFMLALSHDEVVHGKSHLLHKMPGDDWKKYANTRALLTYMWTHPGKKTIFMGMEFGQRQEWNVWDDLQWDLLEFEPHKGIRNLIDDLNALYKNESA

SEQ ID NO: 117123 - protein, 292 aa, Unknown
  Bacterial polypetide isolated from the Sargasso Sea
YSREPGQWLPNAYGGRENLEAIHFLQMLNQRLYQAFPGICMIAEESTAFAGVTKPTDGGGLGFGFKWNMGWMNDSLSYLGRDPIYRQYHHNQLTFSLMYAYSEQFMLSISHDEVVHGKGSLLHKIPGDDWQKFATLRAYYGFMWGHPGKKLLFMGSEFAQRDEWNHNHSLDWHLLAFEPHQGVQRWLRDLNRLYRQFPALSVLDYESQGFRWLDCDNGRDSIFSFVRYGEGSDVPLVFVVNMTPTLHQGFRIGLPQGGDFCEYLNSDSHLYGGSNQGNAGKVIAEDLPGRAG

SEQ ID NO: 117124 - protein, 264 aa, Unknown
  Bacterial polypetide isolated from the Sargasso Sea
VRSFLLGSAFSWIERYGVDGFRVDAVASMLYLDYSRDKGEWLPNEKGGRENLEAIDFLRQFHEILRNEYPGVISIAEESTAFPKISEPTSQGGLGFDFKWNMGWMHDVLAYLGASQKERPAFHEKLTFGSTYQFSEKFVQAFSHDEVVHGKGSLANKMKAHSRTEQISQLRALYAFLWTWPGKKTLFMGGEFAQWKEWDCDGELDWSLRDFPMHEGVRNLVRELNGLYRKHPSWSACDHQRDKFRWISCDDAQSRSISFIRFGE

SEQ ID NO: 117125 - protein, 178 aa, Unknown
  Bacterial polypetide isolated from the Sargasso Sea
ANLRAYLSFMWTHPGKKLLFMGSEFGQWREWNHDRELDWHLLEEADHRGVQNLVRDLNRLYSQEPALHELDSDPQGFQWLIGDDRANSVFAWLRKSSTGHPLLVVANFTPVVREAYRIGVPVDAKWLEVFNSDAACYGGSNTGNGGGMLAEPIESHGEKVSLSLTLPPLGVLVLRPQV

SEQ ID NO: 117126 - protein, 298 aa, Unknown
  Bacterial polypetide isolated from the Sargasso Sea
VPGHFPTDGHGLARFDGTPLYEHADPREGFHQDWNTLIFNYGRTEVRNYLIANALYWLKEYHLDGLRVDAVASMLYRDYSRKAGEWVPNRHGGRENLEAIAFIQAMNVVTYGEVPGIMNVAEESTSFPKVSAPVDAGGLGFGFKWNMGWMNDTLRYMQQDPVHRKYHHDQMTFGLMYAFSENFVLPISHDEVVHGKGSMLRKMPGDEWQQFANLRAYYGFMWGHPGKKLLFMGCEWGQPEEWNHNGELNWHAAGQPLHKGVQSLVRDLNRLYRETPALHVKDCDAEGFQWIATDPAQS

SEQ ID NO: 117127 - protein, 279 aa, Unknown
  Bacterial polypetide isolated from the Sargasso Sea
MGAHLIEEKNQKGVMFCIWAPNAKSISIIGDINSWDGRHHPMQKRLGGIWELFMPTMQEGDKYKYEIRTQQGHIYEKADPYGFLHEIRPQNGSIVSKLKNFNWNDSSWISNRDSSSQINKPISVYEMHLGSWLHESTDNKYLEANGEQREAVPAADLKPGTRLLTYPELTKKLIPYVKERGFTHIELMPISEHPFDGSWGYQVTGWYAPTSRFGTPNEFREFVNKCHEEGIGVILDWVPGHFPKDKHGLAFFDGCHLYEHGDSRIGEHKEWGTLIFNYS

SEQ ID NO: 117128 - protein, 131 aa, Unknown
  Bacterial polypetide isolated from the Sargasso Sea
GVQRLVRDLNHTYRHHKALHELDFDPYGFEWLVVDDHERSVFVFVRRDKAGNEIIVASNFTPVPRHGYRFGINQPGRWREELNTDSMHYHGSNTGNGGIVESEAIASHGREHSLSITLPPLATVWLVREAE

SEQ ID NO: 117129 - protein, 205 aa, Unknown
  Bacterial polypetide isolated from the Sargasso Sea
ISHDEVVHGKGSMLHKMPGDEWQQAANLRCYAGFMYGHPGKKLNFMGNELAQAREWNHDSSLDWHLLDYEKHKGIQALYKALNHLYTSTPALYEQDHEPGGFAWLDHNNADQSVVSFVRMSKDARQKVYVVSNFTPVPRQNFRIGVDDACTLTLALNTDDGAYWGSDYDVASTVNTQTIPWNERTHSAEITLPPLATVFYVANVD

SEQ ID NO: 117130 - protein, 312 aa, Unknown
  Bacterial polypetide isolated from the Sargasso Sea
ADLKPGTRLLTYPELTNKLILYVKERGFTHIELMPISEHPFDGSWGYQVTGWYAPTSRFGTPNEFREFVNKCHEEGIGVILDWVPGHFPKDKHGLAFFDGCHLYEHGDSRIGEHKEWGTLIFNYSRNEVRNFLVANLVYWFEEFHIDGIRVDAVASMLYRDYLRPDGEWIPNENGGNENIEAVKFLQQANHVLFQHFPGALSIAEESTTWPMVTKPTDMGGLGFNLKWNMGWMHDMLDYFEIDPWFRQFHQNSVTFSITYNYTENFMLALSHDEVVHGKSHLLHKMPGDDWKKYANTRALLTYMWTHPGKKN

SEQ ID NO: 117131 - protein, 266 aa, Unknown
  Bacterial polypetide isolated from the Sargasso Sea
FPGVSRPSSTGGLGFWFKWNLGWMHDTLDYMKLDPVHRRHHHDKMTFGMLYNYTENFVLPLSHDEVVHGKKSILDRMPGDAWQKFANLRAYYGWLFAFPGKKLLFMGNEFAQGREWNHDASLDWHLLEGGDNWHHGVQRLVRDLNHTYRHHKALHELDFDPYGFEWLVVDDHERSVFIFVRRDRAGNEIIVASNFTPVPRHEYRFGINQPGRWREELNTDSMHYHGSNTGNGGVVESDPIASHGREHSLSITLPPLATVWLVREAQ

SEQ ID NO: 117132 - protein, 257 aa, Unknown
  Bacterial polypetide isolated from the Sargasso Sea
HGLAFFDGTHLYEHGDPRIGEHKEWGTLIFNYSRNEVRNFLVANLVFWFEQFHIDGIRVDAVASMLYRDYLRPDGEWLANDHGGRENTEAVHFLQQANHVLFQHFPGALSIAEESTTWPMVTQPTENGGLGFNLKWNMGWMHDMLDYFELDPWFRQFHQNNITFSIWYTYTENFMLALSHDEVVHGKSHLLHKMPGDDWQKYANTRALLAYMWTHPGKKTIFMGMEFGQRAEWNVWGDLQWDLLNYEPHKGIQLLVD

SEQ ID NO: 117133 - protein, 292 aa, Unknown
  Bacterial polypetide isolated from the Sargasso Sea
LKNFRGILSIAEESTAWAGVSHPTYTGGLGFNLKWNMGWMNDSLRYMEKDPVYRKYEHQLMTFSMMYAFSENFVLALSHDEVVHGKRSLLEKMPGDEWQKRANLRLYHAYLMGHPGKKLIFMGGEFGQWREWDEKVSLDWHLLENEGHRQLQHFCRELNRLYLRLPALYSNDFDWSGFRWIDHSDQDNSVLAFLRLPAVGYEASEDLEHNDSNSAPVAFVFNFTPVPRRGYLLGLPEADAYHKIFDTDDPWFGGSGFSSQSRIAVENHPSHGFPCRVLLDLPPLAALMLKPG

SEQ ID NO: 117134 - protein, 277 aa, Unknown
  Bacterial polypetide isolated from the Sargasso Sea
INSWDGRHHPMQKRLGGIWELFMPTMQEGDIYKYEIRTQQGHIYAKADPYGFLHEIRPQNGSIVSKLKNFNWNDSSWISNRDSSSQINKPISVYEMHLGSWLHESIDNKYLEDNGKPRDPVPAADLKPGTRLLTYPELTKKLIPYVKERGFTHIELMPISEHPFDGSWGYQVTGWYAPTSRFGTPNEFREFVNKCHEEGIGVILDWVPGHFPKDKHGLAFFDGCHLYEHGDSRIGEHKEWGTLIFNYSRNEVRNYLVANLVYWFEEFHIDGIRVDAV

SEQ ID NO: 117135 - protein, 281 aa, Unknown
  Bacterial polypetide isolated from the Sargasso Sea
MTVSILLDSLKDDGQRLSECRHESPFSILGPQPFKDKWIIRIWMPEASEVELITQQTKIKLQNPNHEWIFEGVLEKDPGNDYQIKVNRGGIEHVQHDPWSFRKEWMGEIDRHLFAEGNHHHIWRKMGAHLTEIDKKQGVMFCLWAPHAKSVSVIGDLNSWDGRHHPMQKRLGGIWELFIPSLREGDLYKYEIRTEKGHCYEKADPYGFQHEVRPAKSSVVSKIDSFQWNDQSWISNRDNRDPLEQPISVYEMHLGSWMHASSDDPFINSNGEHRAPVPAAD

SEQ ID NO: 117136 - protein, 263 aa, Unknown
  Bacterial polypetide isolated from the Sargasso Sea
MPMQQRLGGNWELFVPGLSAGAHYKYEIHTQEGHCYEKADPYGFQHEVRPAQASVVANLKGYQWGDEAWLKQRDSRNPLDQPVSVYEMHLGSWMHGSWDDPYIEADGTPRPPVPAADLKPGARLLTYPELADRVIPYVKARGFTHIELMPMAEHPFDGSWGYQVTGFYAPTSRFGTLNEFRAFVDRCHAEGIGVVLDWVPGHFPKDAHGLAFFDGCHLYEHSDPRIGEHKEWGTLIFNYSRNEVRNFLVANLVFWFEELHIDG

SEQ ID NO: 117137 - protein, 280 aa, Unknown
  Bacterial polypetide isolated from the Sargasso Sea
HADTMDGVTGTRFSVWAPNAQRVSVVGQFNYWDGRRHPMRLRKESGIWELFIPGAQHGQLYKYEMIDANGKLRIKADPYAFEAQMRPETASLICGLPEKVVQSEERKKANQFDAPISIYEVHLGSWRRHTDNNFWLSYRELADQLVPYAKWMGFTHLELLPINEHPFDGSWGYQPTGMYAPTRRFGTRDDFRYFVNAAHQAGLNVILDWVPGHFPSDDFGLAEFDGTRLYEHSDPREGYHQDWNTLIYNYGRREVSNYLVGNALYWIERFGIDALRVDAV

SEQ ID NO: 117138 - protein, 293 aa, Unknown
  Bacterial polypetide isolated from the Sargasso Sea
MHHCGSCRNRYTFLLIFLFLLEQMLTDYDLHLLGEGRHWKSYDKLGAQLCTRDGQQGVHFALWAPNAEAVSVVGDFNGWAGHNHMMSKLMPSGFWQLFVPGVGPNTAYKFRVKTTEGTIDRADPHGYSAEVPPQNASLVTDLSDYNWNDSHWMEQRRRRDWFSEPISFYEVHLGSWRRPGDDPHRWLTYRDLERELIPYCLEMGFTHLEFLPPTEHPLSASWGYQTIGLFAATSRFGTPQDFMSLIDGCHQAGIGVIIDWVPAHFPKDDHGASPAWTGRLSTNMKDPCRGEHP

SEQ ID NO: 117139 - protein, 312 aa, Unknown
  Bacterial polypetide isolated from the Sargasso Sea
EIAMTTPNHPWVFEAQLNRDPGCTYRVRVERGGIVHEQHDPWAFRGEWMGKMDRHLFAEGNHHHIWQKMGAHLTERDGVRGVMFCLWAPSALTVSVIGDLNSWDGRHHPMQQRVGGIWELFIPGLEEGHLYKYEIRTQEGHCYQKADPYGFQHEVRPDNSSVVARLGGYQWSDQGWMQKRESSNALDQPISVYEMHLGSWIHASADEPWIQPDGTPRTPVPAAEMKPGARLLTYAELADRLIPYVKERGFTHIEVMPITEHPFDGSWGYQVTGWYAPTSRYGTPDEFRAFVDRCHAEGIGVIIDWVPGHSRR

SEQ ID NO: 117140 - protein, 246 aa, Unknown
  Bacterial polypetide isolated from the Sargasso Sea
MTDRPVLTMPGETLMPSDADVDALVRAEHGNPFSILGPHPDGEGIVIRAYLPNALGAEVLDRDEQLLAVMEQGQVPGFFFIRLPHQQPYLLKIRWAGGEQITEDPYSFGPQLGELDMHLFSEGNHRQIGRVFGSQVLEVDGVQGVRFAVWAPNARRVSIVGSFNGWDGRRHPMRLRFPSGVWELFIPRLQPGDTYKYEILGPNGILPLKADPIALATEHPPGTASVIARPLDYQWKDHGWLQQRAA

SEQ ID NO: 117141 - protein, 308 aa, Unknown
  Bacterial polypetide isolated from the Sargasso Sea
MIETIQADWIKSEAINLENCCNDNPLKILGPHFYEEQWVIRVWMPEADKVKINFKNKTYNAETINHKWLFEAILPENPNSNYEINISRGGITHTQNDPWSYREEWMGEVDRHLFAEGNHHHIWEKMGAHLIDNKNQKGVMFCIWAPNAKSISIIGDINSWDGRHHPMQKRLGGIWELFMPIMKEGDTYKYEIRTQQGHIYEKADPYGFLHEIRPQNGSIVSKLKNFNWNDSSWISNRDSSSQINKPISVYEMHLGSWLHESTDNKYLEDNGELRDPVPAADLKPGTRLLTYPELTKKLIPYVKERGSL

SEQ ID NO: 117142 - protein, 291 aa, Unknown
  Bacterial polypetide isolated from the Sargasso Sea
CRPVQEGGVGFDYRLQMAIADKWIEVLSEWGADENWDMGNLVFTMENRRYGEKCISYAESHDQALVGDKTTAFWLMDAEMYTNMSTLVPDSPVISRGIALHKMIRQFTMGLGGEGYLNFMGNEFGHPEWIDFPRDDRIEAATGEFIPGNGNSYHLCRRRFDLADMDHLRYKYLNAFDAAMHKVAGAFKYLASNHQYTSCKSNEDKVVVFERGDLVFVFNWNPTQSFSDYRIGCKEETKYKLVLSSDNAEFGGYSNLSTETAGEYHAEDYAFNGRPASFLAYLPSRTVSVYA

SEQ ID NO: 117143 - protein, 304 aa, Unknown
  Bacterial polypetide isolated from the Sargasso Sea
EWAPGAKAACLFGDFNGWSTGAEGVWMTKNDYGVFEVFLPNLADGSPAIPHGTRVKVHLEVEGQEPVDKIPAWIKFAVQAPDEIPFNGIYYDPPPEEVYQFKYARPKSPDELRIYEAHVGMSSIEPKINSYVEFADDVIPRIAQLGYNAVQLMAVQEHAYYASFGYHVTNFFAVSSRCGTPDELKYLIDTAHSYGVAVLMDIVHSHASSNATDGINMFDGTNGQYFHDGPQGYHWMWDSRCFNYGSWEVLRFLLSNLRYWMEEFKFDGFRFDGVTSMMYSHHGLQMAFTGDYGEYFGMSTDVDA

SEQ ID NO: 117144 - protein, 729 aa, Unknown
  Bacterial polypetide isolated from the Sargasso Sea
MLNGQYTDVFSLLGMHSINEGKALVVRCFLRNAQKVDVISLKDGRKVASLERVNEAGLFAGTLGRRVKPFLYALRVTYPLCELNIIDPYQFGSLLDSQDLYLFGEGSSEQAYRFLGANWRQVDSVEGVHFCVWAPNAKRVSVVGDFNHWDETRHVMRQHLANGLWEIFLPDVAEGAHYKFDLVYQNGERHAKSDPMATQMECAPHNASIVPKKHQYPWADSQWMHKRATTAWHRAAMSIYEVQLGSWRRKGEFGEQYLDYQDLIEQLIPYVKEQGFTHIELMPVSEYPFDGSWGYQPVGLYAPTHRFGDANGLKAFIDACHQAEIGVLLDWVAAHFPKDPHGLVRFDGTCLYEHEDPRKGTHPDWDTLIYNYDRGELRSFLLSNACYWLREFHLDGLRLDAVSSMLYLDYSREPGQWLPNAYGGRENLEAIHFLQMLNQRLYQAFPGICMIAEESTAFAGVTKPTDCGGLGFGFKWNMGWMNDSLSYLGRDPIYRQYHHNQLTFSLMYAYSEQFMLSISHDEVVHGKGSLLHKIPGDDWQKFATLRAYYGFMWGHPGKKLLFMGSEFAQRDEWNHNHSLDWHLLAFEPHQGVQRWLRDLNQLYRQFPALSVLDYESQGFRWLDCDNGRDSIFSFVRYGEGSDVPIVFVVNMTPTLHQGFRIGLPQGGDFCEYLNSDSHLYGGSNQGNAGKVIAEDLPWQGMASSALITVPPLGCLILGPATDAPRDTSL

SEQ ID NO: 117145 - protein, 642 aa, Unknown
  Bacterial polypetide isolated from the Sargasso Sea
MDIDALVEARHPDPFSQLGMHQTDAGPVVRALLPNASHVKVIARADGSTLGELEQLKPGLFAGRVSSAAPYRLRIDWHGTVQEIEDTYSFGPILGDEPLGRLAGGDPYAVLECLGARPMEVDGVPGVRFAVWAPNARRVSVVGDFNSWDGRRHPMRLRHQAGVWELFVPRVGPGTRYKYELLARDGHPLPLKADPCAMQTEKPPGTASVVAHVDEIEQFAWTDHEWIQSRADKQTPRAPISIYEVHAESWLRVAEEGQRGLTWEELAERLIPYVKSMGFTHVEFMPIAEHPFGGSWGYQPLGQFAPSARFGKPEQFALFVDKAHAAGLGVILDWVPAHFPNDAHGLIDFDGTPLYEHADPREGYHQDWNTMIYNLGRNEVSAFLVASGLAWLKRYHVDGLRVDAVASMLYRDYSRNAGEWVPNIYGGRENLESIAFLKRLNHEVGYVPGVPGAITIAEESTAWPGVTARVEDGGLGFQFKWNMGWMHDTLHYMQEDPVYRQYHHHMMTFGMVYAYSERFVLPLSHDEVVHGKGSLLGKMPGDRWQKFANLRAYFGFMWTHPGKKLLFMGGEFGQMAEFNHDASPHWHLLDDPNHHGVQMLVRDLNHLYHEDPALHRLDSEPGGFQWLVGENSGNSVYAYRRS

SEQ ID NO: 117146 - protein, 754 aa, Unknown
  Bacterial polypetide isolated from the Sargasso Sea
MIETIQADWIKSEAINLENCCNDNPLKILGPHFYEEQWVIRVWMPEAEEIKINFKNKIYKAETINHKWLFEAILPENPNSNYEINITRGGITHTQHDPWSYREEWMGEVDRHLFAEGNHHHIWEKMGAHLIEEKNQKGVMFCIWAPNAKSISIIGDINSWDGRHHPMQKRLGGIWELFMPTMEEGDKYKYEIRTQQGHIYEKADPYGFLHEIRPQNGSIVSRLKNFNWNDSSWISNRDSSSQLNKPISVYEMHLGSWLHESTDNKYLEENGEPRQPVPAADLKPETRLLTYPELTEKLIPYVKERGFTHIELMPISEHPFDGSWGYQVTGWYAPTSRFGTPNEFREFVNKCHEEGLGVILDWVPGHFPKDKHGLAFFDGCHLYEHGDSRIGEHKEWGTLIFNYSRNEVRNFLVANLVYWFEEFHIDGIRVDAVASMLYRDYLRPDGEWIPNENGGNENTEAVKFLQQANHVLFQHFPGALSIAEESTTWPMVTKPTDMGGLGFNLKWNMGWMHDMLDYFEIDPWFRQFHQNSVTFSITYNYTENFMLALSHDEVVHGKSHLLHKMPGDDWKKYANTRALLSYMWTHPGKKTIFMGMEFGQRQEWNVWDDLQWELLEFEPHKGIRNLIDDLNTLYKNEPALWKNDFDPYGFQWIDCDDKSNSVISFMRRENETNEWLVVVANFTPNTHGSYKVGVPVKGFYKEIFNSDASRYGGSNKGNMGGKETINYNIHDYQNALELALPPLSVSIFKHQSKE

SEQ ID NO: 117147 - protein, 654 aa, Unknown
  Bacterial polypetide isolated from the Sargasso Sea
MHHCGSCRNRYTFLLIFLFLLEQMLTDYDLHLLGEGRHWKSYDKLGAQLCTRDGQQGVHFALWAPNAEAVSVVGDFNGWAGHNHMMSKLMPSGFWQLFVPGVGPNTAYKFRVKTTEGTIDRADPHGYSAEVPPQNASLVADLSDYNWSDSQWMEQRQRRDWFSEPISFYEVHLGSWRRPGDDPHRWLTYRDLERELIPYCLEMGFTHLEFLPPTEHPLSASWGYQTIGLFAATSRFGTPQDFMSLIDGCHQAGIGVIIDWVPAHFPKDDHGLRRLDGTALYEHEDPRRGEHPDWGTLIFNYGRNEVTNYLISSALFWLDHYHVDGLRVDAVASMLYLDYSRREGEWLPNRFGGRENLEAIEFLKELNVQVHHHFPGTLTIAEESTAWPGVSRPTHTGGLGFSLKWNMGWMNDTLRFMKQDPIHRKFHHDELTFSLIYAFHENFVLPLSHDEVVHGKGSLLSQMPGDRWQQFANLRLLYSFMWFHPGKKLLFMGNEFGQPQEWDFDKSLQWHLLRGDSHRGLSQTVVELNRLLREETSLHQIDFDGQGFEWIDCQNWQESIITFLRKGVAQKDSLLIVCNFTPVPRENYRIGVPAANHYVEIFNSDAAHLGGSNIINGDRLMCEQIAQHGREHSVSLTVPPLAAVALKPLDAGNS

SEQ ID NO: 117148 - protein, 608 aa, Unknown
  Bacterial polypetide isolated from the Sargasso Sea
AGCQLRTVVHLDQQVEGVRFAVYAPSATAVSLIGDFNFWDGRRHPMQRSQCGHWVLFVPGLKAGDRYKFELKDPAGNRLPHKSDPVGFYCEQYPSFASVVYDHDQYQWQDAAWRESQLNDKREQPLSIYELHVGSWKRHPNGDSLSWRELAVELVDYVKGMEYTHIELLPVSEHPFSGSWGYQPVGMFSPTSRYGTADDFKYFVDQCHQAGIGIILDWVPAHFPSDAHGLARFDGTPLYEYEDPRRGWHPDWNSYIYDFGRNTVRQFLVASALFWLDKFHVDGLRVDAVASMLYLDYSRNAGEWVPNVDGGNHNYEAISLLKWTNEEVYGKYPHAMTIAEESTAFAGVSRPTFLGGLGFGFKWNMGWMHDTLTYMQKEPIHRRYHHNDMTFSMVYHYDENFILSLSHDEVVHGKHSMLYKMPGDEWQQAANLRAYMGFMYAHPGKKLNFMGTEIAQSNEWNHDAQLPWHLLQYPKHGGQQRLIHDLNHLYRHEPALYQADYEQNGFRWLDHNDADNSIFAWLRADKQGANPLVVACNFTPVPRLAYRLGVPAAGHYRVVLNTDSEHYWGSNYDVGLVFVAEPTPWQGMMHSIVLDLPPLATLFIKQES

SEQ ID NO: 117149 - protein, 333 aa, Unknown
  Bacterial polypetide isolated from the Sargasso Sea
MNEICTSSQQENDLKTIQSLLTGDCHFPRSWLGFHEETGEPKQKEWVVRVWEPSAVEVKIDWNPGKYHALGEPMQRLDDAGIFEWRGKSLSNRSPYLLHCRFEDGSHYRRYDPYYFKVHFEELDQHLFEEGTHLRLFDKLGAHLKEIEGIWGTRFTVWAPNAKRVSVVGEFNHWNGLQHPMQAVGSSGIWELFLPGIGEGMLYKFEIKGQNGEVFLKSDPFAFASEFRPSTASRVANFEDYVWQDESWMENRTRQDPLKQPINIYEVHLGSWKRKADQENRFLTYREAVEELIPYTKEMGYTHLELMPLGEHPLDASWGYQVTSYFAPSSRYG

SEQ ID NO: 117150 - protein, 500 aa, Unknown
  Bacterial polypetide isolated from the Sargasso Sea
TLKATRFAVFAPNASSVSLIGDMNQWDGRRHPMQRTECGHWVLLVPEVGAGVRYKFEIKDSFGNLLPHKADPLAFAAEQYPSHASLVFDHSQYKWQDQKWQERTVDPYHEAMSIYELHPGSWKHNQHGEPLTYTELALELIPYVLDMGYTHIELLPVMEHPYSGSWGYQPLGLFAATSRFGTPDQFKAFVDACHQAGLGVILDWVPAHFPEDAHGLARFDGSHLYEYEDPRRGWHPDWNSCIYDYGKDPVRQFLVASALFWLDYFHIDALRVDAVASMLYLDYSRRDGEWVPNVDGGNHNYEAISLLRWLNTEVYRQYPKAMMIAEESTSFDGVTRPVDLGGLGFGFKWNMGWMNDTLRYIKKDPAYRKFHHNDLTFSMVYAYNENFILPLSHDEVVHGKGSIINKMPGDEWQQAANLRAYYAFMFAHPGKKLNFMGNEFGQGTEWDHNQQLPWYLLSFDKHRGVQQLFRDLNLTYKACPPLHQLDHEAAGFRWINYQDA

SEQ ID NO: 117151 - protein, 754 aa, Unknown
  Bacterial polypetide isolated from the Sargasso Sea
MIETIQADWIKSEAINLENCCNDNPLKILGPHFYEEKWVIRVWMPEADEVKINFKNKTYKTESINHKWLFEAILPENPNHNYEINISRGGITHTQHDPWSYREEWMGEVDRHLFAEGNHHHIWEKMGAHLIEENNQKGVMFCIWAPNAKSISIIGDINSWDGRHHPMQKRLGGIWELFMPSMKEGDTYKYEIRTQQGHIYEKADPYGFLHEIRPQNGSIVSKLKNFNWNDSSWISNRDSSSQINKPISVYEMHLGSWLHESTDNKYLEDNGEPRDPVPAADLKPGTRLLTYPELTKKLIPYVKERGFTHIELMPISEHPFDGSWGYQVTGWYAPTSRFGTPNEFREFVNKCHEEGIGVILDWVPGHFPKDKHGLAFFDGCHLYEHGDSRIGEHKEWGTLIFNYSRNEVRNFLVANLVYWFEEFHIDGIRVDAVASMLYRDYLRPDGEWIPNENGGNENIEAVKFLQQANHVLFQHYPGALSIAEESTTWPMVTKPTDMGGLGFNLKWNMGWMHDMLDYFEIDPWFRQFHQNSVTFSITYNYTENFMLALSHDEVVHGKSHLLHKMPGDDWKKYANTRALLTYMWTHPGKKTIFMGMEFGQRQEWNVWDDLQWELLEFEPHKGIRNLIDDLNVLYKNEPALWKNDFDPYGFQWIDCNDKSNSVISFMRRENDTNEWLVVVANFTPNTHGSYKVGVPVEGFYKEIFNSDGSRYGGSNKGNMGGKETINYNIHDYQNALELALPPLSVSIFKHQSKE

SEQ ID NO: 117152 - protein, 754 aa, Unknown
  Bacterial polypetide isolated from the Sargasso Sea
MIETIQADWIKSEAINLENCCNDNPLKILGPHFYEEQWVIRVWMPEADEVKINFKNNTYKAESINHKWLFEAILPENPNHNYEINISRGGITHTQHDPWSYREEWMGEVDRHLFAEGNHHHIWEKMGAHLIEEKNQKGVMFCIWAPNAKSISIIGDTNSWDGRHHPMQKRLGGIWELFMPTMQEGDTYKYEIRTQQGHIYEKADPYGFLHEIRPQNGSIVSKLKNFNWNDSSWISNRDSSSQINKPISVYEMHLGSWLHESTDNKYLEDNGEPRDPVPAADLKPGTRLLTYPELTEKLIPYVKERGFTHIELMPISEHPFDGSWGYQVTGWYAPTSRFGTPNEFREFVNKCHEEGIGVILDWVPGHFPKDKHGLAFFDGCHLYEHGDSRIGEHKEWGTLIFNYSRNEVRNFLVANLVYWFEEFHIDGIRVDAVASMLYRDYLRPDGEWIPNENGGNENIEAVKFLQQANHVLFQHFPGALSIAEESTTWPMVTKPTDMGGLGFNLKWNMGWMHDMLDYFEIDPWFRQFHQNSVTFSITYNYTENFMLALSHDEVVHGKSHLLHKMPGDDWKKYANTRALLTYMWTHPGKKTIFMGMEFGQRQEWNVWDDLQWELLEFEPHKGIRNLIDDLNVLYKNEPALWKNDFDPYGFQWIDCNDKSNSVISFMRRENDTNEWLVVVANFTPNTHGSYKVGVPVEGFYKEIFNSDGSRYGGSNKGNMGGKETINYNIHDYQNALELALPPLSVSIFKHQSKK

SEQ ID NO: 117153 - protein, 725 aa, Unknown
  Bacterial polypetide isolated from the Sargasso Sea
MSVTQLASASCSSPFSVLSWQQGTTKGLMIRAYLPDAAKVEVFDFATRKSLGQMAAKPVLHGLFELELPKKRKASPYYFQIETPHHHGYELVDPYQFQDEAYYAVHFVNSKPENLYKQLGAQLIELNLGKKKLNATRFAVFAPNASSVSLIGDMNQWDGRRHPMQRTECGHWVLVMPEVGAGVRYKFEIKDAFGNLLPHKADPLAFAAEQYPSHASLVFDHSQYKWQDKTWQERHFDPYHEAMSIYELHPGSWKHNQHGEPLTYTELALELIPYVLDMGYTHIELLPVMEHPYSGSWGYQPLGLFAATSRFGTPDQFKAFVDACHQAGIGVILDWVPAHFPEDAHGLARFDGSHLYEYEDPRRGWHPDWNSCIYDYGKDPVRQFLVASALFWLDYFHIDALRVDAVASMLYLDYSRRDGEWVPNIDGGNHNYEAISLLRWLNTEVYRQYPKAMMIAEESTSFNGVTRPVDLGGLGFGFKWNMGWMNDTLRYIKKDPAYRKFHHNDLTFSMVYAFNENFILPLSHDEVVHGKGSIINKMPGDEWQQAANLRAYYAFMFAHPGKKLNFMGNEFGQGTEWDHNQQLPWFLLSFEKHKGIQQLFRDLNLTYKACAPLHQLDHEPAGFRWINYQDAEHSTLSFYRLDQQGQAVYVVSNFTPIPRSAFRLSVAEQGEYEVILNTDSEYYWGSNYPVGEYLPAFPAAAFGLDYMVQLDLPPLSTLYVRRKSS

SEQ ID NO: 117154 - protein, 555 aa, Unknown
  Bacterial polypetide isolated from the Sargasso Sea
YLHFGAHFTNQQDVDGVRFCLWAPNAASVSIIGEFNFWQANRHFMRFHPASGVWELFIPELKADMCYKFAITAQSGEVIEKADPYAFKMQQAPGTASVLQYKPEAIALSEQAISNRQKRNHIDAPISIYEVHLASWQRGEGNRYLSYTELADKLVSYALEMNFTHLQLMPISEYPFDGSWGYQPVGLFAPTSRFGDYNSFKYFVEQCHKYNVGILLDWVPGHFPSDPHGLHRFDGTHLYEHADMRQGFHPDWNTYIYNYDRPEVKSFLISNAMYWLHQFGLDGLRVDAVASMLYLDYSRKEGEWIPNCYGGRENLGAIECLKQVNLRSYKNNPGIMMVAEESTAWPGVTQSVEHNGLGFGYKWNMGWMNDSLLYMQRDPLYKQHHHHEITFSMVYAFSENFILPLSHDEVVHGKSALIEKMPGDDWQKFANLRAYYAFMWAHPGKKLLFMGGEIAQRAEWGHDHSIDWHLLEHESHKGIKQTVKTLNEVYKNQPALYELDSSAAGFDWIDNNNNEQSILSFVRYAKNAHDFVVVIANFTPMSYQEYTLGVPSKGV

SEQ ID NO: 117155 - protein, 604 aa, Unknown
  Bacterial polypetide isolated from the Sargasso Sea
YRQLGAQLIELDIGTKKIPATRFAVYAPNASAVSLIGDMNSWDGRVHPMQRTECGHWVLVLPEVAQGVRYKYEIKDRHGHLLPHKADPMAFYAEQYPSHASLVFDHQHYQWQDSDWCNRKAVNPLHSPISIYELQAGSWKRQNDNQPLSYRELAEQLIPYVLDMGYTHIELLPVMEHPFDGSWGYQPLGLFAPTSRFGNPDDFKYFVDQCHQAGIGVILDWVPAHFPEDGHGLARFDGSHLYEYEDPRRGWHPDWNSCIYDYGKGYVRQFLVASALFWLEHFHIDGLRVDAVASMLYWDYSRKEGEWIPNIDGGNHNYEAISFFRWFNTEVYSKYPKAMTIAEESTSFPMVSRPVDMGGLGFGFKWNMGWMNDSLRYISKDPAYRRYHHNDLTFSMVYAYNENFILPLSHDEVVHGKGSLLNKMPGDEWQQAANLRAYYAFMFAHPGKKLNFMGNEFAQGREWNHTQSLDWHLLGYDKHRGIQQLFRDLNQTYRRCAPLYELDYQHDGFSWLDHQDADNSTLSFLRRDSQGNTIYVVSNFTPVPRADFLLGVEQPGDYEVILNTDSEYYWGSNYEVGSALHSIAMPYHGKAQHICLQLPPMATL

SEQ ID NO: 117156 - protein, 160 aa, Unknown
  Bacterial polypetide isolated from the Sargasso Sea
MGNELAQAREWNHDSSLDWHLLDYEKHKGIQALYKALNHLYTSTPALYEQDHEPGGFAWLDHNNADQSVVSFVRMSKDAKQKVYVVSNFTPVPRQNFRIGVDDACTLTLALNTDDGAYWGSGYDVASTVNTQTIPWNERTHSAEITLPPLATVFYVANVD

SEQ ID NO: 117157 - protein, 319 aa, Unknown
  Bacterial polypetide isolated from the Sargasso Sea
ANEHGGRENLEAVRFLQQANSVLFHYFPGALSIAEESTTWPLVTMPTSMGGLGFNLKWNMGWMHDMLDYFELDHWFRQFHQNNITFSIWYHHTENFMLALSHDEVVHGKSHLLHKMPGSDELKFANVRALLAYMWTHPGKKTIFMGMEFGQRGEWNVWGDLEWDKLQFSEHQGLVNLVDDLNAFYKSEPALWRNDFDHYGFQWIDCDDTNHSVVSFMRRDEKEGNWVVVVCNFTPVSHGNYRIGVPVEGFYSEVFNSDGSRYGGSNLGNLGGKFADDWGMHGYGQSLELCLPPLTVLVFKHDASKKKVAAIHEAGAISG

SEQ ID NO: 117158 - protein, 354 aa, Unknown
  Bacterial polypetide isolated from the Sargasso Sea
ASTTSGRTEVHGFMLASALYWLREYHVDGLRVDAVASMLYRDYSREAGQWIPNRHGGRENLEAIEFLQHLNEVVRSEVPGALMIAEESTAWPGVSRPVQQGGLGFSHKWNMGWMNDSLSYIQQDPMYRLHHHHQITFGLHYAFSERFILPISHDEVVHGKRSLLGRMPGDRWQQFANLRLFLALMWSHPGKKLLFMGCEFGQWREWDHDQQLDWYLLQYPEHAAAQALVRELNRLYREEPALHRLDDQDSGFQWLVGDDARNSVFAWLRKGGEGSASLLVVHNFTPQVLDGYRIGVPHAGRWQVLLNTDDRCWSGSGAGSEGELHSEQMTAHGQSDSLNLQLPPLGALILRPVQ

SEQ ID NO: 117159 - protein, 717 aa, Unknown
  Bacterial polypetide isolated from the Sargasso Sea
WVVRIWMPEADEVKINFKNKTYKAVSINHKWLFEAILPENPNSNYEINISRGGINHTQYDPWSYREEWMGEIDRHLFSEGNHHHIWEKMGAHLIEENNQKGVMFCIWAPNAKSISIIGDINSWDGRHHPMQKRLGGIWELFMPTMKEGDTYKYEIRTQQGHIYEKADPYGFLHEIRPQNGSIVSKLKNFNWNDSSWISNRDSSSQINKPISVYEMHLGSWLHESIDNKYLEDNGEPRDPVPAADLKPGTRLLTYPELTEKLIPYVKERGFTHIELMPISEHPFDGSWGYQVTGWYAPTSRFGAPNEFREFVNKCHAEGIGVILDWVPGHFPKDKHGLAFFDGCHLYEHGDSRIGEHKEWGTLIFNYSRNEVRNFLVANLVYWFEEFHIDGIRVDAVASMLYRDYLRPDGEWIPNENGGNENTEAVKFLQQANHVLFQHFPGALSIAEESTTWPMVTKPTDMGGLGFNLKWNMGWMHDMLDYFEIDPWFRQFHQNSVTFSITYNYTENFMLALSHDEVVHGKSHLLHKMPGDDWKKYANTRALLTYMWTHPGKKTIFMGMEFGQRQEWNVWDDLQWDLLEFEPHKGIRNLVDDLNELYKNEPALWKNDFDPYGFQWIDCNDKSNSVISFMRRENDTNEWLVIVANFTPNTHGSYKVGVPLEGFYKEIFNSDGSRYGGSNKGNMGGKETINYNIHDYQNALEIALPPLSVSIFKHQSKK

SEQ ID NO: 117160 - protein, 390 aa, Unknown
  Bacterial polypetide isolated from the Sargasso Sea
MQLAQQFEQVLCSQPFSHLGVVKNQQKSVLRVWRPNVSKITIEWENAALANVTVTSKNGLFETPLPKEYQGEVYRVIAEGLNDDKGYIDPYQFSEQAYHAVHYIDSKPSNLYEQAGAQLLTLTSSQGDAIKGVRFCVFAPNASTVSLIGDFNQWDGRTHPMEKTSMGYWVLFVPELAEGERYKYHIKDAHGHDLPHKADPLGFSAEQYPSHASKIYNHNNYEWNDSAWMEKRKGNKYNSPMSIYEVHLGSWKRPGIDTDARYLTYKALADDLISYVSDMGYTHVELLPISEFPFDGSWGYQPVGMFAPTSRFGNPDEFKYFVDKAHQAGIGVIIDWVPAHFPEDGHGLARFDGSCVYEYEDPRKGWHPDWNSCIYDFGKDTVRQFLVANA

SEQ ID NO: 117161 - protein, 407 aa, Unknown
  Bacterial polypetide isolated from the Sargasso Sea
MTQAQTYFYDGSDVALLNGQYTDVFSLLGMHSINEGKALVVRCFLRNAQKVDVISLKDGRKVASLERVNEAGLFAGTLGRRVKPFLYSLRVIYPLCELDIIDPYQFGSLLDSQDLYLFGEGSSEQAYRFLGANWRQVDSVEGVHFCVWAPNAKRVSVVGDFNHWDDTRHVMRQHLGNGLWEIFLPDVAEGAHYKFDLVYQNGERHAKSDPMATQMECAPHNASIVPKKHQHPWADSQWMHKRASTAWHRAAMSIYEVQLGSWRRKGEFGEQYFDYQDLIQQLIPYVKEQGFTHIELMPVSEYPFDGSWGYQPVGLYAPTHRFGDANGLKAFIDACHQAEIGVLLDWVAAHFPKDPHGLVRFDGTCLYEHEDPRKGTHPDWDTLIYNYDRGEVRSFLLSNACYWLREF

SEQ ID NO: 117162 - protein, 373 aa, Unknown
  Bacterial polypetide isolated from the Sargasso Sea
MIETIQADWIKSEAINLENCCNDNPLKILGPHFYEEQWVIRVWMPEADEVKIKFKNNTYKAENINHKWLFEAILPENPNSNYEINISRGGIKHTQHDPWSYIEEWMGEVDRHLFAEGNHHHIWEKMGAHLIEEKNQKGVMFCIWAPNAKSISIIGDINSWDGRHHPMQKRLGGIWELFIPTMQEGDKYKYEIRTQQGHIYEKADPYGFLHEIRPQNGSIVSKLKNFNWNDSSWISNRDSSSQINKPISVYEMHLGSWLHESTDNKYLEDNGEPRDPVAAADLKPGTRLLTYPELTEKLIPYVKERGFTHIELMPISEHPFDGSWGYQVTGWYAPTSRFGTPNEFREFVNKCHEEGLGVILDWVPGHFPKDKHG

SEQ ID NO: 117163 - protein, 723 aa, Unknown
  Bacterial polypetide isolated from the Sargasso Sea
MLAGRHPDPFACLGPHGQADQVVVRALLPGAKSVHALSPEGAELGTLACVDRAGCFAGTIPRNGGAPHYLLAIDWPDARQVIDDAYAFGTLLDDAVLARFSAGDPAAVLDCLGATPTCIDDTDGVRFAVWAPNAQRVSVVGDFNGWDGRRHPMRLRRPSGVWELFVPGIGAGECYKYELRAADGRVLPHKADPCARATEAPPRTASVVADVAALDAFAWHDDSWMHARPHADRYRVPWSIYEVHAESWLRVPEEMNRSATWDELAERLIPYVKGMGFTHVEFMPIAEYPFGGSWGYQPLAQFAPSARFGPVDGFARFVDRAHAAGIGVLVDWVPAHFPNDAHGLAQFDGSALYEHADPREGMHPDWNTCVFNVGRTEVGAFLVASALAWARRYHVDGIRVDAVASMLYRDYSRAEGEWVPNVHGGRENLESVAFLRMLNDTLHGAAAPAGVVTVAEESTAWPGVTAPTGDGGLGFDFKWNMGWMHDTLAYLHEDPIHRRYHHDRMTFGLVYAFSERFVLPLSHDEVVHGKGSLVAKMPGDAWQRLATLRAYFGFMWAHPGKKLLFMGSEFAQWAEFAHDATPHWDLLDAPAHRGVQRLVRDLNRTYAAEPALHALDCHAAGFSWLIGDDRDNSVFAFARRDDAGHLVVAVCNFTPVPRAGYRVGLPAPGHWRELMNTDAAPYGGTNAGNDGAVWAEAVPAHGEAWSATLRLPPLATLWLTPAS

SEQ ID NO: 117164 - protein, 744 aa, Unknown
  Bacterial polypetide isolated from the Sargasso Sea
MTQAQTYFYDGSDVALLNGQYTDVFSLLGMHSINEGKALVVRCFLRNAQKVDVISLKDGRKVVSLERVNEAGLFAGTLGRRVKPFLYALRVTYPLCQLDIIDPYQFGSLLDSQDLYLFGEGSSEQAYRFLGANWRQVDSVEGVHFCVWAPNAKRVSVVGDFNHWDDTRHVMRQHMANGLWEIFLPDVAEGAHYKFDLVYQNGERHAKSDPMATQMECAPHNASIVPKKHQHPWADSQWMDKRASTAWHRAAMSIYEVQLGSWRRKGEFGEQYFDYQDLIEQLIPYVKEQGFTHIELMPVSEYPFDGSWGYQPVGLYAPTHRFGDANGLKAFIDACHQAEIGVLLDWVAAHFPKDPHGLVRFDGTCLYEHEDPRKGTHPDWDTLIYNYDRGEVRSFLLSNACYWLREFHLDGLRLDAVSSMLYLDYSREPGQWLPNAYGGRENLEAIHFLQMLNQRLYQAFPGICMIAEESTAFAGVTKPTDSGGLGFGFKWNMGWMNDSLSYLGRDPIYRQYHHNQLTFSLMYAYSEQFMLSISHDEVVHGKGSLLHKIPGDDWQKFATLRAYYGFMWGHPGKKLLFMGSEFAQRDEWNHNHSLDWHLLAFEPHQGVQRWLRDLNWLYRQFPALSVLDYESQGFRWLDCDNGRDSIFSFVRYGEGSDVPLVFVVNMTPTLHQGFRIGLPQGGDFCEYLNSDSHLYGGSNQGNAGKVIAEDLPWQGMASSALITVPPLGCLILGPATDAPRDTSL

SEQ ID NO: 117165 - protein, 268 aa, Unknown
  Bacterial polypetide isolated from the Sargasso Sea
MRDIPDTPLKIAIVAGEKSGDELGAPLMKSLKSINPSVEFVGVGGAKMTSEGLESYFDMTEISVMGIIEPLLNLRKLLKLRKGLKKYLLHHKPDIFIGIDSPDFNLPISNFLKKNLQIKTIQYVSPSVWAWRKGRIKSMESSIDSVLTLFPFEETAYSNSKIKTCYVGHPLSYEIDITNMEIESKVQNSIALLPGSRTSEILLMGDLMIKAAKKLKLMNPNYQFFMPLSDASHLDLFKEDMKEFINITYENSQDILKKSSMAIITSGT

SEQ ID NO: 117166 - protein, 76 aa, Unknown
  Bacterial polypetide isolated from the Sargasso Sea
MVATAETGQVSSRKVTIAIIAGEASGDILGAGLIRSLRKRYPKARFVGIGGDEMIAEGFHSLVPNGRLSVMGLGES

SEQ ID NO: 117167 - protein, 101 aa, Unknown
  Bacterial polypetide isolated from the Sargasso Sea
MSIKVGIVSAEPSGDLLGSKLIEQIKDKFGDIEVIGVGDGDLSHFGTSKNRKIIEVMGFIDPMKNFFNIKKFQKKLIKQFKDKQIDIFIGIDAPDFNLKSQ

SEQ ID NO: 117168 - protein, 152 aa, Unknown
  Bacterial polypetide isolated from the Sargasso Sea
NIPNIQVIIGKAPGVTLPIIPEFIKIEEIDPQLTMFYGDAALVASGTATLEAAVLDIPMVVSYRFSLPTWIFAKKMATVSYASIVNLIADDLIVPEFIQSEMTPENLTNAVIPLLNKTAERKNMLLGYEKVRRTLGIPGVYDRAAKAILNRL

SEQ ID NO: 117169 - protein, 294 aa, Unknown
  Bacterial polypetide isolated from the Sargasso Sea
QGVTHFTASSDEDALDLTRELIGLLPSNNLSGTPLKNTGDSATRLCESLDSIVPDDPNKPYDVNEVISEILDSGAFLEVQASFAANIVVGFGRLNGSTIGVVANQPKVLAGCLDIDASTKAARFVRFCDAFGIPLVTLVDVPGFLPGANQEWGGIIRHGAKLLYAYSEATVPKMTVIMRKAYGGAYDVMCSKHIRADYNVAWPSAELAVMGADGAVQIIHRRRIHAAGNPEEERQRLVDEYTERFANPYQAAAMGYIDDVIEPSDTRNRLVKALAMLLDKEETRPARKHGNIPL

SEQ ID NO: 117170 - protein, 192 aa, Unknown
  Bacterial polypetide isolated from the Sargasso Sea
FEKHLFKKDRPVLILLPGSRQQEVDHHWPIFLDTITDLNKKFPGLQTVVIKSDNIELLPMPEHIKIEFSSEYAMPNGTAAISASGTATLECAMANLPTVVCYKMSYLNWILFNLFGKVKYISIVNLIAKKKIIPELIQHKMTSKNIIKKIFPYLDIKSEKRIKTINQFDILRKNLGKQGVFDRIANFILREN

SEQ ID NO: 117171 - protein, 175 aa, Unknown
  Bacterial polypetide isolated from the Sargasso Sea
MSIKIGIVSAEPSGDLLGSRLIEQIKDKFGDIEVIGIGDGDLLQHGTSKNRKIIEVMGFIDPLKNFFNIKKFQKKLIKQFKDEQIDIFIGIDAPDFNFEIHKQLHRENILTVHVVCPSVWAWRKGRAKKFKFVDYMLCLFPFELDYCNEVNKGAICIGHPLLSNKNLYTGDKEDE

SEQ ID NO: 117172 - protein, 235 aa, Unknown
  Bacterial polypetide isolated from the Sargasso Sea
KKHHMPASFVGHPIAYEYDIKVNKNLEKKSLGLEKSSDRANKSIFIALLPGSRVSEVARMLSIFLAVADKLYKKNENLKFLIPRAHKNLKNLLDNNLSKYPDLPVKVFEGEAQAVLKSSQIALITSGTATLEALMAKTLMVVAYVAPSISYLVYKHLVKTPYIGLPNILAGKMIVPEFIQKQATVDNLVVSAQEQIDILYSKEGSNLLAEFAKTHQSLRVRSDVLLDVIARVCKD

SEQ ID NO: 117173 - protein, 374 aa, Unknown
  Bacterial polypetide isolated from the Sargasso Sea
MAHFVVVAGEPSGDVLGAKLISDLKKINPDHQFSGIAGPRMIAEGCEPWFEISDLSVMGLTEVIKHLPRILKIRKAVIEKSIDIEPDAYIGIDYPEFNLSIEKSLKKRKIKTIQMVCPSFWAWREARANKFKSAIDLMLCLFPFEPELLKDKGVEAAFIGHPLAEEIKMDSSHRSSSDIESVNIALLPGSRRKEIDFHLEVILDAAVMIRDQLSITKKEVVFFIPTRFKEMEDWIKSFKKFNDLKIKIFKETSDCLSDSDLIITKSGTSTLESALYKKKTIVVYKMSAVSFFLLTKLNLINVSYASLPNILLGNECFKEFIQDDFKAEGIANEAIRLLQVDTDAYLIPLKKLHEDLRSPEQDASSMITRFLGLS

SEQ ID NO: 117174 - protein, 382 aa, Unknown
  Bacterial polypetide isolated from the Sargasso Sea
MLRIGIVVGEPSGDTLGAGLVRELRKKNKNLKIEGIGGEKLKNEKMDLLFPMEILSVMGFTEVLGRYFELRSIRNKLIKHFLKNPPDIFIGIDSPDFNLYIEKRLRKAGIKTIHYVSPSVWAWRMGRVKKIKDSVDLILNVFPFETQIYDRYGVPNKYIGHPLADLLSSTPNIESSRNSLGLPLDKRIIALLPGSRRNEIKRIAAPLLKASLIAKEKDKNLLFICALIDNDSLEIFKKIKNKIAPNLDVNVYIAKTHQAIESSDIVMLASGTATLESMLLYKPMIVAYKMSWLTYLIVKLLAKLPYASIPNILANDCIVPECLQYRCTPKILASELDKFLNSTKNIKKITSYYEKFSKKLRKQADYGAANAVLQLIENDKLN

SEQ ID NO: 117175 - protein, 207 aa, Unknown
  Bacterial polypetide isolated from the Sargasso Sea
MADSPRVAMVAGETSGDLLAGLLIDGMQAHWPGLQSSGIGGPQMARRGFAAWWPSDKLAVHGYSMEVLRRLRELLRIRKQLRERLLKDRPDVFIGVDAPDFNLGLEADLRAAGIKTVHFVCPSIWAWRADRVEKIRRSADHVLCIFPFEPELLAQHGIAATYVGHPLAGVIPMVPDRTAARAQLGLRDEDEVLAILPGSRSSEIQYI

SEQ ID NO: 117176 - protein, 359 aa, Unknown
  Bacterial polypetide isolated from the Sargasso Sea
MSIKVGIVSAEPSGDLLGSRLIEQIKDKFGDIEVIGVGDGDLLQHGTSNNRKIIEVMGFIDPLKNFFNIKKFQKKLIKQFKDEQIDIFIGIDAPDFNFEIHKQLNRENILTVHVVCPSVWAWRKGRAKKFKFVDYMLCLFPFELDYCKEVNKGALCIGHPLLTNKNLYTGGKEDDLICLLPGSRKSEIEHHLPVMIKSFKLFSENTKFKAIIPAYDQATLELINAYIKNEVSISAKVVKAREIMREASLAICCSGTATLECMLAEIPTTVIYKTNFINYWIYKILVNAKFVALPNLIAGKQVMKELLQNKMTVENIVEDLKNNFKNKDRISTELKKASNLLTEPNFSGFLDQINDYCRR

SEQ ID NO: 117177 - protein, 183 aa, Unknown
  Bacterial polypetide isolated from the Sargasso Sea
SVALLPGSRKSEISLLADEMIKAAKELRRKDKSYKFYMPLSDKKHLDLINEPLEDLVKVSFNNSQEVLSNCEIGIITSGTATLEASLLRTPCVTLYKTGWLSFRLIKPLLRIDNFSLPNLLAGKELLPELLQDEVNVVNIINAIEKINLKGLDCYYKEFHTIHENLKAGSSETAAKEISHLID

SEQ ID NO: 117178 - protein, 144 aa, Unknown
  Bacterial polypetide isolated from the Sargasso Sea
KQIKQQVAPDLVVQLEIGKARTVLTAADAVFIASGTATLEAMLAKTAMVVGYKMNWLTHQIAKWLVKLKFFSLPNLLADKALVTELLQEQVTVDNLVKAMAPLLQDQKAQQACVGSFTELHQLIRCNASEQAAAAIAKVMENPV

SEQ ID NO: 117179 - protein, 226 aa, Unknown
  Bacterial polypetide isolated from the Sargasso Sea
ITYFPFEEGAYKNSNVRICYAGHPIAYRLNQDQDELIKRKELRSVALLPGSRKSEISLLADEMIKAAKELRRNDESYKFYMPLSDKKHLDLIKEPLEDLVKVSFNNSQEVLSKCEIGIITSGTATLEASLLRTPCVTLYKTGWLSYRLIKPLLQIDHFSLPNLLAGKELLPELLQDEVNVKNIINAIEKISLKGLDYYYKEFHDIHENLKAGSSETAAKEISHLID

SEQ ID NO: 117180 - protein, 315 aa, Unknown
  Bacterial polypetide isolated from the Sargasso Sea
IKDLKRIFPSSSFIGVGGRRMQQEGLDSFFEMRKISVMGIIEPLLKISELLTLRKKLKEYLSAEAPDIFIGIDSPDFNLAISRHLKMQKIKTVQYVSPSIWAWRKGRIKTIEKSVDKVLTLFPFELLAYSESSVEASFVGHPLAHKIPRVLNKESIRNTKFHLNEGEKMIALLPGSRKSEVKMIGEVLLKTAKLIKELEEKACFFMPLADIGHKELIPNWQDYPWVNFSEKNAQDVLAGSHLGIVTSGTASLEAALFKTPVVVVYKTSWITYLLVKPLLRIKQFSLPNLLAGSSILPELLQYEVTDKNLFNAYKD

SEQ ID NO: 117181 - protein, 134 aa, Unknown
  Bacterial polypetide isolated from the Sargasso Sea
MSVTDLSHATISERKITFGIIAGEASGDILGAGLIRSLRQRYPRARFVGIGGEEMVAEGFHSLVPMERLSVMGLVEVLGRIRELFSIRARLLDYFFATPPDVVIGIDSPDFTLAIERRCHEAGILSVHYVSPSG

SEQ ID NO: 117182 - protein, 231 aa, Unknown
  Bacterial polypetide isolated from the Sargasso Sea
FEVDIYREAGIDAMCVGHPLVDELQQLPVAEELRVAMGLPPTKTLLAVLPGSREGEVRHLMPVFADAMQLLQARHTNLHFVIPAANAARHQQIESMLQSKSLSVSLIRGQGREVMRCSDAIMIASGTATLEAMLLRKPMVISYRMASLSWGILSRLVKTPHVGLPNVLAGEEIVPELLQHHATASRLADAVSGLLEGDGARQVGRFDELAGLIGGNFAERSIDALLPLVKE

SEQ ID NO: 117183 - protein, 153 aa, Unknown
  Bacterial polypetide isolated from the Sargasso Sea
MPVKPLRIAVVAGEPSGDVLAAGLITALKRRYPDAVFEGIAGPNMQAAGCTSLFDIEILSVMGLVEVLSSIRPILKVKNELIAHFIKHPPDVYIGVDAPDFNLRVETALKQQGIKTVHYVSPTVWAWREKRIFKIAKATNRVLGIFPFEQAVY

SEQ ID NO: 117184 - protein, 307 aa, Unknown
  Bacterial polypetide isolated from the Sargasso Sea
MCAGEASGDLLAGSILRAWQRRGTSLDITGIGGDQMQAAGLESLCAIDRLAVVGLAEPLKRLPELLGIRRRLIAQQQRVAPDLFVGVDSPDFNLPVERRLRASGIPTAHLVGPSVWAWRRRRLRGIRESVDRMLCLLPFEVDIYREAGIDAVCVGHPMVDELQQLPAADELRAAMRLPSNKTLVAVLPGSREGEVRHLMPVFADAMQLLQARHTGLHFVIPAANAERHQQIESVLQSTALSVSLIRGQGREVMRCSDAIMIASGTATLEAMLLRKPMVISYRMASLSWAILSRLVTTPYVGLPNVLG

SEQ ID NO: 117185 - protein, 219 aa, Unknown
  Bacterial polypetide isolated from the Sargasso Sea
VRFVGHPLADAIPQQADRAAAREALDLPQDEPVVALMPGSRGGEVARLGELFLDAAIRLRALRPGIHFLLPCATPERREQLEQMLAGRDLPLTLLNGRSHEALAACDAVLIASGTATLEALLYKRPMVVAYRVAPLTYRILKRLVKSPYISLPNLLAERLLVPELIQDAATPEALAQAVAPLIDGGQVQTEGFDVIHRALRRDASVSAAEAVLKLAGRG

SEQ ID NO: 117186 - protein, 191 aa, Unknown
  Bacterial polypetide isolated from the Sargasso Sea
MIKTKEAKSVALLPGSRKSEIALLADEMIRTAKKLKNIDSSYKFYMPLSDKGHLDLINEPFEDWVEVSFNNSQEVLSKCQIGIITSGTATLEALLLRTPCVTLYKTNWLSYRIIKPLLSIENFSLPNLLSGNTFLPELLQDEVNSENIIESLNVINSKGMDYYYKEFHKIHENLKAGSSETAANEISNLID

SEQ ID NO: 117187 - protein, 255 aa, Unknown
  Bacterial polypetide isolated from the Sargasso Sea
MSRPIRIGMVAGEPSGDVLAAGMVAELKRQYPDAVIEGIGGPNMINAGFHSLFDMETLSVMGLVEVLSHLPAILKVKKQLLAHFEQNPPDIFVGIDAPDFNLRVEKALKARGIKTMHYVSPTVWAWREKRIHKIAKATNRVLGLFPFEQQVYDKYHVPYTFVGHTMADAIAIEPDQNAARQELGVDSNASVLAVLPGSRRGEVDTLLPVFLETIEAIHAKRSDIQFLIPAANEHRLAQIKALLLEADNAEERLPI

SEQ ID NO: 117188 - protein, 389 aa, Unknown
  Bacterial polypetide isolated from the Sargasso Sea
MPLPTTQLRLAMVAGEPSGDLLGASLLGGLRERLPESAQYYGIGGPRMIAHGFDSHWQMDKLTVRGYVEALGQIPEILRIRGELKRQLLAERPDAFIGVDAPDFNFNVEQAARDAGIPSIHFVCPSIWAWRGGRIKKIAKSVDHMLCLFPFEPAILDKAGVASTYVGHPLADEIPLEPDTHGARIALGLPADGPVIAVLPGSRRSEIALIGPTFFAAMALMQQREPGVRFVMPAATPALRALLQPLVDAHPQLALTITDGRSQVAMTAADAILVKSGTVTLEAALLKKPMVISYKVPWLTGQIMRRQGYLPYVGLPNILAGRFVVPELLQHFATPEALADATLTQLRDDANRRTLTEVFTEMHLSLRQNTAAKAAEAVVRVLEQRKGRA

SEQ ID NO: 117189 - protein, 72 aa, Unknown
  Bacterial polypetide isolated from the Sargasso Sea
MSKKSQLVFAMVAGELSGDILGAGLMAALQKTHPNARFVGIGGPRMEALGFESLFAMEEFSRDGDSRSAITS

SEQ ID NO: 117190 - protein, 389 aa, Unknown
  Bacterial polypetide isolated from the Sargasso Sea
MALNPSPIRVAMVAGEPSGDLLAASLLEGLASHLPASTHYYGIGGPRMIAQGFDAHWPMEKLTVRGYVEVLRHIPGILGIRNELKRQLLAEPPSVFVGVDAPDFNFGLEHPLREAGIPTVHFVCPSIWAWRGGRIKKIAKAVDHMLCVFPFEKALLEKAGVAASYVGHPLADEIPLVPDTLGARRTLGLAESGPIIAVLPGSRRSEIDLIGPTFFAAMEMMQHQEPGLRFVMPAATPALREMLRPLVDAHPGLALTITEGQSQLAMTAADAILVKSGTVTLEAALLKKPMVISYKVPWLTGQIMRRQGYLPYVGLPNILAGRFVVPEILQHFATPQALAEATLKQLRDEANRRTLTEIFTEMHHVLKQNTAQRAAEVVASVIEKRRALP

SEQ ID NO: 117191 - protein, 370 aa, Unknown
  Bacterial polypetide isolated from the Sargasso Sea
MNSSKNIKVAIVAGEKSGDELGGPLMESLKNHFPNVSFIGVGGEKMKLQGLSSVFPMHKISVMGIIEPLLKIKELLSLRRNLKNFFLNEKPDIFIGIDSPDFNLPLSKYLKKELGLKSVQYVSPSIWAWRKGRIKKIEQSVDSVITLFPFEEEAYIDSNVRVCYAGHPLAYRLNQNEKELIKAKEAKSVALLPGSRKSEITLLADEMIRTAKKLKNVDSSYKFYMPLSDRAHLDLINEPLEDWVEVSLNNSEEVLSKCQIGIITSGTATLEALLLRTPCVTLYKTNWLSYRIIKPLLSIENFSLPNLLSGNTFLPELLQDEVNSENIIESLNFINSKGMDYFYKEFHKIHENLKAGSSETAANEISNLID

SEQ ID NO: 117192 - protein, 373 aa, Unknown
  Bacterial polypetide isolated from the Sargasso Sea
MSDSFHSKKIKIAIVAGEKSGDELGGPLMECLKNNFEDVCFIGIGGEKMKRQGLSSLFPMENISVMGIIEPLLKLKALLSFRKELKEFFLLEKPDIFIGIDSPDFNLPISKFLKKELEIKTVQYVSPSVWAWRKGRIKTIEQSVDSVITLFPFEKNAYKDSSVRICYAGHPLAYRFNVDPNKLIKGKEAKSIALLPGSRKSEVSLLADEMVKAAKEIRKRDKSFKFYMPLSEKSHLELINELLEDFIEVSYNNSHEVLSKCEIGIITSGTATLEALLLRTPCVTLYKTNWLSYKIIKPLLSIDQFSLPNLLAGNNLLPELLQDHVDSDNIIRALDEIEKKGLDFYYKEFHRIHDNLRAGSSETAANEVFDLIG

SEQ ID NO: 117193 - protein, 373 aa, Unknown
  Bacterial polypetide isolated from the Sargasso Sea
MIGNTLENTPLKIAIVAGERSGDELGAPLMKSLKSINPSIEFVGVGGSKMTSEGLESYFDMSEISVMGIIEPLLNLRKLLKLRKGLKKYLHHQKPDIFIGIDSPDFNLPIANFLKKNLQIKTIQYVSPSVWAWRKGRIKSMERSIDSVLTLFPFEETAYSNSKIKTCYVGHPLSYKIDINNMEIESKVQNSIALLPGSRKSEILLMGDLMIKAAKKLKLMNPNYQFFMPLSDSSHLDLFNEVIEDFIHISYENSQDILKKSSMAIITSGTATLEAALSFTPCIAVYKTNWLSYLLIKPLLHIDSFSLPNLILGKKILPELLQSEATIEKIISSVNLLEDRGFEFYRNEFTFIKETLMAGGADKASVEVLKLLN

SEQ ID NO: 117194 - protein, 318 aa, Unknown
  Bacterial polypetide isolated from the Sargasso Sea
ESYFDMSEISVMGIIEPLLNLRKLLKLRKGLKKYLLQQNPDIFIGIDSPDFNLPVANFLKKNLQIKTIQYVSPSVWAWRKGRIKSMERSIDSVLTLFPFEETAYSNSKIKTCYVGHPLSYKIDITNMEIESKVQNSIALLPGSRTSEILLMGDLMIKAAKKLKLMNPNYQFFMPLSDSSHLDLFKEDMEDFIHISYENSQDILKKSSMAIITSGTATLEAALSFTPCIAVYKTNWLSYLFIKPFLHIDSFSLPNLILGKKILPELLQSEATIEKIISSVNLLEDRGFEFYRNEFTFIRETLKAGGADKASVEVLKLLN

SEQ ID NO: 117195 - protein, 99 aa, Unknown
  Bacterial polypetide isolated from the Sargasso Sea
MLVKKPMVVGYKLKPFSYWLAQRLVKTEFVSLPNLLAGRMLVPELIQHECTPENLVVEVSKFFEHDNSALVNTFTELHQLIRCNADQQAAEAVAELLGR

SEQ ID NO: 117196 - protein, 181 aa, Unknown
  Bacterial polypetide isolated from the Sargasso Sea
MSRPIRVALVAGEASGDILGSGLMQAIKQRHPGAEFIGVGGARMEAEGLKSYFPMERLAVMGLVEVLGRLFELLGRRRQLARDLIAAQPDVFIGIDAPDFNLGLELKLRRAGIKTVHYVSPSVWAWRQKRVLKIREACDLMLTLFPFEAQFYDEHKVPVRFVGHPLADAIPQQADRAAARE

SEQ ID NO: 117197 - protein, 310 aa, Unknown
  Bacterial polypetide isolated from the Sargasso Sea
VAGEHSGDILGADLIRALKLLYPHAEFYGIGGERMKAEGFSALFDMEELAVMGIVEVLGRLPRLLKVRKELLQHLTDTQPDVFIGIDAPDFNIPVELKLKAAGIKTVHYVSPSVWAWRQKRIFKIAKATNMVLALLPFEKAFYDKFAVPCSFVGHTLADQMPLQPDKAAAKTELGLNPEAPVLAIMPGSRTNEIKLLAADYLLAAQELKRQQPDLQLICNMVTEQKAALFRQIKQQVAPDLVVQLEIGKARTVLTAADAVFIASGTATLEAMLAKTAMVVGYKMNWLTHQIAKRLVKLKFFSLPNLWLIK

SEQ ID NO: 117198 - protein, 262 aa, Unknown
  Bacterial polypetide isolated from the Sargasso Sea
AGIKTVHYVSPSVWAWRQKRVLKIREACDLMLTLFPFEAQFYDEHQVPVRFVGHPLADAIPQQADRAAAREALDLPQDEPVVALMPGSRGGEVARLGELFLDAAIRLRALRPGIHFLLPCATPERREQLEQMLAGRDLPLTLLNGRSHEALAACDAVLIASGTATLEALLYKRPMVVAYRVAPLTYRILKRLVKSPYISLPNLLAERLLVPELIQDAATPEALAQAVAPLIDGGQVQTEGFDVIHRALRRDASVSAAEAVLK

SEQ ID NO: 117199 - protein, 237 aa, Unknown
  Bacterial polypetide isolated from the Sargasso Sea
MRIALVAGEASGDLLGAGLVRELKARFPNAEFAGIGGDAMRSAGCQTWHDASELAVMGLTEVLRHLPRLLKLRSAFRQRALEWQPDVFIGIDAPDFNLGIERWLKQRGVRTVHYVSPSVWAWREKRAEKIGNSADLVLCLFPMEPPIYARHGIDARFVGHPMADDIPLQGNREEARAALGLPTSAKVLAVLPGSRLGEISRLGEPFFEAAWQVSERIPGLHVVVPAANPACRQLIEE

SEQ ID NO: 117200 - protein, 275 aa, Unknown
  Bacterial polypetide isolated from the Sargasso Sea
LAVMGIVEVLGRCPRLLQVKREILAALLADKPDVFVGIDAPDFNLPVELKLKQAGIKTVHYVSPSVWAWRHKRIFKIAAATDMVLSLLPFEKAFYDKYQVPCTFVGHTMADNMPLDVDKAKAKVELGLDPARPVLAIMPGSRTNEIKLLAPDFLQAALLLQQQIPQLQFVTNMVTETKAGQFNAIKQQLAPELAVTSFTGQARQVLLASDATFITSGTATLEAMLAKCLMVVAYRANWLTYQIGKRLVKLSHFSLPNLLAGHGMVTELLQHEVTP

SEQ ID NO: 117201 - protein, 390 aa, Unknown
  Bacterial polypetide isolated from the Sargasso Sea
EQLQNAAPVRRIGMVPGEASGDLLASLLLKGLRAQLPADIAYNGIGGARMTEQGFQSNWPMHNLSVNGYVEVLGQLREILTIRKELKQNLLTAPPLAFIGVDAPDFNFNVEIAMRQAGVPVVHFVSPSIWAWRAGRIKTIARAVDHILCLFPFEPEIYAKAGIPATYVGHPLADEIPLVPDVEGARTRLGLPLGRKVVAVLPGSRNSEVKHLGPTLFAAMSRMQAVEPELAFVLPAANATLRERIDAMRAEHPGLHLWVVEGQSHAAMEAADVILLASGTATLEAALYKKPMVITYKVPWLTAQIMKRKGYLPYVGLPNILSGRFVVPELLQDDATPEALARETLLQLSDHGNATFLREHFTQMHLTLKQNMAEIGAKVVVDLLRSRSKL

SEQ ID NO: 117202 - protein, 385 aa, Unknown
  Bacterial polypetide isolated from the Sargasso Sea
MSKKSQLVFAMVAGELSGDILGAGLMAALQKTHPNARFIGIGGPRMEALGFESLFAMEELAVMGIVEVLSRLPRLLHVRSSLIKSITELKPDCFIGIDAPDFNIGLELKLKAQGIKTVHYVSPSVWAWRPKRIFKIAKATNMVLSLLPFEKAFYDKHQVPCTFVGHTLADDIPLESDKASARQLLALDPEAEYLAILPGSRGGELKQLAEPFVKAALLIKQQFPDIRFVTPLVNQKRREQFEQALKAYAPDLEIHMVEGKSREVMAAADGILLASGTATLEAMLIKRPMVVAYRVSPLTYQIAKTMMQVNRFSLPNLLAGRDVVPELIQHDCTPEKIAEAVGVELNRDFTPIKAEFERLHQMLRCDASQKAAEAVLALVDAKDVN

SEQ ID NO: 117203 - protein, 389 aa, Unknown
  Bacterial polypetide isolated from the Sargasso Sea
MIKDLNNNHIVKIALVAGEHSGDILGADLIRALKLLYPQAEFYGIGGERMKAEGFQALFDMEELAVMGIVEVLGRLPRLLQVRKELLANLTATQPDVFIGIDAPDFNIPVELKLKAAGIKTVHYVSPSVWAWRQKRIFKIAKATNMVLALLPFEKAFYDKFAVPCSFVGHTLADQMPLQPDKAAAKTELGLKPEAPVLAIMPGSRTNEIKLLAADYLLAAAELKAQQPELQLICNMVTEQKAELFRQIKQQIAPDLAVQLEIGKARTTLTAADAVFIASGTATLEAMLAKTAMVVGYKMNWLTHQIAKRLVKLKFFSLPNLLADQALVTELLQEQVTVQNLVKAMAPLLQDQNAQQACVGSFTELHQLIRCNASEQAAAAIAKVMENPV

SEQ ID NO: 117204 - protein, 307 aa, Unknown
  Bacterial polypetide isolated from the Sargasso Sea
MRWRKPSRPSSSTWISSKTTSAGSSVPDPVRIGIVAGEVSGDILAAGLVRELQARYLDAQFEGIAGPRMQALGVKALFEMEELSVMGITEVLGRLPRILKVRRELLRHFIANPPDIFIGVDAPDFNIGVELKLRRAGIKTVHYVSPSVWAWRQNRIHKIKAATDMVLAFLPFEKAFYDRFDAPCRFVGHTMADDIPLVPDQAAVRRTLGIDANRRWLAVLPGSRSAEVGFMSPLFLEACKHLTVRYPDLGFIVPLVNQKRREQFLAIKAELAPDLDMVLLEGQGREAMIAADVVMLASGTAALKPCW

SEQ ID NO: 117205 - protein, 383 aa, Unknown
  Bacterial polypetide isolated from the Sargasso Sea
MLRIGIVTGEPSGDMLGAGLVQELSKKVKSLSIEGIGGEKLAKKDMSILFPMEKLSVMGFTEVVGRYFELKRIQGELIKHFIKNPPDIFIGIDAPDFNLFLEKQLRKAGIKTVHYVSPSVWAWRAGRIKRIKESADLILNLFPFETDIYNKFSIPNEYVGHPLADKLPTEPNTQLAREKLSIPLNKKVIALLPGSRLTEIKRIGVPLLKAALIAQNKHNDLFFVSSLADKKASKIFKELKMKVTPKLNISIYSEKTHRVIESANIILLASGTVSLEAMLLKKPMIVAYKLSWPTYFIVKLLSKIQYASLPNILAGENIVPECLQFNCRAKVLASELDKLLNSDKYIKKVTNHFTKLSIGLRKKADYKAANAILKLVESNNANR

SEQ ID NO: 117206 - protein, 385 aa, Unknown
  Bacterial polypetide isolated from the Sargasso Sea
MSKKSQLVFAMVAGELSGDILGAGLMAALQKAHPNARFVGIGGPRMEALGFESLFAMEELAVMGIVEVLSRLPRLLHVRASLIKSITELKPDCFIGIDAPDFNIGLELKLKAQGIKTVHYVSPSVWAWRPKRIFKIAKATNMVLSLLPFEKAFYDKHQVPCTFVGHTLADDIPLESDKASARQLLELDPEAEYLAILPGSRGGELKQLAEPFVKAALLIKQQFPDIRFVTPLVNQQRREQFEQALKDYAPDLEIHMVEGKSREVMAAADGILLASGTATLEAMLIKRPMVVAYRVSPLTYRIAKSMMQVNRFSLPNLLAGRDVVPELIQHDCTPEKIAAAVGVELNRDFAPIKAEFERLHQLLRCDASQKAAEAVLALVDVKDVN

SEQ ID NO: 117207 - protein, 602 aa, Unknown
  Bacterial polypetide isolated from the Sargasso Sea
MFDAPVDFRSEVIYFLIVDRFHDGHDVAGDQEGSEKEEAKGLFDKSRQDWGKYWGGNLQGIINKIDYLKELGITALWLSPLFEQVSDLQFSRAPMHGYWTRDFKRINPRFVKVGESTSISQSPTLKTLVDACHAAGIKIVLDIVCNHSSPDINGSKGVVLDDGQPLADFNHDHNGFYYHEGEITDWEDEYQLIHLEMMGLATFNEKNIHYRNYIKSAIQMWLDAGVDALRVDTLKHMPIWFWQEFTTAMKAHKPGLFMFGEYGFSKPWEQRSVDYANNIGMSILDFGLCDGIRFCFSGQEPGGFHQVERVLSYDRVYQRANELVTFIDNHDMPRFLSIVPDSRKLDLALVLLTTLRGVPCLFYGTEQYLNNGTNGGQDPYNRPMMESWDTSSHSFKLVQTLLDLRHRNQALSLGSHRTAWINDDFYLYTRNFRDSAVMVMVNKSDDEHVVDAENIQMPDGSYTCLITGFPVNISNGRLQGYRVHGNSAMVISAEGVPVEAPLVVVFQINGFETQPGQSIAIIGDCDELGHWDHAKAYGMEYVNQNTWTATVGFNGSGPSVLNFKFIVFQENGDPIVEYLINRKTVLPQEGRIAVDCFWNQAN

SEQ ID NO: 117208 - protein, 270 aa, Unknown
  Bacterial polypetide isolated from the Sargasso Sea
MQWHGIPIYFVDSPEHFMREGLYANAFEAYEDNGERFSFFSGAVLQTLKAIDKKPDVIHCHDWHAAMLPFLLTHDKSGYFDSTKTVFTIHNAAFQGVHRLETIPFLRHHPNILAQVHGGYINMLQSGIEFATKVTTVSPNYARELLTDLGSHGLHERLVSRQADLSGILNGCDYTQWNPETDTFLPENYSVDNLHPKTSCKRALQEKSGLPENGNVPLIGMVCRLTEQKGFGYILPILDDLIKHNVQMVIVGTGDPKVCMDLGEFAQQHP

SEQ ID NO: 117209 - protein, 263 aa, Unknown
  Bacterial polypetide isolated from the Sargasso Sea
ADVGITGLDRYLEYKTDDRYVGKIVNDLGYGGCEFVLAVPESWIDVNGLDDLSDLTNEYRQKGLDLRIATKYPKLLNNYLYDNGIYNYRIVAVSGALEAAPAAGYADLIADLTATGTTLRANNLKQIEKGTVLKSQACLIGNPESIRNNSNKHDLAMKLIDLIKSNIRAAEYYRLTANVQCDSEETLASLVLSHPDISGIHGPTVSRLHSKSNTSWFSLSVVVSKSKLSECVSQIRDCGGISIAASKIDYLFNAEVVENNQVF

SEQ ID NO: 117210 - protein, 268 aa, Unknown
  Bacterial polypetide isolated from the Sargasso Sea
MVAAENGALKGAKVGGMADVIRDLPQALAGVEIQADVIMPSYGFLTGLGAKLIHEFEVSFAGRQEPIKLYWLAHPKVQGANIYLLEHGLWQSSPGQIYSQGTSDRPFADDATKFALLCASVAKALVAGLVPMPQLLHLHDWHTGCLAMLRALAPEYQALQSIECVFSIHNLALQGIRPLSHDTSSFAAWFPHLFAQLDEGQRAQIIDPRYPHCINPMRMGITLADKVHLVSPTYAKEVLFPSRPELGFFGGEGLEADLQRKAEQGRVL

SEQ ID NO: 117211 - protein, 154 aa, Unknown
  Bacterial polypetide isolated from the Sargasso Sea
MTLIFQRNIPPVIEEEKFYFKQGYDNRLAHLIEAGCDLYLMPSLYEPCGLNQIYSLRYGTLPIVRKVGGLKDTVEDYRNPKAHGNGFMFEEPTEEALIQVMRKALQTFQIHQKIFNKMISDAMNQRFLWENSAKSYQNLYAKALSSQAVERPRV

SEQ ID NO: 117212 - protein, 183 aa, Unknown
  Bacterial polypetide isolated from the Sargasso Sea
MRILQATSEFFPYSKTGGLADMVAGLSGALAELSEDVTVATPLYRGIREQVPDLKPFGPKVILPLGKQTFTGRWWKATESNGLTLLFLEQEGFYDRPGLYMANGDGYWDNPERFMFLSKAVAQLAGEYDVVHVHDWQTAFVPMLLRASGSRVIPRTVLTIHNLAYQGQCEATRFEITNLPWNW

SEQ ID NO: 117213 - protein, 53 aa, Unknown
  Bacterial polypetide isolated from the Sargasso Sea
CPWYMQGDHTMAAALLYADRVNAVSPTYAEEIRTAEYGEKLDGLLNFVSGKLL

SEQ ID NO: 117214 - protein, 196 aa, Unknown
  Bacterial polypetide isolated from the Sargasso Sea
TDIPLIGMVSRLTGLKGFSFLIPALQEILEMDLQFILLGDGEPGIADALNKIRKSGAGKFYFKQGYDNRLAHLIEAGCDLYLMPSLYEPCGLNQIYSLRYGTLPIVRKVGGLKDTVADYRNAKDHGNGFMFQEPTEEALIQVMRKALKTFQSHPKIFNKMISDAMNQRFLWENSAKSYQKLYFKALSSQPLERPRF

SEQ ID NO: 117215 - protein, 219 aa, Unknown
  Bacterial polypetide isolated from the Sargasso Sea
MHVVHVSVEMAPIAKVGGLGDVVTALARAVHDQGNMVEIILPKYSFFNMSPMLGGMQYETQFEWGGTTIVVQRCIVEGIQVFFIEPQNGFFDVGSVYGRNDDGVKFDYFCNAALEFLTCTQRQPDILHCHDWSTAEVASAYWGNYHHYGLWKPKVVFTIHNMNYGQMKIGEASFHSQITTTVSPSYAGEVAGHPAVNQNLHKFHGVRNGIDTEIWTPRR

SEQ ID NO: 117216 - protein, 179 aa, Unknown
  Bacterial polypetide isolated from the Sargasso Sea
MSKERLYIFDTTLRDGAQTQGVHFSIDEKTKIAHALDDLGVDYIEGGWPGANPSDTEFFQKGLDLKNSTFTAFGMTKKTGRSAENDPGLSAILNSNTKSVCLVGKSWDFHVDVALGISNEENLENIKETTKHFVKNNKEFMFDAEHFFDGYKANPKYALACVKAAYDNGAKWIVLCDTN

SEQ ID NO: 117217 - protein, 202 aa, Unknown
  Bacterial polypetide isolated from the Sargasso Sea
MSKERLYIFDTTLRDGAQTQGVHFSIDEKAKIAHALDDLGVDYIEGGWPGANPSDTEFFQKGLDLKKSTFTAFGMTKKAGRSAENDPGLSAILNSNTKSVCLVGKSWDFHVDVALGISKEENLENIKETTKHFVKNNKEFMFDAEHFFDGYKANPKYALACIKAAYDNGAKWIVLCDTNGGTLPHEVTKIVKEVSEHIPVKI

SEQ ID NO: 117218 - protein, 237 aa, Unknown
  Bacterial polypetide isolated from the Sargasso Sea
MKSWLKIDDSDFHPDCFEDFGGVNLLKGGMLSEDQVNTVSPRYAEELKTPLVGHGLHPFYQRLKQDFSGILNGCDYGQWNPEIDPHLPTNYYSSDRRGKVLCKTTLVEEAGLKYQPGTPLIGMVSRLTGQKGFSLLIHTLQEILEMDLQLVLLGDGEPGIADALKKIGKSGVGKFYFKQGYDNRLAHLIEAGCDLYLMPSLYEPCGLNQIYSLRYGTLPIVRKVGGLKNTVVDFKNA

SEQ ID NO: 117219 - protein, 283 aa, Unknown
  Bacterial polypetide isolated from the Sargasso Sea
RSKWHSEWDVFDNNDLDGNGLPSIGENGVDEFDEKDFSLNYGNLSNVYKDANDDGVDDYPEFNVRNYRYDLRVDWEPNSDFSLNLSHGFAWAKNINITGIARYLADGWIYRYYQSRMRWKNLFLQSYLNSSYSGDPSRPTRNLATGSIIYDRSKKFSLQLQHLNEWRGGDIRFVWGLDYFLTMPDTRGTILSDKDLLDRRDNNGNGESGSPYVFDDKSDDTWYDDGERFTRWSTEDNSQFATPDDDADQDAVYGAIADGIDNDGDSDDFDDLNQNGIPDFVDA

SEQ ID NO: 117220 - protein, 176 aa, Unknown
  Bacterial polypetide isolated from the Sargasso Sea
MSKERLFIFDTTLRDGAQTQGVHFSIDEKAKIAHALDALGVDYIEGGWPGANPSDTEFFQKGLDLKNSTFTAFGMTKKKGRSAENDPGLSAILNSNTKSVCLVGKSWDFHVDVALGISNEENLENIKETTKHFVKNNKEFMFDAEHFFDGYKANPNYALACIKAAYDNGAKWIVPL

SEQ ID NO: 117221 - protein, 109 aa, Unknown
  Bacterial polypetide isolated from the Sargasso Sea
MSKERLYIFDTTLRDGAQTQGVHFSIDEKTKIAHALDDLGVDYIEGGWPGANPSDTEFFQKGLDLKNSIFTAFGMTKKTGRSAENDPGLSAILNSDTKSVCLVGKSWDF

SEQ ID NO: 117222 - protein, 98 aa, Unknown
  Bacterial polypetide isolated from the Sargasso Sea
MSKERLYIFDTTLRDGAQTQGVHFSIDEKTKIAHALDDLGVDYIEGGWPGANPSDTEFFQKGLDLKNSTFTAFGMTKKAGRSAENDPGLSAILNSNTK

SEQ ID NO: 117223 - protein, 467 aa, Unknown
  Bacterial polypetide isolated from the Sargasso Sea
MRVLFLCSEFEGVIKTGGLADACRGLALQMQKLGHDVKVLIPRYGSLYAVPVEESWSSVYFALGGHAQGCAVRQVVNAEVPLLLIEHHDYFGRPRPYDDGQQAYADNALRFAFFCKAALQFCVDTGWIPDLIHGHDWQTGIAAYYLKQYYQQALPGTKMLFTIHNGAYQQALSAQDRAQTEVYSSDSIACSSMLALGLAHADKVNTVSKGYASELLSEPAANGLAALYQSRLADFSGILNGCDYEQWDPATDIYLSSNYSQSELEGKQACKERMRQRYHLELSTAPLFVLVSRITEQKGFAYLLPALEQWLSDADAQVLMMGTGDQMYAGRLRALNEKFPGRFVFVEGFDEALSHQLEAAGDFFLMPSLFEPCGLNQIYSLRYGTVPLVRLTGGLKDTVRDLTDSEPTGVGFVEPTMQALQEALNRAVTLYQQKTLYKEIQQRGMQQRFGWAESALQYQMLYQQLKP

SEQ ID NO: 117224 - protein, 99 aa, Unknown
  Bacterial polypetide isolated from the Sargasso Sea
MSKERLYIFDTTLRDGAQTQGVHFSIDEKTKIAHALDDLGVDYIEGGWPGANPSDTEFFQKGLDLKNSTFTAFGMTKKAGRSAENDLGLSAILNSNTKS

SEQ ID NO: 117225 - protein, 181 aa, Unknown
  Bacterial polypetide isolated from the Sargasso Sea
SQIAILGTGDRSLESGLWQLALDYPGRFSVFLTYDDSLSRLIYGGSDAFLMPSRFEPCGISQLLAMRYGSIPIVRRVGGLVDTVLPHDPENNSGTGFCFDRFEPIDFYTALVRSWEAFRHKDSWKSLQLRAMSQEFSWQRSALEYESMYKDVCGIKAPSPDIAEVEKFSYGQSADPSLKKM

SEQ ID NO: 117226 - protein, 191 aa, Unknown
  Bacterial polypetide isolated from the Sargasso Sea
PNFYLDESKPLFAFIGRLVYEKGTDLLPQVIEKALTQNDISILILGSGNEETQNQLKALISSHPNYYYAFIGYDEKLSHNIYAGADFLLMPSRVEPCGLNQMYALRYGTIPIVRSIGGLKDTIIDIDKNGFGITHDEVTISQITNAINRAKKLYLNQSKFNRIRKQIMEIDHSWDVSANEYITLYKSLLKN

SEQ ID NO: 117227 - protein, 95 aa, Unknown
  Bacterial polypetide isolated from the Sargasso Sea
HYNGGGIYLIDAPHLYERPGSPYHDTNLFAYTDNVLRFALLGWVGCEMACGLDPFWRPDVVHAHDGHAGLAPAYLAARGRPAKSVSTVHNLAYQG

SEQ ID NO: 117228 - protein, 234 aa, Unknown
  Bacterial polypetide isolated from the Sargasso Sea
LKNRTENKKILQREMGLEVNPKKYLLGMVSRLVDQKGVDLLLQVSRRLLAYTDSQIAVLGTGDRYLESGLWQLALDYPGRFSVFLTYDDSLSRLIYGGSDAFLMPSRFEPCGISQLLAMRYGSVPIVRRVGGLVDTVLPHDPENNSGTGFCFDRFEPIDFYTSLVRSWEAFRHKDSWELLQKRAMSQEFSWQRSALEYEIMYKDVCGIKEPSPDVAEVEKFSYGQSADPSLKKT

SEQ ID NO: 117229 - protein, 174 aa, Unknown
  Bacterial polypetide isolated from the Sargasso Sea
YLESSLWQLAIEYPGRFSVFLTYDDALSRLIYGGADAFLMPSRFEPCGISQLLAMRYGAIPIVRKVGGLVDTVEPYNPMNETGSGFCFDRYEPIDFYTSLVRSWEAYRHQKSWKQLQLRAMSNKYSWDRSAKEYELMYKDVCGIKEPSPDAAEVEKFSYGQEADPSRKGKKIKL

SEQ ID NO: 117230 - protein, 186 aa, Unknown
  Bacterial polypetide isolated from the Sargasso Sea
GRCAVFLTYDDDLSRLIYAGSDAFLMPSRFEPCGISQLYAMRYGSVPVVRKVGGLVDTVPPHSPADASGTGFCFDRFEPVDFYTALVRAWEAYRHRDSWQALQKRGMQQDYSWDRSAIDYDVMYRDVCGLKEPTPDAAMVEHFCQGQAAYPSRPEDDGLTVAPAAVSAPSGPSRNPLNRLFGRRAG

SEQ ID NO: 117231 - protein, 141 aa, Unknown
  Bacterial polypetide isolated from the Sargasso Sea
YGGSDAFLMPSRFEPCGISQLLAMRYGSIPIVRRVGGLVDTVLPHDPENNSGTGFCFDRFEPIDFYTSLVRSWEAFRHKDSWELLQKRAMSQEFSWQRSALEYEIMYKDVCGIKEPSPDVAEVEKFSYGQSADPSLKKSMT

SEQ ID NO: 117232 - protein, 204 aa, Unknown
  Bacterial polypetide isolated from the Sargasso Sea
RLVDQKGVDLLLQVSRRLLAYTDSQIVVLGTGDRYLESGLWQLALDYPGRFSVFLTYDDSLSRLIYGGSDAFLMPSRFEPCGISQLLAMRYGSIPIVRRVGGLVDTVLPHDPENNSGTGFCFDRFEPIDFYTSLVRSWEAFRHKDSWELLQKRAMSQEFSWQRSALEYEIMYKDVCGIKEPSPDFVEVEKFSYGQSADPSLKNI

SEQ ID NO: 117233 - protein, 178 aa, Unknown
  Bacterial polypetide isolated from the Sargasso Sea
LRTGDRYLESGLWQLALDYPGRFSVFLTYDDSLSRLIYGGSDAFLMPSRFEPCGISQLLAMRYGSIPIVRRVGGLVDTVLPHDPENNSGTGFCFDRFEPIDFYTSLVRSWEAFRHKDSWELLQKRAMSQEFSWQRSALEYEIMYKDVCGIKEPSPDFAEVEKFSYGQSADPSLKKSMT

SEQ ID NO: 117234 - protein, 203 aa, Unknown
  Bacterial polypetide isolated from the Sargasso Sea
LVDQKGVDLVLQVSRRLLAYTDSQIAILGTGDRSLESGLWQLALDYPGRFSVFLTYDDSLSRLIYGGSDAFLMPSRFEPCGISQLLAMRYGSIPIVRRVGGLVDTVLPHDPENNSGTGFCFDRFEPIDFYTALVRSWEAFRHKDSWKSLQLRAMSQEFSWERSALEYESMYKDVCGIKAPSPDVAEVEKFSYGQSADPSLKKK

SEQ ID NO: 117235 - protein, 283 aa, Unknown
  Bacterial polypetide isolated from the Sargasso Sea
IKTHEYGESLEGLLNYISGKLRGILNGIDLDEWNPAKDPVLPAKFSIKNLENRLENKKILQREMGLEINPKKYLLGMVSRLVDQKGVDLLLQVSRRLLAYTDSQIVVLGTGDRYLESGLWQLALDYPGRFSVFLTYDDSLSRLIYGGSDAFLMPSRFEPCGISQLLAMRYGSIPIVRRVGGLVDTVLPHDPENNSGTGFCFDRFEPIDFYTSLVRSWEAFRHKDSWELLQKRAMSQEFSWQRSALEYEIMYKDVCGIKEPSPDFVEVEKFSYGQSADPSLKKI

SEQ ID NO: 117236 - protein, 150 aa, Unknown
  Bacterial polypetide isolated from the Sargasso Sea
MRILLAAAECAPMIKVGGMGDVVGSLPPSLIKLGHDVRVIIPGYGKLWSLLEVSDEPVFRANTMGTDFAVYKAKHPLHNYVIYLVGHPTFDSDQIYGGENEDWRFTFFASATAEFAWNCWKPQVLHCHDWHTGMIPVWMHQDPEISTVFT

SEQ ID NO: 117237 - protein, 136 aa, Unknown
  Bacterial polypetide isolated from the Sargasso Sea
RRHPGRIGVHIGFDESDARRLYAGSDFLLMPSRFEPCGLSQMYAQRYASLPIARCTGGLADTIEDGVSGFLFDAPQADAYRQAIDRALQVFDHPELLEAMRCQAMSAPLYWRQSVQPYDRLFQRLLSRTSVQRAPR

SEQ ID NO: 117238 - protein, 166 aa, Unknown
  Bacterial polypetide isolated from the Sargasso Sea
MQLALDYPGRFSVFLTYDDSLSRLIYGGSDAFLMPSRFEPCGISQLLAMRYGSIPIVRRVGGLVDTVLPHDPENNSGTGFCFDRFEPIDFYTSLVRSWEAFRHKDSWEFLQKRAMSQEFSWQRSALEYEIMYKDVCGIKEPSPDVAEVEKFSYGQSADPSLKKSMT

SEQ ID NO: 117239 - protein, 404 aa, Unknown
  Bacterial polypetide isolated from the Sargasso Sea
MADFVFSSGVGEGAQYDNKSGRDYHIPTRGGTAKKPSLHIVHVAVEMAPIAKVGGLADVVTAIGRATQDLGHMVEVVLPKYQFFNSSVLLGSREYETHFDWGGTTIRVEKCTVEGLQCFFIEPQNGMFQTDSVYGRNDDSARFNFFCNAALEFLTRTARQPDILHCHDWSSAEVARSYWEHYHHNGLTKPKIAFTIHNMNYGQAKLAEAVYHSQITTTVSPSYAGEVSGSSVIGDNGHKFTGIRNGIDPDIWDPETDGFVPLKYDASSVEKGKAAARAELRNRLGMTGWDDKPIVGVVSRLTAQKGVHLIKHAAHHTLSRGGQFVLLGSAPDPKIQGEFNALANDLAGDNSGFFFAFDEPLSHLMYAGCDVVLVPSMFEPCGLTQMISMRYGAIPRRPSHRWIA

SEQ ID NO: 117240 - protein, 280 aa, Unknown
  Bacterial polypetide isolated from the Sargasso Sea
MGESLEGLLNYISGKLRGILNGIDLDEWNPAKDPVLPAKFSIKNLENRLENKKILQREMGLEVNPKKYLLGMVSRLVDQKGVDLLLQVSRRLLAYTDSQIVVLGTGDRYLESGLWQLALDYPGRFSVFLTYDDSLSRLIYGGSDAFLMPSRFEPCGISQLLAMRYGSIPIVRRVGGLVDTVLPHDPENNSGTGFCFDRFEPIDFYTSLVRSWEAFRHRDSWELLQKRAMSQEFSWQRSALEYEIMYKDVCGIKEPSPDFAEVEKFSYGQSADPSLKKSMT

SEQ ID NO: 117241 - protein, 99 aa, Unknown
  Bacterial polypetide isolated from the Sargasso Sea
MQIVFVSSEVAPWSKTGGLADVCGSLPQALVARGHRVMVIAPRYQNGSKSDVLYDGAFDTCVKSKVGCFGGEQEVGFFHQMKNDVDYVFVDHPSFHRKG

SEQ ID NO: 117242 - protein, 323 aa, Unknown
  Bacterial polypetide isolated from the Sargasso Sea
MFVASEVEGLVKTGGLADVARALPLYLAQKGHDVRIMLPFYKTIKRRDEAKQLVSRWLPTHPGLPDIGYRIYQMDLEGVCVYLLDCPQYFDRPQLYAENNQAYPDNGERFAFLAAAALHASEQLAFAPDIVHCNDWHTGLLPLLLKTRHAHNPFFQHTRSVISIHNAAFQGVFERQQFWAVPEIADYEQRISYDYGHVNLLKCGVLYADKINAVSPNYASELLTHLGAHGMASIFQQRAADLRGILNGCDYQDWDPAFDDFLPATYDVDNLAGKRICKQSLQQETGLPVVDLPIYGMVCRLTEQKGVHLLLPVLDKFLHHKVQ

SEQ ID NO: 117243 - protein, 340 aa, Unknown
  Bacterial polypetide isolated from the Sargasso Sea
CHDWHAAMLPFLLTHDKSGYFDGTKTIFTIHNAAFQGVHKLESIPFLRHHPNILAQVHGGYINMLQSGIEFATKVTTVSPNYASELLTDLGSHGLHERLVNRQADLSGILNGCDYTQWNPETDTFLPENYSVENLHPKTACKRALQEKSGLPENGNVPLIGMVCRLTEQKGFGYILPILDDLIKHNVQMVIVGTGDPKVCMDLGEFAQQHPDQFAFINGFSSEHAHLVEAGADFFLMPSQFEPCGLNQMYSLAYGTIPIVRSVGGLKDTVIDYSNDSEGTGFVFDDPTPYALLSCIRRALLAFYEDAGKFRAMQQRGMRTRFTWEAAAKNYQQLYVSTLT

SEQ ID NO: 117244 - protein, 286 aa, Unknown
  Bacterial polypetide isolated from the Sargasso Sea
NGQISFLKAGLYYADHITAVSPTYAREITEPQFAYGMEGLLQQRHREGRLSGVLNGVDEKIWSPETDLLLASRYTRDTLEEKAENKRQLQIAMGLKVNDKVPLFAVVSRLTSQKGLDLVLEALPGLLEQGGQLALLGAGDPVLQEGFLAAAAEHPGQVGVQIGYHEAFSHRIMGGADVILVPSRFEPCGLTQLYGLKYGTLPLVRRTGGLADTVSDSSLENLADGIASGFVFEDSNAWSLLRAIRRAFVLWSRPSLWRFVQRQAMTMDFSWQVAAKSYRELYYRLK

SEQ ID NO: 117245 - protein, 194 aa, Unknown
  Bacterial polypetide isolated from the Sargasso Sea
MRILFAAAECAPMVKVGGMGDVVGSLPPALAELGHDVRVIMPGYGKLWSQLDIPAEPIWRAQTMGTDFAVYETRHPKTGLTIYLLGHPVFDGERIYGGEDEDWRFTFFASATSEFAWNVWKPQVLHCHDWHTGMIPVWMHQDPEISTVFTIHNLKYQGPWRWKLERMTWCPWYMQGDHTMAAALLYADRVNAVS

SEQ ID NO: 117246 - protein, 268 aa, Unknown
  Bacterial polypetide isolated from the Sargasso Sea
MRILLAAAECAPMIKVGGMGDVVGSLPPSLIKLGHDVRVIIPGYGKLWSLLEVSNEPVFRANTMGTDFAVYEAKHLIHNYVIYLVGHPTFDSDQIYGGENEDWRFTFFASATAEFAWNCWKPQVLHCHDWHTGMIPVWMHQDPEISTVFTIHNLKYQGPWRWKLEKMTWCPWYMHGDHTMAAAMLYADRVNAVSPTYADEIKTHEYGESLEGLLNYISGKLRGILNGIDLDEWNPAKDPVLPAQFSIKNLENRLENKKILQREMGLEV

SEQ ID NO: 117247 - protein, 236 aa, Unknown
  Bacterial polypetide isolated from the Sargasso Sea
HAGLTPAYLAARGNPARSVFTVHNIAYQGLFLARHMAEIALPWSFFQMHGVEFKGQISFLKSGLYFADHITTVSPTYAREITEPQYAFGLEELLRQRQREGRLSGILNGVDESIWDPRRDPLLAAPYDRNSLAEKAKNKQQLQTTLGLKEDGRALLFTVVSRLTSQKGLDLLLGTLPGIIAQGGQLALLGSGDPDLQARFLAAAAQYSGQVSIRIGYDEALSHQMIGGADVILVPS

SEQ ID NO: 117248 - protein, 293 aa, Unknown
  Bacterial polypetide isolated from the Sargasso Sea
MFAAAECAPMIKVGGMGDVVGSLPPALKKLGHDVRLIIPGYGKLWTLMDIAPEPIFRGNTMGVDFAVFETRHPSNGLPIYLVGHPCFDSERIYGGEDEDWRFTFFASAVSEFAWNSWKPQVLHCHDWHTGMIPVWMHQDPEISTVFTIHNLKYQGPWRWKLDQITWCPWYMHGDHTMASAMLYADRVNAVSPTYSREIRTSEYGEKLEGLLNYISGKLRGILNGVDLDAWNPATDNSLPAKFNVDNISGRAINKRVLQERMGLEVNPDKYLMGMVGRLVDQKGIDLLLQVANR

SEQ ID NO: 117249 - protein, 217 aa, Unknown
  Bacterial polypetide isolated from the Sargasso Sea
MRILLAAAECAPMIKVGGMGDVVGSLPPSLIKLGHDVRVIIPGYGKLWSLLEVSNEPVFRANTMGTDFAVYEAKHPIHNYVIYLVGHPTFDSDQIYGGENEDWRFTFFASATAEFAWNCWKPQVLHCHDWHTGMIPVWMHQDPEISTVFTIHNLKYQGPWRWKLEKMTWCPWYMHGDHTMAAAMLYADRVNAVSPTYADEIKTHEYGESLEGLLNYI

SEQ ID NO: 117250 - protein, 208 aa, Unknown
  Bacterial polypetide isolated from the Sargasso Sea
MRILFAAAECAPMVKVGGMGDVVGSLPPALAELGHDVRIIMPGYGKLWSSLQVSSEPIWRAQTMGTEFAVFETRHPTNGLTIYLVGHPTFDGERIYGGEDEDWRFTFFASATSEFAWNMWKPQVLHCHDWHTGMIPVWMHQDPEISTVFTIHNLKYQGPWRWKLERMTWCPWYMQGDHTMAAALLYADRVNAVSPTYAPGDPHCRIRR

SEQ ID NO: 117251 - protein, 298 aa, Unknown
  Bacterial polypetide isolated from the Sargasso Sea
MIPVWMHQTPEISTVFTIHNLKYQGPWRWKLEKMTWCPWYMHGDHTMAAAMLYADRVNAVSPTYADEIKTHEYGESLEGLLNYVSGKLRGILNGIDLDEWNPAKDPVLPAKFSIKNLENRQENKKILQREMGLEVNPKKYLLGMVSRLVDQKGVDLLLQVSRRLLAYTDSQIVVLGTGDRYLESGLWQLALDYPGRFSVFLTYDDSLSRLIYGGSDAFLMPSRFEPCGISQLLAMRYGSIPIVRRVGGLVDTVLPHDPENNSGTGFCFDRFEPIDFYTSLVRSWEAFRHKDSWELLQK

SEQ ID NO: 117252 - protein, 258 aa, Unknown
  Bacterial polypetide isolated from the Sargasso Sea
HRVQYGMGLEGLIAQRAECVSGIVNGIDPAIWSPKADPALPAPFTVDTLNNRIANKRAVEQAFGLDEDDSPIFTVISRLTWQKGMDVLVEVIDDLVALGGRLVVLGTGDPALEIAFATAALRHPGRVAVRIGYDEPVSHLLQGGCDAIVIPSRFEPCGLTQLYALAYGCVPVVARTGGLADTIIDANEAALAMGVATGLQFDTVTADNIVAVLRRTMRLYADQDQWRTIQVNGMNADYSWHHSGRHYAELYRSVLGNP

SEQ ID NO: 117253 - protein, 287 aa, Unknown
  Bacterial polypetide isolated from the Sargasso Sea
MRILLAAAECAPMIKVGGMGDVVGSLPPSLIKLGHDVRVIIPGYGKLWSLLEVSNEPVFRANTMGTDFAVYKAKHPIHNYVIYLVGHPTFDSDQIYGGENEDWRFTFFASATAEFAWNCWKPQVLHCHDWHTGMIPVWMHQDPEISTVFTIHNLKYQGPWRWKLEKMTWCPWYMHGDHTMAAAMLYADRVNAVSPTYADEIKTHEYGESLEGLLSYISGKLRGILNGIDLDEWNPAKDPVLPAKFSIKNLEKRSENKKILQREMGLEVNPKKYLLGMVSRLIDQTRS

SEQ ID NO: 117254 - protein, 168 aa, Unknown
  Bacterial polypetide isolated from the Sargasso Sea
MQVLHVCSEMFPLLKTGGLADVIGALPAAQIAEGIDTRVLLPAFPDIRRGVTDAQVVTRRDTFAGRMTLLFGHYNGVGIYLIDAPHLYDRPGSPYHDTNQHAYTDNVLRFALLGWVGSEMACGLDPFWRPDVVHAHDWHAGLTPAYLAARGRPAKSVFTVHNLAYQGM

SEQ ID NO: 117255 - protein, 168 aa, Unknown
  Bacterial polypetide isolated from the Sargasso Sea
MRILLAAAECAPMIKVGGMGDVVGSLPPSLIKLGHDVRVIIPGYGKLWSLLDVSNEPVFKANTMGTDFAVYEAKHPIHNYVIYLVGHPTFDSDQIYGGENEDWRFTFFASATAEFAWNCWKPQVLHCHDWHTGMIPVWMHQDPDISTVFTIHNLKYQGPWRWKLEKMT

SEQ ID NO: 117256 - protein, 201 aa, Unknown
  Bacterial polypetide isolated from the Sargasso Sea
MRILLAAAECAPMIKVGGMGDVVGSLPPSLIKLGHDVRVIIPGYGKLWSLLEVSNEPIYRANTMGTDFAVYKAKHPIHNYVIYLVGHPTFDSDQIYGGENEDWRFTFFASATAEFAWNCWKPQVLHCHDWHTGMIPVWMHQDPEISTVFTIHNLKYQGPWRWKLEKMTWCPWYMHGDHTMAAAMLYADRVNAVSPTYADEN

SEQ ID NO: 117257 - protein, 281 aa, Unknown
  Bacterial polypetide isolated from the Sargasso Sea
MYADRVNAVSPTYADEIKTHEYGESLEGLLNYISGKLRGILNGIDLDEWNPAKDPVLPAKFSIKNLENRLENKKILQREMGLEVNPKKYLLGMVSRLVDQKGVDLLLQVSRRLLAYTDSQIAVLGTGDRYLESGLWQLALDYPGRFSVFLTYDDSLSRLIYGGSDAFLMPSRFEPCGISQLLAMRYGSIPIVRRVGGLVDTVLPHDPENNCGTGFCFDRFEPIDFYTSLVRSWEAFRHKDSWELLQKRAMSQEFSWQRSALEYEIMYKDVCGIKEPSPDVA

SEQ ID NO: 117258 - protein, 164 aa, Unknown
  Bacterial polypetide isolated from the Sargasso Sea
MPGLLEQGGQLALLGAGDPVLQEGFLAAAAEHPGKVGVQIGYHEAFSHRIMGGADVILVPSRFEPCGLTQLYGLKYGTLPLVRRTGGLADTVTDSSLENLADGVASGFVFEDSNALSLLRAIRRAFVLWSRPSLWRYVQRQAMNMDFSWQVAAHSYRELYQRLL

SEQ ID NO: 117259 - protein, 444 aa, Unknown
  Bacterial polypetide isolated from the Sargasso Sea
LLAAAECAPMIKVGGMGDVVGSLPPSLIKLGHDVRVIIPGYGKLWSLLDISNEPVFRANTMGTDFAIYEAKHPIHNYVIYLVGHPTFDSEQIYGGENEDWRFTFFASATAEFAWNCWKPQVLHCHDWHTGMIPVWMHQDPEISTVFTIHNLKYQGPWRWKLEKMTWCPWYMHGDHTMAAAMLYADRVNAVSPTYADEIKTHEYGESLDGLLNYISGKLRGILNGIDIDEWNPAKDPVLPAKFSIKNLENRQENKKILQKEMGLEVDPKKYLLGMVSRLVDQKGVDLLLQVSRRLLAYTDSQITVLGTGDRYLESGLWQLALDYPGRFSVFLTYDDSLSRLIYGGSDAFLMPSRFEPCGISQLLAMRYGSIPIVRRVGGLVDTVLPHDPQNNSGTGFCFDRFEPIDFYTSLVRSWEAFRHKDSWELLQKRAMSQVFSWQRSALEY

SEQ ID NO: 117260 - protein, 319 aa, Unknown
  Bacterial polypetide isolated from the Sargasso Sea
MTLCPWYMHGDHTMAAAMLYADRVNAVSPTYADEIKTHEYGESLEGLLNYISGKLRGILNGIDLDEWNPAKDPVLPAKFSIKNLENRLENKKILQREMGLEVDSKKYLLGMVSRLVDQKGVDLLLQVSRRLLAYTDSQIAVLGTGDRYLESGLWQLALDYPGRFSVFLTYDDSLSRLIYGGSDAFLMPSRFEPCGISQLLAMRYGSIPIVRRVGGLVDTVLPHDPENNNGTGFCFDRFEPIDFYTSLVRSWEAFRHKDSWELLQKRAMSQEFSWQRSAREYEVMYKDVCGIKEPSPDVAEVEKFSYGQSADPSLKKSMT

SEQ ID NO: 117261 - protein, 483 aa, Unknown
  Bacterial polypetide isolated from the Sargasso Sea
MRILLAAAECAPMIKVGGMGDVVGSLPPSLIKLGHDVRVIIPGYGKLWSLLEVSNEPVFRANTMGTDFSVFEAKHPIHNYVIYLVGHPTFDSDQIYGGENEDWRFTFFASATAEFAWNCWKPQVLHCHDWHTGMIPVWMHQDPEISTVFTIHNLKYQGPWRWKLEKMTWCPWYMHGDHTMAAAMLYADRVNAVSPTYADEIKTYEYGESLEGLLNYISGKLRGILNGIDLDEWNPAKDPVLPAKFSMKNLENRLENKKILQREMGLEVNPKKYLLGMVSRLVDQKGVDLLLQVSRRLLAYTDSQIAVLGTGDRYLESGLWQLALDYPGRFSVFLTYDDSLSRLIYGGSDAFLMPSRFEPCGISQLLAMRYGSIPIVRRVGGLVDTVLPHDPENNSGTGFCFDRFEPIDFYTSLVRSWEAFRHKDSWELLQKRAMSQEFSWQRSALEYEIMYKDVCGIKEPSPDFAEVEKFSYGQSADPSLKKV

SEQ ID NO: 117262 - protein, 268 aa, Unknown
  Bacterial polypetide isolated from the Sargasso Sea
EGLLQGRTNRLDGIANGIDMDEWNPEADVDCEAPFSVVDLSGKLECKRALQKELGLPQRDDVPLMGFIGRLDWQKGPDLLQNALHDMMREDVQVVMLGSGLPELEDFMRWAEETYKDKFRGWVGFSVPMAHRITAGCDMLLMPSRFEPCGLNQLYAMRYGTLPIAHATGGLKDTITPHNAFGDADKVLAGTADMDAGEGVGTGWLFNEMNADALMWAIRSACDVYRTNPNMWRAMQTQAMTQDLSWDNAAKKWEKVFEWSKIDPPHAN

SEQ ID NO: 117263 - protein, 297 aa, Unknown
  Bacterial polypetide isolated from the Sargasso Sea
ADRVNAVSPTYADEIKTHEYGESLEGLLNYISGKLRGILNGIDLDEWNPAKDPVLPAKFSTKNLENRLENKKILQREMGLEVNPKKYLLGMVSRLVDQKGVDLLLQVSRRLLAYTDSQIVVLGTGDRYLESGLWQLALDYPGRFSVFLTYDDSLSRLIYGGSDAFLMPSRFEPCGISQLLAMRYGSIPIVRRVGGLVDTVIPHDPENKIGTGFCFDRFEPIDFYTSLVRSWEAFRHKDSWELLQKRAMSQEFSWQRSALEYEIMYKDVCGIKEPSPDVAEVEKFSYGQSADPSLKKV

SEQ ID NO: 117264 - protein, 513 aa, Unknown
  Bacterial polypetide isolated from the Sargasso Sea
MRILFAAAECAPMIKVGGMGDVVGSLPPALAKLGHDVRLIMPGYSKLWSKLTISDEPIWRAQTMGTEFAVYETKHPGNGMTIYLVGHPVFDPERIYGGEDEDWRFTFFASAAAEFAWNVWKPNVLHCHDWHTGMIPVWMHQDPEISTVFTIHNLKYQGPWRWKLDRITWCPWYMQGDHTMAAALLYADRVNAVSPTYAEEIRTAEYGEKLDGLLNFVSGKLRGILNGIDLEAWNPQTDRALPATFSADDLSGKAVCKRVLQERMGLEVRDDAFVLGMVSRLVDQKGVDLLLQVADRLLAYTDTQIVVLGTGDRGLESGLWQLASRHAGRCAVFLTYDDDLSRLIYAGSDAFLMPSRFEPCGISQLYAMRYGSVPVVRKVGGLVDTVPPHSPADASGTGFCFDRFEPVDFYTALVRAWEAYRHRDSWQELQKRGMQQDYSWDRSAIDYDVMYRDVCGLKEPTPDAAMVEQFSQGQAADPSRPEDDAINAAPEAVTAPSGPSRNPLNRLFGRRAG

SEQ ID NO: 117265 - protein, 393 aa, Unknown
  Bacterial polypetide isolated from the Sargasso Sea
MRILLAAAECAPMIKVGGMGDVVGSLPPSLIKLGHDVRVIIPGYGKLWSLLEVSNEPIFRANTMGTDFAVYEAKHPIHNYVIYLVGHPTFDSDQIYGGENEDWRFTFFASATAEFAWNCWKPQVLHCHDWHTGMIPVWMHQDPEISTVFTIHNLKYQGPWRWKLEKMTWCPWYMHGDHTMAAAMLYADRVNAVSPTYADEIKTHEYGESLEGLLNYISGKLRGILNGIDLDEWNPAKDPVLPAKFSIKNLENRLENKKILQREMGLEVNPKKYLLGMVSRLVDQKGVDLLLQVSRRLLAYTDSQIVVLGTGDRYLESGLWQLALDYPGRFSVFLTYDDSLSRLIYGGSDAFLMPSRFEPCGISQLLAMRYGSIPIVRRVGGLVDTVLPHDPEK

SEQ ID NO: 117266 - protein, 496 aa, Unknown
  Bacterial polypetide isolated from the Sargasso Sea
MRVLQISSEATPFAKTGGLADVAGALPDALERAGCDCTLVVPAYREVFEKNLPIQKTDMQFSVPVGQRNLEATIYSCSLPDQKHNVFLIGNTHCFDRDTLYGGAEDYADNAERFIFFSRAALEVAARQPHAFDIIHCHDWQTSLVPAYQKLLYQSWPTLSEARSVLTIHNVAFQGMFWHWDMLLTGFHWKYFNWRQLEFYGQLNMLKAGIVFADQLTTVSPTYAQEIQAAPGGCGLEGVLAGRASDLTGIVNGIDVETWNPRTDELIPRHYSDDDFKQGKYTARVALAARLGHAAPDDRPLVAFVGRLAEQKGVSLVLDLLHRMAGSGNARFVVLGAGDPQLEEALKVVASEHPDAIDVVIGFDEVFAHLIQAAADILLMPSQYEPCGLAQLYAFRYGTIPVVRATGGLVDTVVDVNDQTRADGTASGFVFQDFQSASLEEAVQRALAAHGNKTLWQDLVYRVMQQDWSWEVSAQQYQKVYERALANAPADVVDVR

SEQ ID NO: 117267 - protein, 391 aa, Unknown
  Bacterial polypetide isolated from the Sargasso Sea
IYGGENEDWRFTFFASATAEFAWNCWKPQVLHCHDWHTGMIPVWMHQDPEISTVFTIHNLKYQGPWRWKLEKMTWCPWYMHGDHTMAAAMLYADRVNAVSPTYADEIKTHEYGESLEGLLNYISSKLRGILNGIDLDEWNPAKDPVLPAQFSIKNLENRLENKKILQREMGLEVNPKKYLLGMVSRLVDQKGVDLLLQVSRRLLAYTDSQIAVLGTGDRYLESGLWQLALDYPGRFSVFLTYDDSLSRLIYGGSDAFLMPSRFEPCGISQLLAMRYGSIPIVRRVGGLVDTVLPHDPENNNGTGFCFDRFEPIDFYTSLVRSWEAFRHKDSWELLQKRAMSQEFSWQRSALEYEVMYKDVCGIKEPSPDVAEVEKFSYGQSADPSLKKSMT

SEQ ID NO: 117268 - protein, 87 aa, Unknown
  Bacterial polypetide isolated from the Sargasso Sea
MSAPLLVLAAGGTGGHMFPAQALAEEMVSIGWRIKLSTDKRGARYAKNFPSEVEVSVIKSATFSGGSFLGKLLVPLIIFYGVLQSLL

SEQ ID NO: 117269 - protein, 219 aa, Unknown
  Bacterial polypetide isolated from the Sargasso Sea
MSKKNNLLVAASGTGGHIFPALAVSKEVEDEWNIHWLGIQQRLDANFIPQKYNLRSLNIKTPRKNIFLFYQYIKILMSTFQIIRILKEKKINLVFTTGGYISAPTIVASKLLRIPVIIHESNLIPGMVTKYFGFLCNYVFLGFKKTNSYLRNCKTIFTGTPLRDQFYKSHPLPEWVPKGKGPLLIVMGGSQGAKAINQILNESLEFLMKKQFRIVHIIG

SEQ ID NO: 117270 - protein, 98 aa, Unknown
  Bacterial polypetide isolated from the Sargasso Sea
MRVLILAGGTGGHVYPALSVAKELKRNEFSISWIGKKDSLESKLSNAESFNFISLETKGFKGKNIFRKIISLIYLEINLVKSIFIIKKIKPDFVFSTW

SEQ ID NO: 117271 - protein, 270 aa, Unknown
  Bacterial polypetide isolated from the Sargasso Sea
MTRLLIAASGTGGHLFPALAVAEVVEASGPVRWLGVPDRLETSLVPERFGLITVKASGLQGRGLKKLVQLIRLLLASVSVRRVIRRESIDAVFTTGGYIAAPAILAARWCGIPVVLHESNAIPGRVTRLLGRLCSAVAIGLPAAAQRIPGSQPIVTGTPVRATFLTPKPLPGWVPRGDGPLLVVMGGSQGAVGLNRMVRAILPNLLDQGCRVVHLTGGNDPEINQLQHPNLAERRFSDDIPGLLQHADLAISRAGAGSLSELAACGTPSV

SEQ ID NO: 117272 - protein, 264 aa, Unknown
  Bacterial polypetide isolated from the Sargasso Sea
NLINFLYIFIQSIPHYLKLRPDFVLGFGGYFTVPIIIAGWLMRLKIFLHEGNAIIGKANRFLLNFTKELLTSFENTLIPGKKIDINNKMVGLPIRINKVEKVLNNDSSSDFVICIIGGSQGAQSLSINIAESIKSVQDNSQKRIIVFHQCRSEDLENLQAYYKTHNINNDVRVFFDEITQVLSKSNLVISRAGSSTVNEIIYYCIPSILIPYPHASDNHQYYNAKNLNTSECTKIISNDSVNMENIFNSINEIKNDNEKVNLIK

SEQ ID NO: 117273 - protein, 69 aa, Unknown
  Bacterial polypetide isolated from the Sargasso Sea
MSRAKIMILAGGTGGHVIPGLTIAKALEEAKCDITWIGTMGGIEEKLVPKANIKIEYITVMGLRGKSLM

SEQ ID NO: 117274 - protein, 263 aa, Unknown
  Bacterial polypetide isolated from the Sargasso Sea
MTRLLIAASGTGGHLFPALAVAEALPEGWRVRWMGVPDRLETQLVPDRYGLITVRAGGLQGRGFRRLIQLLRLLGAGFTTWQLIRRHDIQLVFTTGGYIAAPAIIGARLAGRPAVLHESNAIPGRVTRLLGRFCHTVAVGLPAAAERIPGCKPLMTGTPVRTAFLQPQPAPDWIPAGEGPLLVVIGGSQGAVGMNRMVRAVLPELLRQGCRVVHLTGRNDPEAGSLQHPMLVERPFSDEIPGLLQQADLAISRAGAGSISELA

SEQ ID NO: 117275 - protein, 208 aa, Unknown
  Bacterial polypetide isolated from the Sargasso Sea
MIKILLSTGGTGGHIFPILSLYKELKKNENIKDVKIITDKRAKKFIDFDDFKIINVDSPFRKKGVIHLIKTFFYIFYSTFRCFLIIIFFNPKIVIGSGGYVSFPVLLACILLRKKFILYETNAVLGRVNRLFLPYCFKLLSGYPDIRGLPHKYLKKFYHVGQLVRDKFLQISNEIVDTNSSKINDKVLNILILGGSQGAKVLGEKLPK

SEQ ID NO: 117276 - protein, 284 aa, Unknown
  Bacterial polypetide isolated from the Sargasso Sea
MKSYIKLPLMLAVGTIQALKILLKNKPNIVLSMGGYISFPCAIASYILRIPIITHEQNIIFGLTNNILRFISKKIILGFPMKVKNKKYIYLGNPSRYEKINIKKNKAIKGKINILVVGGSLGAKIFNDIVPKAIYILKQNLDYEINVMHQTGKTYEVANSQYKKFQINIDLKEFIDPMIDAYKWCDIIICRGGALTITEIMNLGIPSIIIPYPYAVDDHQMKNSRYLEENDAAIVINQKFFTDVHLANTLESFINNSELEEKLSKNISKLNKSDATKKICEAII

SEQ ID NO: 117277 - protein, 227 aa, Unknown
  Bacterial polypetide isolated from the Sargasso Sea
VHLVACGTWPTTVPGNIKYEHVGNPVRKEILGRSGSPYIPPGNHPMSILIIGGSQGAKVLSNIVPKAISNLPDELLKYIRVFQQAREEDCQRVKSYYVDKGIACEVLPFFDNIAKHLSEAQLIISRSGASSVADIGVVGRPSILVPLGSAIRDEQTLNAGPLKKVRAATVIAEQNLTVQRLNKAILKILSSPENASKMAANAHKTVVLDATKKLADRVEEISGYSIR

SEQ ID NO: 117278 - protein, 164 aa, Unknown
  Bacterial polypetide isolated from the Sargasso Sea
MSSLTRFNPKTGMVDFWHEFRKPNPLRIPMLLASTVPLLVIFYWLAGETHYRAPERPTITYITTFDPERSDAEIMASNEANQEVKDLREAAEEDLAERKREIYKSLGRGIGMDVDKIEAEADARRAAEEAAEAERRAQVFDQSEDAAGEAGGEDGAAPAEGPQP

SEQ ID NO: 117279 - protein, 204 aa, Unknown
  Bacterial polypetide isolated from the Sargasso Sea
RIKNIKNSVHSGNPIRDEFFRSSDLDSEHVNIYITGGSQGADYINENLPKALSKLTNINVKHQCGKNNIIKVRELYKKYGVKAEIFDFYENPAEQILWSDFVISRAGALSLSEISSLQRGALMIPLPTAIDNHQFENAKSIVELGMGEIHLQNDSIEKLICKIENIILNQSYVNWRKQRNKDHKYAAKVITENIYRFLKRNEKV

SEQ ID NO: 117280 - protein, 273 aa, Unknown
  Bacterial polypetide isolated from the Sargasso Sea
YFLLPFLLLKILFLTVKSFFLLKKNNISILISTGGYMSLPICLAAKILGTKIFLIEPNMVLGRANKFFLNFSKKLICYSKNIINLPSGIDHKLTTINPLIRKEYYEPNAYQKNDNLFTIIIIGGSQGAKIFDELLNKSFIYIAKKVSLKIIHQTSKKNIKFLENFYSQNNIESKVFSFDYNLKEVLKHGDLCITRAGASSLAELSFMNIPFVAIPLPSSKDNHQYENAKYYKEQDCCWIIDQKDFDDKKFGKFLLELINKSEDYIRKKNNYRN

SEQ ID NO: 117281 - protein, 251 aa, Unknown
  Bacterial polypetide isolated from the Sargasso Sea
IAEKFGKENVIFIASNREIERKIYKNSGFKVSHLNISGFRGKNLFEKILWPFNLTSCVLISIFLLIKYRPQNVLLMGNYISVIGLIASIFLLKDIYIHEQNAILGSANKFSLIFAKKLFTTFPLNEKKEHNFGQPVRSAFNSLSYATHSEKEHILVLGGSQGALFFNKQISEILGDLNLNEKILFQTGEHDVKTSTEKIEYIKFIENMPEVMAKSKFIICRAGASTVAEVQSIGLPAVFIPLPNSIDDHQM

SEQ ID NO: 117282 - protein, 204 aa, Unknown
  Bacterial polypetide isolated from the Sargasso Sea
KINITGNPIRNGIEKGLKKTGYDLFQLNNKMPTVFLFGGSQGSVPLNNAIRSILNLFEENGIQLLWQTGEKNYESLKSLETDKIKVKPYVKEMDLAYAICDLVISRAGALTLSELLVCGMPSILLPLPTATADHQTKNAATMVESGAAIMIKQNELDNDILGNTIIELINDKNKLKNMSVNALRIAKPGATKDIVKNILEVAKV

SEQ ID NO: 117283 - protein, 286 aa, Unknown
  Bacterial polypetide isolated from the Sargasso Sea
MKILIIAGGTGGHVYPALSIANEFQDDGNTIYWIGKKNSLEENIALSEDFSFYPINARGFLGKNFFAKIRSIFFIFAALIRSFFLISRINPDIIITTGGYLTLAPGLIGSFFCPLFIHEQNSAPGLTNRILHKRSKITFEAFPDTFKNLTNKVKCVGNPIREDIVNISPINKSNETKFNILILGGSQGSKQINDILINILLTKKVPSHWSFIHQVGKLTSKELKDAYTESGNEFVIKEFIENMAEAYQFCDIVISRSGAMTVSEICTVQKPSILLPLPCLQKIINT

SEQ ID NO: 117284 - protein, 285 aa, Unknown
  Bacterial polypetide isolated from the Sargasso Sea
FFLIIYSLVKSFLYLMKKKIHYLISTGGYMSIPLCISAKILGINIYLFEPNKVLGKSNKLILRFCKKIICNYENIINFPSKFDDKIFLIKPILKKEIFLINKNKKTPNNGFNILVLGGSQGANFFDQFVENLILNISKKFKITVYQQVNNSNILDKLKKKYLDNNIQSNIFTFDNDILNSMSKCNIAITRCGASTIAELVYLNIPFIGIPFPFAKDNHQFYNAKFYEEKDCCWLYNQKDISLDKMLDLFNSIIENPKIYSKKYENLSKISYEYDWNNVNKKLVDL

SEQ ID NO: 117285 - protein, 279 aa, Unknown
  Bacterial polypetide isolated from the Sargasso Sea
MDNKNRIIIAAGGTGGHVLPSIGLANYLMKDYDIEIFTDERGIKYLNNHKNIKIKKINSSRVFGKNIIYFIIGIVKVFLSIIFSIILLIKRKPKLIIGMGGYSSFPVCLSGFILKIPIFIYENNLVIGRANKILLPFSKKILVSTNSIQGIDNKYKNKICHIGFLLRDNILGVKNTNLEVTKNNLSILVIGGSQSAKVFGEQIPEVMKECNKKGIKFNVYQQCLESQKKDIQNIYGKLDIKFELFTFCDDLLKYYQKSDMAITRCGASSIAELVNLRIP

SEQ ID NO: 117286 - protein, 123 aa, Unknown
  Bacterial polypetide isolated from the Sargasso Sea
MVKTRKKKPVVVLAAGGTGGHVYPAESLARHLEEGGWEIFLISDKKGADLSASECWLKVIEITVEPLSGKTGLGKIVALLSLLKGIFQVRRVLKKLHPKAVIGFGGYASFPTMVAAVIGKYKT

SEQ ID NO: 117287 - protein, 218 aa, Unknown
  Bacterial polypetide isolated from the Sargasso Sea
MNILIIAGGTGGHVYPALSIANEFQGEENTIYWIGKKNSLEENIALSEDFSFYPINARGFLGKNFFAKIISISFVFVALIRSFFIIRNIKPDIIITTGGYLSLAPGLIGSLFCPLFIHEQNSVPGLTNRILHKRSKISFEAFPHTFNNLTNKVKCVGNPIREDIVNISPLDKSNETKFNILILGGSQGSKQINDIFLNILLTKKAPSHWSFVHQGRKS

SEQ ID NO: 117288 - protein, 293 aa, Unknown
  Bacterial polypetide isolated from the Sargasso Sea
ANVGGAVNSLGIAVPKSMSGRCDKLGRINRLTRAGVGNPVRVEKSVVKALNWISANQNADGSWGKTAKGAMTGFALLCYLGHCDLTDSPEYGENVAKGIKYLVELGDEKDGWLFVTHNKHGAAYAQGIATYAMAEAYGMTEKDFILPVLQKAIHRIVAGQKQDGGWVYMESRPGPNGLKFDDFGKNEKRSSDTSVSGWQFQALKAAYNTGAVFPGLEPALEGAVKNFYRVYSAKNGGFGYQTATQASNLKHKLTGVGSLGLQSWSKGHPSDEQKKETLNNAMKHILRNNPAMA

SEQ ID NO: 117289 - protein, 95 aa, Unknown
  Bacterial polypetide isolated from the Sargasso Sea
TVSEVAAAGRAAIFVPLPFAVDDHQTKNAQSLVKQNAALMIAQSVLKENLGQAVRQWLQHPEGCFKMGAVAKTCASTHATENVVSHVKSVVGVGD

SEQ ID NO: 117290 - protein, 235 aa, Unknown
  Bacterial polypetide isolated from the Sargasso Sea
GRSNKFFLKYCKKIFCYSNEIINFPEKYLKKVVIIDNLIRKEFYSIEKNKKTELKDEIKILIIGGSQGAKLFDTELRNALLNISAKYKLNVYHQINSTQNLDLENFYKQNNIVHNLFNFEEDILKLISDIDLCITRAGASTLSELFYLNIPFLAIPYLLAVDDHQFQNALFYKKKNCCWILKEDEIKHNVLSDFLINIIQNKNDYILKKENMKKFSYQNSWNKINEKLVGIINEN

SEQ ID NO: 117291 - protein, 197 aa, Unknown
  Bacterial polypetide isolated from the Sargasso Sea
KTIFLVAGGTVGHLFPAIAVSKYFEKSQLHFLVDKRTEKILLNNNLRYHLISSSKLEKNIFKVIISLFKIFYGFIYSLYLIVKFKPALVVGFGGYTSIPTLLAAKVLNKKILIHEQNSVMGKTNRLLSKISNKTAITYKNTVFADTSAIFSGIPIRELKVKKKFNKNKKKKILIIGGSQGAKVFSEIIENIVLRLDK

SEQ ID NO: 117292 - protein, 317 aa, Unknown
  Bacterial polypetide isolated from the Sargasso Sea
IIKSIKNVGYPGIDIIESRRPKLSKNGKEINAEGMYVLPGFIDMHGHIGGGSQGADPDYVFKLWLAHGITTVREPGGRGIDYSIDLKNKSNNNEIIAPRLIIYSSFGSGFKKEISSPEEAREWVRYNAKKGADGIKFFGSSPSIMEAALDENNQLGLGSAMHHAQLNVARWNVLNSARAGLTSMEHWYGLPEALFDDRTVQDYPSNYNYSNEQHRFEEAGKLWRQAAEPYSEHWNYVMNELIELDFTLDPTFNIYEASRDLHRARRAEWHEEYTLPSLWEFYQPSKISHGSYWHFWGTEQEVEWKQNYNLWMTFINE

SEQ ID NO: 117293 - protein, 340 aa, Unknown
  Bacterial polypetide isolated from the Sargasso Sea
IATLAKSPLATLKYFFTLLVCALALAAGWWLWNYYMQGPWTRDGKVRAELVSITPEVSGKIIKIAVKDNQLVKAGEEIFTLDPEPYRIALDNALGGAGQGQIGSRQGGARGEPAQRPVAQRHLRRGGGRGPPQCPGDEGGLPGGPGQSGAGQMVAGQDPGSCRERWLHHQPADPGRQLCQRRRAAGGTGGHPLFLRAGLLRGDQAQAHSAGQTGRGGTLQRGAAAARRGGEHRARHPRSERGGGRQPAAGRQTQCALGAAGPAGAGADQAAGGAARADADCRHYLHHHHRGVRWPPRSGARPPGARPMAASGATPCVTAWRCACRSGWPSCWSWTPPTGR

SEQ ID NO: 117294 - protein, 247 aa, Unknown
  Bacterial polypetide isolated from the Sargasso Sea
MPRLLIAASGTGGHLFPALAVADRLPPDWRVRWLGVPDRLERQLVPGRYPLFTVRAGGLQGRGLGKLKQLVQLLWSAWPVSRLIRKEECVAVFTTGGYIAAPAILAARLCRRPVVLHESNAIPGQVTRLFGRFCTRVALGLPQAADYLSGCRPEVTGTPVREEFLKPAACPDWVPPGSGPLLLVIGGSQGAVGLNRMVRGAAPALLGLGCRIVHLTGSVDPDQGQLKHPDYIERPFSDEIPALLQHA

SEQ ID NO: 117295 - protein, 358 aa, Unknown
  Bacterial polypetide isolated from the Sargasso Sea
MKNILIVTGGSGGHVVPSTSLFEHLKNKFSVKMVSDLRGSKYINTEKFKYELIDVPNLFLKPYLLPINIFKYFLNIFQSIRFLKNNKTNIVISTGGYMTFPFCLAAFILQKKVFLFEPNSVLGRSNRFALKFSTKIICYDENLRNFPIKYNSKKVIVKPILKKEIYNLEKNIINLKKEIKKILIIGGSQGASFFDENITELIIEISKKRNLEVIQQISNINNLSSIKNKYDKSNINYKFIEFTNDSHELYNGIDLAITRGGASTLSELSFLNIPFISIPLPYARDNHQFYNSEFYYKKNCCWLIKQKEFEFKKFSKMIFEIFNDYKNYNEKFKNLEEITKKNTWNNINNKIIEIIDEN

SEQ ID NO: 117296 - protein, 345 aa, Unknown
  Bacterial polypetide isolated from the Sargasso Sea
MSKKNNLLVAASGTGGHIFPALAVSKEVEDEWNIHWLGIQQRLDAHLIPQKYNLKTLNLKTPRKNIFLFYQYIKILMSTFQIIRILKEKKINLVFTTGGYISAPTIVASKLLKIPIIIHESNVVPGMVTKYFGFLCNYVLLGFKETNSYLKNCKTIFTGTPLREQFYKFNFLPEWVPKGNGPLLIVMGGSQGAKAINQILYESLEFLIKKQFRIVHIVGESNLKPFHVKNSKNYIQKKFTNEIAALIQNCDLVISRSGAGTINELMEAEKPSILIPYPYSKNNHQEKNAMILAASGGSVLINQNNMSKEVFEETLERIFKIKSKKGKKHYEILDLMKKNRKIIIK

SEQ ID NO: 117297 - protein, 350 aa, Unknown
  Bacterial polypetide isolated from the Sargasso Sea
MKFLIVAAKTGGHIYPAKVISQELIERGHEILLLGIGNQIEENAFKDLNSKIYKLKIEGFRGQTNLKKLKVLGQVVINVFKVLGIIKKENIDVMIGFGGFITLPAGIASWLRKKPIFIHEQNAVIGSANKILSKISKKTFIGFPLENSNKKIKTILTGNPIRKINLKNFDSIHENDNKIKIYVTGGSQGSQFINETIPKALLKLSSNLKIKHQCGKNHFNLVDRLYRSADFEFEVKEFYENPFKEILWSDFVISRAGALTLSEIISLKRGALIIPLSSSIDNHQALNAESIQRMNLGITHYQEESLEKLVTRLKSIVDNKTYMSWKKLGLDIHINASKMILDIIEDYEFK

SEQ ID NO: 117298 - protein, 343 aa, Unknown
  Bacterial polypetide isolated from the Sargasso Sea
MKNILIVTGGSGGHVVPSTSLFEHLKNKFSVKIVSDLRGSKYINTKEFKYELIDVPNLFLKPYLLPINIFKYFLNIFQSIRFLKNNKTNIVISTGGYMTFPFCLAAFILQKKVLLFEPNSVLGRSNRFALKFSTKIICYDENLRNFPIKYNSKKVIVKPILKKELYNLEKNIINLKKEIKKILIIGGSQGASFFDENITELIIEISKKRNFEVIQQISNINNLSSIKNKYDKSNINYKFIEFTNDSHELYNGIDLAITRGGASTLSELSFLNIPFISIPLPSARDNHQFYNSEFYYKKNCCWLIKQKEFEFKKFSKMIFEIFNDYKNYNEKFKNLEEITKKNT

SEQ ID NO: 117299 - protein, 163 aa, Unknown
  Bacterial polypetide isolated from the Sargasso Sea
MNAKKKVIFSAGGTGGHVYPALAIAKNLILENYDVLWIGTTRGLEKKIIEAESINIKYINFQGIRNKGFITILKSPFLLLRACYQVYKIYKFYKPDLTICFGGYVTVPCGLISFLKKIPLFIHEQNSVLGLSNKILSLFSQKTLMGYRKPGSKYLYSGNPMRE

SEQ ID NO: 117300 - protein, 531 aa, Unknown
  Bacterial polypetide isolated from the Sargasso Sea
MELPEQYKNALKVQQAFNKQQSLEQKAKASLFPERVFQEFEGKASSWWQFDPRVDHLIALLKKHKRSKFLLICAHADTAIALEEAVRVREGIRASVFHEGMSIIERDMAAAYFAQEDNSAQMLICSEIGSEGRNFQFAHHLVLFDLPLNPDLLEQRIGRLDRIGQTQDIQLHIPYFNDHPQQVLLDWYQQGLEALSQTCQTGRAVFEQVSTELFELLAANAIDKDAVQTLIAKSAELNQQLKQKLEQGRDKLLEINSSGRGKASELAEAIAVLDDETRLPMFMLRAWDVLGVNQDDRGENSMVLTMSEHLHSHYPMLDDDGISVTFDRATALAQEDIQFLSWDHPMVQGTLDILTNEQMGNSSVALLPNKALPAGTYFVEFIFIVEASAPKELQLGRYLPVTPVRLLLEKNGKNLAANVGFEQFNKQLKPVGRQPAAKMVKALQSLIHPLIGKAQELAAVRLTEVQQQAQQLMQQKLNAQIERLQALRKLNPSVRPEEIAHLQQQQQELTDYISKARLKFDALRVVVVSHD

SEQ ID NO: 117301 - protein, 361 aa, Unknown
  Bacterial polypetide isolated from the Sargasso Sea
ILITGGGTGGHLFPALAIGEEIQRRDPDVKIHYVGSVFGLEAKVFPVKDVWHTLLPIRGLQRGLSITSIARNLLLPFRIIRSLIKTNKLLNEFIPEVIIGTGGYASALPLYVASKKEKTLPIILQEQNSFPGITTRLFADKAKKICVAFNESENDFNSKTILTGNPIRKGIEDGNRIKGLKQFNFKDNKKTIFLFGGSQGSSYLNKMMSQVVSNIASAGIQVIWQTGDLEFSLYKKMNSNSIRVIPFVNNMDDAYAIADLLICRSGALTLAEITVCGKPSILIPYPYAAGDHQTKNAQSLVNAGAARILFEKSLKSKELLYTVMNLIHNKKELLKMSLASKKLGKPNATNEIVNNIFKVLN

SEQ ID NO: 117302 - protein, 111 aa, Unknown
  Bacterial polypetide isolated from the Sargasso Sea
LIPGADLVICRAGALTVSEVACAGVAAVFVPLPSAIDDHQTANASWLVQKQGAVLLPQSEFSKGALLPLLQSWLQDKSALRHLANNARRTAIDDAAEHVVRVCGEVIGKTK

SEQ ID NO: 117303 - protein, 366 aa, Unknown
  Bacterial polypetide isolated from the Sargasso Sea
MDEEIRIMIAGGGTGGHLYPALAIGEEIMQRTSNVKVHYIGSEFGLEANIFPRKGLSHTLIPISGFQRSLSIKSILKNLSLIFRIPLSIRKIQSLFDRMDPKVIVGTGGYASAIPVKVGLDRNIPTMIQEQNSYPGLTTRLFANKATAVFAGSKDSESYINSKINVTGNPIRNGIEKGLKKIGYDLFQLDNKMPTVFLFGGSQGSVPLNNAIRSILNIFEKNGIQLLWQTGEKNYESLKNLESDKIKVKPYIKEMDLAYAICDLVISRAGALTLSELLVCGMPSILLPLPTATADHQTKNAATMVESGAAIMIKQNELDNDILRNTIIELINDKNKLKNMSANALRIAKPGATKDIVKNILEVAKV

SEQ ID NO: 117304 - protein, 99 aa, Unknown
  Bacterial polypetide isolated from the Sargasso Sea
MNILIIAGGTGGHVYPALSIANEFQNDGNTIFWIGKRDSLEENIAIREDFSFYPINARGFLGKNLFAKISSIFFLFAALIRSFFIISNIKPDIIISTGA

SEQ ID NO: 117305 - protein, 363 aa, Unknown
  Bacterial polypetide isolated from the Sargasso Sea
MSKKNNLLVAASGTGGHIFPALAVSKEVEDEWNIHWLGIQQRLDANLIPQKYNLKTLNLKTPRKNIFLFYQYIKILMSTFQIIRILKEKKINLVFTTGGYISAPTIVASKLLRIPVIIHESNLIPGMVTKYFGFLCNYVFLGFKKTNSYLRNCKTIFTGTPLRDQFYKSHPLPEWVPKGKGPLLIVMGGSQGAKAINQILNKSLEFLMKKQFRIVHIIGECNQQSFNVKNSNNYVQKKFTNEIAALIQNCDLVISRSGAGTINELIETEKPSILIPFPYSKNNHQEKNAMILAESGGSVLMNQSKISKEVFEETIERIFKRKSKNGKYYYEILDIMKQNMENNNKIKSKIEIRKFFNYFLKEF

SEQ ID NO: 117306 - protein, 96 aa, Unknown
  Bacterial polypetide isolated from the Sargasso Sea
MSGRALIAAGGTGGHVYPALAVAGLLIEQGWSVDWVGTERGIEQRLVPAAGLPLHHLSVSGLRGKNWVARVQGAVRLIAALWQSLSLMWRVKPDVV

SEQ ID NO: 117307 - protein, 354 aa, Unknown
  Bacterial polypetide isolated from the Sargasso Sea
MNILIIAGGTGGHVYPALSIAKEFQDNRNTIFWIGKRDSLEEKIALREDFSFYPINARGFLGKNFFAKISSIFFLFSALIRSFFLINNIKPDIIISTGGYLSVAPGLIGSMFSPLFIHEQNSVPGLANRILHKRSKITFEAFPDTFNNLTNKVKCVGNPIREDIVNIPPIKKTNKTKFNILILGGSQGSKQINDILIKILLTKKVPSHWSFIHQAGRLNSRGLQDAYTESGNEFVIKEFLENIAEAYQFCDIVISRSGAMTVSEICSVQKPSILLPLPWSSENHQYTNAKYLKNRGAAEIINSDVSNSIQLLELLINLESDHNRLNSMAYSASKVFPQFASKNIYKSINEYLTI

SEQ ID NO: 117308 - protein, 393 aa, Unknown
  Bacterial polypetide isolated from the Sargasso Sea
IYPALTLAHQFKKDGNKVVIVGTGNDTEKMIFAKEEFEVRYFKSKLQNYPTYKKILFLFKVNNDLQEFVRDIKPDLILGMGGYASAQVCISGGRESCIIIHEQNAIAGRVNRLLLFLNARAAIEGLPGAFNWFEKLYMYFFGSHTYLGNPIREKIAHDAWLHRKTNGRYLDSKAKNYPEELRILVMGGSQGARSINKIAPEALSDANEKIDIKVLHVTGEDDYQNVKDSYSRLNIEAKVKKYYPEIENAYASADLFIGRSGAMTVSELSTLGLPSILIPYPYATDNHQLFNALFLEAKGGAIIINNDDLTKELLAEKVITLGRDHKSLSQMAESANERRLSFSSELITKYCYATIFFEKQLKSYGFWHSWFYPLVRVKERIERAKEHSNLDEL

SEQ ID NO: 117309 - protein, 92 aa, Unknown
  Bacterial polypetide isolated from the Sargasso Sea
MQTTDKQQKTALIMAGGTGGHIFPAKAVAELLKQQGWSIHWLGTADRMEATLVPQFGFPFHSIAVAGLRGKGLKSLVKAPLMLLRSISQGPR

SEQ ID NO: 117310 - protein, 106 aa, Unknown
  Bacterial polypetide isolated from the Sargasso Sea
MESKLFFLAAGGTGGHVFPAEALAHELIARGHKVHFVTDSRAERFAGTFPAEKIHVVPSATIGSKNPISVIRAGFTLFKGSRVARALFAQYRPAAVIGFGGYPTVP

SEQ ID NO: 117311 - protein, 89 aa, Unknown
  Bacterial polypetide isolated from the Sargasso Sea
MKIFISAGGTGGHVFPAVEFIKLAMTNGHTVYWFGTKRGIERKNLPANCHLFEINAVGYRGKRFLQKIFSIFRLVQTFFKVAIKFIKYN

SEQ ID NO: 117312 - protein, 197 aa, Unknown
  Bacterial polypetide isolated from the Sargasso Sea
MIMAGGTGGHVYPALSVAEHLRDQGIEIVWLGTRKGLEARVVPAAGFQVEWLEIKGLMGTSWIRKAVMPWMLLRAVAQALRIIRRRMPDAVLGMGGFATGPGGLAAWLLRRPLVIHEANAVCGVTNRLLAPLSKRILTGFENVRHLGEKARWTGNPVRLEITQRVSTPMGTDKAQPFRLLVLGGSQGARSINILMPL

SEQ ID NO: 117313 - protein, 167 aa, Unknown
  Bacterial polypetide isolated from the Sargasso Sea
MNQSVDIVFTGGGTAGHVLPNVRLINDLKKEGFSCAYIGSRTGPEFKLTSNLDLPFKSISCGKLRRYFSFQNFLDLFKIIIGIIQAIVILFRIKPKIIFSKGGFVSFPVVFAAWLNRIPVILHESDLTPGLANRLSLPFCTEVCTSFAGTASFLKTSKTIHFTGLPI

SEQ ID NO: 117314 - protein, 266 aa, Unknown
  Bacterial polypetide isolated from the Sargasso Sea
MNSVSKKKLISIVAGGTGGHIFPAISLIKFLKDKYNILIITDNRGSVYFTNFKKKNYLSYNFKLVAINSQSPFKYGLINKVIFIFLSVLTALKILNLFLKHKPILLIGFGGYSTFIPCLMSKIMGIKFFIHEQNAMMGRANKFLEFFATISFLGFKNTKPKINIKKRIFCGTPLREEFYKINKYKSDYNYIKQNFNILIFGGSLGSDYFSTQIPNLICSLNKSISQKLNITHQVINEKILPVQTIYKKNKISANVKSFFPDMIKYF

SEQ ID NO: 117315 - protein, 231 aa, Unknown
  Bacterial polypetide isolated from the Sargasso Sea
MNKLDPRNTILIAAGGTGGHIFPSLSIINEIRVGNFIVITDQRGKTYFNSFLNKKVINFKISIHNVSSPSNKVMFDKIKSSYQFLISILKSIILMIKNKPNIVIGFGGYPSVAPVLAAKLLKIPSIIHEQNATLGRANKFLGNVANFLALSFIETKNIYRVKNSIFTGNPVRQEFNNIGKLKYPCPTKENKINILIIGGSLGASFFSKHLTTIICSLPIELRKNLKIVQLS

SEQ ID NO: 117316 - protein, 215 aa, Unknown
  Bacterial polypetide isolated from the Sargasso Sea
HCVWAGGIAGKGPVARVRSAGAIAFGTLQARKLLKNLKPSVVVGFGGYASVPTMLAATYSTVSTAIHEQNAVLGRANRLFAFKVQKIATSYEKVSHIPETAVTRAVYTGMPVRAAVKDLHGTPYPALSEKTDFNILVFGGSQGASVFSRVVPQAIEKLEGAYRKRLSIVQQCRPEDYNALRADYDRLGVRAEIAPFFQDIPHKIAESHLVISRSG

SEQ ID NO: 117317 - protein, 101 aa, Unknown
  Bacterial polypetide isolated from the Sargasso Sea
CRAGALTVSEVAAAGRAAIFVPLPFAVDDHQTKNAQSLVKQNAALMIAQSVLKENLGQAVRQWLQHPEGCLKMGAVAKTCASTHATENVVSHVKSVVGVGD

SEQ ID NO: 117318 - protein, 63 aa, Unknown
  Bacterial polypetide isolated from the Sargasso Sea
  misc_feature (29)..(29): Xaa can be any naturally occurring amino acid
MSKKIIFAAGGTGGHIFPAINLMKHFFEXGYEVILVTDKRGKNFINDYSKSKCYVLAADTPTN

SEQ ID NO: 117319 - protein, 133 aa, Unknown
  Bacterial polypetide isolated from the Sargasso Sea
MSVQKTALIMAGGTGGHIFPGLAVAEELRTRGWRVHWLGAPGSMESRIVPQHGFALELIDFSGVRGKGLVTLALLPLRLLRAFWQALQVVRRVKPDVVVGLGGYITFPGGMMGVLAGKPLVLHEQNSVAGMAN

SEQ ID NO: 117320 - protein, 45 aa, Unknown
  Bacterial polypetide isolated from the Sargasso Sea
MQTTGKQQKTALIMAGGTGGHIFPAKAVAELLKQQGWTIHLAGYS

SEQ ID NO: 117321 - protein, 289 aa, Unknown
  Bacterial polypetide isolated from the Sargasso Sea
VQKTKEKFKIVLTGGGTAGHVMPHIALLPTFIKKNWIVLYIGGAGLEKEMIENIGLSYKQIATGKLRRYFSWQNLFDFFKVFLGFFQSLYHLYIFKPNVVFSKGGFVSVPVCFAARVLKIPVVTHESDLTPGLANKMIAKVASAVLYAFSDTKKYLNSKIKSFWVGIPVRSDLLSGDKEKGLKLCRFKEDDKKPVLLILGGSLGAKIINNTVYSCLDELLNSYKVIHITGRSKSKNIHKKGYKSFEFLNDEFKDVLACSQLVVSRAGANSLFELLAAQKPMLLIPLSKG

SEQ ID NO: 117322 - protein, 172 aa, Unknown
  Bacterial polypetide isolated from the Sargasso Sea
MKKKIIFSAGGTGGHIFPAIHLMNHFYEKGYEVLLVTDIRGKKFIENISKFKSYEIKTDTPTNKTILKKIFSFFVILLSIFKSIIIIKKEKPDLVFGIGGYVSFPISFASKIFRLPLVIYESNTVLGRTNKFLLSFSNKIFLARELVINFNKKYHNKTHIVGAVLNKKIINY

SEQ ID NO: 117323 - protein, 293 aa, Unknown
  Bacterial polypetide isolated from the Sargasso Sea
MSKKIIFTAGGTGGHILPAINLMKHLSEKKYEVVLVTDLRGNNFISNYSEFRSYVFKAETPTNKNFIKKLISFFTIFNSILKSIFILRKEKPDLIIGFGGYVSFPISFASKFFNLPLFIYESNLTLGRANKYLLPFAKKVILSKLIKKNFPKKFENKICESGPILSKNIINQKDFKKNNIKENFVILVLGGSQGAEIFGRVVPYVIEMIKKEGFNIEIKQQCISSQTKSLVEYYQKNYIKNYIFEFDKDISKHILSSDLVITRSGATTTAELVHMQTPFIAIPLPNSIDNHQY

SEQ ID NO: 117324 - protein, 220 aa, Unknown
  Bacterial polypetide isolated from the Sargasso Sea
MGDKNILIMAGGTGGHVYPALAIAENLQIKGYKLFWLGTIYGLEKNIVPKYGYTLLNISIMSVRGKGFLRLLAMPILITVAVFQSLIIMIKIRPVIVIGMGGFVSGPGGIAAWLMRIPLLIHEQNAIAGLTNKMLAPFAVSIMTAFPKVFEKSKKISVTGNPVREEIKNITKPEKRYINRKSNLLRILVLGGSLGAEKLNKIIPETLQNLIGNYSVQVKH

SEQ ID NO: 117325 - protein, 177 aa, Unknown
  Bacterial polypetide isolated from the Sargasso Sea
MNKKIVFSAGGTGGHIFPTINLMKFFHNNNYEVLLITDSRGKSLINKYLKFNSYTINSGTFSNKNIFLKFLSFFLILFSIIKSIFILVKEKPNLVFGLGGYVSFPISFASKFLNIPLVIYENNLILGRANKYLLPLSKKILLGTAKPINFPKKYENKISLVGNILKEEIMNYKLLKK

SEQ ID NO: 117326 - protein, 285 aa, Unknown
  Bacterial polypetide isolated from the Sargasso Sea
MYNNKRKIVTIIAGGTGGHIFPAISCFHFLKNKFQICIITDSRGSKYFEQIKNNKINKFDLIIINSISPYKKGLIQKFKFVLYTLFSILKSLFIFFKIKPNLLIGFGGYTTVFPCVIGKMIGIKFIIHEQNAIMGRANKFLEKFANLTMVSFENTIPKKYSRRRIFCGTPVRNEFFINKNNKLTKEKNKKYFNILIFGGSLGSNFFSEKLPEAFCKIDKNILNKLQITHQIINPKINEVKQRYLSHNISASVNKFFKNIHQYYKNADLIICRAGGSTLAEILVSK

SEQ ID NO: 117327 - protein, 184 aa, Unknown
  Bacterial polypetide isolated from the Sargasso Sea
TPVNMLVVGGSLGAQVLNQTLPSAFKALNKTSAINVWHQTGKGHLNSVEQAYKTHMFESDNVKVAEFIDDMDAAYAWADIVICRAGALTVSEIAAAGKMAVFVPFPHAVDDHQTANAQYLVEADGALLMQQSAFNEQSIVVLLTPYLVNPSLINKMANNAKKQAILDATASVAAHCEQVSNKRA

SEQ ID NO: 117328 - protein, 70 aa, Unknown
  Bacterial polypetide isolated from the Sargasso Sea
MSTRPIMIMAGGTGGHVFPGLAVAKEICNRSGSVVWMGTRKGLEGRLVPEAGIEVEWISVSGLRGRGVFA

SEQ ID NO: 117329 - protein, 284 aa, Unknown
  Bacterial polypetide isolated from the Sargasso Sea
KKINIILSTGGSGGHVFPAIAISDEMKKLKIEHSILTDKRCEKFFSKRNIPYKVIHSSSVQINPLSFFIGVLKIFAGLIQSLIYIKKLKPLLLIGFGGYSSVPTIIAAKLLRISTSLHEQNAVMGKANRFLSNFTEFDMLSYKKTKFSNVNKSIYTGMPVRNILVNKNSTNNSNSIKVLVLGGSQGARIFSKIIPQIIDALDNKFKKKIILVQQSRTEDIKSLKDLYLKMGIKFKLKTFFENIFEEMLDSKFIISRCGSSTLAEIELVSRFSILFPLPGSKDNH

SEQ ID NO: 117330 - protein, 166 aa, Unknown
  Bacterial polypetide isolated from the Sargasso Sea
MKALILAGGTGGHVYPALSVAKELRRNQFSISWIGKKGSLENKFSKDETFDFICLDTKAFKGKNIYGKVVALLYLAINFVKCFLIIRKIKPDIVFSTGGYVSLAPALATFILSIPLFIHEQNSIPGLVNKILNRISKLTFEAFPGSFAESSKIHTVGNPVRSEIIK

SEQ ID NO: 117331 - protein, 87 aa, Unknown
  Bacterial polypetide isolated from the Sargasso Sea
MKKKIIFTAGGTGGHIFPAINLMKHIFEKDYDVLLVTDNRGNKFIENFKEFKSYILKSGTPTNKNIIKKFISFFIIFYSLIQSIIII

SEQ ID NO: 117332 - protein, 218 aa, Unknown
  Bacterial polypetide isolated from the Sargasso Sea
MKFLLVAAKTGGHVFPASVIGKELTKNDHEVIFVGTGSEIEKNAYHNLDSEIYELSMNGFRGVNLITKLQVLFQTFINVFKVIQIINKEKINAMIGFGGFITVPVGVACWIKRKPIFIHEQNALMGSANKLLSKISKINFLGFPINGFNNSIYSGNPIRESFINNSENTIDDKNKIRIYITGGSQGAQYINKHLPRIFKDFSNNIKIIHQCGKIIFKK

SEQ ID NO: 117333 - protein, 123 aa, Unknown
  Bacterial polypetide isolated from the Sargasso Sea
MTRKKIILVAGGTGGHIFPAISLAGKLQKMSHEILIITDFRGKKFEIEKDGWSVKYINIENPNQNKLFGKIKAAVSLIRSTVASWKIISNFGADVVVGFGGYPSLPPVIAANWMCVPSILHEK

SEQ ID NO: 117334 - protein, 234 aa, Unknown
  Bacterial polypetide isolated from the Sargasso Sea
MILAGGTGGHVIPGLTIAKALEDAKCDITWIGTKGGIEEKLVRKANIKIEYITVMGLRGKSLMNVLIAVKQLIRSIFQSINLLMKYRPDVVIGMGGYVSGLGGIVAFLLRYPLVIHEQNSVPGTTNKFLAKIASSVLEAFPGSFRSNMNAKTIGNPIREEIALIEDPKKRLQDRNFPIRILVLGGSQGSLILNQSVPKAIKEVASSSKLEVFHQAGEKTLSNAKKAYEDVPVGL

SEQ ID NO: 117335 - protein, 354 aa, Unknown
  Bacterial polypetide isolated from the Sargasso Sea
MNILFIAGGTGGHVYPALSIAQEFKGKDNNIAWIGKADSLEERVCSKEGFVFYSVKGTGFLGKGVLGKIVALYFFVAALLRSFFLLIKIKPDLIVSTGGYISLAPSLLGSLFCPLFIHEQNSVAGLTNKILHRFSKITFEAFPDTFLNFKSKTSFVGNPVRKEIFSISTKKQEKTSTFNILILGGSQGSKQINDIIKIILTNHDLPSSWNIVHQAGTLDNSRLKEVYEKSGVNFEIREFIENMAEVYQQSQLIISRSGAMTISEICSAGKPSVLLPLPWASDNHQYINAKYLKDQGAAEIIESDISNSEKLFKLLIELEKDDNKRESMGHNATLVFPPNTSESIYKAINESLKI

SEQ ID NO: 117336 - protein, 349 aa, Unknown
  Bacterial polypetide isolated from the Sargasso Sea
MKILIVAAKTGGHVFPASSIAKELILNNHEIVFLGIGSEIEKNAYKDISSKTYNLSIQGYRNENVITRLKVLLQVFINIFKVIRIVSREKIDGMIGFGGFITVPAGIGCWLKRKPIFLHEQNAILGSANRLISKFSKINFLGFPIKNIKRSIVSGNPIRRSFANNHNYKNNDDFINIYITGGSQGAEYINNEIPKIFENFPHAIKIKHQCGKHNRQKVRNLYEHHNVNAEVSEFYKNPAEQIIWSDFVISRGGALSLSEITSLKRGVFIIPLPTSIDNHQIENAKIIENMNMGILHNQNDSPRILLQEIKRIIENKTFLKWKNTTNQSHNKSREIITSNIEKYFNNEAV

SEQ ID NO: 117337 - protein, 348 aa, Unknown
  Bacterial polypetide isolated from the Sargasso Sea
MKYLIVAAKTGGHIFPAKAIAEELINNNNEIILLGIGNEIENNAYKELDSKKYSILIDGFRGQKILKKFKVLIQTLKGVLKVLKIIKKENIDAMIGFGGFICIPAGIAIWIRRLPIFIHEQNAIMGTANRFLSKIAKINFLGFPIKQIKRSVVSGNPIRKSFINTDNGHVDYDQNEIRIYVTGGSQGANFINQEIPMVLKELSFNLKIKHQCGENYFNEVKSLYSAGNVQAEVYKFYDNPSKEILWSDFVISRAGALSLSEIISLKRGALIIPLATSIDNHQVKNAKIITKMNMGVLHEEKDGKEKLINKLKEVIEKKLYLNWKKYHTNDHVNASKIILKHLEDYFKK

SEQ ID NO: 117338 - protein, 226 aa, Unknown
  Bacterial polypetide isolated from the Sargasso Sea
MKVLILAGGTGGHVYPALSVAKEFSRSKHSIFWIGKKLSLESELSKKESFNFTSLETKGFKGKNIIGKIVSLIYLEINVLKSIFIIKKIKPDMVFSTGGHVTLAPALASYLLSIPLFIHEQNSVPGLVNKILNRLSKLTFEAFPGSFNKSPKIHTVGNPVRSEIIKSPPPKPTIKEHFNILILGGSQGSRQLNEIVLKAFKNKMIPSHWHIVHQIGDLDRSSIVEA

SEQ ID NO: 117339 - protein, 347 aa, Unknown
  Bacterial polypetide isolated from the Sargasso Sea
MKFLIVAAKTGGHIFPAVAVADEIKKNNFELVFLGTGSSIEEDAYDKFSSVFYKLQMEGFRGKSLSKKLKVIFQVIFNIFKVIKIIKKEKINAMIGFGGFITVPVGIGCYLLNIPIFIHEQNAVMGSANKILSKISKINFLGMRIKNIKNSVHSGNPIRTEFFQSSDLDNEYVNIYITGGSQGADYINENLPKALSKLTNINVKHQCGKNNIIKVRELYKKYGLSAEIHDFYKNPAEQILWSDFVISRAGALSLSEISSLQRGALMIPLPTAIDNHQFENAKSIVDLGMGEIHLQNDSIERLICKIENIISNQSYVNWKKQRNKDHKYAAKVITENIYKFLNRNEKV

SEQ ID NO: 117340 - protein, 363 aa, Unknown
  Bacterial polypetide isolated from the Sargasso Sea
MSNNLIISGGGTGGHIYPAISIANQLSKKISHCNILFVGAKNKMEMKKVPQNGYKIIGLWISGFQRKFNLFSNISLPFKIIFSLIHSLLIILKHKPKIVVGTGGYASGPVMYIASILGIPVFIQEQNSYPGLTNRILSKYATKIFVAYDGMDKYFNSSKIIVSGNPIRKSIKNISVKNKSDYLSSIDLKSDLQTILVLGGSLGAYQLNEFVSKNLDFFKKNNLQVILQCGSRYSDKYKFLNNTQIKVLPFIEEMDKAFSAADIIISRSGASIISELCFVGKPVIFIPSPNVAEDHQTKNAKKLYDLGAAEYVEEDEIDYKLTSIINKILVSEIYRDSLSAKISSLSKPDASKIIVNEIKMYLK

SEQ ID NO: 117341 - protein, 352 aa, Unknown
  Bacterial polypetide isolated from the Sargasso Sea
MKALILAGGTGGHVYPALSVAKELKRNEFSISWIGKKKSLESNLSKKEGFNFISLNAKGFKGKNIFGKIISLIYLDINVFKSIFIIKKVKPDIVFSTGGYVSLAPALASYLLSIPLFIHEQNSVPGLVNKILNRLSKKTFEAFPGSFDKSSKIHTVGNPVRPEIIKNPEDKPTIKDHFNILILGGSQGSEQLNEIIIKSFKGKTVSSNWRIIHQIGHCDQAPIIELYSAQSFKYEVVPYIENIAKAYHECDLVIGRSGAMTISEICSSAKPSILLPLPWAADNHQYFNAKFLQAKKASILLESSLTSADKLFTLLNDLEKDHNARHAMSLNAFSSFQMASDSRIVEIINESI

SEQ ID NO: 117342 - protein, 196 aa, Unknown
  Bacterial polypetide isolated from the Sargasso Sea
MTKKRNIKFLVLAGGTGGHIFPAQAFAEFCIKNGDYIHWIGTNRGLEKQITQKYNIDFTEIKFNGLRGKSIFKFIKFPFSLLYNLILIKKLFKKIKPDITISFGGYSTVPGGIISYLTKTPLILHEQNAKIGRANKFLSYFAKIHSSAYENVFPEKFKNSSITIGNPLRNLFYNNQIKFNKKSNINILILGGSHGA

SEQ ID NO: 117343 - protein, 268 aa, Unknown
  Bacterial polypetide isolated from the Sargasso Sea
MKRVMIAAGGTGGHIFPALVVAEQLVAQGVEVQWVGSRRGLEARLVAPQYPLTYLKVEALRGKGRWQQFKRLVGLCWATLKMVRVIRRTRPDVVLTMGGFVSAPVGVAAWLSRRCLVVHEQNAVPGMVNRYLSRLAAVVMQGYASAFSPTTKVKTVGNPVRAALLGAALPAARYGQRNGLFRVLVLGGSQGAHAINTAVMDWVDYYALADEVEVWHQAGRSDCARLTREYDRMDVTVRVDAFIEDMVSAYTWADLVICRAGAMTVTEV

SEQ ID NO: 117344 - protein, 302 aa, Unknown
  Bacterial polypetide isolated from the Sargasso Sea
VAHHLMAQGWQVRWLGTADRMEADLVPKHGIEIDFIRISGLRGKGVNALLAAPVRIFNAWRQARAIMKQFKPDVVLGMGGYVSGPGGLAAWSLGIPVVLHEQNGIAGLTNKWLAKIATTVMQAFPGAFPNAEVVGNPVRTDVLALPSPEVRLAGREGPVRVLVVGGSQGARVLNQTMPQVAAELGDAVTIWHQSGKGAQQTVEQAYADAGQPQHKVTEFIDDMAAAYAWADVVVCRSGALTVSEIAAAGLPALFVPFQHKDRQQYWNALPLEKAGAAKILEQPQFTVDAVANTLFRVVARNL

SEQ ID NO: 117345 - protein, 220 aa, Unknown
  Bacterial polypetide isolated from the Sargasso Sea
MYRVFAGVNPPPHRRGDRPMTGDSHIMLAAGGTGGHIFPAIAVAEEMLHRGYRVSLITDSRGVNLGKTLSEVQVHRINASGIRGNILQKVSGVLSIGVGVLQARRLFSRHRPQCVIGFGGYPSVPTMLAANLSKLPAIIHEQNAVIGRANRLVAKRVSKIATSFNETAGVDAETASKINQTGNPVRAAFSQARQTPYPPIGPNGEDVKILVLGGSQGATV

SEQ ID NO: 117346 - protein, 367 aa, Unknown
  Bacterial polypetide isolated from the Sargasso Sea
MTASQRTLMVMAGGTGGHVFPGLAVAHRMEAAGWRVVWLGNPAGMEATLVPKHGIPMEYVRFGGLRGKGLKTKLTLPFNLLRACGQSLAALRRVRPDVVLGMGGYITFPAGVMTALSGRPLVLHEQNSIAGLTNKVLAKFAKRVLVAFPGALPHAEWTGNPIRAELAGTEAPKARYASRSGPLNVLVVGGSLGAAALNEVVPRALAMLAPGERPRIVHQAGAKHIEALKANYEAAGFAAGEDVRLVPFIDDMAAAYAAADLVICRSGAMTVSEIAAVGVAALFVPFPYAVDDHQTSNAAFLADAGAAVLVQQRDLSAELLADWLRGQSRASLADMAERSRSLAKPEATDEVARVCAKAAGANLEELQ

SEQ ID NO: 117347 - protein, 354 aa, Unknown
  Bacterial polypetide isolated from the Sargasso Sea
MSAVRVILAAGGTGGHVFPAIGLAEALSKRGHSVLCLTDTRAIDLQPSVRSWDVKCIPAISFSGSGIRPKIRAFWTLIKGIFLSQYFIKKFDAEIVVGFGGYPTVAPIIAAFISRSIVILHEQNAVLGRANRWLSSVAHIIATSFELTRGLNDKHSKTVMVGNPVRNEMKKARSSSYPIIKADNKINILVIGGSAGAKILSDTVPKALLLLPTSLRKNLLITQQCREEDLSRVVAIYKTAKQKSDIKTFFDDISEKIKNSHLVISRSGASTVAELSVIGRPAILIPYQFAIDNHQKINADAMVKSGGAWSFDESNLQPKALANFLEEILTDHEKLRSAAHASRNFGTPSLRRSL

SEQ ID NO: 117348 - protein, 361 aa, Unknown
  Bacterial polypetide isolated from the Sargasso Sea
MQHKNILIMAGGTGGHVYPALAVAENLRLKGFKLFWLGTSHGLEKKIVPNYGYPLHKISIVSIRGKGFLRLLLVPFFLIISLFQALIIMIKVRPVVVLGMGGFASGPGGIAAWIMRIPLLIHEQNAIAGLTNKLLAPFASSIMTSFPRVFKKSNKIIVTGNPTREDIKNISKPEQRYKNRESKLLKVLVLGGSQGAEKLNKIIPETLHNFDRKYIIKIKHQCGERNLSGTHEIYAKYNVAAEIIPFIEDMVGAYMWADIVICRAGASTIFELAACGIASILIPFPFAVDDHQVRNAEYLANNDAAILVEESELSTKKLKQILLDFFNTPELLIEMAIKARKLSKPNASNNVAKLCVETSYA

SEQ ID NO: 117349 - protein, 362 aa, Unknown
  Bacterial polypetide isolated from the Sargasso Sea
MTDAGKRILVMAGGTGGHVFPALAVAKYLAQQGWQVRWLGTADRMEARLVPQYGFDIDFIDIKGVRGNGLVRKLAAPFKVVRSILQAKAVIAEFKPDVVLGMGGFASGPGGVAAKLAGVPLVLHEQNAIPGMTNKLLSRIANQVLCAFKNTFTQVKAKVVGNPIRRELIALGAEPKQAADDALKVLVVGGSLGAKVFNDLMPEVVAALSKQQSITVWHQVGKDNLAGVKSAYQQQGQEGGVNVAEFIDDMEAAYRWADVVLCRAGALTVSELAAVGLPSILVPYPHAVDDHQTRNAQVLVEAGAAFLLPQAILDVNKLVSKLQLLANDRAELAQMGQRARDVAVLDATEQVAQVCIALAEKG

SEQ ID NO: 117350 - protein, 278 aa, Unknown
  Bacterial polypetide isolated from the Sargasso Sea
PVALVKQLNPELVLGFGGYASGPGGLAAWLAGKPLIVHEQNAVAGTTNRLLARIAKKVLVAFPQAFADRKDRLVVGNPVRAEVLAVSGQKQLQAPTPSLKVLVVGGSLGAQVFNQHLPALFAKAAQFGQLEIRHQTGKAMETQVQQAYAALPELKASASAFIEDMAAAYTWADLVICRAGALTVSEVACAGVAAVFVPLPSAIDDHQTANASWLVQKQGAVLLPQSEFSKGALLPLLQSWLQDKSALRHLANNARRTAIDDAAEQVVRVCGEVIGKTK

SEQ ID NO: 117351 - protein, 362 aa, Unknown
  Bacterial polypetide isolated from the Sargasso Sea
MTDAGKRILVMAGGTGGHVFPALAVAKYLAQQGWQVRWLGTADRMEARLVPQYGFDIDFIDIKGVRGNGLVRKLAAPFKVVRSILQAKAVIAEFKPDVVLGMGGFASGPGGVAAKLAGVPLVLHEQNAIPGMTNKLLSRIANQVLCAFKNTFTQVKAKVVGNPIRRELIALGAEPKQAADDALKVLVVGGSLGAKVFNDLMPEVVAALSKQQSITVWHQVGKDNLTGVKSAYQQQGQEGGVNVAEFIDDMEAAYRWADVVLCRAGALTVSELAAVGLPSILVPYPHAVDDHQTRNAQVLVEAGAAFLLPQAILDVNKLVSKLQLLANDRAELAQMGQRARDVAVLDATEQVAQVCIALAEKG

SEQ ID NO: 117352 - protein, 356 aa, Unknown
  Bacterial polypetide isolated from the Sargasso Sea
MVMAGGTGGHVFPGLAVADRLKAQGWTIHWLGTADRMEAELVPAHGYPISFIDIQGVRGNGIKRLLVAPYRIVKSVLQARRVLKTIRPDVVLGMGGFASGPGGVAAWLSGIPLLLHEQNAAAGLTNKLLARLAKRVLMAFPGAFAPSRRTAVVGNPVRPEVVALPDPQLRSGAEPLRLLIVGGSLGARVLNEQVPPAVAAAGVPIEVRHQCGKGNRDAVAEAYAKEGVAAEVSEFIKDMAGAYAWADLVVCRAGALTVSEVAAAGVAAIFVPLPHAVDDHQTRNALTLVDGGAAEFLPQSELTTASLAARLSWLAGRRETLLNMAQAARRVAITDAAERVADECKRLATGQIEREL

SEQ ID NO: 117353 - protein, 304 aa, Unknown
  Bacterial polypetide isolated from the Sargasso Sea
PLHLINVSGLRGKGKLSLLKAPFQLLRSLLQARRIVRELQPVCVLGMGGYVTGPGGLAARMAGVPLVIHEQNAVAGTANRLLSRIATRICEAFPNTFGASDKRRTTGNPVREELFLETPREPLAGRKPKLLVLGGSLGAEPLNKLLPAALEKIPVDVRPQVFHQAGKQHADITAERYRDAAVEAEVAPFIKDMARAYGWADLVVCRAGALTVSELAAAGLPSFLVPLPHAIDDHQSRNAEYLAKEGAAVLLPQHATDAATLAAQLTEVLMHLEKLNVMGATARRLAKPDATRTVVDICQEVMRG

SEQ ID NO: 117354 - protein, 372 aa, Unknown
  Bacterial polypetide isolated from the Sargasso Sea
MTPMQQRTLMVMAGGTGGHVFPGLAVAHLMQAWGWKVVWLGNPAGMEATLVPKHGIPMEYVRFGGLRGKGLKTKLMLPLNLLRACSQSLSVLRRVKPDVVLGMGGYITFPAGLMTALSGRPLVLHEQNSIAGLANKVLAKVAKRVLVAFPNALPHGEWTGNPIRAELARAIAPKARYAARSGPLNVLVVGGSLGAAALNEVVPRAVALLAPNERPRIVHQAGAKHIEALREHYAAAGLQAGADVELVPFIDDMTSAYANADLVICRSGAMTVSEIAAVGVAAFFVPFPFAVDDHQTTNAAFLADNGAALVVQQRDLSAQKLADWLRSQTRETLAEMAERSRSLAKPDATEQVAKICATVAGSISGASPEGKQ

SEQ ID NO: 117355 - protein, 408 aa, Unknown
  Bacterial polypetide isolated from the Sargasso Sea
GSPYSSPSCFALNPWLLDAADLTAEGFISSEDQETLPGADAASEGVDRVDFALANQRSQALATALLSRWPSQNQERQEAFRAWCEVQAWLENHARYSVLHDQHQGAWWSWPAPLATHREGALQRWSDDHGEALLQVKLVQWHLDRQWQAIRRLAKERGVLVFGDLPFYVSADSADVWSHRSLFTIKENGELTTQSGVPPDYFSETGQLWGSPVYRWGRHRLTRFRWWRHRIARQRQLADLLRLDHFRALAGYWAVPGGDTTAQNGSWQPSPGRSLLSKLQQDGGGALPLIAEDLGVITPDVEALRDGFRLPGMKVLQFAFDGLQDNPYLPENVEGSRWVVYTGTHDNPTTLGWWNKLDDASKERIASRVNGPVEAPAWHLFDMAFATPAELVVAPLQDLLHLDDSARF

SEQ ID NO: 117356 - protein, 314 aa, Unknown
  Bacterial polypetide isolated from the Sargasso Sea
VPEAGFEIIGLWISGIQRKLTLDNLSFPLKLIVSIAKSFALIKDFKPHVVVGVGGYASGPLLYAASRKGVPTLIQEQNSYAGLTNKWLSKNVSTICVAHDGMDKYFPQEKLVVTGNPVRKTIKLNPNRINEGYQHFELDANKPIILLIGGSLGARSLNEAVLANLDFIKQNGIQLIWQCGGYYYKEMQERTGDLPRSIVLRDFVRQMDFAYAIADVVISRAGALSLAELMLTGKPVVLVPSPNVAEDHQTINAKALVEHDAAIMIQDSVASEELFKATFDLVKSQDRRDQLAQNIHSMAHENAAMDIANEVIKL

SEQ ID NO: 117357 - protein, 301 aa, Unknown
  Bacterial polypetide isolated from the Sargasso Sea
LNGLVKKHCEENIKPIQQEYSALQNEKEDRWTWHPRQIELMEGAKDKARELGLWNFFLPDPDGNIGDGLTNLDYTYVATEIGKYPLASESMNCSAPDTGNMEVLERVGTEEQKKQWLEPLLNGEIRSAYAMTEPNLASSDAKNISTSAVLDGDEWVINGEKFYISGAGDPRCKIMITMVKTSPDAHPSKQQSQILVPKDTPGVQILEGMQVFGHDHAPHGHMHIKFDNVRVPKENILLGEGRGFEISQVRLGPGRIHHCMRTIGKAEIALELMVKRAGTREAFGKPIAKLGGNLEIFPERG

SEQ ID NO: 117358 - protein, 419 aa, Unknown
  Bacterial polypetide isolated from the Sargasso Sea
MNFDYTPKVQALREKLLAFFDEHIYPNEQAFYAEIARNRQNGNAWLPTELIEQLKQKARDAGLWNLFLPESVRGAGLTNLEYAPLCEIMGRVPWAPEVFNCNAPDTGNMETIERYGSDDNKREWLEPLLQGHIRSAFLMTEPEVASSDATNIQTSIVRDGDTYVINGHKWWSSGAGDPRCKVYIVMGKTDPEAPRHSQQSMILVPADATGITVHRPLTVFGYDDAPHGHMEITLQNVRVPASNMLLGEGRGFEIAQGRLGPGRIHHCMRLIGLAERALELMAKRSMQRVAFGKPVAAQGVTQERLAEARCMIEQARLLTLKTAYMMDTVGNKGARGEIAMIKVVAPNMACQVIDWAIQAHGGGGVSDDFPLAYAYASARTLRFADGPDEVHRNAIAKLELARYMDVGAEARVEMPVTRV

SEQ ID NO: 117359 - protein, 828 aa, Unknown
  Bacterial polypetide isolated from the Sargasso Sea
MNFVGAGNTFAYNPDTDTIDISIAGGGGAAAGSGEDITLGSPTDGSYSPGALDTINSTTKVVDSIDDLNELALNMLKGTAVSEVDFSADKTTGGSPLSITLTPTYAGNADLFDVDWGDGGNVELDLTLSQLNHTYNESAGGLFSITLNAKNNSGSGAGSEFAVAKNDYIAVYTPDPEVRFNLYRNASGGSLLSGNDLYVVEGQSLYLKNTTTNTSGFDVDYSVTWGDGNTDSVADDASAGGVDGSRLEHTWADGTSSGTGLDTLTVSLDSHNGSDPSVIPTTKEIALKVYDDSPAQPDGLSTKSLTDIPSTGDSPRLASGATDNTGASLLSDGDVVDRVVSGTVDSSMTDSFAYGADTGSLTANVSGSADGSVTFTFAGDESGTYDSLIITEESDYQLLDSTGSPTTFQSSIYYPGLYKGFKARISKPVADLAVGANSFQLQHSTTGNTNTVSFIKDDLTSDPTTDVSSATVSENVSGVYRYISGVPYYNSGSPSLTLSGVAIEDLVGQCYTNQNDIVEVNDGVSVTDYSYSDIDGSTTMLTGGVPNANVGTASPYTIGDLVVPITTPNVRTESQIRVRAKNVNGVGNYSSEIPTKIQVHTSEQYGISEIAIPVEDALGNGTHTDDGIRIFDFSGDVDDTPAFNNAINFYTNDPYTELLDPGIEGTQEAMIRDGQIQHDTSDYSTGYLPAGGPDRSGDTGTQYFTFAFRRQVVANFDINIESSGVAGLWIALPGTAIDTTSGLNGWLRSDSAYSGAGVPGTETGGNGSNGCAFNNSDLILPNTSLSGGYTMTLGEENMSNATGNVVLVRIALTSGQSISSLSITEASL

SEQ ID NO: 117360 - protein, 417 aa, Unknown
  Bacterial polypetide isolated from the Sargasso Sea
MLQNDPELFELSMSEKTQPLMDLVKKHCEENVKPIQQEYSALQNEKEDRWSWHPRQIELMEGAKEKARELGLWNFFLPDPDGNIGDGLTNLDYTYVASEIGKYPLASESMNCSAPDTGNMEVLERVGTEEQKKQWLEPLLNGEIRSAYAMTEPNLASSDAKNISTSAVLDGDEWVINGEKFYISGAGDPRCKIMIVMVKTSPDAHPSKQQSQILVPKDTPGVEILEGMQVFGHDHAPHGHMHIKFNNVRVPKENILLGEGRGFEISQVRLGPGRIHHCMRTIGKAETALELMVKRAGTREAFGKPIAKLGGNLEIISRARIEINAMRLAVLQAAKAMDVLGNKEARVYISAIKAMVPEKACKIIDQAIQMHGAAGISQWTPLAGLYTDIRHLRFADGPDEVHHMVVGRAEMQKYDLW

SEQ ID NO: 117361 - protein, 416 aa, Unknown
  Bacterial polypetide isolated from the Sargasso Sea
MIQNNPELFELSMSEKTQPLMDLVKHHCEENIKPIQAEYSALQNEKEDRWSWHPRQIELMEGAKDKARELGLWNFFLPDPDGNIGDGLTNLDYTYVATEIGKYPLASESMNCSAPDTGNMEVLERVGTEEQKKQWLEPLLNGEIRSAYAMTEPNLASSDAKNISTSAVLDGDEWVINGEKFYISGAGDPRCKIMIVMVKTSPDAHPSKQQSQILVPKDTPGVHILEGMQVFGHDHAPHGHMHIKFDNVRVPKENILLGEGRGFEISQVRLGPGRIHHCMRTIGKAEVALELMVKRAGTREAFGKPIAKLGGNLEIISRARIEINAMRLAVLQAAKAMDVLGNKEARVYVSAIKAMVPEKACKIIDQAIQMHGAAGISQWTPLAGLYTDIRHLRFADGPDEVHHMVVGRAEMQKYDL

SEQ ID NO: 117362 - protein, 417 aa, Unknown
  Bacterial polypetide isolated from the Sargasso Sea
MLQNDPELFELSMSKKTQPLMDLVKKHCEENVKPIQAEYSALQNEKEDRWSWHPRQIELMEGAKEKAKELGLWNFFLPDPDGNIGDGLTNLDYTYVATEIGKYPLASESMNCSAPDTGNMEVLERVGTEEQKKQWLEPLLNGEIRSAYAMTEPNLASSDAKNISTSAVLDGDEWVINGEKFYISGAGDPRCKIMIVMVKTSPDAHPSKQQSQILVPKDTPGVHILEGMQVFGHDHAPHGHMHIKFDNVRVPKENILLGEGRGFEISQVRLGPGRIHHCMRTIGKAEVALELMVKRAGNREAFGKPIAKLGGNLEIISRARIEINAMRLAVLQAAKAMDVLGNKEARVYVSAIKAMVPEKACKIIDQAIQMHGAAGISQWTPLAGLYTDIRHLRFADGPDEVHHMVVGRAEMQKYDLW

SEQ ID NO: 117363 - protein, 416 aa, Unknown
  Bacterial polypetide isolated from the Sargasso Sea
MSTNPELFELSMSDKTQPLMDLVKKHCEENIKPIQQEYSALQNEKEDRWTWHPRQIELMEGAKEKARELGLWNFFLPDPDGNIGDGLTNLDYTYVATEIGKYPLASESMNCSAPDTGNMEVLERVGTEEQKKQWLEPLLNGEIRSAYAMTEPNLASSDAKNISTSAVLDGDEWVINGEKFYISGAGDPRCKIMIVMVKTSPDAHPSKQQSQILVPKDTPGVQILEGMQVFGHDHAPHGHMHIKFDNVRVPKENILLGEGRGFEISQVRLGPGRIHHCMRTIGKAEVALELMVKRAGTREAFGKPIAKLGGNLEIISRARIEINAMRLAVLQAAKAMDVLGNKEARVYVSAIKAMVPEKACKIIDQAIQMHGAAGISQWTPLAGLYTDIRHLRFADGPDEVHHMVVGRAELQKYDLW

SEQ ID NO: 117364 - protein, 414 aa, Unknown
  Bacterial polypetide isolated from the Sargasso Sea
TNPELFELSMSKKTQPLMDLVKKHCEENIKPIQQEYSALQNEKEDRWTWHPRQIELMEGAKDKARELGLWNFFLPDPDGNIGDGLTNLDYTYVATEIGKYPLASESMNCSAPDTGNMEVLERVGTEEQKKQWLEPLLNGEIRSAYAMTEPNLASSDAKNISTSAVLDGDEWVINGEKFYISGAGDPRCKIMITMVKTSPDAHPSKQQSQILVPKDTPGVQILEGMQVFGHDHAPHGHMHIKFDNVRVPKENILLGEGRGFEISQVRLGPGRIHHCMRTIGKAEIALELMVKRAGTREAFGKPIAKLGGNLEIISRARIEIDAMRLAVLQAAKAMDVLGNKEARVYVSAIKAMVPEKACKIIDQAIQMHGAAGISQWTPLAGLYTDIRHLRFADGPDEVHHMVVGRAELQKYDLW

SEQ ID NO: 117365 - protein, 116 aa, Unknown
  Bacterial polypetide isolated from the Sargasso Sea
IYNIGWLEPLLDRIARDPTTVVCPVIDVIDDTTLEYHWHDSSGVNVGGFDWNLQFNWHAVPERERKKHSSTAEPVASPTMAGGLFSINKKFFEQLGNYDPGFDIWGGENLELSFKV

SEQ ID NO: 117366 - protein, 233 aa, Unknown
  Bacterial polypetide isolated from the Sargasso Sea
RQKKLSEIKNDFINNISHEFKTPIATINLALDSISSNEKNNITEKTNSYLGMIREENSRMLSQVENILRISQLEKSSNPLKMDSIDLHEVIEDATEHVKLLIGSKKGKINLKLNAINRYINGNKNHLENIIINILDNAIKYSKNSPVINFTSNTVEDKIQLCIEDKGIGMDKSTQKMIFEKFFREQNGDIHNIKGHGLGLSYVKKIVDFHNGIIKVDSEKGVGTKFSIEFKNI

SEQ ID NO: 117367 - protein, 515 aa, Unknown
  Bacterial polypetide isolated from the Sargasso Sea
MSISLIGIIFLQGYWIYSSWENKEEEFSLSVNTSLREVSLEVKNRELNDYVNAYQMLIDSIGAPNESNFTDVFLFLDEDQSTNLSTFFAYGILEEDYNISIPDNLVSNPDNNQNVKDYKAVKTTILNKNIFDRRENTLNSSISKIKSVQDIDVFKFEKYKSAFEEYASSLPIHKRTTSREIQVLLEQSFQERDITTPYEFGIYSNGLSTKIKSNNYLEVQSGPKYTIPFFDDQLSNVKYDLVVSFPEKREYVLSGIIGIASLSFLLTLIIIILSTGALYQILRQKKLSEIKNDFINNISHEFKTPIATINLALDSISSNEKNNITEKTNSYLGMIREENSRMLSQVENILRISQLEKSSNPLKMDIIDLHEVIEDATEHVKLLIGSKKGKINLKLDAINRYINGNKNHLENIIINILDNAIKYSKNSPVINFTSNTVEDKIQLCIEDKGIGMDKSTQKMIFEKFFREQNGDIHNIKGHGLGLSYVKKIVDFHNGIIKVDSEKGVGTKFSIEFKNI

SEQ ID NO: 117368 - protein, 286 aa, Unknown
  Bacterial polypetide isolated from the Sargasso Sea
FDDQLSSVKYDLVVSFPEKREYVLSGIIGIASLSFLLTLVIIILSTGALYQILRQKKLSEIKNDFINNISHEFKTPIATINLALDSISSNEKNNITEKTNSYLGMIREENSRMLSQVENILRISQLEKSSNPLKMDSIDLHEVIEDATEHVKLLIGSKKGKINLKLNAINRYINGNKNHLENIIINILDNAIKYSKNSPVINFTSNTVEDKIQLCIEDKGIGMDKSTQKMIFEKFFREQNGDIHNIKGHGLGLSYVKKIVDFHNGIIKVDSKKGVGTKFSIEFKNI

SEQ ID NO: 117369 - protein, 260 aa, Unknown
  Bacterial polypetide isolated from the Sargasso Sea
MAAGGAGSASGAADRQWPPPSRADLSPLFPADQPMPYRRDLMSFYQVLQQATAPAREHLFNAPIIEACRKGEISRDIYLRFLSQAYYHVRHTVPLLMATGGKLGQEYEWVRGAIAEYIDEEYGHQEWILSDIRACGGDAEAVRHGQPELPIELMVAFLYDQVQRGNPMGFFGMVQVLEGTSVAIALTVADQLKAGLGLPPQAMSYLSSHGALDQEHLKFFESLMNRVEAPADQAAIIHSAKVVYRLYADMLYQLTENQTS

SEQ ID NO: 117370 - protein, 184 aa, Unknown
  Bacterial polypetide isolated from the Sargasso Sea
AVEGAFAETVLFPGDPLRAKYIAETFLENVEQVTDVRNMLGFTGTYKGKRISVMGSGMGIPSCSIYATELIKDYGVKNLIRVGTCGAISTDVKVRDVIIGMGACTDSQVNRLRFKGQDFAAIANYELMNAVIESAKVKGTKIRVGNVFSADLFYTPDPQMFDVMEKMGVLGVEMEAAGLYGVCP

SEQ ID NO: 117371 - protein, 221 aa, Unknown
  Bacterial polypetide isolated from the Sargasso Sea
MTAHINAQPTDFAETVIMPGDPLRAKYIAETYLTDAVEVTNVRNMLGYTGYYQGQRISVMGHGMGISSMVLYGHELINFFGVKCIIRIGSLGATQKHVHMRDVILAQAAGTDSPTNAKRSSGYHMATSATFSLLHKAYTQANEKGISVKVGNVFSGDLYYDPDEDMIPALERFGVLGIDMEVAGLYGLAHQQGIESLAILTVSDHCLTGEETTAEERQLSF

SEQ ID NO: 117372 - protein, 166 aa, Unknown
  Bacterial polypetide isolated from the Sargasso Sea
MATKHMNAAPGDFAGTVLMPGDPLRAEYIAENFLDGPRRVTDIRNMWGFTGEYKGIPVSVMAHGMGIPSVSIYVTELITEYDVKRVIRVGSCGTTHPDVKLRDVLIAQGASTDSGVNRMRFGGYDFAALASFSLVRHAVDAAEALDVRYHVGNIFSADLFYTPDTA

SEQ ID NO: 117373 - protein, 112 aa, Unknown
  Bacterial polypetide isolated from the Sargasso Sea
MATPHIHAPEGAFAETVLMPGDPLRAKHIADTFLQDVVCVNTVRNMFGYTGTYQGKKVSVLGSGMGIPSMSIYATELVKFYGVKNIIRIGSCGGLPLDVKVRDVVIAMGAST

SEQ ID NO: 117374 - protein, 233 aa, Unknown
  Bacterial polypetide isolated from the Sargasso Sea
MTAHINANPDDFAETVIMPGDPLRARYIAETFLTDAREVTNVRNMLGYTGYYNGQRISVMGHGMGIPSMVLYAHELVNDFGVKRIIRIGSLGATQRHVQMRDVILAQAAGTDSPTNAKRSAGYQMATSADFALLHKAFTKAQERAIPVKVGNIFTGDLYYDPDENLIPALEKFGVLGIDMEVAGLYGLAHQQGIEALAILTVSDHCLTGEETTAEERQLSFNQMIELALHTAL

SEQ ID NO: 117375 - protein, 215 aa, Unknown
  Bacterial polypetide isolated from the Sargasso Sea
MPGDPLRAQYIAENFLDDAVQVTGVRNMFGFTGTYKGKPVSIMGSGMGIPSMSIYARELIVSFGVKNIIRIGTCGGIGTDIKIRDVIFAQGASTDSNVNRARVRGYDFSAIADFDLLLNGVNAAKELGIKAKVGNVFTTDTFYQADDTFYKDLDKLGVLAVDMETAGLYGVAAEYGANAMALFTVSDHVITGEATPADERQSTFNEMVKIALESI

SEQ ID NO: 117376 - protein, 234 aa, Unknown
  Bacterial polypetide isolated from the Sargasso Sea
MTAHINAQPTDFAETVIMPGDPLRAKYIAETYLTDAVEVTNVRNMLGYTGYYQGQRISVMGHGMGISSMVLYGHELINFFGVKRIIRIGSLGATQQHVEMRDVILAQAAGTDSPTNAKRSSGYQMATSATFSLLHKAYTKANEKGISVKVGNVFSGDLYYDPDEDMIPALERFGVLGIDMEVAGLYGLAHQQGIESLAILTVSDHCLTGEETTAQERQLSFNNMIELALETALN

SEQ ID NO: 117377 - protein, 234 aa, Unknown
  Bacterial polypetide isolated from the Sargasso Sea
MTAHINAQPTDFAETVIMPGDPLRAKYIAETYLTDAVEVTNVRNMLGYTGYYQGQRISVMGHGMGISSMVLYGHELINFFGVKRIIRIGSLGATQKHVHMRDVILAQAAGTDSPTNAKRSSGYHMATSATFSLLHKAYTQANEKGISVKVGNVFSGDLYYDPDEDMIPALERFGVLGIDMEVAGLYGLAHQQGIESLAILTVSDHCLTGEETTAEERQLSFNNMIELALATALN

SEQ ID NO: 117378 - protein, 236 aa, Unknown
  Bacterial polypetide isolated from the Sargasso Sea
MATPHINAVEGAFAETVLFPGDPLRAKYIAETFLENVEQVTDVRNMLGFTGTYKGKRISVMGSGMGIPSCSIYATELIKDYGVKNLIRVGTCGAISTDVKVRDVIIGMGACTDSQVNRLRFKGQDFAAIANYELMNAVIESAKVKGTKIRVGNVFSADLFYTPDPQMFDVMEKMGVLGVEMEAAGLYGVAHEFGARALCVVTVSDHIRTGEKTTSDERQTTFNDMILMTLDAAITL

SEQ ID NO: 117379 - protein, 236 aa, Unknown
  Bacterial polypetide isolated from the Sargasso Sea
MATPHINAVEGAFAETVLFPGDPLRAKYIAETFLENVEQVTDVRNMLGFTGTYKGKRISVMGSGMGIPSCSIYATELIKDYGVKNLIRVGTCGAISTDVKVRDVIIGMGACTDSQVNRLRFKGQDFAAIANYELMNAVIESAKVKGTKIRVGNVFSADLFYTPDPQMFDVMEKMGVLGVEMEAAGLYGVAHEFGARALCVVTVSDHIRTGEKTTSEERQTTFNDMIVMTLDAAITL

SEQ ID NO: 117380 - protein, 239 aa, Unknown
  Bacterial polypetide isolated from the Sargasso Sea
MATPHINAEMGDFADVVLMPGDPLRAKHIAETFLEDVREVNNVRGMLGFTGTYKGRKISVMGHGMGIPSCSIYTKELITDFGVKKIIRVGSCGAVRMDVKLRDVVIGMGACTDSKVNRIRFKDHDFAAIADFDMVRNAVDAAKALGVDARVGNLFSADLFYSPDGEMFDVMEKYGVLGVEMEAAGIYGVAAEFGAKALTICTVSDHIRTHEQTTAAERQTTFNDMIKIALESVLLGDKE

SEQ ID NO: 117381 - protein, 238 aa, Unknown
  Bacterial polypetide isolated from the Sargasso Sea
MATPHINAKDGAFADTVLMPGDPLRAKYIAETFLENVEQVCDVRNMFGFTGTYKGRRISIMGHGMGIPSCSIYAKELITDYGVKTLIRVGSCGAVREDVKLRDVVIGMGACTDSKVNRLRFKDHDFAAIADFDLVANAVQAAKNKGVAVRVGNIFSADLFYTPDPSMFDVMEKYGILGVEMEAAGIYGVAAEYGAKALTICTVSDHIRTGEQTTSEERQLTFNDMIEIALDSVLLGDN

SEQ ID NO: 117382 - protein, 304 aa, Unknown
  Bacterial polypetide isolated from the Sargasso Sea
MENFDYIILGAGSAGCVLANRLSANPNHKVLLIEAGSKDTNPWIHIPGGYFKTMLNPKTDWCFQTEREKYCDNREMVYPRGKTLGGSSSINGMLYIRGQSNDFNYWRQLGNVGWSWEDVLPYFKKSEDFQFGENEFHGSGGPLAVQEIRGTFKVCDLFMDAAEEFGHKRTDDFNNGDNEGMGYFPFTVRNGLRCSTAVGYLNPVKKRKNLKVVTNAHVKNIEFDNKKADKVNYWIGNNVISVKANKEVILSSGTIGSPHILQASGIGPGELLKKNNVNVVKDHPGVGMNLTDHLMLRPVYKVKN

SEQ ID NO: 117383 - protein, 280 aa, Unknown
  Bacterial polypetide isolated from the Sargasso Sea
SPCVTAPLVGALLYISTTGDALGGGLKLFALGLGMGAPLVLFAIGGGALLPKSGTWMVGVRKAFGVMLLAVSVWLLERVLPAPVTLALWGLLAVGSAIWLGALEFTLKSGRQRLAQLLGVALLVYGVSAWLGALQGQSDPLRPLGQLDAKAVLPSGANAGWQTVDTPAALDAALLSAKNADQPLLLDWYADWCISCKVIEREVLAAPAVREQLTGYRLVRFDITRSDAEQRALLDRYQLFGPPALQLFAPNGEEWQDLRTVGETDAESFVKRLRQANGRI

SEQ ID NO: 117384 - protein, 109 aa, Unknown
  Bacterial polypetide isolated from the Sargasso Sea
MGKFSDKYDLNKAKLLKQLIEKSYKKGNFTLSSGKKSSHYLNCKPVSLNGEGLNLISELFLDLKDLRSKAVAGLTLGADPLVSGLIVKAALNGLDLDGLIIRKEIKKYG

SEQ ID NO: 117385 - protein, 39 aa, Unknown
  Bacterial polypetide isolated from the Sargasso Sea
MFSKKQEFIEFTLHEKILKFGRFTLKSGRISPYFFNTGV

SEQ ID NO: 117386 - protein, 94 aa, Unknown
  Bacterial polypetide isolated from the Sargasso Sea
MPPLPGSSDDRRRILLERLSTQAYRRGQFTLASGRESEHYVNCKPVSLSGSGLALISAGMLEHVESDAIAVAGLTLGADPLVSGVAVLAAQQDR

SEQ ID NO: 117387 - protein, 152 aa, Unknown
  Bacterial polypetide isolated from the Sargasso Sea
SEHYVNCKPVTLSGEGLLYASCCMLECVEEDSVAVAGLTLGADPLVSGVALVSAIDEIKLDALIVRKEAKGHGTGAWIEGPELPAGSKVTVLEDVITTGGSAIKAAEKLRDAGYIVNRVVAIVNRQEGTEADDAMDAANLDLVSLFVLEELI

SEQ ID NO: 117388 - protein, 177 aa, Unknown
  Bacterial polypetide isolated from the Sargasso Sea
MGNFSEKYDLNKAKLLKQLIEKSYKRGNFTLSSGKKSSHYLNCKPVSLNGQGLNLISDLFLELKDSRSKAVAGLTLGADPIVSGLIVKAASQGLNLNGLIIRKEIKKYGTKAGIEGPLLQEGTLVTVLEDVVTTAGSVIKAINKLRENDYVVEEVLSIVDRQEGGREALSAENVKLK

SEQ ID NO: 117389 - protein, 89 aa, Unknown
  Bacterial polypetide isolated from the Sargasso Sea
RKEIKDHGEGGSLIGTLKSKKVLIIDDVLTAGTAIKNSLKIIKKEKADLSAVMVALDREEKDENNNFYRDNLNKEGIKIFSIAKISELT

SEQ ID NO: 117390 - protein, 107 aa, Unknown
  Bacterial polypetide isolated from the Sargasso Sea
MGKLSDKYDLKKAKLLKQLIEKSYKKGNFTLSSGKKSSHYLNCKPVSLNGEGLNLISDLFLELKDSRSKAVAGLTLGADPLVSGLIVKAALHGLDLDGLIIRKEIKK

SEQ ID NO: 117391 - protein, 190 aa, Unknown
  Bacterial polypetide isolated from the Sargasso Sea
MGDFTLKSGKKSPYFFNVGAFFEQGYIDKLADLYSELILESSISFDVIFGPAYKGIPLAAAISASLAVKTGKPVPFAFDRKEEKKHGEGGQIVGELKNKKILIVDDVLTAGTALKQSIEIIIGAGGSLSACVVALDREEKIEGRIARDRLLEEYKINILSIAQISNLVEYLESSGNLDDAEIIKNHISRS

SEQ ID NO: 117392 - protein, 135 aa, Unknown
  Bacterial polypetide isolated from the Sargasso Sea
MGNFSEKYDSNRAKLLKHLIEKSYKKGNFTLSSGKKSSHYLNCKPVSLNGEGLNLISDLFLELKDSSSKAVAGLTLGADPLVSGLIVKAASQGLDLNGLIIRKEIKKYGTKAGIEGPILEEGTMVTVFRGCGYNC

SEQ ID NO: 117393 - protein, 186 aa, Unknown
  Bacterial polypetide isolated from the Sargasso Sea
MNNFSQKNKLNKENLLKLLIEKSYKKGNFTLASGKQSAHYLNCKPVSLNGTGLQLISNLFLELMDPSSKAVAGLTLGADPLVSGLIVTAASKGLLFDALIIRKEIKEYGTKAGLEGPILKEGTIVTVLEDVVTTAGSAIKAINKLRENNLLVEEVLSIVDRREGGYEALKEQNIKLKSLFSIEDFL

SEQ ID NO: 117394 - protein, 190 aa, Unknown
  Bacterial polypetide isolated from the Sargasso Sea
QKSFIWASGWKSPIYCDNRIILSHPKTRLFIRNQISNQINKFYDEPEIIAGVATGAIGIGILVADLLKLPFVYVRPNAKKHGRLNQIEGTFLKGQSVVVIEDLISTGNSSLMAVDALRNAELNINGMISIFSYGFPISFENFKNKNVKLNSLSSYDILIEQAYESGFINVKEHVILSEWRKNPQKWNPQN

SEQ ID NO: 117395 - protein, 170 aa, Unknown
  Bacterial polypetide isolated from the Sargasso Sea
MGKFSDKYDLNKAKLLKQLIEKSYKKGNFTLSSGKKSSHYLNCKPVSLNGEGLNLISDLFLELKDSRSKAVAGLTLGADPIVSGLIVKAASQGLGLNGLIIRKEIKQYGTKAGIEGPKLEEGTLVTVLEDVVTTAGSVIKAIKKLRENNYVVEEVLSIVDRQEGGLEALQ

SEQ ID NO: 117396 - protein, 213 aa, Unknown
  Bacterial polypetide isolated from the Sargasso Sea
MVNDEYIAKETCKLLLQINAIKLNPKNPFTWASGWKSPIYCDNRIILSFPAVREKICYFLSQQIKKSYEDYDVIAGVATGAIGIGMLVANQLNKPFVYIRADRKKHGRKNSIEGFYEKSQKVVVIEDLISTGNSSLEACQSLISENLKIKGLISIFNYNFEISKLNFESKNISYSSLCSYNYLIDYAVKNNYVSDVELTQLIKWRNNPQEWNK

SEQ ID NO: 117397 - protein, 222 aa, Unknown
  Bacterial polypetide isolated from the Sargasso Sea
MKKYQKEFVEFLIDERALQFGRFELKSGRISPYFFNTSAFNSGNTVEKLSYFYAEAILRHLPQCTSVFGPAYKGIPLCLSSAIALTHLSKKDIGYFFDRKEKKAHGDQGLLVGKIPLKTEVIALVDDVITDGQTKIEAIENLKNWFGLSVSAVFVAFDRLEKNDEGIQASQAFSEKTGIPVHAIITIYDVLSLLKEDSFKNTDQVPESSVEEIESYLKVYSN

SEQ ID NO: 117398 - protein, 104 aa, Unknown
  Bacterial polypetide isolated from the Sargasso Sea
MVLDKKVAEQTINYLTQINAIKLNTKNPFTWTSGIKSPIYCDNRLLLSYPEIRKFIAEKMSKIIKNKYGENISITGVATGAIAIGALIAERLNLSYSYVRQSPK

SEQ ID NO: 117399 - protein, 88 aa, Unknown
  Bacterial polypetide isolated from the Sargasso Sea
MVLDKKVAEQTINYLTQINAIKLNTKNPFTWTSGIKSPIYCDNRLLLSYPEIRKFIAEKMSKIIKNEYGENISITGVATGAIAIGGID

SEQ ID NO: 117400 - protein, 127 aa, Unknown
  Bacterial polypetide isolated from the Sargasso Sea
MGNFSEKYDLNKAKLLKQLIEKSYKRGNFTLSSGKKSSHYLNCKPVSLNGEGLNLISDLFLELKDSRSKAVAGLTLGADPIVSGLIVKAASQGSDLNGLIIRKEIKKYGTKAGIEGPILEEGTLVTV

SEQ ID NO: 117401 - protein, 277 aa, Unknown
  Bacterial polypetide isolated from the Sargasso Sea
AVTFFNGEWFEGSPAVIKPKDHGFWLASNVFDGARSMLGRLPDLDLHCRRLIQSARIMGMSPNISAKEIEALAREGVTKFSEDTELYICPMFYPSSGFIVPEPESTEFLIHFSVSPLPPPDGFSACSTRFRRPSLDTAPTEAKASCLYPNVARGVSEARSKGFDTAVVLDPNGNVAEFSYANLFIAKDGVVHTPAINGTFLNGITRQRIIALLTNAGYQVVERAISFTELLGADEIFGTGNYAKISPCTRLENQPIRSGPIYSHARELYLEFTIDCG

SEQ ID NO: 117402 - protein, 132 aa, Unknown
  Bacterial polypetide isolated from the Sargasso Sea
MIKSRNEFLALLKEEAYKKGDFKLSSGRKSEHYVNCKPVTLQGDALMFISWCIFECLDDDCDAVGGLTLGADPLVSGVPMVAAIEERPMDGLIVRKEPKGHGTKAWIEGPELAPGSKVTVLEDVITTRWFCY

SEQ ID NO: 117403 - protein, 57 aa, Unknown
  Bacterial polypetide isolated from the Sargasso Sea
KGELSAIQEVERDYGAHIIAIIQMSDLIAYLEEKQAEQPELAAQLVAMKAYRAQYGI

SEQ ID NO: 117404 - protein, 54 aa, Unknown
  Bacterial polypetide isolated from the Sargasso Sea
PFTWASGWKSPIYCDNRTILSYPKVRDLICEYLSSQIEENFSNFDVIAGVANEE

SEQ ID NO: 117405 - protein, 98 aa, Unknown
  Bacterial polypetide isolated from the Sargasso Sea
MGKFSDKYDLNKAKLLKQLIEKSYKKGNFTLSSGKKSSHYLNCKPVSLNGEGLNLISDLFLELKDSSSKAVAGLTLGADPIVSGLIVKAALMAKILMV

SEQ ID NO: 117406 - protein, 185 aa, Unknown
  Bacterial polypetide isolated from the Sargasso Sea
GNFSEKYDLNKAKLLKHLIEKSYKRGTFTLSSGKKSSHYLNCKPVSLNGEGLNLISDLFLELKDSRSKAVAGLTLGADPLVSGLIVKAALQGLDLNALIIRKEIKKYGTKAGIEGPKLEEGTLVTVLEDVVTTAGSVIKAIKKLRENNYVVEEVLSIVDRQEGGCEALNDENVKLKSLFTIKDFL

SEQ ID NO: 117407 - protein, 180 aa, Unknown
  Bacterial polypetide isolated from the Sargasso Sea
MKDELLKLLKEHAYRKGEFKLSSGKKSEHYVNCKPVTLSAQGINLVSTLLLECISSDVVAVGGLTLGADPLVTGVAMASDECLWAPDLNGLIVRKEPKGYGTGAWIEGPLPLEGAKVTVLEDVITTGGSAIKAAKKLRDAGYVVDRVVSIVDRQEDGEADKLMKNADLELVSLYKLEELI

SEQ ID NO: 117408 - protein, 112 aa, Unknown
  Bacterial polypetide isolated from the Sargasso Sea
MGKFSDKYDLNKAKLLKQLIEKSYKKGNFTLSSGKKSSHYLNCKPVSLNGEGLNLISDLFLELKDSRSKAVAGLTLGADPLVSGLIVKASLHGLNLSGFIIRKEIKNTVPSW

SEQ ID NO: 117409 - protein, 122 aa, Unknown
  Bacterial polypetide isolated from the Sargasso Sea
KPVCFNRKEEKDHGEGGSLIGAKPEGKVLIVDDVISSGLAIREALEILKPYDVEIAGVLVTLDRQEKGQKSDLMASAELKSEGIDVFEIISLDGLLDAGNIISEDDIVRIKDYREQFRGKDA

SEQ ID NO: 117410 - protein, 120 aa, Unknown
  Bacterial polypetide isolated from the Sargasso Sea
MFKDSGALLEGHFVLTSGRHSPSYFQCAKLLQHPKYLESLSSAIAENFKSEEIDFVISPAVGGIVLGTEIGRILKKRTIFAERQSGQMTLRRGFEIRSNEKALVVEDVVTTGGSVKEVMN

SEQ ID NO: 117411 - protein, 213 aa, Unknown
  Bacterial polypetide isolated from the Sargasso Sea
MILDKKVAEQTAKYLLQINAIKLNPKNPFLWASGLKSPIYCDNRIILSYPKIRYYISNSLAMCIKKLYGDNITIAGVATGAIAIATLVAENLNCPFVYVRPEPKKHGRKNQVEGKLNRNSKIVVVEDLISTGKSSLNAVKALRIEKKDVLGMVAIFSYGFEKAKIEFKNLNVNLNTLSDYEFLLKEAINQKTINSIFLNDLKKWRKSPEKWTN

SEQ ID NO: 117412 - protein, 126 aa, Unknown
  Bacterial polypetide isolated from the Sargasso Sea
MPLTPEEQRQTLLRQLARDAYRRGHFTLASGRQSEHYVNCKPVSLSGSGLALVSAAMLPHVEPESVAVAGLTLGADPLVSGVAMTAATAGRSLDALIVRKQAKGHGTGAWLEGPLPKSGALVTVLE

SEQ ID NO: 117413 - protein, 186 aa, Unknown
  Bacterial polypetide isolated from the Sargasso Sea
MGKFSDKYDLNKAKLLKQLIEKSYKKGNFTLSSGKKSSHYLNCKPVSLNGEGLNLISELFLDLKDSRSKAVAGLTLGADPIVSGLIVKAALNGLDLDGLIIRKEIKKYGTKAGIEGPILEEGTLVTVLEDVVTTAGSVIKAIKKLRENNYVVEEVLSIVDRQEGGLEALEDENVKLKSLFTIKDFL

SEQ ID NO: 117414 - protein, 186 aa, Unknown
  Bacterial polypetide isolated from the Sargasso Sea
MRNFSEKYDLNKTKLLTQLIEKSYKKGNFTLSSGKKSSHYLNCKPVSLNGQGLNLISDLFLELKDSRSQTVAGLTLGADPLVSGLIVKAASQGLGLNGLIIRKEIKQYGTKAGIEGPILEEGTLVTVLEDVVTTAGSVIKAIKKLRENNYIVEEVLSIVDRQEGGLEALEDENVKLKSLFTIKDFL

SEQ ID NO: 117415 - protein, 212 aa, Unknown
  Bacterial polypetide isolated from the Sargasso Sea
MILDKKVAEQTINYLTQINAIKLNTKKPFTWTSGIRSPIYCDNRLLLSYPEIRKFIADRMSEIIANKYGQKISITGVATGAIAIGAMIAERLNSPYSYVRPEPKGHGLKNQIEGYIEEGSKLVVIEDLISTGKSSLKAIKALRNKNLNVVGMLSVFSYNFDFANERFQKENISINSLADYNTLVEMIIAEGSITYAESNRLMEWRKDPQSWS

SEQ ID NO: 117416 - protein, 212 aa, Unknown
  Bacterial polypetide isolated from the Sargasso Sea
MNDLKNNFIEFAINEQILRFGDFVLKSGRNSPYYFNTGLCCSGSKLRCLADFYANYIQLSELNFDFIFGPAYKGITLASSISLQLNSLFSVDKPFSSNRKEEKKHGDSGSLIGSPLSGKGLIVDDVISSGSSIEESINIIKKNNAKPISVLVALDRMELGKKRRAAFELESDNNISVHSIINIEDVVVYLKKNESGNNNIQRMEEYLDQFKR

SEQ ID NO: 117417 - protein, 215 aa, Unknown
  Bacterial polypetide isolated from the Sargasso Sea
MPGLKEHQKIFIELALQSNALEFGKFKLKSGRVSPYFFNAAKMLNGCNLYELAKCYIEEIKDINMEFDCLYGPAYKGIFLGSIVATVLSQGGTSCSLSFNRKEIKDHGEGGNIIGPDPTGNVLIIDDVLSAGTAARESIKILDNFNATPMIFLVGLDRQEKGESDLSAKSELEKDFGIKVSSIINLDALIEYSQNNQNFKTYILELEEYRKSWGA

SEQ ID NO: 117418 - protein, 354 aa, Unknown
  Bacterial polypetide isolated from the Sargasso Sea
MTARKLFDEAYYLAQNPDIAAAGIDPFQHYMSIGWRENRDPNKFFSSGFYTNFNADLREDGTINPLKHYVEFGVQELRDPSPFFDTSYYLENNLDVANGSTNPLEHFWLFGNTEARSPTASFDINYYLSNNPDVAAAVNANFFSAFEHFIAFGHKERRDPSENFNTNLYLELYPDVGASSFTAFEHYEYFGRNEKRRSDENYTVPEGNTATILGTSFAETLTGSSGDDTIQGAGGNDVIRGNNGNDTLTAGSGNDQLYGDNGNDTLTANSGSNKLFGGAGDDVITAGTGTDLITAGVGDDTINLANSSSDTLIYSGHTSNLNGSDTIATFQTNDVNNFNAVLNAGTISNLASGS

SEQ ID NO: 117419 - protein, 367 aa, Unknown
  Bacterial polypetide isolated from the Sargasso Sea
MFAGQKTVANVAPELDGVRDGGKALAAPSAVLQMSASGTTSMVITPPEVGATAKLVITTGTAGTAINEGSIITLSPENAFGVPSSIATTDIVMTSSVLTNASGAANVRVHPKNVTVEFTGAKLNNPLVHLEIPDMDPTVTGTGSNMFAGSQGIGANSTITITIAQSAGITNPTESDSPTIAVTGTGYGAGTATAGTTLPRKLTTSTTSTSRGGSVTITGYGFKNGTTATVFIDADGGKDLDSGEVQLAEAVVASDDTFAATFSLTVPPFSVASSSAINAVDGKGNSSPTSVSVGVADKIIISPTTAAIGETVQITLQDFVASNYVASGANGHVKFGSVAGTVPSTQVLQVASDGSLVFDIPNTKPAH

SEQ ID NO: 117420 - protein, 166 aa, Unknown
  Bacterial polypetide isolated from the Sargasso Sea
FFNSGHLNDLADLYHKEIIDSGIPFDILFGPAYKGIPLVAAVTSLAGAKGEKSFPIAFDRKEEKDHGEGGIIVGEIENKDVLIIDDVLTAGTALKNSIHIINSSGGKVVGAIVALDREEKIENETIKDSLEKELNIPILSIAQMNSLIKYIKESKEYSHLSKFFQE

SEQ ID NO: 117421 - protein, 75 aa, Unknown
  Bacterial polypetide isolated from the Sargasso Sea
MSGPDPLLELLVRRAYRRGQFTLASGRRSEHYVNCKPVTLSGQGALLLAPQLLQRVEPEAVAVAGLTLGADPMVS

SEQ ID NO: 117422 - protein, 190 aa, Unknown
  Bacterial polypetide isolated from the Sargasso Sea
MKKYQKEFAEFLIDEQALQFGRFELKSGRISPYFFNTSAFNSGNTVEKLGYFYAEAILRNLPQCTSVFGPAYKGIPLCLSSAIALTHLSKKDIGYFFDRKEKKAHGDQGLLVGKIPLETEVIALVDDVITDGQTKIEAIEKLNNWFGLRVSTVFVAFDRLEKNDEGMQASQAFSEKLGFLYMQSSPFMMY

SEQ ID NO: 117423 - protein, 163 aa, Unknown
  Bacterial polypetide isolated from the Sargasso Sea
MEIHRKTLLNLIKERAYKKGKFTLSSGKESEHYINCKPVSLSCEGNALISHLMFEHIEDKSAAVGGLTLGADPLVCGIAQKAYYSNKHIDALIVRKNPKGYGTKEVIEGNKPPKGSIVTVLEDVTTTGSSAIKAVNVLRDAGYIVNRVVAIVDRIEDHICMGE

SEQ ID NO: 117424 - protein, 215 aa, Unknown
  Bacterial polypetide isolated from the Sargasso Sea
MSGLKDYQKTFIELALQSNALEFGKFKLKSGRISPYFFNAAKMLNGCDLHKLANCYINAIKDSNVEFDCLYGPAYKGIFLGSIIATVLSQRGTPCPLSFNRKEVKDHGEGGDIIGPDPAGNVLIIDDVLSAGTAARESIKILENFNATPKIFLIGLDRQEKGKADLSAKSELEKDFDIQVLSIINLDALIEYSQNNQDFNTYISELEKYRMNWGA

SEQ ID NO: 117425 - protein, 148 aa, Unknown
  Bacterial polypetide isolated from the Sargasso Sea
MKKYQKEFAEFLIDEQALQFGRFELKSGRISPYFFNTSAFNSGNTVEKLGYFYAEAILRHLPQCTSIFGPAYKGIPLCLSSAIALTHLSKKDIGYFFDRKEKKAHGDQGLLVGKIPQESEVIVLVDDVITDGQTKIEAIQKLKNWFGL

SEQ ID NO: 117426 - protein, 120 aa, Unknown
  Bacterial polypetide isolated from the Sargasso Sea
MENFDYIILGAGSAGCVLANRLSVNPNHKVLLIEAGSKDTNPWIHIPGGYFKTMLNPKTDWCFQTEREKYCDNREMVYPRGKTLGGSSSINGMLYIRGQSNDFNYWRQLGNVGWSWEDVL

SEQ ID NO: 117427 - protein, 75 aa, Unknown
  Bacterial polypetide isolated from the Sargasso Sea
MENFDYIILGAGSAGCVLANRLSANPNYKVLLIEAGSKDTNPWIHIPGGYFKTMLNPKTDWCFQTEREKYCDNRE

SEQ ID NO: 117428 - protein, 118 aa, Unknown
  Bacterial polypetide isolated from the Sargasso Sea
MFNKKRDFIEFTINKKILRFGDFTLKSGRKSPYYFNTGLCHDGQLLSDLSSYYADYIKDNNLNYDFIFGPAYKGITLCSSICQSLYSKYSIISQYAFNRKETKIHGDKGNFVGCAIKG

SEQ ID NO: 117429 - protein, 212 aa, Unknown
  Bacterial polypetide isolated from the Sargasso Sea
MVLDKKVAEQTINYLTQINAIKLNTKNPFTWTSGIKSPIYCDNRLLLSYPDIRNFIAEKMSEIIKNKYGENISVTGVATGAIAIGALIAERLNLPYSYVRPEPKNHGLKNQIEGFIAKGSEVIVIEDLISTGKSSLNAINALRDESFNISGMLSIFSYNFDFANQRFQNENIPINSLADFNTLVEMILSEGSISKDEATRLMDWRKDPENWV

SEQ ID NO: 117430 - protein, 138 aa, Unknown
  Bacterial polypetide isolated from the Sargasso Sea
MKDYQEKFIRLALNAEALIFGDFTLKSGRNSPYFFNAAKMLNTKFLADLSECYTKTLQDLDVSFDSIYGPAYKGIFIASIIGASLGKSDLDIPVSFNRKEEKDHGEGGDLIGQLPSGNVLIIDDVISAGTAARESMKK

SEQ ID NO: 117431 - protein, 146 aa, Unknown
  Bacterial polypetide isolated from the Sargasso Sea
MKDYQEKFIRLALNAEALIFGDFTLKSGRNSPYFFNAAKMLNTKFLADLSECYTKTLQDLDVSFDSIYGPAYKGIFLASIIGASLGKSDLDIPVSFNRKEEKDHGEGGDLIGQLPSGNVLIIDDVISAGTAARESIEKIKSIGANP

SEQ ID NO: 117432 - protein, 185 aa, Unknown
  Bacterial polypetide isolated from the Sargasso Sea
MHPFIKKAIELEALKLGDFTLKSGLKSKYFFNIASFFNGQDMHFLASQYFKVIQKANLEFDAMYGPAYKGIPLATAISQLFYVEEQKKIELIFDRKEIKDHGEGGKLIGDISGKTILIIDDVLTAGTAIKETVEIIQENNAKTVAAIVALDRMEKDANSLTFKENLEKSLSIPILSIATFEDLKE

SEQ ID NO: 117433 - protein, 208 aa, Unknown
  Bacterial polypetide isolated from the Sargasso Sea
QKSFLNLAIESKSLQFGEFTLKSGRESPYFFNAANMLGGSNLYELAKCYVDAINDKELNFDCIYGPAYKGIFLGSIVATLFSEKGKEYPLSFNRKEEKDHGEGGNIIGKNPYGNVLIIDDVLSAGTAGRESIEAILKLSATPSSFIVGLDRQERGLSEISSSKELEKDFNIKVESIVNLDSLIDFVKENVVYTDHLDRLNEYRKSWGA

SEQ ID NO: 117434 - protein, 206 aa, Unknown
  Bacterial polypetide isolated from the Sargasso Sea
MVKDEFIAKETSKLLLQINAIKLNPKNPFTWASGWKSPIYCDNRTVLSYPKVRDLICEYLSSQIEENFSNFDVIAGVATGAIGIGMLVANKLKKPFIYVRSGRKKHGRKNSVEGYFQKNQKVIVIEDLISTGKSSLEACDSLIEENLNVQGLVSIFNYNFDISKANFESKRINYYSLCSYNFLIEYAAQQNYISSKEIDELKKWRS

SEQ ID NO: 117435 - protein, 192 aa, Unknown
  Bacterial polypetide isolated from the Sargasso Sea
GEFTLKSGRISPYFFNAANMLGGSNLYELAKCYMDAINDKGLEFNCIYGPAYKGIFLGSIVATLFSENGKNYPLSFNRKEEKDHGEGGNIIGRKPKGKVLIIDDVLSAGTAGRESIETILKLSATPSCFIVGLDRQEKGLSNMPSSKELEKEFNIRVESIVNLESLISYVKDNSEYQNHLEALNNYRKNWGA

SEQ ID NO: 117436 - protein, 168 aa, Unknown
  Bacterial polypetide isolated from the Sargasso Sea
IEYGHLDQLAQVMAEKIKDSDISFDVIFGPAYKGIFLGSVLATKLNKPVCFNRKEEKDHGEGGSLIGAKPEGKVLIVDDVISSGLAIREALEILKPYDVEIAGVLVTLDRQEKGQKSDLMASAELKSEGIDVFEIISLDGLLDAGNIISEDDIVRIKDYREQFRGKDA

SEQ ID NO: 117437 - protein, 135 aa, Unknown
  Bacterial polypetide isolated from the Sargasso Sea
MLKHVEADATAVAGLTLGADPLVSGVAMAAAIANRSLDALIVRKAAKGHGTGAWLEGPRPAKGTIVTVLEDVVTTGGSSLKAVHQIQEAGYRVQRVVTIVDREEGGASAMQEEGLELISLFRLSEVADYAEALPS

SEQ ID NO: 117438 - protein, 189 aa, Unknown
  Bacterial polypetide isolated from the Sargasso Sea
MKTNESLIEMLINKQVLKFGSFKLNSGRISPYFFNLGAIDDGTSFHELGLAYARKIHDEQFTCDVLFGPAYKGIPIAVSTAIGLTDFGRNISVAYNRKEAKDHGEGGRLIGARLEGKVILIDDVLTSGKAIRESAELILEAGASIEGVVIALDRKERTKSEKSAVMELREELDAPVHGLASIDDVIGYL

SEQ ID NO: 117439 - protein, 156 aa, Unknown
  Bacterial polypetide isolated from the Sargasso Sea
MHPFIKKAIELEALKFGDFTLKSGLESKYFFNIASFFNGQDMHFLANQYFKVIQKANLEFDAMYGPAYKGIPLATAISQLFYVKEQKKIELIFDRKEIKDHGEGGKLIGDISGKKILIIDDVLTAGTAIKETVEIIQQNNAKTVAAIVALDRMEKD

SEQ ID NO: 117440 - protein, 212 aa, Unknown
  Bacterial polypetide isolated from the Sargasso Sea
MNSLKKQFIEFTLNHEILRFGTFTLNSGRQSPYFFNTGLCNNGKLLSSLAKFYSKCIIENAIEYDFIFGPAYKGITLASSISHTLYSDNSVSKPFCHNRKEAKTHGESGIFVGYQPKGAAMIVDDVISSGNSITESIKLLETNNAHPTSVVVAFDRMEVGYKKRASVELSENYDVSVYSIITLEDIVSHIKSDASLTKYISKMEDYMNEYKR

SEQ ID NO: 117441 - protein, 205 aa, Unknown
  Bacterial polypetide isolated from the Sargasso Sea
FLKIASKSKSLKFEKLHLKSVVSSPYFFNAANMLSSCSLYELAKCYVDAIEDKNLNFDCIYGPAYKGIFLGSIVATLFSEQGNNYPLAFNRKEEKDHGEGGNIIGAKPSGNVLIIDDVLSAGTAGRESIETILNLDASPACFIVGLDRQEKGNSEKSSSSELSTEFNIKVESIVNLDTLINFVENDLAYSEFLPNLNKYREEWGA

SEQ ID NO: 117442 - protein, 175 aa, Unknown
  Bacterial polypetide isolated from the Sargasso Sea
MKQELIKILKRDSYRNGDFTLSSGKKTEHYINCKPVILNAAGLKLISHSMLEYIDQNSVAVAGLTLGADPLVCGVALASLEHPWCPTQDALIVRKEAKGHGTNAWVEGPLPAVRSEITVLEDVVTTGGSSLKAVEKLRDMGYNVNRIISIVDREEGGWELMKESGIELFSLVTIR

SEQ ID NO: 117443 - protein, 210 aa, Unknown
  Bacterial polypetide isolated from the Sargasso Sea
NYQKLFLDIAIESQSLQFGEFTLKSGRTSPYFFNAANMLGGSNLYELAKCYMDAINDKGLEFSCIYGPAYKGIFLGSIVATLFSENGKTYPLSFNRKEEKDHGEGGNIIGRKPKGKVLIIDDVLSAGTAGRESIETILKLSATPSCFIVGLDRQEKGLSNMPSSKELEKEFNIRVESIVNLESLISYVKDNSEYQNHLEALNNYRKNWGA

SEQ ID NO: 117444 - protein, 174 aa, Unknown
  Bacterial polypetide isolated from the Sargasso Sea
MFLANGKLNTLAECYVNKIKNENLKFDMLFGPAYKGIFLATAISTKLSQSRTVPVCFNRKEEKDHGEGGSYIGKKPFGKVLIVDDVLSSGLAIGESIEFLKNFDVEIIGAIVGLNRLERGQKTSQVASDELKNEGINIYALMTIDEIMLDEDLITQSQIKEIKAYRDQYSGENV

SEQ ID NO: 117445 - protein, 149 aa, Unknown
  Bacterial polypetide isolated from the Sargasso Sea
MPSPPAPAEDPTRLLLKRLAMEAYRRGTFKLASGRQSEHYVNCKPVSLSGRGLALISTAMLAHVEEDAAAVAGLTLGADPLVSGVAMAAALSGRPLDALIVRKQAKGHGTAAWLEGPLPAQGSIVTVLEDVVTTGGSALKAVQQLQDAG

SEQ ID NO: 117446 - protein, 212 aa, Unknown
  Bacterial polypetide isolated from the Sargasso Sea
MKDYQEKFIRLALNAEALIFGDFTLKSGRNSPYFFNAAKMLNTKFLADLSECYTKTLQDLDVSFDSIYGPAYKGIFIASIIGASLGKSDLDIPVSFNRKEEKDHGEGGDLIGQLPSGNVLIIDDVISAGTAARESIEKIKSMGANPKIMLVGLDRQEKGSSNISAKAELENDFGLIVSSIVNLDLLISFVSDDPNFNEFKSDLEEYRNNWGA

SEQ ID NO: 117447 - protein, 187 aa, Unknown
  Bacterial polypetide isolated from the Sargasso Sea
KSGRKSPYFFNAANMLNGSNLYELAKCYTDAIEETNLEFDSIFGPAYKGIFLGSIVATLLSEQGKNFPLCFNRKEEKDHGEGGSIIGDKPSGDVLIIDDVLSAGTAGRESIELIKEVSANPKAFIVGLDRQEKGNTDSSASQELCDEYNIEFISIINLDTLIEFVKSDTQFNNYLDELNEYREVWGA

SEQ ID NO: 117448 - protein, 144 aa, Unknown
  Bacterial polypetide isolated from the Sargasso Sea
MNYKNLFIKHCIEKEALKFGQFNLKSGRVSPFFFNSGVFTDSKSVNLISDIFINVIEENKIDFKNIFGPAYKGIPLAVSLTHKIFEKNKMVVGFVFNRKDEKTHGEGGNLVGDFLPGNTIVVDDVITAGTAIKNSLSLIMQIEN

SEQ ID NO: 117449 - protein, 211 aa, Unknown
  Bacterial polypetide isolated from the Sargasso Sea
KDYQKLFLKLALDSQALQFGDFTLKSGRKSPYFFNAANMLKGSNLYQLAHCYVEAINDHDVDFDCIYGPAYKGIFLGSIVATVLSAQGKNYPISFNRKEEKDHGEGGNIIGANPKGKTLIIDDVLSAGTAGRESINLITKQNATPVSFIVGLDRQEKGKSQQCASKELKDEFNLSVISIIDLDTLITYVGNESQFNGYLSGLNQYRDTWGA

SEQ ID NO: 117450 - protein, 197 aa, Unknown
  Bacterial polypetide isolated from the Sargasso Sea
LKAEALLLGDFTLKSGRKSPYFFNISSFFELGLINELSSLYTNLIEEENIEFDVIFGPAYKGIPLAAAVATIMSERTSNPISISFDRKEEKIHGEGGKLIGSVENKKVLILDDVLTAGTALNQSIDLVREMGGEVVSSVIALDREELVDGVPARDLIAEKTNSKLLSIATISQLVNFFNLTNKIEEAQIIKNHLSKR

SEQ ID NO: 117451 - protein, 193 aa, Unknown
  Bacterial polypetide isolated from the Sargasso Sea
MNPLNPSSDGIKENLLTLLAQKAYRFGDFSLASGKKSSHYVNCKPVSLSGPGLLSISSLFLKQINESDSGVAGLTLGADPLVSGVVILAAQSGIDLNGLIVRKEAKGHGTGEWLEGPLPPKGSVITVLEDVVTTGGSSLKAVEQLRNQGYLVKQVLAIVDREEGGLDAMSKADLELNSLFFLKEIVERANSLQ

SEQ ID NO: 117452 - protein, 176 aa, Unknown
  Bacterial polypetide isolated from the Sargasso Sea
MNRLATLAYRRGDFTLASGRKSEHYVNCKPVSLSGSGLALISRAMLTQVEADARAVAGLTLGADPLVSGVAMAAADQGRELDALIVRKEAKGHGTGAWLEGPLPAPGALITVLEDVVTTGGSSLKAVRQLRDAGYEVNRVVTIVDREEGGDAAMAADNLELISLYKLSEIAAFVPA

SEQ ID NO: 117453 - protein, 165 aa, Unknown
  Bacterial polypetide isolated from the Sargasso Sea
FFAEAIRYSNIKFDMLYGPAYKGIPLASAISITFHEIFNCNYPFCFNRKEIKDHGEGGITFGAKIKNRIMIIDDVISAGTSIKDSVDIIESEGGTVAGAIVAVNRQERGEGELSAIQEAQNRYGIKIMSIVNLDDIISYISESNKFKKHLGAIKAYRKKYGEIST

SEQ ID NO: 117454 - protein, 193 aa, Unknown
  Bacterial polypetide isolated from the Sargasso Sea
MTSAFRFDDDARRSLLERLARVAYRHGQFTLASGRESEHYVNCKPVSLSGSGLALISSAMLDHVEAQAVAVAGLTLGADPLVSGVAMAAALANRSLDALIVRKQAKGHGTGAWLEGPLPQKGALITVLEDVVTTGGSSLKAVHQLQEAGYLVNRVITIVDREEGGTEAMAAAGLDLVSLFRLTEVSNCARELS

SEQ ID NO: 117455 - protein, 214 aa, Unknown
  Bacterial polypetide isolated from the Sargasso Sea
MENYKQNFIQMSIDIGALKFGEFELKSGRVSPYFFNMGLFSSGRSMKNIGDFYAAALEESNLEYDMLFGPAYKGVPLVSVLSSSLFVNHEKDVSFVYNRKEKKEHGEGGQIVGPSLAGKIVIVDDVITAGTAIKEASKMIIEAGAEISGILIALDRQEKGAGDSSAVQEVSQELGVPVISIANLDQILTYVKNSPSEFGDYVNRIEGYREKYGA

SEQ ID NO: 117456 - protein, 197 aa, Unknown
  Bacterial polypetide isolated from the Sargasso Sea
LKSDALLLGDFILKSGKKSPYFFNVGSFFNQGFLAELSNLYTEEIISSKLEFDVIFGPAYKGIPLAAAISASLSTKISKPIPFAFNRKEAKVHGEGGSIVGELKDKKVLVVDDVLTAGTALKQSLEIISQEGGSAIGCLVALDREEILDDLLARDKIFQDFNISVASIAKISQLIEFLEDCERQDEAKIIKNYLLGT

SEQ ID NO: 117457 - protein, 194 aa, Unknown
  Bacterial polypetide isolated from the Sargasso Sea
MISAFRYDNDARRTLLKRLAGEAYRRGQFTLASGRESEHYVNCKPVSLSGSGLALISSAMLDHLDAEAVAVAGLTLGADPLVSGVAMAAALVERPLDALIVRKQAKGHGTGAWLEGPLPPQGALITVLEDVVTTGGSSLKAVHQLREAGYVVKRVITIVDREEGGATAMAAADLELVSLFRLSEVSSAAEELSR

SEQ ID NO: 117458 - protein, 153 aa, Unknown
  Bacterial polypetide isolated from the Sargasso Sea
MNSLKKQFIEFTLNHEILRFGTFTLNSGRQSPYFFNTGLCNNGKLLSSLAKFYSKCIIENTIEYDFIFGPAYKGITLASSISHTLYSDNSVSKPFCYNRKEAKTHGESGIFVGYQPKGAAIIVDDVISSGNSITESIKLLETNNAHPTSVVVA

SEQ ID NO: 117459 - protein, 209 aa, Unknown
  Bacterial polypetide isolated from the Sargasso Sea
MKERENQFFKLALESDALLIGDFTLKSGRKSPYFFNISALFESGFINELSTLYADLIEEENIKFDVIFGPAYKGIPLAAAVATILSNRSSHSVAISFDRKEEKTHGEGGKIIGNVKDKKVLILDDVLTAGTALNQSIDLIRQTGGEVVSSVVALDREEYVEGALARDLIEDKTSSKLLSIARISQILDFLKQTKKSEEAHLIEDYLSRQ

SEQ ID NO: 117460 - protein, 185 aa, Unknown
  Bacterial polypetide isolated from the Sargasso Sea
MHPFIKKAIELEALKFGDFTLKSGLKSKYFFNIASFFNGQDMHFLASQYFKVIQKANLEFDAMYGPAYKGIPLATAISQLFYVEEQKKIELIFDRKEIKDHGEGGKLIGDIAGKKILIIDDVLTAGTAIKETVEIIQQNNAKTVAAIVALDRMEIDANSLTFKENLEKSLSIPILSIATFEDLKE

SEQ ID NO: 117461 - protein, 212 aa, Unknown
  Bacterial polypetide isolated from the Sargasso Sea
MVFDKIIAKKTINYLLQINAIKLNTKTPFTWASGIKSPIYCDNRLILSNIEIRDYIANQMANIISKSFSGNYIVAGVATGAIAIGALVAERLKKPYIYVRPNPKGHGLKNQIEGSLPIGSNVIVIEDLISTGMSSLNAVNAIKGESSSVNAMLSIFSYSFDFANDRFKSEKINLISLADYNILVEIVKEQKIISHDEIEKLQRWREDPEDWM

SEQ ID NO: 117462 - protein, 130 aa, Unknown
  Bacterial polypetide isolated from the Sargasso Sea
MKQFQIDFIEFALSRQVLKFGSFTLKSGRTSPYFFNAGLFNTGGDLARLGRFYAAALEDAGVEFDLLFGPAYKGIPIATTTAVALFDQYGKDVPYCFNRKEAKTHGEGGNLVGSPLQGKVMLVDDVITAG

SEQ ID NO: 117463 - protein, 214 aa, Unknown
  Bacterial polypetide isolated from the Sargasso Sea
MQNYKKQFAEFLVRSDALQFGEFTLKSGRVSPYFFNSSKFNSGPVIEQLGKFYALAIEQYAPSCNMVFGPAYKGIPLCVTVATALSKKMNRNIGYFFNRKEIKTHGDQGALVGQFPQSGDMAIIVDDVFTDGNTKIESIDLVWNLCKIKFSGVMVALDRMEISSRGGDAIAEFNDKTGLPVWSIINIREVCLYLKNRTVNGNVILSEAIYHEIE

SEQ ID NO: 117464 - protein, 214 aa, Unknown
  Bacterial polypetide isolated from the Sargasso Sea
MENYQQNFIQLAIQIGALKFGEFELKSGRVSPYFFNMGLFSTGKALKNIGDFYAAALEGSNIDYDMLFGPAYKGIPLVSVLSSSLFVNHEENVPFVYNRKEKKDHGEGGQIVGPSLSGKVVIVDDVITAGTAIKEASKMITQAGAEISGILIALDRQEKGGGDLSAVEEVSTELGVPVISIVKLDQILTFVKNSPSELEAYVEKIETYREKYGA

SEQ ID NO: 117465 - protein, 155 aa, Unknown
  Bacterial polypetide isolated from the Sargasso Sea
AGVEFDLLFAPAYKGIPIATTTAVALFDQYGKDVPYCFNRKEAKTHGEGGNLVGSPLQGKVMLVDDVITAGTAIRESMQLIQAQGASLSGVLIALDRQEKGQGELSAIQEVERDFGTQVVSIICLNDLINYLQGKPELAQYLEAVSAYRAQYGVS

SEQ ID NO: 117466 - protein, 220 aa, Unknown
  Bacterial polypetide isolated from the Sargasso Sea
MAADWRHDFIAFCLECEVLRFGEFTLKSGRQSPYFFNAGLFNTGLRLAKLGSYYAKAIVESKLEWDVLLGPAYKGIPLAAATSMCLATEHDIDAKYCFNRKEAKDHGEGGIIVGSPLAGRALVIDDVITAGTAARESAALVAAQGAELAGLVVALDREECGAGTTLTAIGQVEADLKVPVVSILTLTDLIGFLEAKGRSEDAARLTAHKAQFGAGQAGAA

SEQ ID NO: 117467 - protein, 188 aa, Unknown
  Bacterial polypetide isolated from the Sargasso Sea
SGRISPYFFNAGRFSTGGALARLGRCYAAALQASGLHVDMLFGPAYKGIPLVSTTAMALSEQHGMDLPFAFNRKEAKTHGEGGNIVGAPLAGDVVVIDDVMTAGTAIRESMAILNESDAQGAGVVIGLDRCERGDGERSAVQQVEQNWGLTVVSVVSLHDIITWVESNPTMAQHREALERYRERYGVA

SEQ ID NO: 117468 - protein, 69 aa, Unknown
  Bacterial polypetide isolated from the Sargasso Sea
MQTYQKEFIEFAIQQGVLRFGEFTLKSGRISPYFFNAGLFNTGSALARLGRFYAAALEDSGIEYDVVFG

SEQ ID NO: 117469 - protein, 213 aa, Unknown
  Bacterial polypetide isolated from the Sargasso Sea
MQPYQRDFIRFAIDRGVLRFGEFTLKSGRTSPYFFNAGLFNTGSALAELGRCYAAAIVDSKIPFDVLFGPAYKGIPLAATTAVALADQHQLDVPWCFNRKEAKDHGEGGSLVGAPLAGDVLIIDDVITAGTAIREVMQIINAQQAKAAGVLIALNREERGNGELSAIQEVERDFGIPVVSIVSLTQVLEFLADDPQLKQHLPAVEAYRAQYGI

SEQ ID NO: 117470 - protein, 190 aa, Unknown
  Bacterial polypetide isolated from the Sargasso Sea
KLGDFTLKSGRQSPYFFNAASFIEYGHLDQLAEVMAEKIKDSDISFDIIFGPAYKGIFLGSVLATKLNKPVCFNRKEEKDHGEGGSLIGAKPEGRVLIVDDVISSGLAIREALEILKPYDVEIAGVLVTLDRQEKGQKSDLMASAELKSEGIDVFEIISLDGLLDAGNIISEDDIARIKDYREQFRGKDA

SEQ ID NO: 117471 - protein, 196 aa, Unknown
  Bacterial polypetide isolated from the Sargasso Sea
MHNYQSKFIDFVIDHKILRFGEFKLKSGRISPYFFNAGLFNSGKKLNFLAESYASAIVESKLSFDVLFGPAYKGIPLVSATAIVLSREYNLEKPYVFNRKEEKQHGEKGLLVGSNLEGSALIIDDVITAGTAIREVVEIIRSTNARISGVAVALDRQERGLGELSAIQEIEEKLNISVISIVSLKDIISYLELSED

SEQ ID NO: 117472 - protein, 218 aa, Unknown
  Bacterial polypetide isolated from the Sargasso Sea
MRSESMKPYQRQLFEFALTKQVLKFGEFTLKSGRKSPYFFNAGLFNTGRDLALLGRFYAEALVDSGIDFDLLFGPAYKGIPIATTTAVALAEHHDLDLPYCFNRKEAKTHGEGGNLVGSPLQGRVMLVDDVITAGTAIRESMEIIQAHGAELAGVLISLDRQERGRGEISAIQEVERDYGCKVISIVTLKDLIAYLEEKPEMAEHLATVRAYREEFGV

SEQ ID NO: 117473 - protein, 200 aa, Unknown
  Bacterial polypetide isolated from the Sargasso Sea
IESQALQFGEFTLKSGRQSPYFFNAANMLKGSNLFQLAQCYVDTIIDNNIEFDCIYGPAYKGIFLGSIVATVLSKQGKNYPVSFNRKELKDHGEGGNIIGADPTGNVLIIDDVLSAGTAGRESINSIINHNATPSSFIVGLDRQEKGVSNESASKELESEFNLNVTSIVNLDSLIGYVKNESELTEHLEGLNIYRNTWGA

SEQ ID NO: 117474 - protein, 184 aa, Unknown
  Bacterial polypetide isolated from the Sargasso Sea
YSSGLRSPIYCDNRVLIAYPEAREQVVEAFSRQVSSEAEVIVGTATAGIPHAAWLAHALNLPMAYVRSKAKQHGQGNQIEGRLSSGQRIVLIEDLISTGGSALTAVMALRQAGAAILGCHSIFSYGLPAAVAGFAEAEVAVSSLVDLPVLLEVATSQEMISPEQQAAVLRWAAAPGAWQPGALP

SEQ ID NO: 117475 - protein, 190 aa, Unknown
  Bacterial polypetide isolated from the Sargasso Sea
QLGDFTLKSGRQSPYFFNAASFIEYGHLDQLAEVMAEKIKDSDISFDIIFGPAYKGIFLGSVLATKLNKPVCFNRKEEKDHGEGGSLIGAKPEGRVLIVDDVISSGLAIREALEILKPYDVEIAGVLVTLDRQEKGQKSDLMASAELKSEGIDVFEIISLDGLLDAGNIISEDDIARIKDYREQFRGKDA

SEQ ID NO: 117476 - protein, 213 aa, Unknown
  Bacterial polypetide isolated from the Sargasso Sea
KADFLGFAIESGALKFGEFTLKSGRVSPYFFNTGAFSSGAALSKLARAYSMCINEKSPEFDMLFGPAYKGIPLVSAISVCYSDLYNRDIGFCFNRKEEKKHGEKGTIVGQELKGNVLIIDDVISAGTSVRESVKIIEGESACPAAVVITLDRQERGLGPKTAVEETEHSLNLRVESIVSFKDIVHYLERIGNFSSEIEALQEYQIAYGNKVSE

SEQ ID NO: 117477 - protein, 205 aa, Unknown
  Bacterial polypetide isolated from the Sargasso Sea
MSQNSELRQSFIRFAVEAGVLSFGEFVTKAGRTSPYFFNAGKFADGALLGQVAQFYAKTLLDSGVEFDMLFGPAYKGITLASATAVALAGLGRNVGFAYNRKEAKDHGEGGSLVGAKLQGRVVIVDDVISAGTSVRESVELIRAAGATPAAVLILMDRMERSGNAVDIGERSAVQDVQAQYGMPVVSIANLDDLLGYLDNAGDPA

SEQ ID NO: 117478 - protein, 214 aa, Unknown
  Bacterial polypetide isolated from the Sargasso Sea
MKETKTNFLRLAIDSNVLQFGDFTLKSGRKSPYFFNAGLFNTGKAIAQLGRHYADTIVSSNIEFDMLFGPAYKGITLASATASALSDKYDIDKPFAFNRKESKAHGEGGCVVGANLKGKVLIIDDVITAGTAVREAYDLIISEGASVAGLVISMDRQERGKSKISATSELEQELNSPVMSIASLEDLIFFIKEDENLKSHLPNLIEYHSKYSSL

SEQ ID NO: 117479 - protein, 214 aa, Unknown
  Bacterial polypetide isolated from the Sargasso Sea
MENYKQNFIQLAIQIGALKFGEFELKSGRVSPYFFNMGLFSTGKALKNIGDFYAAALEGSNIEYDMLFGPAYKGIPLVSVLSSSLFVNHEKNVPFVYNRKEKKDHGEGGQIVGPSLSGKVVIVDDVITAGTAIKEASKMITQASAEISGILIALDRQEKGGGDLSAVEEVSKELGVPVISIVNLDQILTFVKNSSSELEAFVEKIEAYREKYGA

SEQ ID NO: 117480 - protein, 212 aa, Unknown
  Bacterial polypetide isolated from the Sargasso Sea
MKSYQEKFISIAIQEQALQFGDFTLKSGRQSPYFFNAANMLAAKSIFEVAQCYLECIDDNGLSFDCMFGPAYKGIFLGSAIATLMGQSESTISLAFNRKEVKDHGEGGNIIGQIEGDVLIIDDVLSAGTAVKEAINTVKQSGTRPAKYVLVGLDRQEKGQGELSAKTELESQFDIRVLSIISLDTLIDYIDSDRTLDASLSAMRDYRQVWGA

SEQ ID NO: 117481 - protein, 213 aa, Unknown
  Bacterial polypetide isolated from the Sargasso Sea
MKAFQRDFIEFAIERGVLKFGEFTLKSGRVSPYFFNAGLFNRGGDLAKLGRFYADALMDAGVAFDVLFGPAYKGIPIATTTAVALADSHKLDVPYCFNRKEAKTHGEGGNLVGSPLEGKVMLVDDVITAGTAIRESMTLIEQQQASLSGVLIALDRQERGNGELSAIQEVERDFGTQVISIVSLADVVAYLTEKGGFDSEISAINTYRENYGI

SEQ ID NO: 117482 - protein, 214 aa, Unknown
  Bacterial polypetide isolated from the Sargasso Sea
MKQFQKDFIEFALSRQVLKFGSFTLKSGRTSPYFFNAGLFNTGGDLARLGRFYAAALEDAGVEFDLLFGPAYKGIPIATTTAVALFDQYGKDVPYCFNRKEAKTHGEGGNLVGSPLQGKVMLVDDVITAGTAIRESMQLIQAQGASLSGVLIALDRQEKGQGELSAIQEVERDFGTQVVSIICLNDLINYLQGKPELAQYLEAVSAYRAQYGVS

SEQ ID NO: 117483 - protein, 214 aa, Unknown
  Bacterial polypetide isolated from the Sargasso Sea
MENYKQNFIQLAIQIGALKFGEFELKSGRVSPYFFNMGLFSTGKALKNIGDFYAAALEGSNIDYDMLFGPAYKGIPLVSVLSSSLFVNHEKNVPFVYNRKEKKDHGEGGQIVGPSLSGKVVIVDDVITAGTAIKEASKMITQAGAEISGILIALDRQEKGGGDLSAVQEVSTELDVPVISIVNLDQILTFVKNSPSELEAYIEKIEIYREKYGA

SEQ ID NO: 117484 - protein, 214 aa, Unknown
  Bacterial polypetide isolated from the Sargasso Sea
MSQLKDYQINFINEAMRVGALEFGTFTLKSGRQSPYFFNASKLLFDADINIIIEGFAHKFLEFGSDINQLFGPAYKGTIFGSMLGMHLKKTNPSLSLCFNRKEVKDHGEGGMFIGQSPSGNVVVVDDVLSAGTAAKESIDLILENDATPSGILVGLNRQEKGTSAQSASFELEQTYNLKVLSVISLDDLIRFLKKSDQAEFIDSMESYRDEWGA

SEQ ID NO: 117485 - protein, 232 aa, Unknown
  Bacterial polypetide isolated from the Sargasso Sea
SYLWQDWSVQAMQEGLGESFVGTSNCSIAMKRDIEAIGTNAHELPMVYSALAKSDEELAKAPYKVLEDWREEHDGNLRIILPDTYGTEGFLKNAPDWLSSWTGMRIDSGDPRLGARTAIKWWQSMGEDPKEKLLIFSDGLDVNQILDLHKEFSKEVNVSFGWGTNLTNDFRNLVTCGRLDAFSLVCKAASVNGRPTVKLSDNPNKATGPLTEIERYKRVFQVGAQEALRIDI

SEQ ID NO: 117486 - protein, 276 aa, Unknown
  Bacterial polypetide isolated from the Sargasso Sea
DKVPLARLIDEGELREQLDHIRSLSLSRGESTWLRGNTFYGKRQMFRPDFMEWFENLRLPPYHLERKGDQYELTFEGSWPEVMLWEIPALAVLMELRSRAVLNDMGRFELQVLYARAMTKVWEKIEQLRQIDGLGIADFGTRRRHSFLWQDWCVQAMMEGLGSSFTGTSNCLIAMRREVEAIGTNAHELPMVYSALAKDDKALAQAPYDVLSDWHEEHDGNLRIILPDTYGTEGFLQNAPDWLAGWTGIRIDSGDPATAAEIAIRWWQDRGEDPTE

SEQ ID NO: 117487 - protein, 73 aa, Unknown
  Bacterial polypetide isolated from the Sargasso Sea
MIITSLLDTDLYKFTMMQVVLHQFPGAQVEYKFKCRNPGVQLGAFANEIRDEIRSLCSLQFQDAELPYLRSLR

SEQ ID NO: 117488 - protein, 430 aa, Unknown
  Bacterial polypetide isolated from the Sargasso Sea
MVDIARRVWNHKWKIDPIVRSLLDTDFYKLLMCQSIFRNKPDTSVTFSLINRSKNIKLAELIDEGELREQLDHIRSLSLSRGESTWLRGNTFYGKRQMFRSDFMEWFEKLKLPPYHLEKKAGQYELTFEGSWPEVMLWEVPALSVLMELRGRAVLNKMAKFELEVLYARAMTKLWEKIENLRNIKDLKIADFGTRRRHSFLWQDWAVQAMLEGLEDKFIGTSNCLIAMRRDIEAIGTNAHELPMIYSALAENDEELANAPYQVLADWHEEHDGNLRIILPDTYGTEAFLNRAPDWLKQWTGIRIDSGDPVDGAEAAIAWWQNKGENPKDKLVIFSDGLDTPTISDLHEKFNGRVKVSFGWGTNLTNDFRGLVSDGSLDAFSLVCKPIKANNRSTVKLSDNLNKALGASEEINRYKRVFGVNDQKSFDIFV

SEQ ID NO: 117489 - protein, 260 aa, Unknown
  Bacterial polypetide isolated from the Sargasso Sea
MLDTDFYKLTMMQAVLHHYPNAEVEWAFRSRSGEDLTPYLDEIRQQIEALAELQMTTEELAYLERIPYMQPDFIRFLGLFRFDLRYLQVSIEDGELVMHLRGPWLHVILFEVPLLAIVSEVRNRARYPAVTLAQARDRLDEKLHWLRSQASSDELASFTLADFGTRRRFSFAVQAMVVDRLQCDFPGRFAGTSNVHLARTRNVKPMGTMAHEWIMAHQQLGPRLIDSQVAALDCWVREYRGALGIALTDCITMDAFLRDF

SEQ ID NO: 117490 - protein, 253 aa, Unknown
  Bacterial polypetide isolated from the Sargasso Sea
RLVEKMKLLGARPEFADCKIADYGTRRRFSKQWHEEVILTLKDGLGEQFAGTSNVFYAMKHSLTPLGTMAHEYLQACQALGPRLRDSQIYGFEMWAKEYRGDLGIALSDVYGMEAFLRDFDMYFCKLFDGARHDSGDPFDWGERLLKHYEANRCDPRTKILVFSDALDIPKVLQLYERFRGRCKLAFGVGTNLTNDLGYNPLQIVIKMVRCNGQPVAKLSDSPGKNMCEDKAYLAYLRQVFGIAQPEEDGAAK

SEQ ID NO: 117491 - protein, 218 aa, Unknown
  Bacterial polypetide isolated from the Sargasso Sea
MPIIQSLLDTDLYKFTMMQAVLHQHPGAQVQYRFKCRTPGIDLARYIDQIDEEIDHLCTLRFSDAELDYMRGLRFVKPDFADFLGLFHLDRKYIQLRASKAVPGEIELDITGPWLHTILFEVPLLAIINEVWFRNTTTADFAEGERRLQAKAALLRDTPGFEQCRIADYGSRRRYSRDWHARLLPLLRDALGPQLVGTSNVHFARLYGMTPHGTMAHE

SEQ ID NO: 117492 - protein, 246 aa, Unknown
  Bacterial polypetide isolated from the Sargasso Sea
EKLDWLKAEASPSELAGFQLADFGTRRRFSYRVQEQAVHILKRDFPGRFVGTSNVHLAREFDLKPIGTMAHEWLMAHQQLGPRLIDSQIAALDCWVREYRGLLGIALTDCITMDAFLADFDLYFAKLFDGLRHDSGDPLVWAEKAIAHYEKLGIDPMSKTLVFSDGLDLPKSLRLYRALSGRIHVSFGVGTNLTCDIPGVEPMNIVIKMIACNGQPVAKISDTPGKTQCRDENFVHYLKHVFRVTH

SEQ ID NO: 117493 - protein, 255 aa, Unknown
  Bacterial polypetide isolated from the Sargasso Sea
MSESVFADRIVQNLLDTDFYKLTMMQAVLHNYPNVEVEWEFRCRNSEDLRPYLAEIRYQIERLAELSLSPDQLGFLERISFMKPDFLRFLGLFRFNLRYVQTGIENGELFIRLRGPWLHVILFEVPMLAIVSEVRNRYRYQTVILEQAREQLYRKFDWLTANASSDELSELQVADFGTRRRFSYRVQEEVVSVLKHDFPGRFVGTSNVHLAREFDMKPLGTMAHEWIMAHQQLGPRLIDSQIAALDCWVREYRGL

SEQ ID NO: 117494 - protein, 350 aa, Unknown
  Bacterial polypetide isolated from the Sargasso Sea
MAPVITSLLDTDLYKFTMWQALLHRHPQTQSEYRFVCRNQPIYPLAELLPEVNAALDHLCTLRFSEDELAYLGGLRFIKSDFIDFLRIFQFQRNFIHAWAEGDQLHIVAQGPQVHVMGFEIFVLAIVNELYFRRFDATAALASGCERLAAKVQQLQDLAQQATLRHPFELFDFGLRRRYSGAWQREVVKTFAEQAPQWFKGTSNVLLARDLGLVPIGTMAHEYLQSYQALGVRLRDFQKAALEDWVQEYRGDLGIALTDTVGMDAFLADFDLYFAKLFDGLRHDSGDPVAWGEKALAHYAKLRIDAHTKRLVFLDGLTLTKALALYRHFGDRTQLGFGIGTHLTNDMGDA

SEQ ID NO: 117495 - protein, 392 aa, Unknown
  Bacterial polypetide isolated from the Sargasso Sea
MPPILNSLLDTDAYKLHMQQAVFHRYPDAEVVAEFHSRNEEDLLPMMGQIEEQLHLAGSLRLTRPELNFLAERPFFTADYLDHLRRKPLDASLLKVFEQDGRINVRVEGPWQDVILWEIPVLAIISEMRNRFRYPQFGVTQALERLDQKIDKLERELSREEMSEFNLIDFGTRRRFSLAVQDAVVGRLKERLPAFRGTSNYLLAQKYGLPAVGTQAHEWFQAHQQLGFPLEHSQRAALTSWLDEFTNHLGIALTDCITMDAFLRDFDFELASRYQGLRHDSGDPVVWGEKAISHYQRLGIDPTEKTLVFSDGLNLDKAVELFRHFRGRINTSFGIGTKLTCDLPGVSPMNIVFKLMECNGGPVAKISDSPGKTLCRDADFIRNLKQAFHVGV

SEQ ID NO: 117496 - protein, 85 aa, Unknown
  Bacterial polypetide isolated from the Sargasso Sea
MCGIVGISAESNVASEIYDSLLMLQHRGQDAAGISVCDQKDKLSTRKSMGYVRDVFQQRHMEKLIGNYGIGHVRYPTAGGNGKEF

SEQ ID NO: 117497 - protein, 242 aa, Unknown
  Bacterial polypetide isolated from the Sargasso Sea
MCGIVGISAETNVAAEIYDSLLMLQHRGQDAAGMSVCDQDDKLTSRKSMGYVRDVFQQMHMDKLIGNYGIGHVRYPTAGGNGKEFAQPMYVNSPYGISLTHNGNLTNSKQLSNELFHAEMRHLLTDSDSEVLLNIFAHELGKQREIYPTAEHIFKAVAKTHIRCDGAYAVLALITGHGILAFRDENGIRPLSIGTRKGKSRVEYIIASEDSLFIPLGFKKLRDIEPGEAVFINKEGNFFSQQ

SEQ ID NO: 117498 - protein, 76 aa, Unknown
  Bacterial polypetide isolated from the Sargasso Sea
MYDKLNEECGVFGIFNHKDSAVLTQLGLHSLQHRGQEGAGIVSCDREKFTCIRKTGLVGDNFNNLDIIDQLKGKYA

SEQ ID NO: 117499 - protein, 310 aa, Unknown
  Bacterial polypetide isolated from the Sargasso Sea
ILRNIQPFFADTNAGGIGVAHNGNLTNSISLRNKLVEEGAIFYTTSDTETIVQLIAKSKRPKTIDKVIDAIFQIQGGYALVMLTQNSLIGVRDPYGIRPLVIGKLGNSYVLASETCAFDIIGAKFLREVENGEIVLIENNELKSIKPFPAKKVRPCVFEYIYFSRPDSLIGGKTAYEHRKNIGKELAKENDTDADIVVPVPDSGNAAAMGFAQELKMNFEHGLIRNHYVGRTFIEPSQKIRSLGVKLKLNANQTTIKNKKIILIDDSLVRGTTSYKIVKMLYDAGAKEVHVKDCVSRNKISRFLWSRYTY

SEQ ID NO: 117500 - protein, 84 aa, Unknown
  Bacterial polypetide isolated from the Sargasso Sea
MQKIKYKNYNPKLKEECGVFGISNTPDASTLTALGLHALQHRGQEGCGIVSFDGNKYHSEKRFGLVGDNFNKEKVLKNLPGNYA

SEQ ID NO: 117501 - protein, 256 aa, Unknown
  Bacterial polypetide isolated from the Sargasso Sea
FIQDDKIESIKPFPEQKVRPCVFEYIYFSRPDSILNGKTAYEYRKNLGEELAKEDNIEGDIIVPVPDSGNAAALGYSQQTKKNFELGLIRNHYVGRTFIEPSQKIRSLGVKLKLNPNESSIKNKKIILVDDSLVRGTTSFKIVKMLYDSGAKEVHVRIASPEIRYPDFYGVDTPTKKELLAANKNNDEICKYIGAKSLKFLSIDGLYRAIGFESRNKNYPQLTDHYFTGDYPVKPMDDLGDDKITQLSLLSTGSNN

SEQ ID NO: 117502 - protein, 267 aa, Unknown
  Bacterial polypetide isolated from the Sargasso Sea
FLREVENGEIVVIKNDNIESIKPFPKKKSRPCVFEYIYFSRPDSILNGKTTYEFRKKFGEQLAIEDNIKADLVVPVPDSGNAAALGYSQKTKINFDLGLIRNHYVGRTFIEPAQKIRSLGVKLKLNANKSSIKNKKIILIDDSLVRGTTSHKIVKMLYDAGAKEIHVRIASPEIKFPDFYGVDMPTKEELLAANKSIDEIREYIGANTLKFLSINGLYKAMGYEKRNNTYPQLTDHYFTGDYPVEIIDELGENKITQLSLLSTGSNS

SEQ ID NO: 117503 - protein, 99 aa, Unknown
  Bacterial polypetide isolated from the Sargasso Sea
MKKFNSDKLREECGIFGISNHSDASALTALGLHALQHRGQEGCGIVSFDGKNYHSEKRQGLVGDHFTDPNTIKKLPGNFAIGHNRYSTTGETSLRNIQP

SEQ ID NO: 117504 - protein, 290 aa, Unknown
  Bacterial polypetide isolated from the Sargasso Sea
MRYIKGAFSLLMMTKDELIGVRDPLGIRPLCLGKKNDSWVLSSESSALSHIGAEFVREIDNGETIVINKNGIESSKYSSSSKDHKMCIFEQIYFSRPDSVIDGQLTYESRMKMGMSLAKEHAVDADIVVGVPDSAIPAAIGYSNESKIPYTEGLIRNRYVGRTFISPNQKLRDLGVKTKFNVLNEIVRDKKIILIDDSIVRGTTTSRVIEMIKEAGAKEVHMRVSSPPITSPCFFGVDMATTSELIANQYNIEEIRKIIGADSLGFLSIDALQKSVNSKKNNYCRACFTG

SEQ ID NO: 117505 - protein, 203 aa, Unknown
  Bacterial polypetide isolated from the Sargasso Sea
EDTFDADLVVPVPDSGNAAALGYAQEKKVKFDLGLIRNHYVGRTFIEPSQQIRSLGVKLKLNANLSVIKNKKIILIDDSLVRGTTSYKIVKMLYDAGAKEVHVRIASPEIKYPDFYGVDTPTKKELLAANKTVDEIKEFISAQSLKFLSLDGLYKAMGFEKRNDNYPQLTDHYFTGDYPVKIIDELGGDKVTQLSLLSTGSNN

SEQ ID NO: 117506 - protein, 195 aa, Unknown
  Bacterial polypetide isolated from the Sargasso Sea
ADLVIPVPDSGVPAALGYSEASKIPFNLGIIRNHYVGRTFIEPTQTIRQLGIKLKHNANNSIIKNKKIVLIDDSIVRGTTAIKIVEMMRNAGASEVHMRISSPPIKFPDYYGIDTPSKSELIASKNSNAEIKKMLKLDSLHFLSLDGLYNSMGHKKRDINNPQYTDHCFTGDYPTKLADRDEGALKNQLSLLKDN

SEQ ID NO: 117507 - protein, 80 aa, Unknown
  Bacterial polypetide isolated from the Sargasso Sea
MKNFDPKLKEECGVFGISNAKDAAALTALGLHALQHRGQEGCGIVSFDGKKYYSEKRFGLVGDNFNKEKVLNNLKGWFCN

SEQ ID NO: 117508 - protein, 217 aa, Unknown
  Bacterial polypetide isolated from the Sargasso Sea
AYEYRKNFGAQLANEDNINADLVVPVPDSGNAAALGYAEKKGLKFDLGLIRNHYVGRTFIEPSQQIRSLGVKLKLNPNISVIKDKRIILVDDSLVRGTTSSKIVKMLYDSGAKAVHVRIASPEIKFPDFYGVDTPTKKELLAANKSTNEICEFIKAKSLKFLSLNGLYLGMGFDKRNDNYPQLTDHHFTGEYPVKIIDELGEDKVTQLSLLSTASNN

SEQ ID NO: 117509 - protein, 239 aa, Unknown
  Bacterial polypetide isolated from the Sargasso Sea
HRPFGNPSPRPCIFEHVYFSRPDSVMDGLSVYQVRKQIGVELAKESFADADVVIPVPDSGVPAAIGYAQESGIPFELGIIRSHYVGRTFIQPGDAARHADVKRKHNANRAVVEGKRIILIDDSIVRGTTSKKIVEMMRDAGAAEVHMRIASPPTEHSCFYGVDTPERSKLLAATMDTEAMADFIKADSLAFVSIDGLYRAVGESERKKSCPQFCDACFSGEYPTKLTDFSDRFPELDAA

SEQ ID NO: 117510 - protein, 311 aa, Unknown
  Bacterial polypetide isolated from the Sargasso Sea
YSLVMLAQNTLIGVRDPHEIRQLVIGKLKNSFVLASETCSLDIIGAKFVREVENGEVVYIENNELKSVKPFPERKARPCVFEYIYFSRPDSLLNGKTAYEYRKNLGTELAKETHEKADVVVPVPDSGNAAAIGYSKHVGIDFDLGLIRNHYVGRTFIEPSQQIRSLGVKLKLNANQSSIKGKKIILIDDSLVRGTTCYKIVRMLYDAGAKEVHVRIASPEIKYPDFYGVDTPTKKELLAANKTIDQICEYISAKSLKFLSVNGMYKAIGFDKRNDAYPQLTDHYFTGDYPIKPIDKLGDKKITQLSLLSVT

SEQ ID NO: 117511 - protein, 287 aa, Unknown
  Bacterial polypetide isolated from the Sargasso Sea
MFDSPKEECGVVGITTATDASRLAFFALYALQHRGQESAGLATYNGKINIKTGMGLISQALNEPDIELLEGSYSIGHTRYSTSGSTKIENAQPIKCLVETDEIALSHNGNVINAKSIREELREWGCEFKSSSDSEVILQLLANAPGKDWAEKINYMMNRLQGAYSLTVLTKDGIIGIRDPLGVRPLCLGKIEDGYILASESCAIDHIGGEFIREIDPGEAIFITKDKIKTIFKKETPKLANCVFENIYFARPDSILDEQLVYITRKQMGAQLAIEHPVEADIVIGVP

SEQ ID NO: 117512 - protein, 305 aa, Unknown
  Bacterial polypetide isolated from the Sargasso Sea
AQPMYVNSPFGISISHNGNLTNHEELKEVLVHKDLRHLNTDSDSEVLLNVFAHELQKQGSVKPGAKEIFAAVRALHKRVCGAYSVVIMINGVGIVGFRDPFGIRPLIVGSKDSDLIGKDYMIASESTVLDSLGFETLDDVKAGSAVFISPEGIIETESCINNPVPTPCIFEYVYLARPDAKIDKISVHKSRLRMGEFLAKKIIEEKPNHDIDVVIPIPDSSTTSALQLATTLGVKYREGFVKNRYIGRTFIMPFQEKREKSVRQKLNPIDLEFKDKVVLLVDDSIVRGTTSRQIIEMARASGAKK

SEQ ID NO: 117513 - protein, 243 aa, Unknown
  Bacterial polypetide isolated from the Sargasso Sea
PLKKIRPCVFEYIYFSRPDSLLNGKCAYEYRKNFGVELAKETSIDADLVVPVPDSGNAAAIGYSQHEKINFDLGLIRNHYVGRTFIEPAQKIRSLGVRLKLNANKSTIKNKKIVLVDDSLVRGTTSHKIVKMLYDFGAKEVHVRIASPEIRFPDFYGVDTPTKKELLAANKTNEEICKYIDAKSLEFLSVDGLYRAMGYEKRNSTYPQLTDHYFTGDYPVKLIDDLGDNKVTQLSLLSTKSNN

SEQ ID NO: 117514 - protein, 212 aa, Unknown
  Bacterial polypetide isolated from the Sargasso Sea
DVVMPIPDSGRTSAMSLAESLGVPYREGFIKNRYIGRTFIMPGQAVRKKSVRQKLSPVSLEFKDKVVCLVDDSIVRGTTCSQIIEMARDAGAQKVYFCSAAPAVRFPNVYGIDMPTSEELVAFNRTDEEVAEVINADWLVYQDLDDLVECSQAGNREIETFECSVFDGKYVTGDIDAAYMERVAASRNDTSRFGSDSTARTDASLINVHNDV

SEQ ID NO: 117515 - protein, 91 aa, Unknown
  Bacterial polypetide isolated from the Sargasso Sea
MPLREACGVLGIASKSEILNLLQVGLRALQHRGQESAGLTIFDEEHKTQKGMGLVSEVLDDFGEEFKKGTVGIGHVRYSTAGGSSMKNAQP

SEQ ID NO: 117516 - protein, 311 aa, Unknown
  Bacterial polypetide isolated from the Sargasso Sea
LVEDGAIFYTTSDSETIVQLIARSKKEKNIDKIIEAISQIQGGYALVMLTKNILIGARDIYGIRPLVIGKINKSFVLASETCALDIIGAEFIREVENGEIVYIEDNELHSLKPFGNHTPRPCVFEYIYFSRPDSILRGKTAYEYRKNLGRELAKEDNVDAELVVPVPDSGNAAAIGYSQQKKIDFDLGLIRNHYVGRTFIEPGQQIRSLGVKLKLNANKSSIENKKIILVDDSLVRGTTSHKIVKMLYDAGAKEVHLRIACPEIKFPDFYGVDMPTKKELLAANKSVEEICDYVKAKSLKFLSLEGLYIAL

SEQ ID NO: 117517 - protein, 245 aa, Unknown
  Bacterial polypetide isolated from the Sargasso Sea
NKKLIGVRDPYGIRPLVLGDLNGAPVLTSETCALDIIGAKYVRDVEHGEIIIISEDGMESIKPFPKVQERPCIFERIYFSRPDSIVGGKTVYTYRKNLGQELAKETNIDADVIIPVPDSGVPAALGYSQESKIPFELGIIRNHYVGRTFIEPSQSIRQFGVKLKHNANSSYIKNKKVILIDDSIVRGTTAKKIIKMVYDAGAKEVHLGIACPPIKHPDFYGIDTPDYNELIASKSSLEEINNIIG

SEQ ID NO: 117518 - protein, 283 aa, Unknown
  Bacterial polypetide isolated from the Sargasso Sea
TTGNNTLRNIQPFFADTNAGGIGVAHNGNLTNSISLRNKLVEEGAIFYTTSDTETIVQLIAKSKRPKTIDKVVDAIFQIQGGYALVMLTQNSLIGVRDPYGIRPLVIGKLGNSYVLASETCALDIIGAKFLREVENGEIVLIENNKLISIKPFPPKKVRPCVFEYIYFSRPDSLLDNKTAYEHRKNLGKELAKENNINADIVVPVPDSGNAAALGFSQELKINFEHGLIRNHYVGRTFIEPSQKIRSLGVKLKLNANETTIKNKKIILIDDSLVRGTTSHKIV

SEQ ID NO: 117519 - protein, 173 aa, Unknown
  Bacterial polypetide isolated from the Sargasso Sea
FDLGLIRNHYVGRTFIEPSQKIRSLGVKLKLNANLSVIKNKKIILVDDSLVRGTTSSKIVKMLYDAGAKEIHVRIASPEIKFPDFYGVDTPTKKELLAANNSVDKICELIGAKSLKFLSIDGLYKAMGFDKRNNIYPQLTDHHFTGDYPVKVIDELGEDKVTQLSLLSTASNN

SEQ ID NO: 117520 - protein, 221 aa, Unknown
  Bacterial polypetide isolated from the Sargasso Sea
ALVIMTNKKLIGVRDPLGIRPLILGKIKNSYVIASESCALDIVGAKFVREIENGEIVVIENDKLSSLKPFPKKKARPCVFEYIYFSRPDSILNGKCAYEYRKKLGFELAKESDDVGDIVVPVPDSGVPAAIGYAQLKKTKFELGLIRNHYVGRTFIEPAQSIRSLGVKLKLSANMSSIKNKSIILIDDSLVRGTTCYKIVKMLYDSGAKEVHVRIASPEKK

SEQ ID NO: 117521 - protein, 57 aa, Unknown
  Bacterial polypetide isolated from the Sargasso Sea
MKALKTNRKSPFIKDDKLHEECGVFGVYNHEDSAALTALGLHALQHRGQEAAGIVTF

SEQ ID NO: 117522 - protein, 313 aa, Unknown
  Bacterial polypetide isolated from the Sargasso Sea
SYALGTIDTVQQGGKILRNVQPFFADTNAGGIGVSHNGNFTNAITLRKKLVEEGAIFYTTSDSETIVQLIARSKKEKNIDKIIEAISQIQGGYALVMLTKNILIGARDIYGIRPLVIGKINESFVLASETCALDIIGAEFVREVENGEIVYIEDNELNSLKPFGNHTPRPCVFEYIYFSRPDSILRGKTAYEYRKNLGRELAKQDHVDAELVVPVPDSGNAAAIGYSQQKKINFDLGLIRNHYVGRTFIEPGQQIRSLGVKLKLNANKSSIENKKIILVDDSLVRGTTSHKIVKMLYDAGSKEVHLRIACPEI

SEQ ID NO: 117523 - protein, 58 aa, Unknown
  Bacterial polypetide isolated from the Sargasso Sea
MKKLKRKLKIYNPKLKEECGVFGISNTKDASTLTALGLHALQHRGQEGCGIVSFDGNN

SEQ ID NO: 117524 - protein, 228 aa, Unknown
  Bacterial polypetide isolated from the Sargasso Sea
SLVALSRDMLIGMRDPFGVRPLVLGQLDGAWLLASESVAFDIIGANLVRELEPGEMVVIKDNGLESFHPFTTQKQRFCIFEFVYFSRPDSEVEGSSVYNVRKRIGQELAKEAPIEADIVVPVPDSGVPAAIGYAEEAFIPFELGIIRNHYVGRTFIEPSDQIRHLGVKLKHNANSGTLKGKRVILVDDSIVRGTTSTKIVEMVRSAGAAEVHMRIASPPTTHSCFYGV

SEQ ID NO: 117525 - protein, 153 aa, Unknown
  Bacterial polypetide isolated from the Sargasso Sea
MCGIFGIFGHPKASELTFLGLHALQHRGQESAGISVSDGETIHTRRGQGLVSEVFSGDEYLEFKGNQAIGHVRYTTAGDSGLLNAQPLVFRYTGGQVGVAHNGNLVNAKRLRDQLERQGSIFQTNSDTEVVSHLIARAGPPIDHAFQDALRVI

SEQ ID NO: 117526 - protein, 238 aa, Unknown
  Bacterial polypetide isolated from the Sargasso Sea
MLCDSVNNIFNKVKGAYSVTSIIIGKGLVVFRDPNGIRPLVKGERSNGNGGRDYIFASENTMFYALGYEPKGTVLPGELIYVDESGKVFSKRLVKKEFNPCIFEYVYFARPDARLNDVSVYRSRLRMGQNLADSWKKKHPDKIPDIVIPAPSTANTAALSFANALDVRYSEGLYKNTFIGRTFIMPGQAQRKKSVKYKLVPQELEIRDKKVMILDDSIVRGNTSREIVRMLKDFGAKE

SEQ ID NO: 117527 - protein, 166 aa, Unknown
  Bacterial polypetide isolated from the Sargasso Sea
MCGVVGIVSQTEVSPLIYDALTILQHRGQDAAGIATSTNNRFFIRKQLGLVRDVIRNQHILTLRGQMGIGHVRYPTAGSEDRELAQPMYVNSPFGISISHNGNLTNIEELRETLVNKDLRHLNTDSDSEVLLNVFAHELQKQGSVKPGSREIFAAVRSLHKRVRGA

SEQ ID NO: 117528 - protein, 200 aa, Unknown
  Bacterial polypetide isolated from the Sargasso Sea
QSDMVIPVPDSGVPAAIGFAEQSEIPFETGIIRNHYVGRTFIEPQQSIRAFSVKLKHNANKILVDGKKVILVDDSLVRGTTSIKIVRMMREAGAKEVHMRIAAPPIKYPDYYGIDTPVKENLLAANHSLNEIKDFLDVDSIAYLSIDGLYRAMGHKDGRDPKNPGYTDHCFTGDYPTTLMDQSGEENIRQLSLLFEIEKD

SEQ ID NO: 117529 - protein, 112 aa, Unknown
  Bacterial polypetide isolated from the Sargasso Sea
MARLNEECGIFGISNNKDAASLTALGLHALQHRGQEGCGIVTLDGKKFYSERRLGLVGDNFTKGNILKKLPGNYAIGHNRYSTTGNNLIKNIQPFFADLHDGGISIAHNGNL

SEQ ID NO: 117530 - protein, 95 aa, Unknown
  Bacterial polypetide isolated from the Sargasso Sea
VALGLHALQHRGQEGCGIVSFDGKNYHSEKRFGLVGDNFNKEKVLNKLLGNYAIGHNRYSTTGGTTLRNVQPFFADTNAGGIVVAHNGNLTNAVT

SEQ ID NO: 117531 - protein, 254 aa, Unknown
  Bacterial polypetide isolated from the Sargasso Sea
MEQSLYTERHPGLVSDNFTKTSVINRLVGNSAVGHNRYSTTGATIQRNIQPFFADLWGGGFAIAHNGNITNALSLRDELIRKGSIFQSTSDTETILQLVARSDADRTLDRLVDALMQISGAWALVVLTNKKLIGARDPFGIRPLVLGELDGAKILASETCALDIIGAKFMREIEPGEIIVITEDGEESIKPFPNARLRPCIFEYIYFSRPDSMLDGKSVYECRKSFGKNLAKECPANADIVVPVPDSGVPAALG

SEQ ID NO: 117532 - protein, 188 aa, Unknown
  Bacterial polypetide isolated from the Sargasso Sea
GVPDSAIAAAIGYAEESNIPYGEGLMKNRYVGRTFIQPEQSLRERNVQLKFNPLKEMIDGKRVVVVDDSIVRGTTTPRVINMLRNAGAKEVHMRITSPPIKHPCFYGVDMASKSELIANYKSLEEIENHIGADSLGYLSIESTMQATKQNQDTLCTACFTGNYPTSVPLQFHKMQMETQTTDRHGMKF

SEQ ID NO: 117533 - protein, 305 aa, Unknown
  Bacterial polypetide isolated from the Sargasso Sea
MCGIVGIVSSNDVNQQIYDSLLLLQHRGQDSTGIATMENTVFHIHKVQGQVNTAYRTRDMRNLIGKIGLGHVRYATKGSAESVEEAQPFYVNAPYGIVLIHNGNLTNTRDLEKQLFNVDKRHTNSSSDTEMLLNVFATELQEQINNQELEPDIIFNAVKSLHKRIQGSYASIALISGHGLLAFRDPFGIRPLVIGKRYSLTTKKEEWMVASESLVLENNDYEVVRDVDPGEAVFINLDGEFFSKQCSENPMLFPCAFEYVYLARPDSIMNGISVYKARLKMGDYLAETIKETINSGRYDVVMPIL

SEQ ID NO: 117534 - protein, 44 aa, Unknown
  Bacterial polypetide isolated from the Sargasso Sea
MKKFKLDKLREECGVFGVSNHEDSSALVALGLHALQHRGQEGWE

SEQ ID NO: 117535 - protein, 256 aa, Unknown
  Bacterial polypetide isolated from the Sargasso Sea
MVKENCGVVGIYSEGDVNVIPMVIDALRALQHRGQEAWGLAIPNKAPLKRLGLVSASSGEFKKISEEYASHSAIGHVRYSTVGKSDLESAQPLKVKDLCVAHNGTISNVEELSNLVGGCTFTPQNASDTLVAAQRLVSLITENGKLGNALSILKNEMVGSFCFTFLSDDDAVFAARDPKGFRPMVLGHKEEGNVHIVTSESSAISAIGAKLVRDVVPGELIKISKDGGFETEMFSDDTNRAHCSFEFTYFAQPSSK

SEQ ID NO: 117536 - protein, 79 aa, Unknown
  Bacterial polypetide isolated from the Sargasso Sea
MCGIYGCASPNDKSFLDIIEGLIRLQHRGQDSFGIANQHKYYKKMGLVKQINHDEVKNINGNYLIGHVRYRTSGYQSID

SEQ ID NO: 117537 - protein, 185 aa, Unknown
  Bacterial polypetide isolated from the Sargasso Sea
MKKYNEDKLREACGIFGISKHKDASAVVALGLHALQHRGQEGCGIVSFDGKNFHSEKRQGLVGDHFTKSEVIKKIPGEAAIGHNRYSTTGETSLRNIQPFFADLHGGGISIAHNGNLTNALTLRDNLVKNGAIFRTTSDTETIVQLIAKSKREKIIDKLIDALFQIQGGYSLVLMTNKKLIGVRD

SEQ ID NO: 117538 - protein, 203 aa, Unknown
  Bacterial polypetide isolated from the Sargasso Sea
ETNVDADLVVPVPDSGNAAAIGYSQYVEKEFELGLIRNHYVGRTFIEPSQKIRSLGVKLKLNANKSSIKNKRIILVDDSLVRGTTSHKIVQMLYDAGAKEVHVRIASPEIKFPDFYGVDTPTKKELLASNKTNDEICKYINAKSLKFLSIDGMYKAMGFDKRNNIYPQLTDHYFTGDYPVKPIDNLGDDKITQLSLLSTASNS

SEQ ID NO: 117539 - protein, 329 aa, Unknown
  Bacterial polypetide isolated from the Sargasso Sea
TNGLTLRHELKKEGAIFQSTSDTETILQLVARSKKGNTISRFIDALSRIEGAYALVALTNKKLIGVRDPLGIRPLVLGQLDGNYILTSETCALDIIGAKFIREVENGEIVVITDNTIESIKPFPQVKPRPCIFEYIYFSRPDSIVGGLSVYQCRKAFGKELAKESFVQADMVIPVPDSGVPAAIGYAEQSEIPFETGIIRNHYVGRTFIEPQQSIRAFSVKLKHNANKILVDGKKVILVDDSLVRGTTSIKIVRMMRDAGAREVHMRIAAPPIKYPDYYGIDTPVKENLLAANNELNEIKDMLDVDSIAYLSIDGLYRAMGHKEGRDPK

SEQ ID NO: 117540 - protein, 164 aa, Unknown
  Bacterial polypetide isolated from the Sargasso Sea
TFIMPYQEERKKSVRRKLNILDLEFQGKNVLLVDDSIVRGTTSKKIIEMARASGAKKVYFASAAPPIKYQNLYGIDMPSTSELIASNKTNDEVAKEIDADWLIYQTLDDLIDTVQVGNPEINEFETSIFTGKYITPLIENYLEDLENSRKDELKMQREKSKANG

SEQ ID NO: 117541 - protein, 277 aa, Unknown
  Bacterial polypetide isolated from the Sargasso Sea
TCALDIIGAKFLREVENGEIVVIENNELQSIKPFPSKKSRPCVFEYIYFSRPDSILNGKTTYEFRKKFGEHLALEDNVNADLVVPVPDSGNAAALGYSQKRKINFDLGLIRNHYVGRTFIEPAQKIRSLGVKLKLNANKSSIENKKIILIDDSLVRGTTSYKIVKMLYDAGAKEIHVRIASPEIKYPDFYGVDMPTKDELLAANKSVNEICNYIGAKSLKFLSINGLYKAMGYEKRNNTYPQLTDHYFTGDYPVEIIDELGENKITQLSLLSTGSNN

SEQ ID NO: 117542 - protein, 279 aa, Unknown
  Bacterial polypetide isolated from the Sargasso Sea
MYASSEDQLNSRKSMGYVRDVFQQRHMEKLVGNYGIGHVRYPTAGGAGKEFAQPMYVNSPYGISLAHNGNLTNSKQLATQLFHAEMRHLQTDSDSEVLLNIFAHELGKQREIYPSAEHIFKAVAKTHIRCDGAYAVLALISGYGMLAFRDNNGIRPLSIGVRKGKIRNDYIISSEDALFTPLGYEKLRDVDPGEAVFIDKHGELFSQQCSDNPQKRPCIFEYVYFSRPDSKIDEISVYKARMRMGTKLAGQIKKTRPDHDIDVVIPIPDSSVTAAHQLA

SEQ ID NO: 117543 - protein, 42 aa, Unknown
  Bacterial polypetide isolated from the Sargasso Sea
MSKLKEECGVFGIFNNKDAAALTALGLHSLQHRGQEGCGIVT

SEQ ID NO: 117544 - protein, 253 aa, Unknown
  Bacterial polypetide isolated from the Sargasso Sea
YSLVILTNKKLIGVRDPYGIRPLVLGDLNGAPVLASESCALDIIGAKFVREIENGEIIIISEKGMESIRPFPKVAERPCIFERIYFSRPDSMLGGNTVYTYRKNLGIELAKEHYVDADTVVPVPDSGVPAALGYAQQSNTPFELGIIRNHYVGRTFIEPSQSIRQFGVKLKHNANVSYIKNKKIILIDDSIVRGTTAKKIIKMIYDAGAKEVHLGIACPPIKHPDFYGIDTPDYNELIASKNSIEEISKTIGS

SEQ ID NO: 117545 - protein, 91 aa, Unknown
  Bacterial polypetide isolated from the Sargasso Sea
MCGIIGISAENNVAEEIYESLLMLQHRGQDAAGMVVCEPSGKLNSRKSKGYVRDVFQQNHMSNLQGNLGIGHVRYPTAGGIGKEFAQPNVC

SEQ ID NO: 117546 - protein, 41 aa, Unknown
  Bacterial polypetide isolated from the Sargasso Sea
MRNFDPKLKEECGVFGIGNAKDASALTALGLHALQHRGQEG

SEQ ID NO: 117547 - protein, 125 aa, Unknown
  Bacterial polypetide isolated from the Sargasso Sea
MYNPKLKEECAVFGISNTPEASTLTALGLHALQHRGQEGCGIVSFDGEKYHSEKRFGLVGDNFNDEKVLKNLPGNYAIGHNRYSTTGGTALRNVQPFFADTNSGGIGVAHNGNLTNAITLRNKMV

SEQ ID NO: 117548 - protein, 67 aa, Unknown
  Bacterial polypetide isolated from the Sargasso Sea
MIKLNTSEDKLHEECGVFGIFGSPDASTLTTLGLHALQHRGQEGAGIVTFDGSGFHGVRRTGLVGDN

SEQ ID NO: 117549 - protein, 244 aa, Unknown
  Bacterial polypetide isolated from the Sargasso Sea
TPCVFEHVYFARPDSVIDGISVHQARLRMGEALASRIESLVPDHRIDAVIPVPDSGRIAALGLSSALGVPYREGFVKNRYIGRTFIMPGQKIRKDSVRKKLNTISEEFSGKTVLIVDDSIVRGNTSRRIVQMAREAGASRVLFASSSPPIVHPNVYGIDMPAREEYVAYGRTNDEICEAIGADWLIYQDLGDLVDACTGASGSQIAEFDCSCFNGIYVTGGITEEYLSRISRTRSDSGKEQASV

SEQ ID NO: 117550 - protein, 303 aa, Unknown
  Bacterial polypetide isolated from the Sargasso Sea
KQFDKVIDAIFQIQGGYALVMLTQNSLIGVRDPYGIRPLVIGKLGNSYVLASETCAFDIIGAKFVREVENGEIVLIENNELKSIKPFPAKKVRPCVFEYIYFSRPDSLIGGKTAYEHRKNIGRELAKENDADADIVVPVPDSGNAAAMGFAQELKMNFEHGLIRNHYVGRTFIEPSQKIRSLGVKLKLNANQTTIKNKKIILIDDSLVRGTTSYKIVKMLYEAGAKEVHVKIACPEIRYPDFYGVDTPTKKELLAANKTNDEICEYIGAKTLRFLSIEGLYKAIGFEKRNETYPQLTDHYFHG

SEQ ID NO: 117551 - protein, 240 aa, Unknown
  Bacterial polypetide isolated from the Sargasso Sea
KSKRTKTIDKVIDAIFQIQGGYALVMLTQNSLIGVRDPYGIRPLVIGKLGNSYVLASETCAFDIIGAKFVREVENGEIVLIENNELKSIKPFPAKKVRPCVFEYIYFSRPDSLIGGKTAYEHRKNIGRELAKENDTDADIVVPVPDSGNAAAMGFAQELKMNFEHGLIRNHYVGRTFIEPSQKIRSLGVKLKLNANQTTIKNKKIILIDDSLVRGTTSYKIVKMLYDAGAKEVHVKIACP

SEQ ID NO: 117552 - protein, 91 aa, Unknown
  Bacterial polypetide isolated from the Sargasso Sea
MKKFNSDKLKEECGIFGISNHEDASTLVALGLHALQHRGQEGCGIVSFDGINYHSEKRQGLVGDHFTNSDTLKKLPGSFAIGHNRYSTTGE

SEQ ID NO: 117553 - protein, 70 aa, Unknown
  Bacterial polypetide isolated from the Sargasso Sea
MREECGVFGISNHEDSSTLVALGLHALQHRGQEGCGIVSYDGKNYHSEKRQGLVGDHFTKSNVIKKLPGK

SEQ ID NO: 117554 - protein, 272 aa, Unknown
  Bacterial polypetide isolated from the Sargasso Sea
MFVTQQLGESKAENLQPLFANLALGGFACAHNGNLTNTMSLKKKLVDTGSIFQTTSDTELILQLVARSKKRKLMDKLIDTLYQIKGAYSLIILTNKKLIGIKDPFGIRPLVLGDKNGSPVLASETCALDIIGAKYVRDIENGEIIVITKNGIESIKPFKKVNERPCIFERIYFASPDSIIDGKTVYTYRKSLGEQLAIENDIDADVVVPVPDSGVSAAIGYSQKSGIPFELGIIRSHYVGRTFIEPTQNIRQLGVKLKHSVNRSCVKNKKVI

SEQ ID NO: 117555 - protein, 181 aa, Unknown
  Bacterial polypetide isolated from the Sargasso Sea
MGYASETGLPYELGIIRNHYVGRTFIEPADHIRHLGVKLKHNASRAVIGGKRVILVDDSIVRGTTSVKIIEMMRNAGAKEVHMRIASPPTTHSCYYGVDTPEREELLAAQNSVDQMRKFMGADTLAFVSIEGLYRAMGLNERNRETPQYCDACFTGEYPVRLIDRDGGQTTPQLSFLSNLS

SEQ ID NO: 117556 - protein, 66 aa, Unknown
  Bacterial polypetide isolated from the Sargasso Sea
MKNFNPKLKEECGVFGISNAKDASALTALGLHALQHRGQEGCGIVSFNGKQYFSEKRFGLVGDNFK

SEQ ID NO: 117557 - protein, 190 aa, Unknown
  Bacterial polypetide isolated from the Sargasso Sea
RQLAREHPVKADYVVPVPDSGVASAIGYSEESKIPLELGLLRNHYVGRTFIEPQQHIRNFGVKLKLNSVKDVLKNKKVIVIDDSIVRGTTCRKIIKMIKDAGAKEVHVRISSPPTKDSCYYGIDTPDKTELIANDLSTEQIRRYILADTLGYLTLDGLRNSVQKNSSYNVKNNFCVSCFNSRYPTDIELL

SEQ ID NO: 117558 - protein, 233 aa, Unknown
  Bacterial polypetide isolated from the Sargasso Sea
EYIYFARPDTILNGKTAYEHRKSLGKELAKENDIDADIIVPVPDSGNAAALGFAQYLGKNFEHGLIRNHYVGRTFIEPSQKIRSLGVKLKLNANQTTIKNKKIILIDDSLVRGTTSHKIVKILYDAGAKEVHVKIACPEIRYPDFYGVDTPTRKELLAANKSNDEICEYIGAKSLKFLSINGMYRAIGFDNRNENYPQLTDHYFTGDYPVKPVDELGDSKITQLSLLSTGSNN

SEQ ID NO: 117559 - protein, 228 aa, Unknown
  Bacterial polypetide isolated from the Sargasso Sea
MIKFDDRIRDKCGVFGVFGHEDASALTALGLHALQHRGQESAGIVSFDGKNFNNQLNLGLVGDYFTKERVIKRLPGYAALGHVRYSTTGKTLFKNIQPLFADLQGGGLACSHNGNLTNGIELRKRLIREGSIFQSTSDTEAFIHLISKSKEKTIVKKIIDALHEIKGAYSFGLLTNKKLIGIRDPLGIRPLVLGSLGKAKIISSETCALDIIGAKFVRENKMWRNNSN

SEQ ID NO: 117560 - protein, 267 aa, Unknown
  Bacterial polypetide isolated from the Sargasso Sea
FVRDVENGEIVYVENDELKSIKPFPQKKVRPCVFEYIYFSRPDSILNGRTAYEYRKRFGAELAKEDNLDADLVVPVPDSGNAAALGYAEEKKINFDLGLIRNHYVGRTFIEPSQQIRSLGVKLKLNANVSVIKNKKIILVDDSLVRGTTSSKIVKMLYDNGAKEIHVRIASPEIKYPDFYGVDTPTKKELLAANKSVDEIKEFIKAKSLKFLTLDGLYRGMGFDKRNDAYPQLTDHHFTGDYPVKIIDELGEDKVTQLSLLSTGSSN

SEQ ID NO: 117561 - protein, 129 aa, Unknown
  Bacterial polypetide isolated from the Sargasso Sea
MQVIGHVRYPTAGSSSASEAQPFYVNSPFGISLAHNGNLTNTVELAEGLIKKRRHVNTTSDSEVLLNLLADELQKTTSLMLTPDEVFDTIAKVHEQARGAYAVVAMIIGQGLVAFRDPFGIRPLVLGKH

SEQ ID NO: 117562 - protein, 207 aa, Unknown
  Bacterial polypetide isolated from the Sargasso Sea
FYRKALGEHLAIENNVIADVVVPIPDSGVSAAIGFSQKSKIPFELGIIRSHYVGRTFIEPSQNIRQFGVKLKHSVNRSCIKNKKVILIDDSIVRGTTASKIVKMVYEAGAKEVNLGISCPPILHPDFYGIDTPNYDQLIASKSNLEEIRKLVGAKSLFFLSLDGTYKAMGCKKRNSKIPQFTDHCFTGEYPIDVTEILEINRQTNEK

SEQ ID NO: 117563 - protein, 200 aa, Unknown
  Bacterial polypetide isolated from the Sargasso Sea
MYNPKLKEECAVFGISNTPEASTLTALGLHALQHRGQEGCGIVSFDGEKYHSEKRFGLVGDNFNDEKVLKNLPGNYAIGHNRYSTTGGTALRNVQPFFADTNSGGIGVAHNGNLTNAITLRNKMVEEGSIFYTTSDTETIVKLIAKSKRPKTIDKVIDALFQIQGGYALVMMTQNTLIGVRDPFGIRPLVIGKLKNSYVF

SEQ ID NO: 117564 - protein, 261 aa, Unknown
  Bacterial polypetide isolated from the Sargasso Sea
MCGIAGIFSHKPVASELYDSIINLQHRGQDAAGIMTYDKRMHKEKGVGLAKEIFNSENMELLTGNIGISHNRYPTHGGFSHGEVQPFWTSVPYGIALAHNGNLTNYNELASEVTKTETRYLNTNSDSEVLLHLFADALHKDSPPQTSKEFFELLCESVSNIFNKVRGAYSVTSIIIGKGLVVFRDPHGIRPLVKGERSNGNGGKDYIFASENTMFYAMGYEPQGTVLPGELIYVDENGEIFKKRLIKKEFNPCIFEYVYLL

SEQ ID NO: 117565 - protein, 287 aa, Unknown
  Bacterial polypetide isolated from the Sargasso Sea
DSLLLLQHRGQDSTGIATMENTVFHIHKAKGQVNTAYRTRDMRNLIGKIGLGHVRYATKGSAESVEEAQPFYVNAPYGIVLIHNGNLTNTRDLEKQLFNIDKRHTNSSSDTEMLLNVFATELQEQIHNQELEPDIIFSAVKSLHKRIQGSYASIALISGHGLLAFRDPFGIRPLVIGKRFSLTTKKEEWMVASESLVLENNDYQVVRDVDPGEAVFINLNGEFFSKQCSENPMLFPCSFEYVYLARPDSIMNGISVYKARLKMGDYLAETIKQTINSGDVDVVMPIP

SEQ ID NO: 117566 - protein, 239 aa, Unknown
  Bacterial polypetide isolated from the Sargasso Sea
TSDTETIVQLIAKSKRSKIIDKIIESLFKIQGGYALTILIKNKLIGIRDPYGIRPLVIGKINKSYVLASETCALDIIGAKFIRAVENGEIVVITEDGLESIKPFPKIKERPCIFEYIYFSRPDSTINNVSVYEYRKKFGAELAKETHIEADLIVPVPDSGVPASIGYAEKIKKNIELGIIRNHYVGRTFIEPTQQIRSFGVKLKHNINKSLVKNKSIILIDDSLVRGTTSVKIIKMLYE

SEQ ID NO: 117567 - protein, 202 aa, Unknown
  Bacterial polypetide isolated from the Sargasso Sea
DNIEGDIIVPVPDSGNAAALGYSQQTKKNFELGLIRNHYVGRTFIEPSQKIRSLGVKLKLNPNETSIKNKRIILVDDSLVRGTTSYKIVKMLYDVGAKEVHVRIASPEIRYPDFYGVDTPTKKELLAANKSNDEICKYIGAKSLKFLSIEGLYKAIGFENRNKNYPQLTDHYFTGDYPVKPIDNLGDDKITQLSLLSTGSNN

SEQ ID NO: 117568 - protein, 113 aa, Unknown
  Bacterial polypetide isolated from the Sargasso Sea
MKLKKKFKIYNPKIKEECAVFGISNSNDASTLTALGLHALQHRGQEGCGIVSYDGEKYHSEKRFGLVGDNFNDEKVIKKLPGKYAIGHNRYSTTGGTALRNVQPFFADTNAGG

SEQ ID NO: 117569 - protein, 261 aa, Unknown
  Bacterial polypetide isolated from the Sargasso Sea
KLPGNRAIGHNRYSTAGNNLIKNVQPFFADLHTGGISIAHNGNLSNARHIRRGLVKNGSIFQTTSDTETIVQLIAKSKRIKVVDKIIDSLFKIQGGYALVILTEKKLIGIRDPFGIRPLVIGKINKSYILASETCALDIIGAKFVREVENGEMVVITDSGLESIKPFPKIKERPCIFEYIYFSRPDSIINNVSVYEHRKKLGAELAKESKTEADLIIPVPDSGVPASIGYAEKIKKNVELGIIRNHYVGRTFIEPTQQIRS

SEQ ID NO: 117570 - protein, 124 aa, Unknown
  Bacterial polypetide isolated from the Sargasso Sea
MCGIIGMFCVDSVNQQIYDNLLLLQHRGQDSAGIVTMDNHTFHVHKQRGRVREAFRTRDMRKLLGNAGIGHVRYATRGAAASEEEVQPFYVNAPYGITFVHNGNLTNTLQLEQDLFKIDRRHTN

SEQ ID NO: 117571 - protein, 208 aa, Unknown
  Bacterial polypetide isolated from the Sargasso Sea
KELAKENNIDADIIVPVPDSGNAAALGFAQYLGKNFEHGLIRNHYVGRTFIEPSQQIRSLGVRLKLNANRTTIKNKKIILIDDSLVRGTTSLKIVKMLYDGGASEVHVKIACPEIRYPDFYGVDTPTRKELLAANKSNDEICEHIGAKSLKFLSIDGMYRAIGFEKRNNSYPQLTDHYFTGEYPVKPIDDLGDNKITQLSLLNTASNN

SEQ ID NO: 117572 - protein, 48 aa, Unknown
  Bacterial polypetide isolated from the Sargasso Sea
MNFNPKLKEECGVFGISNNKDASALTALGSHALQHRGQEGCGIVTFDG

SEQ ID NO: 117573 - protein, 296 aa, Unknown
  Bacterial polypetide isolated from the Sargasso Sea
LNKIIDALMQIQGGYALSIIANGTLIGARDPLGIRPLVLGKIKNTFILASETCALDIIGAKFIREIENGEVVVIKDNKVESRRPFPKKQIKPCVFEYIYFSRPDSILKNKTAYEYRKNLGTYLAKETDIKPDVIVPVPDSGVPAALGFSQESGIPFELGLIRNHYVGRTFIEPTQQIRSLGVKLKLNPNQSSIRRKKVVLIDDSLVRGTTSTKIIKMLYDFGAKEVHMRIASPAIKYPDFYGVDTPTQEELLAANKNLEEMRKYIGAKSLKFLSLDGLYQALGYEHRDNDNPQFTD

SEQ ID NO: 117574 - protein, 240 aa, Unknown
  Bacterial polypetide isolated from the Sargasso Sea
NKMVEEGSIFYTTSDTETIVKLIAKSKRPNTIDKVIDALFQIQGGYALVMMTQNTLIGVRDPYGIRPLVIGKLKNSYVFASETCALDIIGAKYIREVENGEIVYVENDNLKSIKPFPQKKVRPCVFEYIYFSRPDSILNGKTAYEYRKNFGAELAKEDNLDADLVVPVPDSGNAAALGYAKEKGIGFDLGLIRNHYVGRTFIEPSQQIRSLGVKLKLNANISVIKNKKIILVDDSLVRGK

SEQ ID NO: 117575 - protein, 63 aa, Unknown
  Bacterial polypetide isolated from the Sargasso Sea
MFLWDQTDDKLREECGVFGISGHKEAAAVTALGLHALQHRGQEAAGIVSYDGKRFHSERRIGL

SEQ ID NO: 117576 - protein, 244 aa, Unknown
  Bacterial polypetide isolated from the Sargasso Sea
MARSDSLMDGVSVYKARLRMGEKLADKILRERPEHDIDVVIPIPDTSRTAALELANRLGVKFREGFVKNRYIGRTFIMPGQAARKKSVRQKLNAIDLEFRGKNVMLVDDSIVRGTTCKQIIQMAREAGAKNVYFCSAAPAVRYPNVYGIDMPSAHELIAHNRTTEEVAELIGADWLIYQDLEDLVDAVGGGKVKIDNFDCAVFDGNYITGDIDEAYLHKIEQARNDLSKVKTNAVSAIIDLYNN

SEQ ID NO: 117577 - protein, 49 aa, Unknown
  Bacterial polypetide isolated from the Sargasso Sea
MREECGVFGVSEHNDATALVALGLHALQHRGQEGCGIVSFDGKSFHFRK

SEQ ID NO: 117578 - protein, 238 aa, Unknown
  Bacterial polypetide isolated from the Sargasso Sea
FAHELGKQREIYPSEKNIFKAVTKTHIRCDGAYAVIALINGYGLVAFRDNNGIRPLSIGVRKGKEREEYIVSSEDALFTPLGFEKLRDIDPGEAIFIDKSGKLFSQQCADNPQKRPCIFEYVYFSRPDSKIDEISVYKARMRMGTKLAGQIKKTRPDHDIDVVIPIPDSSVTAAHQLAVDLNVPYREGFVKNRYIGRTFIMPYQEERKKSVRRKLNILDLEFEGKNVLLVDDSIVRGT

SEQ ID NO: 117579 - protein, 251 aa, Unknown
  Bacterial polypetide isolated from the Sargasso Sea
VRDPYGIRPLVIGKLGNSYVLASETCAFDIIGAKFIREVENGEIVLIENNELKSIKPFPAKKVRPCVFEYIYFSRPDSLIGGKTAYEHRKNIGRELAKENDTDADIVVPVPDSGNAAAMGFAQELKINFEHGLIRNHYVGRTFIEPSQKIRSLGVKLKLNANQTTIKNKKIILIDDSLVRGTTSYKIVKMLYEAGAKEVHVKIACPEIRYPDFYGVDTPTKKELLAANKTNDEICEYIGAKSLKFLSIEGL

SEQ ID NO: 117580 - protein, 269 aa, Unknown
  Bacterial polypetide isolated from the Sargasso Sea
MSAKYVRDVEHGEIIIISEDGMESIKPFPKVQERPCIFERIYFSRPDSIVGGKTVYTYRKNLGKELAKETNINADVIIPVPDSGVPAALGYSQESKIPFELGIIRNHYVGRTFIEPSQSIRQFGVKLKHNANSSYIENKKVILIDDSIVRGTTAKKIIKMVYDAGAKEVHLGIACPPIKHPDFYGIDTPDYNELIAAKSSLEEINNVIGSKSIFFLSLEGTYKAMGYEKRDNETPQFTDHCFTGDYPTSLLDREQGTVSKQFSLLSEKN

SEQ ID NO: 117581 - protein, 286 aa, Unknown
  Bacterial polypetide isolated from the Sargasso Sea
DDQLNSRKSMGYVRDVFQQRHMDKLVGNYGIGHVRYPTAGGAGKEFAQPMYVNSPYGISLAHNGNLTNSKQLGTQLFHAEMRHLRTDSDSEVLLNIFAHELGKQREIYPSEKNIFKAVTKTHIRCDGAYAVIALINGYGLVAFRDNNGIRPLSIGVRKGKEREEYIVSSEDALFTPLGFEKLRDIDPGEAIFIDKSGKLSSQQCAENPQKRPCIFEYVYFSRPDSKIDEISVYKARMRMGTKLAGQIKKTRPAHDIDVVIPIPDSSVTAAHQLAVDLNVPYRESFV

SEQ ID NO: 117582 - protein, 164 aa, Unknown
  Bacterial polypetide isolated from the Sargasso Sea
YVGRTFIEPTQNIRSLGVKLKLSANRSSIKNKSVILIDDSLVRGTTCHKIVKMLYDSGAKKVHVRIASPEIKFPDFYGIDMPSKKELLAANKNINEMCKYVGANSLKFLSIDGLYKAICGNPRNKLYPQFTDHYFTGEYPVKPVDQMENNKIAQLSLLSGKSTN

SEQ ID NO: 117583 - protein, 218 aa, Unknown
  Bacterial polypetide isolated from the Sargasso Sea
FARPDSFLFGEHVYKARKEMGRAMAQESPADADLIVPVPDSGVVSAMGFAEESGIPFEMGLIRNHYVGRTFIEPQSQIRNFGVKLKLNAVKNLISGKRLAIIDDSIVRGTTCRKIVKMLLEAGAKEVHLRISAPPILHSCFYGIDTPHKEELIAHTHSLEATRKYLGADSLQYLSIKKMLEVLQNGKNKFCSACFDGNYPVPITDHLSTTQQLNLFSK

SEQ ID NO: 117584 - protein, 239 aa, Unknown
  Bacterial polypetide isolated from the Sargasso Sea
VRPCVFEYIYFSRPDSILNGKTAYEYRKKFGAELAKEDNLDADLVVPVPDSGNAAALGYAEEKKINFDLGLIRNHYVGRTFIEPSQQIRSLGVKLKLNANVSVIKNKKIILVDDSLVRGTTSSKIVKMLYDNGAKEIHVRIASPEIKYPDFYGVDTPTKKELLAANKSVDEIKEFIKAQSLKFLTLDGLYRGMGFDKRNEAYPQLTDHHFTGDYPVKIIDELGEDKVTQLSLLSTGSSN

SEQ ID NO: 117585 - protein, 266 aa, Unknown
  Bacterial polypetide isolated from the Sargasso Sea
AQDPRGFRPLSLGQFENAWVVSSETCALNTIGADFVCEIKPGELLVFDEKGLQMRSFTGVQTRKICSFEYIYFARPDSEVDGISVHSVRKELGRELCREAPAEADLVIGVPDSGLAAAVGYAEQCGLPYELGMMKNRYVGRTFIQPNQELRRRGVKMKLSVVRKAVEGKRLVLVDDSIVRGITSGRIVSMLKDNGATEVHMRVTSPPITHPCLYGIDTARHMELIAAEMSVDEIRDEIGADSLHFLSEKGMIQATGREDLSEDQGH

SEQ ID NO: 117586 - protein, 142 aa, Unknown
  Bacterial polypetide isolated from the Sargasso Sea
MKKYNSDKLREECGIFGVSNHEDSSALVALGLHALQHRGQEGCGIVSFDGKNYHSEKRQGLVGDHFTNSEIIKKLPGHFAIGHNRYSTTGETSLRNIQPFFADLHMGGLSIAHNGNLTNALILRNSLVKDGAIFRTTSDTET

SEQ ID NO: 117587 - protein, 299 aa, Unknown
  Bacterial polypetide isolated from the Sargasso Sea
MCGIVGIVSSNDVNQQIYDSLLLLQHRGQDSTGIATMENTVFHIHKVKGQVNTAYRTRDMRNLIGKIGLGHVRYATKGSAESVEEAQPFYVNAPYGIVLIHNGNLTNTRDLEKQLFNVDKRHTNSSSDTEMLLNVFATELQEQINNQELEPDIIFNAVKSLHKRIQGSYASIALISGHGLLAFRDPFGIRPLVIGKRLSLTTKKEEWMVASESLVLENNDYEIVRDVDPGEAVFINLDGEFFSKQCSENPMLFPCAFEYVYLARPDSIMNGISVYKARLKMGDYLAETIKQQSILEILM

SEQ ID NO: 117588 - protein, 59 aa, Unknown
  Bacterial polypetide isolated from the Sargasso Sea
MKIFNPKLKEECGVFGISNISDASTLTALGLHALQHRGQEGCGIVSYDEKITTLKKDLG

SEQ ID NO: 117589 - protein, 122 aa, Unknown
  Bacterial polypetide isolated from the Sargasso Sea
MYNPKLKEECAVFGISNTPEASTLTALGLHALQHRGQEGCGIVSFDGKKYHSEKRFGLVGDNFNDEKVLKNLPGNYAIGHNRYSTTGGTALRNVQPFFADTNSGGIGVAHNGNLTNAITLRN

SEQ ID NO: 117590 - protein, 321 aa, Unknown
  Bacterial polypetide isolated from the Sargasso Sea
SDSLINLNGNMGIGHVRYPTAGCDDVSEAQPFYTANPINITLAHNGTLTNSETIKEELTKTHFCQFNTSSDSEVLLKLFAYELYKTNYRKVSNDHVFRALKKVFNRCSGGYAVIMLIAGVGIVAFRDPKGIRPLAIGSNKNSYMIASESSALTSMGYRALEDVLPGQAVIINEDGTVNKKRLIRKAVHQPCIFEYVYFSRPDSTIDEISVHKSRLRMGDFLGDKILREYKNIEVDVVIPVPDTSRTSAMQVAHKLGVKYREGFMKNRYIGRTFIMPGQNTRKKSVARKLNPIEIEFKDKNVLLVDDSIVRGHTSKRIIQMV

SEQ ID NO: 117591 - protein, 154 aa, Unknown
  Bacterial polypetide isolated from the Sargasso Sea
MCGIIGLVGHPDSQVGKTLYDGLLVLQHRGQDAAGIVTSDSRNISHRRANGLVRDVFRLRHIQALQGSMGLGHVRYPTAGSSSAAEAQPFYTNSPFGVSLAHNGNLTNPEEIIDTLLERDHRRINTSSDSEALLNLFAAEIQRSINGRRGGLDA

SEQ ID NO: 117592 - protein, 303 aa, Unknown
  Bacterial polypetide isolated from the Sargasso Sea
MESQPWNSKKLSLHKELGVVTEVFKTDESLGLEGNVGIGHVRYPTAGCSDVSEAQPFHSSNPVNICLAHNGTLTNSDEMKKFLLETHFCQLNTQSDSEVLLNLFAYELSKINFDVLQNSHVFEALKRVYERCEGGFAVTMIVGGVGLVAFRDSNGIRPLVVGKKDESFMVASESSALSALGYEFEHDIDPGSAIIISESGVIEKSVCAESISHSPCLFEFVYFSRPDSVIDSISVHKSRLRMGDFLGDKILRDYSHLEIDAVIPVPDTSRTSAMQVAYKLGVKYREGFIKNRYIGRTFIMPGQ

SEQ ID NO: 117593 - protein, 126 aa, Unknown
  Bacterial polypetide isolated from the Sargasso Sea
MVKENCGVVGIYSEGDVNVIPMVIDALRALQHRGQEAWGLAIPNKAPLKRLGLVSASSGEFKKISEEYASHSAIGHVRYSTVGKSDLESAQPLKVKDLCVAHNGTISNVEELSNLVGGCTFTPQNA

SEQ ID NO: 117594 - protein, 236 aa, Unknown
  Bacterial polypetide isolated from the Sargasso Sea
CVFEYIYFARPDSILDGKTAYEHRKNLGKELAKESDINADIIVPVPDSGNAAALGFSQHLGKNFEHGLIRNHYVGRTFIEPSQRIRSLGVKLKLNANRSTIKDKKIILIDDSLVRGTTSHKIVKMLYDSGAKEVHVRIACPEIKYPDFYGVDTPTRKELLAANKSNEEICEYIGAKSLKFLSIDGMYRAIGFDKRNKNYPQLTDHYFTGDYPVKPIDELGDSKITQLSLLNTASNN

SEQ ID NO: 117595 - protein, 275 aa, Unknown
  Bacterial polypetide isolated from the Sargasso Sea
LTALGLHALQHLGQEGCGIVSYDGNSYHSERKFGLVGDNFTKKHSLDKLNGKIAIGHNRYSTTGGETIRNIQPFYADLHGGAISIAHNGNLTNALLLREQMVREGAIFQTTSDTETIVQLVARSKKKDILNKIIDALMQIQGGYALSIIANGTLIGARDPLGIRPLVLGKFKNAFILASETCALDIIGAKFIREIENGEVVVIKDNKVESRRPFPKKQIKPCVFEYIYFSRPDSILKNKTAYEYRKNLGTYLAKETEIKPDVVVPVPDSGVPAAL

SEQ ID NO: 117596 - protein, 66 aa, Unknown
  Bacterial polypetide isolated from the Sargasso Sea
MDKLNEECGVFGISNHEDASALVALGLHALQHRGQEGCGIVSFDGTNYHSEKRQGLVGDHFTDPET

SEQ ID NO: 117597 - protein, 242 aa, Unknown
  Bacterial polypetide isolated from the Sargasso Sea
MGRQFLKHCALNTIGADFVREIKPGELLVFDEKGLQMRSFTGVQTRKICSFEYIYFARPDSEVDGISVHSVRKELGRELCREAPAEADLVIGVPDSGLAAAVGYAEQCGLPYELGMMKNRYVGRTFIQPNQELRRRGVKMKLSVVRKAVEGKRVVLVDDSIVRGITSGRIVSMLKDNGATEVHMRVTSPPITHPCLYGIDTARRMELIAAEMSVDEIRDEIGADSLHFLSEKGMIQATGRED

SEQ ID NO: 117598 - protein, 263 aa, Unknown
  Bacterial polypetide isolated from the Sargasso Sea
VENGEIVIVENEKIQSIKPFPKKKSRPCVFEYIYFARPDSILNGKSAYEFRKNLGYELAKESKNIGDIIVPVPDSGVPAAIGFAQFKKMNFELGLIRNHYVGRTFIEPTQSIRSLGVKLKLSANMSSIKNKSVILIDDSLVRGTTCYKIVKMLYESGAKEVHVRIACPEIKFPDFYGIDMPSKKELLAANKNLNEMKNYIQSDSLKFLSIDGLYRGICGSKRNNVYPQFTDHYFTGEYPIKPVDKMKENNVAQLSLLSGKSNN

SEQ ID NO: 117599 - protein, 60 aa, Unknown
  Bacterial polypetide isolated from the Sargasso Sea
MLKKKYRNYSPKIKEECGVFGISNYVDASALTALGLHALQHRGQEGCGIVSYDGKKYYSE

SEQ ID NO: 117600 - protein, 258 aa, Unknown
  Bacterial polypetide isolated from the Sargasso Sea
MGEIIVIEDGNIKSIKPFTTKKQRPCVFEYVYFSRPDSFIKGKCAYEYRKNFGYELAKESDDAGDIVVPVPDSGVPAAIGYSQYKKKSFELGLIRNHYVGRTFIEPKQNIRSFGVKLKLSSNKSSIKNKSIILIDDSIVRGTTCSKIVKMLYDGGAKEVHVRISSPPIKFPDFYGIDMPSKKELLAANKNLEEMCKHIQADSLKFLSIEGLYKAIFGQKRNDTYPQLTDHYFTGEYPVELVDQNENDKVTQLSLLSGK

SEQ ID NO: 117601 - protein, 47 aa, Unknown
  Bacterial polypetide isolated from the Sargasso Sea
MKSFNSKLKEECGVFGISNIEDASALTALGLHALQHRGQEGCGIVTF

SEQ ID NO: 117602 - protein, 289 aa, Unknown
  Bacterial polypetide isolated from the Sargasso Sea
CKLKNSYILSSESCALDIIGATFVREIENGEIVIIENQELKSIKPFPKQKPRPCVFEYIYFARPDSIINNKCAYEYRKKLGIQLAKETDVQADFVVPVPDSGVPAALGYAEQSNKKFEFGLIRNHYVGRTFIEPTNNIRSLGVKLKLSSTKSIVKNKSIILIDDSLVRGTTCYKIVKMLYESGAKEVHVRIACPQIKYPDFYGVDMPTKEELLAFNKNIQEMCDHIKAKSLKFLSLSGLYTALIEEKRNSNYPQFSDHYFTGEYPIKPQDNLTGIRLKQLSLLSSKSNS

SEQ ID NO: 117603 - protein, 220 aa, Unknown
  Bacterial polypetide isolated from the Sargasso Sea
IDGRNVYDSRKRIGQELADESGVPADVVIPVPDSGVPAALGYAEQAGIPYELGIIRNHYVGRTFIEPTDRIRHLGVKLKHNANRDVIDGRRVVLVDDSIVRGTTSVKIVEMMRAAGANEVHMRIASPPTTHSCFYGVDTPTRDQLLAAQNDVDEMARIIGVDSLAFLTMDGLYRAMGLESRDASAPQYCDACFSGEYPIIPTDQSSDQPSPQLSFLTQLA

SEQ ID NO: 117604 - protein, 311 aa, Unknown
  Bacterial polypetide isolated from the Sargasso Sea
YDNQDIPREACGVVGIYAPKEEVARAVFFGLYALQHRGQESAGIATSDGSQIYTHTEMGLVGQGFQEYDLSRLPGHISIGHTRYSTTGSSNIENAQPIISKGVNVEIALGHNGNLINAVDLKKELLDWNVMFSSSADSEIIAHIISNAPANNWSDRAAYTMRKLQGAYSLVMMTKNELIGMRDPLGVRPLCIGKLNEGWILASESCALDHIGADLVRELNPGEAVLIDQNGPKTIYQKERSGKIGQCIFEQIYFSRPDSILSEKLVYSTRMAMGAELSREFPVDADVVIGVPDSATAAAVGYSQESGIPYS

SEQ ID NO: 117605 - protein, 72 aa, Unknown
  Bacterial polypetide isolated from the Sargasso Sea
MKNWQNFLKKFEVRQSHVPRFNEECGVFGISGTKDAAALTALGLHALQHRGQEGCGIVSYDGNSYHSERKFG

SEQ ID NO: 117606 - protein, 229 aa, Unknown
  Bacterial polypetide isolated from the Sargasso Sea
MCGLAGIYSNKPVAAELYDSLIHLQHRGQDAAGIITYKNRMHKSKGSGLVRDIFTDKKINRLKGNIGIAHNRYPTHGGFGHGEIQPFWTSVPYGIALAHNGNLTNYNELSETITSSESRYLNTHSDTEALLHLFADLLHNKQQPANDEQFFKNLCDTVKTVFEKVDGAYSVVALIIGKGLVAFRDPNGIRPLVKGARKHKDGKKDYIVASENTMFYPLGFEPEGSVLPG

SEQ ID NO: 117607 - protein, 86 aa, Unknown
  Bacterial polypetide isolated from the Sargasso Sea
MPLREACGVLGIASKSEILNLLQVGLRALQHRGQESAGLTIFDEEHKTQKGMGLVSEVLDDFGEEFKKGTVGIGHVRYSTAGGSSM

SEQ ID NO: 117608 - protein, 50 aa, Unknown
  Bacterial polypetide isolated from the Sargasso Sea
MDRLREECGVFGIFNNKDAAALTALSLHALQHRGQEGCGIVTFNGKKFFC

SEQ ID NO: 117609 - protein, 275 aa, Unknown
  Bacterial polypetide isolated from the Sargasso Sea
ALDIIGAKFIREVENGEIVLIENDELKSIKPFPIKKVRPCVFEYIYFARPDSILDGKTAYEHRKSFGAELAKENDIDADIVVPVPDSGNAAALGFAQHLKMNFELGLVRNHYVGRTFIEPSQKIRSLGVKLKLNANQSAIKNKKIILIDDSLVRGTTSYKIVKMLYDAGAKEVHVKIACPEIRYPDFYGVDTPTKKELLAANKTNKEICDYIGAKSLKFLSLDGMYRAVGFDRRNESYPQLTDHYFTGDYPVKPIDELGDNKITQLSLLSTASNN

SEQ ID NO: 117610 - protein, 183 aa, Unknown
  Bacterial polypetide isolated from the Sargasso Sea
ITALGLHAVQHRGQEGCGIVSFDGKNYFSEKRFGLVGDNFNKEKVLKKLKGNYAIGHNRYSTTGENTLRNIQPFFADTNAGGIGVAHNGNLTNSIALRNKLVEDGAIFYTTSDTETIVQLIAKSKREKTIDKIVDAIFQIQGGYSLVMLTQNSLVGVRDPFGIRPLVIGKLNNSYVLASETCA

SEQ ID NO: 117611 - protein, 212 aa, Unknown
  Bacterial polypetide isolated from the Sargasso Sea
MCGVVGIVSQTEVSPLIYDALTILQHRGQDAAGIATSTNNRFFIRKQLGLVRDVIRNQHILTLRGQMGIGHVRYPTAGSEDRELAQPMYVNSPFGISISHNGNLTNIEELRETLVNKDLRHLNTDSDSEVLLNVFAHELQKQGSVKPGSREIFAAVRSLHKRVRGAYSVVIMINGIGIVGFRDPFGIRPLIVGSKENDLIGKDYMIASESTV

SEQ ID NO: 117612 - protein, 82 aa, Unknown
  Bacterial polypetide isolated from the Sargasso Sea
MKKHIKILKKKLKNYNPRLKEECGVFGISNAKDASALTALGLHALQHRGQEGCGIVTFDGEKYYSEKRFGLVGDNFNKEKVL

SEQ ID NO: 117613 - protein, 287 aa, Unknown
  Bacterial polypetide isolated from the Sargasso Sea
IKNSYVLASETCALDIIGAKFLREVENGEIVVIENNKLKSLKPFPQKKSRPCIFEYIYFSRPDSILNGKTTYEFRKKFGEQLANEDNIEADLIVPVPDSGNAAALGYSQKTKINFDLGLIRNHYVGRTFIEPAQKIRSLGVKLKLNANKSSIKDKKIILIDDSLVRGTTSHKIVKMLYDAGAKEIHLRIASPEIKYPDFYGVDMPTRKELLAANKSVKEMCEHIGADSLKFLSIDGLYKAMGFEKRNKTYPQLTDHYFTGDYPVEIIDELGDNKITQLSLLSTGSNN

SEQ ID NO: 117614 - protein, 214 aa, Unknown
  Bacterial polypetide isolated from the Sargasso Sea
YRKNFGLQLAKEDDIDADLVVPVPDSGNAAALGYAEEKSLKFDLGLIRNHYVGRTFIEPSQQIRSLGVKLKLNPNISVIKDKRIILVDDSLVRGTTSSKIVKMLYDAGAKEVHVRIASPEIKFPDFYGVDTPTKKELLAANKSTAEICEFIKAKSLKFLSLNGLYLGMGFEKRNENYPQLTDHHFTGEYPVKIIDELGEDKVTQLSLLSTASNN

SEQ ID NO: 117615 - protein, 60 aa, Unknown
  Bacterial polypetide isolated from the Sargasso Sea
MKKFKSDKLREECGVFGISNHQDASAMVALGLHALQHRGQEGCGIVSYDGKNYHSEKRQG

SEQ ID NO: 117616 - protein, 65 aa, Unknown
  Bacterial polypetide isolated from the Sargasso Sea
MKKFKLDRLREECGVFGVSNHEDASRLVALGLHSLQHRGQEGCGIVSFDGNSFHSEKRQGLVGDH

SEQ ID NO: 117617 - protein, 197 aa, Unknown
  Bacterial polypetide isolated from the Sargasso Sea
MLKKKFQIYDPKLKEECAVFGISDNSDASTLTALGLHALQHRGQEGCGIVSFDGKKYHSEKRFGLVGDNFSKEKVIKTLPGKFAIGHNRYSTTGGTTLRNIQPFFADTNAGGIGVSHNGNLTNAIKLRTKMVEEGSIFYTTSDTETIVKLIARSKRAKTVDRVIDALFQIQGGYALVVLTQNILIGARDPFGIRPLV

SEQ ID NO: 117618 - protein, 209 aa, Unknown
  Bacterial polypetide isolated from the Sargasso Sea
MKKLKKKFKIYDPKIKEECAVFGISNSNDASTLTALGLHALQHRGQEGCGIVSFDGEKYHSEKRFGLVGDNFNDEKVLKKLPGKYAIGHNRYSTTGGTALRNVQPFFADTNAGGIGVAHNGNLTNAITLRNKLVQEGAIFYTTSDTETIVQLVAKSKRAKTIDKIIDAIFQIQGGYALVMMTQNTLIGVRDPYGIRPLVIGKLKNSFVL

SEQ ID NO: 117619 - protein, 131 aa, Unknown
  Bacterial polypetide isolated from the Sargasso Sea
MKLKKKFKIYDPKIKEECAVFGISNSNDASTLTALGLHALQHRGQEGCGIVSYDGEKYHSEKRFGLVGDNFNDEKVIKKLPGKHAIGHNRYSTTGGTALRNVQPFFADTNAGGIGVAHNGNLTNAITLRNK

SEQ ID NO: 117620 - protein, 246 aa, Unknown
  Bacterial polypetide isolated from the Sargasso Sea
ETIVQLVAKSKRNTTIDKIIDALFQIQGGYALIMLTQNTLFGVRDPFGIRPLVIGKLKNSYVFASETCALDIIGAKFVRDVENGEVVYIENDELKSIKPFPIKKTRPCVFEYIYFSRPDSILNGKCAYEYRKNFGIELAKETNVEADLVVPVPDSGNAAAIGYSQHIGKKFELGIIRNHYVGRTFIEPAQKIRSLGVKLKLNANKSSIKNKKIILVDDSLVRGTTSHKIVKMLYDAGAKEVHVRIA

SEQ ID NO: 117621 - protein, 279 aa, Unknown
  Bacterial polypetide isolated from the Sargasso Sea
GIVTFDGEKYYSEKRFGLVGDNFNKEKILKNLKGNYAIGHNRYSTTGSNTLRNIQPFFADTNAGGIGVSHNGNLTNSISLRNKLVEEGAIFYTTSDTETIVQLIAKSKRIKTIDKIVDAIFQIQGGYALVMLTQNSLVGVRDPYGIRPLVIGKLGNNYVLASETCALDIIGAKYLRDVENGEIVLIENNKLTSMKPFPLKKVRPCVFEYIYFSRPDSILDNKSAYEHRKNIGKELAKENDIEADIVVPVPDSGNAAALGFAQYLKINYEHGLIRNPLCR

SEQ ID NO: 117622 - protein, 164 aa, Unknown
  Bacterial polypetide isolated from the Sargasso Sea
YVGRTFIEPSQKIRSLGVKLKLNPNISVIKNKRIILVDDSLVRGTTSSKIVKMLYDSGAKEVHVRIASPEIKFPDFYGVDTPTKKELLAANKSTAEICEFIKAKSLKFLSLNGLYLGMGFEKRNENYPQLTDHHFTGEYPVKIIDELGEDKVTQLSLLSTASNN

SEQ ID NO: 117623 - protein, 53 aa, Unknown
  Bacterial polypetide isolated from the Sargasso Sea
MKIYNPKLNEECGVFGISNIKDASALTALGLHSLQHRGQEGCGIVTFDGERYY

SEQ ID NO: 117624 - protein, 42 aa, Unknown
  Bacterial polypetide isolated from the Sargasso Sea
MKKSNLDKLNEECGVFGISNHEEASALVALGLHALQHRGQEG

SEQ ID NO: 117625 - protein, 84 aa, Unknown
  Bacterial polypetide isolated from the Sargasso Sea
MCGIVGIYSENHVASSIYDSLLMLQHRGQDAAGMSVCDVTGKINTRKSMGYVRDTFHQGHMSRLLGNYGIGHVRYPTAGGGGKE

SEQ ID NO: 117626 - protein, 98 aa, Unknown
  Bacterial polypetide isolated from the Sargasso Sea
MKKHIKILKKKLKNYNPRLKEECGVFGISNAKDASALTALGLHALQHRGQEGCGIVTFDGEKYYSEKRFGLVGDNFNKEKVLNNLKGNYAIGHNRYST

SEQ ID NO: 117627 - protein, 166 aa, Unknown
  Bacterial polypetide isolated from the Sargasso Sea
IRNHYVGRTFIEPSQSIRQFGVKLKHNSNVSYIKNKKIILIDDSIVRGTTAKKIIKMIYDAGAKEVHLGIACPPITHPDFYGIDTPDYNELIASKNSIEEINNAIGSKSLFFLSLEGTYRSMGYETRNPDQPQFTDHCFTGEYPTSLIDREKGNISKQFSLLTEKN

SEQ ID NO: 117628 - protein, 45 aa, Unknown
  Bacterial polypetide isolated from the Sargasso Sea
MAIESPKEECGVFGILNPQEQVAESIYLGLFALQHRGQESAGILP

SEQ ID NO: 117629 - protein, 176 aa, Unknown
  Bacterial polypetide isolated from the Sargasso Sea
MDKLKEECGVFGIFNANEAALLTTLGLHALQHRGKEGVGIVTFDGTNFNAVREEGLVGKTFNKPETIAKLPGKNAVGHVRYSTTGASVSKNIQPLFADLAAGGFACAHNGNLVNAENIRNQLIKDGAIFQSTSDTETILQLVARSRNKLIKDKLIDALHQIKGAYSLVILTNKKLI

SEQ ID NO: 117630 - protein, 159 aa, Unknown
  Bacterial polypetide isolated from the Sargasso Sea
MSEIREECGIFGIYNSDDASALTALGLHALQHRGQEGCGIVSFDGNNFHSEKRHGLVGDNFTNKDVLKKLPGKFSIGHNRYSTTGETSLRNIQPFFADLYGGGISVAHNGNLTNALQLRENLVKDGAIFRTTSDTETLVQLVAKSSRKKIIDKIIDAIF

SEQ ID NO: 117631 - protein, 304 aa, Unknown
  Bacterial polypetide isolated from the Sargasso Sea
SDSEILLNIFAHELQLHSKDIFTPDDVFYAVAGVHRRVKGAYAVVSVISDRGIVAFRDPMGIRPLCYGSKTVNGKRETMIASESVALDSAGFKLERDIKPGETIFVDINGKVHSRLCTDKTGHAPCIFEFVYFARPDTIIDGISVYAARMKMGQNLADKIIKNWHDHDIDVVMPIPDTSRISALELSISLKVPYREGFIKNRYIGRTFIMPEQSQRAQSVKRKLNAISSEFNGKNVLLVDDSIVRGTTSKQIIDMAREAGAKQVYMASAAPPVKFPNVYGIDMPASNEFAADGRTEEEIAKLIG

SEQ ID NO: 117632 - protein, 73 aa, Unknown
  Bacterial polypetide isolated from the Sargasso Sea
MKIFDPKLKEECGVFGISNAKDASALTALGLHALQHRGQEGCGIVTFDGEKYYSEKRFGLVGDNFNKEKVLKN

SEQ ID NO: 117633 - protein, 216 aa, Unknown
  Bacterial polypetide isolated from the Sargasso Sea
MNIEKKLGYELAKESGDAGEIVIPVPDSGVPAAIGFSQYKKINFELGLIRNHYVGRTFIEPSQNIRSLGVKLKLSANMSSIKNKSVVLIDDSLVRGTTCHKIVKMLYNSGAKEVHVRIASPEIKFPDFYGIDMPTRKELLAANKNLKEIRDYIGADSIKFLTIDGMYNALCDANRNNVYPQFTDHYFTGEYPIKPVDQITDEKVTQLSFLSGKSNN

SEQ ID NO: 117634 - protein, 302 aa, Unknown
  Bacterial polypetide isolated from the Sargasso Sea
GVRDPYGIRPLVIGKLGNSYVLASETCAFDIIGAKFMREVENGEIVLIENNKMKSIKPFPAKKVRPCVFEYIYFSRPDSLIGGKTAYEHRKNIGRELAKENDTDADIVVPVPDSGNAAAMGFAQELKMNFEHGLIRNHYVGRTFIEPSQKIRSLGVKLKLNANQTTIKNKKIILIDDSLVRGTTSYKIVKMLYDAGAKEVHVKIACPEIRYPDFYGVDTPTKKELLAANKNNDEICEYIGAKSLRFLSIQGLYKAIGFEKRNEAYPQLTDHYFTGEYPVKLVDELGDNKITQLSLLSTGSNN

SEQ ID NO: 117635 - protein, 96 aa, Unknown
  Bacterial polypetide isolated from the Sargasso Sea
MYIENLKEECGIFGIFGHPDAAALTALGLHALQHRGQESAGIVSFDGQHFNSERHLGLVGDHFTKSSVIDRLPGNYALGHVRYSTTGSTSLKNIQP

SEQ ID NO: 117636 - protein, 272 aa, Unknown
  Bacterial polypetide isolated from the Sargasso Sea
IIGANFVREVANGEIVLIENNQLTSIKPFPPKKVRPCVFEYIYFARPDSLLDDKTAYEHRKNLGKELAKENDIDADIVVPVPDSGNAAALGFSQKHKMNFEHGLIRNHYVGRTFIEPSQKIRSLGVKLKLNANQTTIKNKKIILIDDSLVRGTTSHKIVKMLYDAGAKEVHVRIACPEIRYPDFYGVDTPTKKELLAANKTNDEICEYIGAKSLKFLSIDGLYRAIGFDKRNDTYPQLTDHYFTGDYPVKPVDELGDSKITQLSLLSTASNN

SEQ ID NO: 117637 - protein, 165 aa, Unknown
  Bacterial polypetide isolated from the Sargasso Sea
HYVGRTFIEPSQKIRSLGVKLKLNANLSVIKNKKIILVDDSLVRGTTSSKIVKMLYDAGAKEIHVRIASPEIKFPDFYGVDTPTKKELLAANNSVEKICELIGAKSLKFLDIDGLYKAMGFEKRNELYPQLTDHHFTGDYPVKIIDELGEDKVTQLSLLSTGSNN

SEQ ID NO: 117638 - protein, 183 aa, Unknown
  Bacterial polypetide isolated from the Sargasso Sea
MGYSQKANKNFELGLIRNHYVGRTFIEPSQKIRSLGVKLKLNPNKTSIKDKKVILVDDSLVRGTTSYKIVKMLYDAGAKEVHVRIASPEIRYPDFYGVDTPTKKELLAANKNNDEICKYIGAKSLKYLSIDGLYKAIGFENRNKNYPQLTDHYFTGDYPVKPIDNLGDDKITQLSLLSTGSNN

SEQ ID NO: 117639 - protein, 189 aa, Unknown
  Bacterial polypetide isolated from the Sargasso Sea
MPKKKFKIYNPKIKEECAVFGISNNQDASALTVLGLHALQHRGQEGCGIVSFDGKKYHSEKRFGLVGDNFSKEKVIKTLPGNYAIGHNRYSTTGGTTLRNIQPFFADTNAGGIGVAHNGNLTNAITLRKKMVEEGSIFYTTSDTETIVKLIARSKRAKTIDKVIDALFQIQGGYALVVMTQNILIGVRD

SEQ ID NO: 117640 - protein, 473 aa, Unknown
  Bacterial polypetide isolated from the Sargasso Sea
SKPRDECGVYGVYNHDKAANLTALGLHALQHRGQDSAGIVTSNNQKFFAHRGMGQVSDVFSNKEIIPKLVGSISIGHNRYGTTGESALKNVQPLFSELDFGGIAIAHNGNLTNTNQIKEQLIKNGAIFQSTSDTEVILHLISTAKGTLIDRIVYALQSITGAFSLVMLTNDSLIGVRDPFGIRPLVLGKLDDSYILSSESCGLDIIGANLIRDIEPGEILIIKNNKIDSIKPFKKTYLKPCLFEYIYFSRPDSILEGRNVYDVRKSIGHQLASENPKDNKIIDVVIPIPDSGNASALGYSEKIKKPFEFGIIRNHYTGRTFIEDSISVRNLSVKLKHNPNILSFKDKSIALVDDSIVRGTTSVKIVEMLRNCGVKDVHMRIASPPVKYPCFYGIDTPTKEELLASKYTIDQIKKYIGVDSLKFVTLDGVYKALGFQNGREKEKPMFTDHYFSGDYPVKLIDQDAGINPSQLSL

SEQ ID NO: 117641 - protein, 183 aa, Unknown
  Bacterial polypetide isolated from the Sargasso Sea
MQKKKYKNFSPKLKEECGIFGISNNYDASTLTALGLHALQHRGQEGCGIVSFDGEKYHSEKKFGLVGDNFNKPDILKSLPGNFSIGHNRYSTTGDTTLRNIQPFFADTNSGGIGVAHNGNLTNAITLRKKLVEDGAIFYTTSDTETIVQLIAKSKRGKIIDKVIDALFQIQGGYALVMLTQNY

SEQ ID NO: 117642 - protein, 873 aa, Unknown
  Bacterial polypetide isolated from the Sargasso Sea
MFLLIVSLNNVFAQEVETDSSIEEIVVTGSYLKTSPTDGASPIDVIDRDAIENFGANTVADLVRNLASNSGSENVPDSFTSGSTQGTSNVNLRGLGLSSTLVLIDGRRQTVAGATANDGSVFVNTSIIPLIAIERVEVLKEGAASVYGSDAVAGVVNYIFRRDFTGLEVSYNHQFTDIGSQEDDRVSVIFGEKFGNTNLVIAADFLERSPMSSALRPESTQLGISGLGNSFLLFGPSTVESGPYAGSYTPFTNVPDANCVENNGFIIPQASGSRCGFLFGPRFNIVNDEEHQNVYGSIKSDLANGMEFNADVLFSSIKVNDNPQSPSYPALSYLSPSNAILPGQGGNPFGVPVLWLGRPLGSAFPSPNAPRDIDNLRFSVGLTGNLGGFDWDLRYTHSETDHYFYQPDTSTTRFSAAIAGQGGTSGTESWNLFDPSANSASLREWISTAQETWSENELDVVDLVFSGEIGSTAAGNIDIAFGLQYREEAFDLKRDKGSIVEFDSEGNLVKPADLLFLGGGSESNASRDAIALFAEVSVPVTDKLQVNGAVRYEELEDDSTFDPKISLRYEVSDSLILRASASTSFREASLSQLYSSGVGLQGIQDFTTDGTPKGGTTFIRIAQDGNPNLSPEESDNLNIGVIWRPQSNLEIKLDYWSIDYSDVITIESAQGIVAATPLAPAVKRTIDGTLIGVTTGYFNASNVKTDGIDFEVNYSLDTSFGDIELGLSGSHMNKYEIPNAKGETQDVVGLFNHDNFARSLPETKMTLSAVLNSGPHKLALYGKHISDYKTTRALSDTAKSRGYTQKIDEWFSVDLQYNYTFDMDDNQIRLTLGGINILDEDPPLVFDAANFSYDSRQHDARGRIMYVGIKLIR

SEQ ID NO: 117643 - protein, 346 aa, Unknown
  Bacterial polypetide isolated from the Sargasso Sea
SDTETIVKLIAKSKRVKTIDKIIDAIFQIQGGYALVMMTQDTLIGVRDPYGIRPLVIGKLKNSYVFASETCAFDIIGAKFVREVENGEIVYIEKDELKSIKPFPPKKARPCVFEYIYFSRPDSILNGKTAYEYRKNFGRQLAKEDKLEADLVVPVPDGGSAAALGYAEEKAINFDLGLIRSHYIGRTFIEPSQKIRSLGVKLKLNANISVIKNKRIILVDDSLVRGTTTSKIVKMLYDSGAKEIHVRIASPEIKYPDFYGVDTPTKKELLAANKSVNEICEFIQAKSLRFLTLNGLYKAIGFEKRNDDYPQLTDHHFTGDYPVKIIDELGEDKVTQLSLLSTASNN

SEQ ID NO: 117644 - protein, 96 aa, Unknown
  Bacterial polypetide isolated from the Sargasso Sea
MCGIVGIVAHEDVNQNLYDALTVLQHRGQDAAGIMTCAGDRVSLRKSNGMVYDVFRQDHMRRLVGPMGIGHVRYPTAGCNSSAESQPFYVNSPYGI

SEQ ID NO: 117645 - protein, 265 aa, Unknown
  Bacterial polypetide isolated from the Sargasso Sea
MVKENCGVVGIYSEGDVNVIPMVIDALRALQHRGQEAWGLAIPNKAPLKRLGLVSASSNEFKKITEEYASHSAIGHVRYSTVGKSDLESAQPLKVKDLCVAHNGTISNVEELSNLVGGCTFTPQNASDTLVAAQRLVSLITENGKLGSALSILKNEMVGSFCFTFLSDDDAVFAARDPKGFRPMVMGHKEEGNVHIVTSESSAISAIGAKLVRDVVLGELIKISKDGMETEMFSDDKNRAHCSFEFTYFAQPSSKMEGTNIYLAR

SEQ ID NO: 117646 - protein, 223 aa, Unknown
  Bacterial polypetide isolated from the Sargasso Sea
IIKQGLHHDVDVVIPISDTSRSTALQVAHHLGVKYREGFIKNRYIGRTFIMPGQEIRKKSVKQKLNPIDLEIRDKNVLLIDDSIVRGTTSKKIIQMARNTGANKVFFASAAPPVKHPNVYGIDMPSTAELLASNRTEEELARYIGADWLIYQELDDLISAVQFDESDAEAFDTSCFSGEYVTGDVTSNYLDFIESKRNDAAKAKKEIERKQIEIQDQSSMTVS

SEQ ID NO: 117647 - protein, 175 aa, Unknown
  Bacterial polypetide isolated from the Sargasso Sea
LPFELGIIRNHYVGRTFIEPQQSTRDFGVKLKHNINRHAVRGKKVVLIDDSIVRGTTSVKIVELMRQAGAQEVHMKIASPPIKYPDFYGIDTPEKAQLLASLKSEEEMAAYIGADSLSFLSVDGLYRAMGYEKGRDDANPAFTDHCFTGDYPTPLEDNNIAWLFETSQLSVRNEN

SEQ ID NO: 117648 - protein, 84 aa, Unknown
  Bacterial polypetide isolated from the Sargasso Sea
MCGIVGISAETNVAAEIYDSLLMLQHRGQDAAGISVCNNDDQLNSRKSMGYVRDVFQQRHMDKLAGNYGIGHVRYPTAGGAGKE

SEQ ID NO: 117649 - protein, 282 aa, Unknown
  Bacterial polypetide isolated from the Sargasso Sea
VFASETCALDIIGAKFIREVENGEIVCIENNEIKSLKPFPPKKIRPCIFEYIYFSRPDSLLNGKTAYEYRKKFGEYLANEDVVDADVVVPVPDSGNAAALGYSQKKDITFDLGLIRNHYVGRTFIEPGQKIRSLGVKLKLNANKSSIKNKKIVLVDDSLVRGTTSEKIVKMLYDGGAKEVHMRIACPEIKYPDFYGVDMPTKKELLAANKSVDEICKFINAKSLKFLSVDGLYNAMGYEKRNETYPQLTDHYFTGDYPVKIIDELGNDKVTQLSLLSTASNN

SEQ ID NO: 117650 - protein, 197 aa, Unknown
  Bacterial polypetide isolated from the Sargasso Sea
MAIENSVAADVVVPIPDSGVSAAIGFSQKSSIPFELGIIRSHYVGRTFIEPSQTIRQFGVKLKHSVNKSCIENKKVILIDDSIVRGTTASKIVKMVYEAGAKEVHLGISCPPIMHPDFYGIDTPNYNELIASQSDLNEMTKLVGAKSLFFLSLAGTYKAMGCDKRNSITPQFTDHCFTGEYPIDVSEILEINKKINE

SEQ ID NO: 117651 - protein, 374 aa, Unknown
  Bacterial polypetide isolated from the Sargasso Sea
EFHITGNITNAITIRQKMVEEGAIFYTTSDTETIVKLIAKSNRGKIIDKVIDAIFQIQGGYSLVMLAQNILIGVRDPHGIRQLVIGKLKNSYVLASETCSLDIIGAKFVREVENGEVVYIENDELKSVKPFPERRARPCVFEYIYFSRPDSLLNGKTAYEYRKNLGIELAKETHEKADVVVPVPDSGNAAAIGYSKHVGIDFDLGLIRNHYVGRTFIEPSQQIRSLGVKLKLNANQSSIKGKKIILIDDSLVRGTTCYKIVRMLYDAGAKEVHVRIASPEIKYPDFYGVDTPTKKELLAANKTNDQICEYISAKSLKFLSVDGMYKAIGFEKRNNAYPQLTDHYFTGDYPIKPIDKLGDNKITQLSLLSVTSNN

SEQ ID NO: 117652 - protein, 80 aa, Unknown
  Bacterial polypetide isolated from the Sargasso Sea
MKNRLKFLKKFEVRQSHFPRFNEECGVFGISGTKDAAALTALGLHALQHRGQEGCGIVSYDGNSYHSERKFGLVGDNFTK

SEQ ID NO: 117653 - protein, 328 aa, Unknown
  Bacterial polypetide isolated from the Sargasso Sea
MVKENCGVVGIYSEGDVNVIPMVIDALRALQHRGQEAWGLAIPNKAPLKRLGLVSASSGEFKKISEEYASHSAIGHVRYSTVGKSDLESAQPLKVKDLCVAHNGTISNVEELSNLVGGCTFTPQNASDTLVAAQRLVSLITENGKLGSALSILKNEMVGSFCFTFLSDDDAVFAARDPKGFRPMVLGHKEEGNVHIVTSESSAISAIGAKLVRDVVPGELIKISKEGGFETEMFSDDTNRAHCSFEFTYFAQPSSKMEGTNIYLARKRIGQFLAKKYPIHDADVVIPVPDSARPAALRFAQELEIQFDERLLKDRYSKKGPLISFIEP

SEQ ID NO: 117654 - protein, 181 aa, Unknown
  Bacterial polypetide isolated from the Sargasso Sea
GFAQFKRMNFELGLIRNHYVGRTFIEPTQSIRSLGVKLKLSANMSSIKNKSVILIDDSLVRGTTCHKIVEMLYSSGAKEVHVRIASPEIRFPDFYGIDMPSKKELLAANKNLDEMCKHIKADSLKFLSINGMYNALCGESRKDLYPQFTDHYFTGDYPVEPVDNSNKKVSQLSFLSGKSTN

SEQ ID NO: 117655 - protein, 51 aa, Unknown
  Bacterial polypetide isolated from the Sargasso Sea
MQKKKLRIYNPKLKEECGVFGISNTKDASTLTALGLHALQHRGQEGCGIVS

SEQ ID NO: 117656 - protein, 209 aa, Unknown
  Bacterial polypetide isolated from the Sargasso Sea
GTELAKEDDVEGDVVVPVPDSGNAAALGYSQKANKNFELGLIRNHYVGRTFIEPSQKIRSLGVKLKLNPNKTSIKNKKIILVDDSLVRGTTSYKIVKMLYDSGAKEVHVRIASPEIRYPDFYGVDTPTKKELLAANKNNDEICKYIGAKSLKYLSINGLYKAMGFESRNKDYPQLTDHYFTGDYPVKPIDNLGDDKITQLSLLSTGSNN

SEQ ID NO: 117657 - protein, 373 aa, Unknown
  Bacterial polypetide isolated from the Sargasso Sea
MCGLVGIYHKKDQVSADIYDGLVQVQHRGQDAAGIATWDKSKMYTHKELGLVSEVFKTSDSLINLNGNMGIGHVRYPTAGCDDVSEAQPFYTANPINITLAHNGTLTNSERIKEELIKTHFCQFNTSSDSEVLLKLFAYELYKTNYRKVSNNHIFRALKNVFKRCSGGYAVIMLIAGVGIVAFRDPKGIRPMAIGSNKKSYMIASESSALTSMGYRTIEDVLPGQAIIINEDGLIHKKRLIRNAVHQPCIFEYVYFSRPDSTIDEISVHKSRLRMGDFLGDKILREYKNIEVDVVIPVPDTSRTSAMQVAHKLGVKYREGFMKNRYIGRTFIMPGQNTRKKSVARKLNPIEIEFKDKNVLLVDDSIVRGHTSK

SEQ ID NO: 117658 - protein, 426 aa, Unknown
  Bacterial polypetide isolated from the Sargasso Sea
EKSRMNLVGNLGIGHVRYPTAGSNDVNDSQPFYTSNPVNITLAHNGTLTNSDSIREELIKTHFCQFNTNSDSEALLNLFAYELYKTNFRKLTKSHVIRALKAIYEKCSGGFSVVAIVSGIGIVAFRDPNGIRPLSIGYKKNSFMIASESSALTALDFHSIEDVKPGQAVIIELNGTLTKRKIEKLSMHTPCLFEFVYFSRPDSSIDDISVHKSRLRMGDFLGEKILREYPKLNVDVVIPIPDTSRTSAMQVAFKLGVKYREGFMKNRYIGRTFIMPGQNLRKRSVKQKLNPIEIEFKDKRVLLVDDSIVRGHTSKSIVKMVKKCGAKKVFLASASPPIRHQNVYGIDMPATTELVGHKRSTEEIKMYIKADELIYQDLEDLKRSATIGNPKITSFEDSVFTGNYRVGNITKDFLKNLENTRSNLSK

SEQ ID NO: 117659 - protein, 309 aa, Unknown
  Bacterial polypetide isolated from the Sargasso Sea
MCGIVGIVSCDDVNQQIYDSLLLLQHRGQDSTGIATMEDTVFHIHKAKGQVNTAYRTRDMRNLIGKIGLGHVRYATKGSAESVEEAQPFYVNAPYGIVLIHNGNLTNTRDLEKQLFNVDKRHTNSSSDTEMLLNIFATELQEQIHNQDLEPDIIFNSVKNLHKRIQGSYASIALISGHGLLAFRDPFGIRPLVIGKRISLITQKEEWMVASESLVLENNDYQVVRDVEPGEAIFITHNGEFFSKQCSENPKLFPCAFEYVYLARPDSVMNGISVYQARLKMGDYLAETIKQTIQSGDVDVVMPIPDSSR

SEQ ID NO: 117660 - protein, 215 aa, Unknown
  Bacterial polypetide isolated from the Sargasso Sea
EYRKNFGYELAKESDDVGDIVVPVPDSGVPAAIGYSQYKKIGFELGLIRNHYVGRTFIEPKQNIRSFGVKLKLSSNKSSIKNKSIVLIDDSIVRGTTCSKIVKMLYDGGAKEVHVRISSPPIKFPDFYGIDMPSKKELLAANKNLKEMCKHIQADSLKFLSLEGLYKAIFSQSRNNTYPQLTDHYFTGEYPVDLVDQQKNDKVAQLSLLSGKSSN

SEQ ID NO: 117661 - protein, 241 aa, Unknown
  Bacterial polypetide isolated from the Sargasso Sea
KKVRPCIFEYIYFSRPDSILSGKTAYEYRKNFGAQLAKEDTFDADLVVPVPDSGNAAALGYAQEKKVKFDLGLIRNHYVGRTFIEPSQQIRSLGVKLKLNANLSVIKNKKIILIDDSLVRGTTSYKIVKMLYDAGAKEVHVRIASPEIKYPDFYGVDTPTKKELLAANKTVDEIKEFISAQSLKFLSLDGLYKAMGFEKRNDNYPQLTDHYFTGDYPVKIIDELGGDKVTQLSLLSTGSNN

SEQ ID NO: 117662 - protein, 44 aa, Unknown
  Bacterial polypetide isolated from the Sargasso Sea
MQKTRFKIYDPKLKEECGVFGISNTNDSAALTALGLHALQHRGQ

SEQ ID NO: 117663 - protein, 67 aa, Unknown
  Bacterial polypetide isolated from the Sargasso Sea
MKKNTKKQKKKFKIYNPKLKEECGVFGISNNPDASTLTALGLHALQHRGQEGCGIVSFDGKKYHSEK

SEQ ID NO: 117664 - protein, 180 aa, Unknown
  Bacterial polypetide isolated from the Sargasso Sea
SQHVGRKFDLGLIRNHYVGRTFIEPVQKIRSLGVKLKLNANKSTIKNKKIVLIDDSLVRGTTCYKIVKMLYDTGAKEVHVRIASPEIKFPDFYGIDTPTKKELLAANKNNEEICKYINAKSLKFLSIDGMYRGMGFEKRNNTYPQLTDHYFTGDYPVKPIDDLGDDKITQLSLLSTASNN

SEQ ID NO: 117665 - protein, 172 aa, Unknown
  Bacterial polypetide isolated from the Sargasso Sea
IGYANESKIPYTEGLIRNRYVGRTFISPSQKLRELGVKTKFNVLNEVVRGQRIILIDDSIVRGTTTSRVIEMIKDAGAKEIHMRVSSPPITSPCFFGVDMATTSELIANKFSVEKIRKMLGADSLGFLSVNNLKESVNASENNYCKACFTGDYPIPVQLDFDKFHLEKIRQK

SEQ ID NO: 117666 - protein, 376 aa, Unknown
  Bacterial polypetide isolated from the Sargasso Sea
GIGVSHNGNLTFSISLRNKLVQEGAIFYTTSDTETIVQLIAKSKRSKTIDKIIDAIFQIQGGYALVMMTQKSLIGVRDPYGIRPLMIGKLGNSYVLASETCALDIIGAKFIREIENGEIVLIENDELTSIKPFSPKKVRPCVFEYIYFSRPDSLLDNKTAYEHRKNLGKELAKENDIKADIVVPVPDSGNAAALGFAQHLKMNFEHGLIRNHYVGRTFIEPSQKIRSLGVKLKLNANQSTIKNKKIILIDDSLVRGTTSYKIVKMLYDAGAKEVHVRIACPEIKYPDFYGVDTPTKKELLAANKTNDEICEYIGAKSLKFLSIDGLYRAIGFDKRNEAYPQLTDHYFTGDYPVKPVDELGDNKITQLSLLSTASNN

SEQ ID NO: 117667 - protein, 79 aa, Unknown
  Bacterial polypetide isolated from the Sargasso Sea
MLKKKFKSYNPKLKEECGVFGISNFEDASALTALGLHALQHRGQEGCGIVSYDGNKYYSEKRFGLVGDNFNNEKVLKKL

SEQ ID NO: 117668 - protein, 485 aa, Unknown
  Bacterial polypetide isolated from the Sargasso Sea
MCGIVGIYHDNENVCGSIYDGLIQVQHRGQDAVGISTWDKTKMYLHKDTGLVTEVFKTDNSLSQLNGNIGIGHVRYPTAGSDDSSEAQPFYTANPVNIALAHNGTLINSEQIKSQLIKTHFCQFNTTSDSEVLLNLFAYELYKTNFRKLTNAHVFKALKEVYSKCSGGYAVTMLIAGVGIVAFRDPNGIRPLSLGIKKGSIMVGSESSALAALGYNSLSNVEPGQAVIISEDGTISKKKIIRKSEHTPCLFEFVYFSRPDSTIDAISVHKTRLRMGDLLGENIKTNFKDLGVDVVIPIPDTSRTSAMQVAYKLGVKYREGFMKNRYIGRTFIMPGQKLRKKSVKQKLNPIDIEFRDKNVLLVDDSIVRGHTSKQIIQMVKNCGAKKVFFASASPPVRFQNVYGIDMPATKELIAHKRTVRQIKRKIGADELIYQDLEDLTLAAHIGNPKIKKFEDSVFTGDYCAGNVTEEFLEGLEKDRMDAMRQ

SEQ ID NO: 117669 - protein, 283 aa, Unknown
  Bacterial polypetide isolated from the Sargasso Sea
LASETCALDILGAKFIREIEPGEVIVITEDGEESIKPFPNARLRPCIFEYIYFSRPDSMLDGKSVYECRKSFGRNLARECPSKADIVVPVPDSGVPAALGYSEESKIPFELSIIRNHYVGRTFILPTQSNRQSSVKLKHNPDRVSIKGKSVVLVDDSVVRGTTSIKIVELMREAGASEIHMRIACPPIKYPDFYGIDTPETEQLLASNKNLDEMCKYIGADSLGFLSLDGLYQSMGYKKGRNNDNPEYTDHCFTGDYPTNLSDYKSEKIQEQLSLLSENESQN

SEQ ID NO: 117670 - protein, 325 aa, Unknown
  Bacterial polypetide isolated from the Sargasso Sea
DALMQISGAWALVVLTNKKLIGARDPFGIRPLVLGELDGAKMLASETCALDIIGAKFIREIEPGEIIVITEDGEESIKPFPNARLRPCIFEYIYFSRPDSMLDGKSVYECRKSFGKTLAKECPANADIVVPVPDSGVPAALGYSEESKIPFELSIIRNHYVGRTFILPTQSNRQSSVKLKHNPDRGSIKGKSVVLVDDSVVRGTTSVKIVELMREAGASEIHMRIACPPIKYPDFYGIDTPETEQLLASNKSLDEMCKYIGADSLGFLSLDGLYKSMGYNKGRNNDSPEYTDHCFTGDYPTNLNDYKSEKIQEQLSLLSENESQN

SEQ ID NO: 117671 - protein, 404 aa, Unknown
  Bacterial polypetide isolated from the Sargasso Sea
GISAMAHVRYSTRGETILRNVQPLYADLDTGGFTVGHNGNLTNTLLLREKLVSSGAIFQSTSDTEVILHLVAKSKKLKFIDKFIDAIGYLEGAYALVALTNKKLIGARDPLGIRPLVLGKLDKSYILASETCALDIIGAEFIREVENGEVIVITDDGIESHYPFPKQSPRPCIFEYIYFAMPHSVIGGRSVYEIRKQLGYELSKEDNVKAEIVVPVPDSGVPAALGYSEGSKINFDYGLIRNHYVGRTFIEPTQNIRQFGVRLKHSANVQMVKNKSVVLLDDSLVRGTTSVKIVTMLFESGAKEVHLRIASPPIKYSDYYGIDTPEKDSLLAAKHNIDEMRDYIGCTSLKFLSIEGLYRALGYSERNNEMPQFTDHCFTGDYPTKLSDIEQIPDHTSQLSLLEE

SEQ ID NO: 117672 - protein, 335 aa, Unknown
  Bacterial polypetide isolated from the Sargasso Sea
KSKRSKTIDKIIDAIFQIQGGYALVMLTQNSLIGVRDPYGIRPLIIGKLGKSYVLASETCALDIIGAKFIRNVENGEIVLIENEKLKSIKPFPLKKVRPCVFEYIYFSRPDSIIDNKTAYEHRKNIGKELAKENNIDADIVVPVPDSGNAAALGFAQHLKMNFEHGLIRNHYVGRTFIEPSQKIRSLGVKLKLNANQSTIKNKKIILIDDSLVRGTTSHKIVKMLYDSGAKEVHVRIACPEIRYPDFYGVDTPTKKELLAANKTNDQICEYIGAKSLKFLSLNGLYKAIGFEKRNDTYPQLTDHYFTGDYPVKPIDELGDDKITQLSLLSSASNN

SEQ ID NO: 117673 - protein, 261 aa, Unknown
  Bacterial polypetide isolated from the Sargasso Sea
MCGIFGIFGHPKASELTFLGLHALQHRGQESVGISVSDGETIHTRRGQGLVSEVFSRDEYLEFEGNQAIGHVRYTTAGDSGLLNAQPLVFRYTGGQVAVAHNGNLVNAKRLRDQLERQGSIFQTNSDTEVVSHLIARAGPPIDHAFQDALRVIDGAYALLLMTEKQMIAAQDPRGFRPLSLGQFENAWVVSSETCALNTIGADFVREIKPGELLVFDEKGLHMRSFTGVQTRKICSFEYIYFARPDSEVDGISVHSVRKEL

SEQ ID NO: 117674 - protein, 305 aa, Unknown
  Bacterial polypetide isolated from the Sargasso Sea
MKNRLNFLKKFRVRQSHVPRFNEECGVFGISGTKDAAALTALGLHALQHRGQEGCGIVSYDGNSYHSERKFGLVGDNFTKKHSLDKLKGKIAIGHNRYSTTGGETIRNIQPFYADLHGGAISIAHNGNLTNALLLREQMVREGAIFQTTSDTETIVQLVARSKKKDILNKIIDALMQIQGGYALSIIANGTLIGARDPLGIRPLVLGKFKNAFILASETCALDIIGAKFIREIENGEVVVINDNKVESRRPFPKKQIKPCVFEYIYFSRPDSILKNKTAYEYRKNLGTYLAKETDIKPDVVVPVP

SEQ ID NO: 117675 - protein, 210 aa, Unknown
  Bacterial polypetide isolated from the Sargasso Sea
MCGIVGISAETNVAAEIYDSLLMLQHRGQDAAGISVCNSDDQLNSRKSMGYVRDVFQQRHMDKLAGNYGIGHVRYPTAGGAGKEFAQPMYVNSPYGISLAHNGNLTNSKQLGTQLFHAEMRHLRTDSDSEVLLNIFAHELGKQREIYPSEKNIFKAVTKTHIRCDGAYAVIALINGYGLVAFRDNNGIRPLSIGVRKGKEREEYIVSSED

SEQ ID NO: 117676 - protein, 281 aa, Unknown
  Bacterial polypetide isolated from the Sargasso Sea
HSCLGTCALDIIGANFVREVENGEIVVITDDGIESVKPFPPVKPRPCVFEYIYFARPDSSVGGQSVYECRKSFGRELAKESGVEADLVIPVPDSGVPAAIGYAEAANIPFELGIIRNHYVGRTFIEPQQSIRAFSVKLKHNANRILVGGKRVILIDDSIVRGTTSIKIVQMMRDAGALEVHMRIASPPIKYPDYYGIDTPVQDQLLAANQTLEKMREFIGADSLSFLSVNGLYKAMGHPEGRDPNNPLYTDHCFTGDYPTQLQDQQTDEHIKQLSLLSERR

SEQ ID NO: 117677 - protein, 276 aa, Unknown
  Bacterial polypetide isolated from the Sargasso Sea
GIGHVRYPTAGTLSSSEAQPFYVNSPFGICLAHNGNLVNNEELRKHLSEVDRRHLNTESDTEALLNLFAHELQENFDGSLSPEIIFKAATHLFNKSSGGYAVVSMILNEGLVAMRDPNGIRPLILGKREVGQGTEYMIASESVALDIADFEIMRDVKPGEVIYITKEGELFSKQCVKPKSYTPCIFEFVYFARPDSIIDGMSVYKSRLRMGEYLAQRIIKKGLHHDVDVVIPIPDTSRSTALQVAHHLGVKYREGFIKNRYIGRTFIMPGQEIRKK

SEQ ID NO: 117678 - protein, 224 aa, Unknown
  Bacterial polypetide isolated from the Sargasso Sea
MGRSTHKTFGEHPREECGVVAVYSQRDQTSRLAFFGLYALQHRGQESAGIASADLTDIHVHTDMGLVSQVFREDSLSHLQGNLVIGHTRYSTTGSSNACNAQPIVVNGIHGKLALANNGNIINAAKLKSQQQLEWNCTYTSTTDSEVLAYQLANSPGVDWHDRAKQFMRSVQGAYSLVAVTKDTMIAARDPLGIRPMCLGKWDDGWIIASETCALDHLGAEFIK

SEQ ID NO: 117679 - protein, 185 aa, Unknown
  Bacterial polypetide isolated from the Sargasso Sea
MLPSLAADLNKPYRQGFVKNRYIGRTFIMPLQEERKKSVRRKLNILDLEFKDKNVLLVDDSIVRGTTSKQIIEMVREAGAKKVLFASACPPVKYQNLYGIDMAATKELVAHDKTENEIADAIGADELIYQTLEDLISSVQEGNPEIKEFETSIFTGKYPTDIDDGYLENLEEERSDIIKMSKKES

SEQ ID NO: 117680 - protein, 293 aa, Unknown
  Bacterial polypetide isolated from the Sargasso Sea
MKKFKSDKLNEECGIFGVSNHENASRVVALGLHSLQHRGQEGCGIVSFDGRSFHSEKRQGLVGDHFTNIETLKKLPGNSAIGHNRYSTTGETSLRNIQPFFADLYHGGLSIAHNGNLTNAISLRNDLVKNGSIFRTTSDTETIVQLIAKSKREKILDKITETLFKIQGGYALVILTNKKLIGIRDPLGIRPLVIGKLGKSYIFASETCALDIVDAKFIREVENGEIVVIENDQIKSFKPFNKIKTRPCVFEYIYFARPDSILKGECAYEYRKRLGIELAKESEIEADMVVPVP

SEQ ID NO: 117681 - protein, 224 aa, Unknown
  Bacterial polypetide isolated from the Sargasso Sea
ARPDSIMNGISVYKARLKMGDYLSETIKEIITSGDVDVVMPIPDSSRPAAMQVARQLGIEYREGFFKNRYVGRTFIMPGQQKRKKSVRQKLNAMSAEFKNKNVLIVDDSIVRGTTSKEIVQMAKDAGANKVSFTSAAPPVRFPHVYGINMPNRDELIAHDRTISEIADKLEIDNLVYQSVENLRKSIISDSLVEHLEMSCFTGTYVTGTVNQEYLNWVENEYTS

SEQ ID NO: 117682 - protein, 327 aa, Unknown
  Bacterial polypetide isolated from the Sargasso Sea
HERSKWNSSSITRKERSGARYRIYDASESVALDIADFEIMRDVKPGEVIYITKEGELFSKQCVKPKSYTPCIFEFVYFARPDSIIDGMSVYKSRLRMGEYLAQRIIKKGLHHDVDVVIPIPDTSRSTALQVAHHLGVKYREGFIKNRYIGRTFIMPGQEIRKKSVKQKLNPIDLEIRDKNVLLIDDSIVRGTTSKKIIQMARNAGANKVFFASAAPPVKYPNVYGIDMPSTAELLASNRTEEELARYIGADWLIYQDLDDLISAVQFDESDAEAFDTSCFSGEYVTGDVTPNYLDFIENKRNDAAKAKKEIERKQIEIQDQSLMTVS

SEQ ID NO: 117683 - protein, 220 aa, Unknown
  Bacterial polypetide isolated from the Sargasso Sea
SVMNGISVYESRLRMGDRLAQTIAETLPAGDIDVVMPIPDSARPSAMQVAKQLGLEYREGFYKNRYVGRTFIMPGQAERKKSVRQKLNALGTEFAGKNVLIVDDSIVRGTTSREIVQMARSAGANKVTFTSAAPPVRYPNVYGINMPTRAELLAHGRTSEQISDVLGADHVVYQTVENLLESIVENTEIKDLEMSCFDGHYVTGGIDEDYFQWLEQNCRS

SEQ ID NO: 117684 - protein, 105 aa, Unknown
  Bacterial polypetide isolated from the Sargasso Sea
MCGIVGISAETNVAAEIYDALLMLQHRGQDAAGIAVCSSEDQLNSRKSMGYVRDVFQQRHMEKLVGNYGIGHVRYPTAGGAGKEFAQPMYVNSPYGISLAHNGNL

SEQ ID NO: 117685 - protein, 263 aa, Unknown
  Bacterial polypetide isolated from the Sargasso Sea
MLKKRFKNFNPKIKEECGVFGITNNDDAAALTALGLHALQHRGQEGCGIVSFDGTKYHSEKRFGLVGDNFNKEKVLKKLNGNYALGHNRYSTTGGTTLRNIQPFYADTNAGGISISHNGNLTNAITLRSKLVKDGAIFYTTSDTETIVQLIAKSKRQKTIDKIIDALFQIQGGYALVMLTQKTLIGVRDPFGIRPLVIGKIKNSYVLASETCALDIIGAKYIRDVENGEIVFIENDKLESIKPFPKKKERPCILNIYISLDQT

SEQ ID NO: 117686 - protein, 315 aa, Unknown
  Bacterial polypetide isolated from the Sargasso Sea
MCGIVGISAESNVAAEIYDALLMLQHRGQDAAGITVCNSDDKLSTRKSKGYVRDVFAQRHMEKLIGDYGIGHVRYPTAGGAGKEFSQPYYVNSPYGISLAHNGNLTNSKQLANELFHAEMRHLKTDSDSEVLLNIFAHELAKQREIYPSAENIFKAVSKTHLRCDGAYAVLALIAGHGLVAFRDNNGIRPLSIGIRKGETRDEYVISSEDALFSSHGFKKLRDVEPGEAIFIDKNGELFSQQCADKPKKRPCIFEYVYFSRPDSKIDEISVYKARTRMGTKLASQIKNSKPDHDIDVVIPIPDSSVTAAHQLAVD

SEQ ID NO: 117687 - protein, 291 aa, Unknown
  Bacterial polypetide isolated from the Sargasso Sea
QPFYVNSPFGICLAHNGNLVNNEQLRKHLSEVDRRHLNTESDTEALLNLFAHELQENFDGSLSPEIIFKAATHLFNKSSGGYAVVSMILNEGLVAMRDPNGIRPLILGKREVGQGTEYMIASESVALDIADFEIMRDVKPGEVIYITKEGELFSKQCVKPKSYTPCIFEFVYFARPDSIIDGMSVYKSRLRMGEYLAQRIIKKGLHHDVDVVIPIPDTSRSTALQVAHHLGVKYREGFIKNRYIGRTFIMPGQEIRKKSVKQKLNPIDLEIRDKNVLLIDDSIVRGTTSKK

SEQ ID NO: 117688 - protein, 167 aa, Unknown
  Bacterial polypetide isolated from the Sargasso Sea
MKNRQNFLKKFEVRQSHVPRFNEECGVFGISGTKDAAALTALGLHALQHRGQEGCGIVSYDGSSYHSERKFGLVGDNFTKKHSLDKLKGKIAIGHNRYSTTGGETIRNIQPFYADLHGGAISIAHNGNLTNALLLREQMVREGAIFQTTSDTETIVQLVARSKKKDI

SEQ ID NO: 117689 - protein, 333 aa, Unknown
  Bacterial polypetide isolated from the Sargasso Sea
NSKSLAKELFFAEMRHLNTDSDSEVLLNILAHEIAKQKAINPTPEHFFKAVSKTHIRCDGAYAVVALITGAGILAFRDPNGIRPLVIGEREGKNRKEYVIASENALFASLGFKTLRDVEPGEAVFIDKKGIISSKQCSLSAKSQPCIFEYVYLSRPDSTLDQISVYQSRMRMGKYLAKNILDNMSDHDIDVVIPIPDSSTTAALQLANELNIPYREGFVKNRYIGRTFIMPYQEERKKSVRRKLNILELEFLNKNVLLVDDSIVRGTTSKKIIEMAKMAGAKKVYFASAAPQSDIKIFMESIWLLLRSWLLINKLKKKFVLRSEPIRFFINIR

SEQ ID NO: 117690 - protein, 306 aa, Unknown
  Bacterial polypetide isolated from the Sargasso Sea
PLTIGVRKGKNRYEYIISSETALFSALGYKFLRDVEPGEAVFIDNSGKIFSQQCSSEISKKPCIFEYVYLARPDSIIDEISVYKSRMRMGLKLADRIRNLNLVDEIDVVIPIPDSSTTAALQLAADLKKPYRQGFVKNRYIGRTFIMPLQEERKKSVRRKLNILDLEFKDKNVLLVDDSIVRGTTSRQIIEMVREAGAKKVLFASAAPPVKYQNLYGIDMAATKELIAHNKTEAEVADAIGADELIYQSLDDLISSVQEGNPDIKDFETSIFTGNYPTQIEDGYLENLEEERSDIIKMSKQEKNKT

SEQ ID NO: 117691 - protein, 195 aa, Unknown
  Bacterial polypetide isolated from the Sargasso Sea
QEIPDEDIDVVIPIPESSITSGTKVARVLNKDLAYGFVKNRYVGRTFIMPEQILRRESVRRKLNPISDEFKDKKVLLVDDSIVRGTTMKQIVSMCYKAGAKKVSVASAAAEVKFPNVYGIDMAAKKDLIASSRTNNEIKEFLGCDHLVYQSLEDMVQSVIELNPNINSVEKSIFDGNYPTNISTEYLENLEKIRG

SEQ ID NO: 117692 - protein, 187 aa, Unknown
  Bacterial polypetide isolated from the Sargasso Sea
MLKKKFKNYNPKLKEECGVFGISNNNDASALTALGLHALQHRGQEGCGIVTFDGDQYHSEKRFGLVGDNFNKEKVLKNLIGNYAIGHNRYSTTGGTTLRNIQPFFADTNAGGITISHNGNLTNAITLRSKLVSEGAIFHTTSDTETIVQLIAKSKRNKTLDKIIDALFQIQGGYSLVMLTQKKLIGV

SEQ ID NO: 117693 - protein, 222 aa, Unknown
  Bacterial polypetide isolated from the Sargasso Sea
MVNELPDLDFNDDRLREECGLFGVYGHPDAAALTALGLHALQHRGQESVGIVSYDGERFNAERRLGLVSENFTKASVLEQLIGRNSIGHVRYSTTGETTLRNVQPLFADLAGGGLAVAHNGNLTNAVTLRDELVNSGCIFQTTSDTETILHLIARSKRGNTLARFIDALFKIEGAYALVVLTNKKLIGVRDPLGIRPLVIGELDGSYILASETCALDIIGAN

SEQ ID NO: 117694 - protein, 233 aa, Unknown
  Bacterial polypetide isolated from the Sargasso Sea
MKKFKLDKLKEECGIFGISNHEDASAMVALGLHALQHRGQEGCGIVSFDGKNYHSEKRQGLVGDHFTDPEALKKLPGTFAIGHNRYSTTGETSLRNIQPFFADLHMGGLSVAHNGNLTNAIILRESLVKDGAIFRTTSDTETIVQLIAKSKREKFLDKLIDALFQIQGGYSLILMTNKKLVGVRDPFGIRPLVIGKLKNSFILASETCALDIIGANFIREVENGEIVIIENEE

SEQ ID NO: 117695 - protein, 292 aa, Unknown
  Bacterial polypetide isolated from the Sargasso Sea
RYPTQGSSGTALAQPFYVNSPYGIALAHNGNLTNSAFLSEELFQSDLRHLNTDSDSEVLLNVFAHELHRLGKLQPTAGDIFDAIKVVHKRCEGGYAAVALISGFGLVAFRDPNGIRPLVVGQREGKGGSTEYMVASESVALDVLGFELLGDVLPGEAICVTQTGELHREQCADSPKLTPCIFEHVYFARPDSLIDSISVYKTRMRQGAALAKKILRERPENDIDVVIPIPDTSRVAGQSLAYELGVKFREGFMKNRYIGRTFIMPGQSERKKSVRQKLNPVPLEFQDKTVLL

SEQ ID NO: 117696 - protein, 255 aa, Unknown
  Bacterial polypetide isolated from the Sargasso Sea
HSEKRQGLVGDHFTKGDTIKKLPGSFAIGHNRYSTTGETSLRNIQPFFADLFGGGLSISHNGNLTNAISLRESLVKDGAIFRTTSDTETIVQLIAKSKRNKIIDKIIEALFQIQGAYSLILLTNKKLIGVRDPYGIRPLVIGKLKDSYILASETCALDLVNAKYIRDVENGEIVVIEKKKLTSIKPFPKYKARPCVFEYIYFARPDSLINNKCAYEYRKNLGIELAKESDIKADLVIPVPDSGVPAALGYAQLTK

SEQ ID NO: 117697 - protein, 283 aa, Unknown
  Bacterial polypetide isolated from the Sargasso Sea
IQGGYALVMLTQNSLIGVRDPYGIRPLIIGKLGNSYVLASETCALDIIGAKFLREVENGEIVLIENDKLKSVKPFPLRKVRPCVFEYIYFARPDSLIDNKTAYEHRKNLGKELAKENNINADIVVPVPDSGNAAALGFSQHLNINFEHGLIRNHYVGRTFIEPSQKIRSLGVKLKLNANETTIKNKIIILIDDSLVRGTTSHKIVKMLYDAGAKEVHVRIACPEIKYPDFYGVDTPTKKELLAANKSNEEIREYIGAKSLNFLSIEGLYRAIGLKKEMKHIHS

SEQ ID NO: 117698 - protein, 165 aa, Unknown
  Bacterial polypetide isolated from the Sargasso Sea
MTSTEHPIRDECGVFGIMDHPDAATLTALGLQALQHRGQEAAGIVTVDGDRFFAERRMGLVRDNFTKNSVINRLCGNIAVGHVRYSTTGETAMRNVQPLFADMNFGGLSLAHNGNLTNALAIRRELEKTGAIFQSTTDTETILHLIAQSTKVGIVDKFIDALFQV

SEQ ID NO: 117699 - protein, 317 aa, Unknown
  Bacterial polypetide isolated from the Sargasso Sea
MCGIVGIVASDEVRQDLYDALTILQHRGQDAAGIVTSDGNQCFLRKSNGLVSDVFQEHHMQRLHGTVGLGHCRYPTAGSSSSAEAQPLYVNSPYGLALAHNGNLTNSAELRSELTANQLRHLNTSSDSEVLLNIFANELGSRQAVEPSPNDIFKAVGAVHEQCKGAYASVAMIIGSGIVGFRDPYGIRPLVYGRRQTDIGFDYMIASESVALDILGFELVADVSPGEAIFISNDGQVYTQQCARKVELVPCIFEHVYLARPDSILDGMSVYKSRLKMGEYLAEQVLKHYSGRDHDIDVVIPIPDTGRTAALPLAHEL

SEQ ID NO: 117700 - protein, 234 aa, Unknown
  Bacterial polypetide isolated from the Sargasso Sea
MKKFKLNSIREECGVFGIHNFIDASTITALGLHALQHRGQEGCGIVSFDGINFHSEKRHGLVGDNFTNKDILKKLPGKSAIGHNRYSTTGETSLRNIQPFFADIYGGGISVAHNGNFTNALKLREKLVKEGAIFRTTSDTETIVQLIAKSKRQKMIDKVIDTLFQVQGGYALVMMSNKKLIGARDPLGIRPLVLGKIKDSYVLASETCAFDIIGAKFIREIENGEVVVIEDNSL

SEQ ID NO: 117701 - protein, 163 aa, Unknown
  Bacterial polypetide isolated from the Sargasso Sea
MKNFNPKLKEECGVFGISNMQDASALAALGLHALQHRGQEGCGIVTFDGEQYYSEKRFGLVGDNFNKEKVLKNLKGNYAIAHNRYSTTGNNTLRNIQPFFADTNAGGIGVAHNGNLTNSIHLRNKLVEDGAIFYTTSDTETIVQLIAKSKRVKTIDKVVDAVS

SEQ ID NO: 117702 - protein, 285 aa, Unknown
  Bacterial polypetide isolated from the Sargasso Sea
VKDASALTALGLHSLQHRGQEGCGIVTFDGKKYYSEKRFGLVGDNFNKEKVLNYLKGNFAIGHNRYSTTGNNTLRNIQPFFADTNAGGIGVAHNGNLTNSIYLRNKLVEDGAIFYTTSDTETIVQLIAKSKRSKTIDKIIDAIFQIQGGYALVMLTQNSLVGVRDPHGIRPLVIGKLKNSFVLASETCALDIIGAKFVREVENGEIVLIENDKLNSIKPFPTKRVRPCVFEYIYFARPDSILNGKTAYEHRKNLGKELAKENNVDADIIVPVPDSGNAAALGFAQ

SEQ ID NO: 117703 - protein, 107 aa, Unknown
  Bacterial polypetide isolated from the Sargasso Sea
MKKCIKTLKKKSKIYNPKLNEECGVFGISNVKDASALAALGLHSLQHRGQEGCGIVTFDGERYYSEKRFGLVGDNFNKEKVLDNLKGNFAIGHNRYSTTGNNTLRNI

SEQ ID NO: 117704 - protein, 272 aa, Unknown
  Bacterial polypetide isolated from the Sargasso Sea
MKNSKIDKLREECGIFGISNHADSAALVALGLHALQHRGQEGCGIVSFDGKNYHSEKRQGLVGDHFTDSETLKRLPGTFAIGHNRYSTTGETSLRNIQPFFADLHMGGLSVAHNGNLTNALQLREALVKDGAIFRTTSDTETIVQLLAKSKREKFLDKLVDALFQIQGGYSLLLMTNKKLVGVRDPYGIRPLVIGKLNSSFIFASETCALDIVGATFVREVENGEIVVIENNKLQSIKPFPKQKPRPCVFEYIYFARPDSLINGKCAYEYRK

SEQ ID NO: 117705 - protein, 302 aa, Unknown
  Bacterial polypetide isolated from the Sargasso Sea
KRIGEGRGNFYTTSDSETIVQLIARSKKEKNIDKIIEAISQIQGGYALVMLTKDVLIGARDIYGIRPLVIGVINNSYVLASETCALDIIGAEFLREVENGEIVYIENNELRSLKPFGDHKPRPCVFEYIYFARPDSILRGKTAYEYRKNLGRELAKEDEVDADLVVPVPDSGNAAAIGYSQQKKINFELGLIRNHYVGRTFIEPGQQIRSLGVKLKLNANRSSIENKKIILVDDSLVRGTTSHKIVRMLYDAGAKEVHLRIACPEIKFPDFYGVDMPTKKELLAANRSVEEICDYIKAKKLK

SEQ ID NO: 117706 - protein, 307 aa, Unknown
  Bacterial polypetide isolated from the Sargasso Sea
LSLKKSVVYFGISNTKDASALTALGLHALQHRGQEGCGIVTFDGKQYFSEKRFGLVGDNFNKEKILKKLQGDYAIGHNRYSTTGENTLRNIQPFFADTNAGGIGVAHNGNLTNSISLRKKLVDEGAIFYTTSDTETIVQLIAKSKRAKTIDKIVDAIFQIQGGYALVMLTQTSLVGVRDPFGIRPLVIGKLKNSYVLASETCALDIIGAKFIREVENGEIVLIENNELKSIKPFPPRKVRPCVFEYIYFARPDSMLDGKTAYEHRKNLGSELAKENDIDADIVVPVPDSGNAAALGFAQSLNVKFEA

SEQ ID NO: 117707 - protein, 270 aa, Unknown
  Bacterial polypetide isolated from the Sargasso Sea
KKLPGKYAIGHNRYSTTGGTALRNVQPFFADTNAGGIGVAHNGNLTNAITLRNKLVQEGAIFYTTSDTEVIVQLIAKSKRSKTIDKIIDAIFHVQGGYALVMMTKNTLIGLRDPFGIRPLVIGKLKNSYVFCSETCALDIIGAKFVREVENGEIVYVENDELKSLKPFSPKKVRPCIFEYIYFSRPDSILNGKTAYEYRKNYGVQLAKEDELEADIVVPVPDSGNAAALGYAQEKNIPFDLGLIRNHYVGRTFIEPSQKIRSLGVKLKLN

SEQ ID NO: 117708 - protein, 280 aa, Unknown
  Bacterial polypetide isolated from the Sargasso Sea
VIGKLKDSYVFASETCALDIIGAKYIRDVENGEIVYVENKKLISLKPFPLKKIRPCVFEYIYFSRPDSILNGKCAYEYRKNFGRELAKETSIDADLVVPVPDSGNAAAIGYSQHENINFDLGLIRNHYVGRTFIEPAQKIRSLGVKLKLNANKSTIKNKKIVLVDDSLVRGTTSHKIVKMLYDFGAKEVHVRIASPEIRFPDFYGVDTPTKKELLAANKTNEEICKYIDAKSLKFLSVDGLYKAMGYEKRNATYPQLTDHYFTGDYPVKLIDELGDNKVT

SEQ ID NO: 117709 - protein, 183 aa, Unknown
  Bacterial polypetide isolated from the Sargasso Sea
MKKNTKKQKKKFKIYNPKIKEECGVFGISNNLDASTLTALGLHALQHRGQEGCGIVSFDGKKYHSEKRFGLVGDNFNKEKVLKKLPGKYAIGHNRYSTTGGTALRNVQPFFADTNAGGIGVSHNGNLTNAITIRNKLVEEGAIFYTTSDTEVIVQLIAKSKRLKTIDKIIDAIFQIQGGYALV

SEQ ID NO: 117710 - protein, 282 aa, Unknown
  Bacterial polypetide isolated from the Sargasso Sea
EPALRNVQPLFADLSVGGFAIAHNGNLTNALKLRNELVQSGAIFQSTSDTEVLLQLIARSKSNGVINRFVDALKEIDGAYALVALTDDKLIGARDPLGIRPLILGKLENRFILSSETCALDIIGAKFVREIENGEVVVISGENIESIRPFPKIKKRPCIFEYIYFARPDSVFGGKSIYECRKNFGHELAAEAPCSADVVIPVPDSGVPAALGYAEAAGLSFELGIIRNHYVGRTFIEPQQSTRDFGVKLKHNINRNAVKGKKVVLIDDSIVRGTTSVKIVEL

SEQ ID NO: 117711 - protein, 261 aa, Unknown
  Bacterial polypetide isolated from the Sargasso Sea
IGHNRYSTTGGTTLRNIQPFFADTHAGGIGVAHNGNLTNALTIRKKLVKDGAIFYSTSDTEVIIQLIAKSKRSTTVEKITDAIFQIQGGYALVMLAQNKLIGVRDPLGIRPLVIGKLKNSYVLASETCALDIIGAKFIREVDNGEIVIIENDKLETIKPFPKKKQRPCIFEYIYFSRPDSILNGKTTYEFRKKFGEQLALEDNIKADLVVPVPDSGNAAALGYSQKTKINFDLGLIRNHYVGRTFIEPAQKIRSLGVKLKL

SEQ ID NO: 117712 - protein, 239 aa, Unknown
  Bacterial polypetide isolated from the Sargasso Sea
MKKLKKKFKIYDPKIKEECAVFGISDSNDASTLTALGLHALQHRGQEGCGIVSYDGEKYHSEKRFGLVGDNFNDEKVLKKLPGKYAIGHNRYSTTGGTALRNVQPFFADTNAGGIGVAHNGNLTNAITLRNKLVQEGAIFYTTSDTETIVQLIAKSKRVKTIDKIIDAIFQIQGGYALVMMTQNTLIGVRDPYGIRPLVIGKLKNSYVLASETCAFDIIGAKFVREVENGEIVYIENDE

SEQ ID NO: 117713 - protein, 214 aa, Unknown
  Bacterial polypetide isolated from the Sargasso Sea
MKNFDPKLKEECGVFGISNAKDASALTALGLHALQHRGQEGCGIVTFDGEKYYSEKRFGLVGDNFNKEKVLNNLKGNFAIGHNRYSTTGHNTLRNIQPFFADTNAGGIGVSHNGNLTNSIYLRKKLVDEGAIFYTTSDTETIVQLIAKSKRSKTIDKVIDAIFQIQGGYALVMLTQNSLIGVRDPYGIRPLMIGKLGKSYVLASETCALDIIGA

SEQ ID NO: 117714 - protein, 152 aa, Unknown
  Bacterial polypetide isolated from the Sargasso Sea
MKKHIKTLKKKLTNFDPKIKEECGVFGISNAKDASALTALGLHALQHRGQEGCGIVSFNGKEYFSEKRFGLVGDNFNKEKVLKKLQGDFAIGHNRYSTTGENTLRNIQPFFADTNAGGIGVAHNGNLTNSISLRKKLVDDGAIFYTTSDTET

SEQ ID NO: 117715 - protein, 283 aa, Unknown
  Bacterial polypetide isolated from the Sargasso Sea
LIGVRDPYGIRPLVIGKLGSSYVLASETCALDIIGAKFLREVENGEIVLVENNELKSIKPFPPKKVRPCVFEYIYFARPDSLIDNKTAYEHRKNLGKELAKENDIKADIVVPVPDSGNAAALGFAQNLNINFEHGLIRNHYVGRTFIEPSQKIRSLGVKLKLNANETTIKNKRIILIDDSLVRGTTSHKIVKMLYDAGATEVHVRIACPEIRYPDFYGVDTPTKKELLAANKSNDEIREYIGAKSLKFLSIDGLYRAIGFEKRNETYPQLTDHYFTGDYPVKP

SEQ ID NO: 117716 - protein, 264 aa, Unknown
  Bacterial polypetide isolated from the Sargasso Sea
MEECGVFGISNFEDASALTALGLHALQHRGQEGCGIVSFDGKKYYSEKRFGLVGDNFNNEKVLKNLPGNYAIGHNRYSTTGGTTLRNIQPFFADTHAGGIGVAHNGNLTNALTLRQKLVKDGAIFYSTSDTEVIIQLIAKSKRSSTVEKITDAIFQIQGGYALVMLAQNKLIGVRDPLGIRPLVIGKLKNSYVLASETCALDIIGAKFLREVENGEIVVIGNDQLESIKPFPAKKSRPCIFEYIYFSRPDSILNGKTTYEFRKK

SEQ ID NO: 117717 - protein, 294 aa, Unknown
  Bacterial polypetide isolated from the Sargasso Sea
AASRPDAAGIMTCENTNLYLRKDNGLVRDVLKTRHMLNLKGNMGIGHVRYPTAGCSSSAEAQPFYVNSPYGITLAHNGNLVNAEPLKEDLMRDDLRHLNTNSDSEVLLNILAHELNKIGKHRSKLNPDDIFDAVGRLHQRCKGGYAAVAMITGIGILGFRDPNGIRPIVFGERKTDIGTESIIASESVAVDALDFQLIRDIEPGEAVFISVEGEIFTRQCADNTKYSPCIFEYVYLARPDSIIDGISVYKARLRMGETLARKILKLYPTHDIDVVIPIPDSSRTAALSLANEMG

SEQ ID NO: 117718 - protein, 190 aa, Unknown
  Bacterial polypetide isolated from the Sargasso Sea
MRKNTKNLKKKLKIYNPKLKEECGVFGISNASDASTLAALGLHALQHRGQEGCGIVSYDGKNYHSEKRFGLVGDNFNKEKILKKLPGNYAIGHNRYSTTGATTLRNVQPFFADTNAGGIVVAHNGNLTNALTLRKKLVEDGAIFYSTSDTETIIQLIAKSKREKKIDKIIDALFQIQGAYALVFLTQNTL

SEQ ID NO: 117719 - protein, 135 aa, Unknown
  Bacterial polypetide isolated from the Sargasso Sea
MKPNKKSTFLNDDKLHEECGVFGIYNHEDSAALTALGLHALQHRGQEAAGIVTFDGTKFISERHPGLVSDNFTKASVINRLVGNSAVGHNRYSTTGATIQRNIQPFFADLWGGGFAIAHNGNITNALSLRDELIK

SEQ ID NO: 117720 - protein, 273 aa, Unknown
  Bacterial polypetide isolated from the Sargasso Sea
ASALVALGLHSLQHRGQEGCGIVSYDGKNYHSEKKQGLVGDHFTNTDVIKNLPGNSAIGHNRYSTTGETSLRNIQPFFADLHLGGLSIAHNGNLTNAISLRDSLVKDGAIFRTTSDTETIVQLIAKSKRLKILDKIIDALFQIQGGYSLVMMTNNQLIGLRDPYGIRPLVLGKLKNSFIFASETCALDIVGAKYIRDIENGEIVIIEDDKIKSVKPFPKLKAKPCVFEYIYFSRPDSILDGKCAYEYRKEFGKQMAIETDIDSDIGCACSGLG

SEQ ID NO: 117721 - protein, 151 aa, Unknown
  Bacterial polypetide isolated from the Sargasso Sea
MIKKNSTKVREECGVFGISNINDASALAALGLHALQHRGQEGCGIVSYDGKNYYSEKRFGLVGDNFNNEDTIKKLPGNFAIGHNRYSTTGGKILRNVQPFFADTNAGGIGVSHNGNFTNAITLRKELVKEGAIFYTTSDSETIVQLIARSK

SEQ ID NO: 117722 - protein, 246 aa, Unknown
  Bacterial polypetide isolated from the Sargasso Sea
MRNFNSKLKEECGVFGISNNPDASTLTALGLHALQHRGQEGCGIVSFDGEKYYSEKRFGLVGDNFNKEKVLKNLAGKYAIGHNRYSTTGGTTLRNVQPFFADTNAGGIGISHNGNLTNAITLRKKLVEDGAIFYTTSDTETIVQLIAKSKRNKTIDKIIDALFQIQGGYALVMLAQNMLIGVRDPYGIRPLVIGKIKDSYVFASETCALDIIGAKFVREVENGEIVYVEDNVIKSLKPFSLKKARP

SEQ ID NO: 117723 - protein, 206 aa, Unknown
  Bacterial polypetide isolated from the Sargasso Sea
MPNLLNDRPHHECGVFGIYGHPDAAALTALGLHALQHRGQEAAGIVTFDNKHFHAERRMGLVSDTFTKTSVLGRLKGQSAIGHVRYSTTGGTLLRNVQPLFADLALGGFAIAHNGNLTNALSVRLELVKEGAIFQSTSDTETILQLVAKSKKSFTIDRMIDALSQIEGAFALVALTNKELIGVRDPFGIRPLVLGELDGKYILCSE

SEQ ID NO: 117724 - protein, 161 aa, Unknown
  Bacterial polypetide isolated from the Sargasso Sea
MKIQKIKYKNYNPKLKEECGVFGISNSKEASTLTALGLHALQHRGQEGCGIVSFDGEQYHSEKRFGLVGDNFNKEKVLKNLSGNYAIGHNRYSTTGGAALRNIQPFFADTNAGGIGISHNGNLTNAITLRNKLVQEGAIFYTTSDTETIVQLMQNQKGRKL

SEQ ID NO: 117725 - protein, 309 aa, Unknown
  Bacterial polypetide isolated from the Sargasso Sea
STDASTLTALGLHALQHRGQEGCGIVSYDGEKYHSEKRFGLVGDNFNDEKVLKKLPGKYAIGHNRYSTTGGTALRNVQPFFADTNAGGIGVAHNGNLTNAITLRNKLVQDGAIFYTTSDTETIVQLIAKSKRRKTIDKIIDAIFQIQGGYALVMMTQNTLIGVRDPYGIRPLVIGKLKNSYVFASETCAFDIIGAKFVREVENGEIVYIENDELKSIKPFPPKKIRPCVFEYIYFSRPDSILNGKTAYEYRKNFGQQLAKEDKIEADLVVPVPDSGNAAALGYAEEKGLKFDLGLIRNHYVGRTFMSPL

SEQ ID NO: 117726 - protein, 307 aa, Unknown
  Bacterial polypetide isolated from the Sargasso Sea
KRIKTIDKIVDAIFQIQGGYALVMLTQTSLVGVRDPYGIRPLVIGKLKNSYVLASETCALDIIGAKFIRDVENGEIVLIENNQLKSIKPFPLKKVRPCVFEYIYFARPDSILDGKTAYEHRKSLGAELAKENDINADIVVPVPDSGNAAALGFAQHLSMSFELGLVRNHYVGRTFIEPSQKIRSLGVKLKLNANQSAIKNKKIILIDDSLVRGTTSHKIVKMLYDAGASEVHVRIACPEIKYPDFYGVDTPTKKELLAANKTNDEICNYIGAKTLKFLTLNGMYKAIGFDKRNENYPQLTDHYFTGD

SEQ ID NO: 117727 - protein, 179 aa, Unknown
  Bacterial polypetide isolated from the Sargasso Sea
LDPLQCKLQEQLGIEYREGFFKNRYVGRTFIMPGQQKRKKSVRQKLNAMSAEFKNKNILIVDDSIVRGTTSKEIVQMAKDAGANKVFFTSAAPPVRYPHVYGINMPNRDELIAHNRTISEIADKLEIDNLVYQSVESLRKSIIGDSPIKGLEMSCFTGDYVTGTVNQEYLNWVENVYKS

SEQ ID NO: 117728 - protein, 237 aa, Unknown
  Bacterial polypetide isolated from the Sargasso Sea
MCGIVGISAQTNVAAEIYDALLMLQHRGQDAAGIAVCSSEDQLNSRKSMGYVRDVFQQRHMEKLVGNYGIGHVRYPTAGGAGKEFAQPMYVNSPYGISLAHNGNLTNSKQLGNELFHAEMRHLQTDSDSEVLLNIFAHELGKQREIHPSAEHIFKAVAKTHIRCDGAYAVLALISGYGMLAFRDNNGIRPLSIGVRKGKIRNDYIISSEDALFTPLGYEKLRDVDPGEAVFIDKHGE

SEQ ID NO: 117729 - protein, 163 aa, Unknown
  Bacterial polypetide isolated from the Sargasso Sea
MKKNTKKQKKKFKIYNPKLKEECGVFGISNNPDASTLTALGLHALQHRGQEGCGIVSFDGKKYHSEKRFGLVGDNFNKEKVLKKLPGKFAIGHNRYSTTGGTALRNVQPFFADTNAGGIGVAHNGNLTNAITIRNKLVEEGAIFYTTSDTEVIVQLIAKSKRS

SEQ ID NO: 117730 - protein, 278 aa, Unknown
  Bacterial polypetide isolated from the Sargasso Sea
SIYIDKNNELHSHQCVEPKSYTPCIFEFVYFARPDSIIDGMSVYKSRLRMGEHLAQQIIQKGLHHDVDVVIPIPDTSRTSAIQVAHHLGVKYREGFIKNRYIGRTFIMPGQEKRKKSVKKKLNPIDLEINDKNVLLIDDSIVRGTTSRQIIEMARNAGAKKVFFASAAPPVKFPNVYGIDMPATSELIASNKNDEDLSAYIGADWLIYQSLDDLIEAVRFEESEVNHFDTSCFSGEYVTNDITEKYLQRIELKRNDEAMAKKEMERKQLDIQDPTKIL

SEQ ID NO: 117731 - protein, 134 aa, Unknown
  Bacterial polypetide isolated from the Sargasso Sea
MNDRPQHECGVFGIFGHEDAGALTALGLHALQHRGQEAAGMVTYDGKHFHAERRMGLVSDTFTKTSILGRLKGNSAIGHVRYSTTGGTLLRNVQPLFADLALGGFAIAHNGNLTNGLTIRLELVKEGAIFQSTS

SEQ ID NO: 117732 - protein, 138 aa, Unknown
  Bacterial polypetide isolated from the Sargasso Sea
MIKTNSTKIREECGVFGISNINDASALAALGLHALQHRGQEGCGIVTYDGKNYYSEKRFGLVGDNFNNEDTIKKLPGSYAIGHNRYSTTGGKILRNVQPFFADTNAGGIGVSHNGNFTNAITLRKKLVEDGAIFYTTF

SEQ ID NO: 117733 - protein, 300 aa, Unknown
  Bacterial polypetide isolated from the Sargasso Sea
MRDPNGNRPLILGKREVGQGTEYMIASESVALDIADFEIMRDVKPGEVIYITKEGELFSKQCVKPKSYTPCIFEFVYFARPDSIIDGMSVYKSRLRMGEYLAQRIIKKGLHHDVDVVIPIPDTSRSTALQVAHHLGVKYREGFIKNRYIGRTFIMPGQEIRKKSVKQKLNPIDLEIRDKNVLLIDDSIVRGTTSKKIIQMARNAGANKVFFASAAPPVKYPNVYGIDMPSTAELLASNRTEEELARYIGADWLIYQDLDDLISAVQFDESDAEAFDTSCFSGEYVTGDVTPNYLDFMRTR

SEQ ID NO: 117734 - protein, 279 aa, Unknown
  Bacterial polypetide isolated from the Sargasso Sea
IYITKEGELFSKQCVKPKSYTPCIFEFVYFARPDSIIDGMSVYKSRLRMGEYLAQRIIKKGLHHDVDVVIPIPDTSRSTALQVAHHLGVKYREGFIKNRYIGRTFIMPGQEIRKKSVKQKLNPIDLEIRDKNVLLIDDSIVRGTTSKKIIQMARNAGANKVFFASAAPPVKYPNVYGIDMPSTAELLASNRTEEELARYIGADWLIYQDLDDLISAVQFDESDAEAFDTSCFSGEYVTGDVTPNYLDFIENKRNDAAKAKKEIERKQIEIHDQSSMTVS

SEQ ID NO: 117735 - protein, 182 aa, Unknown
  Bacterial polypetide isolated from the Sargasso Sea
MSEVPAHTEEGFLPDKLHEECGVFGIFGHTDASAIVALGLHALQHRGQEAAGIVTYDGKHFHAERKLGLVSDTFTDSRILEQLTGKAAVGHVRYSTTGETVLRNVQPLFADLAGGGFAIAHNGNLTNALSLRDELVMQGAIFQSTSDTETILQLVARSKRDNTLSRFIDTLFKIEGAYSLVS

SEQ ID NO: 117736 - protein, 311 aa, Unknown
  Bacterial polypetide isolated from the Sargasso Sea
DGAIFRTTSDTETIVQLIAKSKRDKFIDKLIDALFQIKGGYSLILMTNKKLVGVRDPFGIRPLVIGKLKNSYIFASETCALDIVGATFIREVENGEIVFIEDEKIKSIKPFPKQKSRPCVFEYIYFARPDSLIDGKCAYEYRKKLGSELAKETDIDADLVVPVPDSGVPAALGYAAQANKKFELGLIRNHYVGRTFIEPSQNIRSLGVKLKLSSTKTIVKNKKIILIDDSLVRGTTCLKIIKMLYEAKAKEVHVRIACPEIKYPDFYGVDMPTKKELLAHNRSNDEMCQYIKAKSLKFLKFKWFIQSSDRR

SEQ ID NO: 117737 - protein, 251 aa, Unknown
  Bacterial polypetide isolated from the Sargasso Sea
MTNSIYLRNKLVEEGAIFYTTSDTETIVQLIAKSKREKKIDKVVDAIFQIQGGYALVMLTQKSLIGVRDPYGIRPLVIGKLKNSYVLASETCALDIIGAKFIREVENGEIVLIEDDKLESIKPFPPKKVRPCVFEYIYFARPDSILSGKTAYEHRKNLGKELARENDIEADIIVPVPDSGNAAALGFAQHLSKNFELGLIRNHYVGRTFIEPSQKIRSLGVKLKLNANQTTIKNKKIVLIDDSLVRGTTSH

SEQ ID NO: 117738 - protein, 246 aa, Unknown
  Bacterial polypetide isolated from the Sargasso Sea
MCGIVGISAETNVAAEIYDSLLMLQHRGQDAAGMVVCDTEDQLNSRKSMGYVRDVFEQKHMNNLIGNYGIGHVRYPTAGGSGSEFAQPMYVNSPYGISLAHNGNLTNSKQLSAELFHAEMRHLKTDSDSEVLLNIFAHELAKQKEIYPSAEHIFKAVSKTHFRCDGAYAVLALITGHGILAFRDNNAIRPLSIGIRNGKTREEYIISSEDALFTSMGFDKLRDIEPGEAIFIDKNGKLHSQQCAEE

SEQ ID NO: 117739 - protein, 256 aa, Unknown
  Bacterial polypetide isolated from the Sargasso Sea
MLSLGEVIYITKEGELFSKQCIKPKSYTPCIFEFVYFARPDSIIDGMSVYKSRLRMGEYLAQRIIKKGLHHDVDVVIPIPDTSRSTALQVAHHLGVKYREGFIKNRYIGRTFIMPGQEIRKKSVKQKLNPIDLEIREKNVLLIDDSIVRGTTSKKIIQMARNAGANKVFFASAAPPVKYPNVYGIDMPSTAELLASNRTEEELARYIGADWLIYQDLDDLISSVQFDESDAEAFDTSCFSGEYVTGDVTPNYLDFH

SEQ ID NO: 117740 - protein, 98 aa, Unknown
  Bacterial polypetide isolated from the Sargasso Sea
MKKQKKKFKIYNPKLKEECGVFGIGNISDASALTALGLHALQHRGQEGCGIVSFDGEKYHSEKRFGLVGDNFNKEKVLKKLPGKYAIGHNRYSTTGGT

SEQ ID NO: 117741 - protein, 171 aa, Unknown
  Bacterial polypetide isolated from the Sargasso Sea
ARQLGIEYREGFFKNRYVGRTFIMPGHQKRKQSVRQKLNAMSTEFKNKNVLIVDDSIVRGTTSKQIVQMAKDAGANKVFFTSAAPPVRFPHVYGINMPNRDELIAHDRTIIQIAEKLEIDNLVYQSVENLRKSIIKDSLVKDLEMSCFTGSYVTGMVNQEYLEWVENEYKS

SEQ ID NO: 117742 - protein, 147 aa, Unknown
  Bacterial polypetide isolated from the Sargasso Sea
MLKKKFKNFNPKIKEECGVFGISNNKDASALTALGLHALQHRGQEGCGIVTFDGDQYHSEKRFGLVGDNFNKEKVLKTLIGNYAVGHNRYSTTGGTTLRNIQPFFADTNAGGISISHNGNLTNAITLRSKLVKDGAIFYTTSDTETI

SEQ ID NO: 117743 - protein, 254 aa, Unknown
  Bacterial polypetide isolated from the Sargasso Sea
HLNTESDTEALLNLFAHELQENFDGSLSPEIIFKAATHLFDKCSGGYAVVSMILNEGLVAMRDPNGIRPLILGKREVGQGTEYMIASESVALDIADFEIMRDVKPGEVIYITKEGELFSKQCVKPKSYTPCIFEFVYFARPDSIIDGMSVYKSRLRMGEYLAQRIIKKGLHHDVDVVIPIPDTSRSTALQVAHHLGVKYREGFIKNRYIGRTFIMPGQEIRKKSVKQKLNPIDLEIRDKNVLLIDDSIVRGTTS

SEQ ID NO: 117744 - protein, 313 aa, Unknown
  Bacterial polypetide isolated from the Sargasso Sea
LPIYNSKLKEECGVFGISNSIDASALTALGLHALQHRGQEGCGIVSYDGQKYYSEKRFGLVGDNFNKQKILKGLPGNYAIGHNRYSTTGDTSLRNIQPFFADTNTGGIGVAHNGNLTNAITLRKKLVKDGAIFHTTSDTETIVQLVAKSRRNKIIDKIIDALFQIQGGYALVMLTQNILIGVRDPFGIRPLVIGKVKDSYVFASETCALDIIGAKYIRDVENGEIVCVENGKLNSLKPFPAKKIRPCVFEYIYFSRPDSILNGECAYEYRKRLGAELAKESSIDTDVVVPVPDSGNAAAIGYSKHSGINFELG

SEQ ID NO: 117745 - protein, 223 aa, Unknown
  Bacterial polypetide isolated from the Sargasso Sea
MQKKKFKIYNPKLKEECGVFGISNFEDASALTALGLHALQHRGQEGCGIVSYDGNQYYSEKRYGLVGDNFNNEKVLKKLPGNFAIGHNRYSTTGGTTLRNIQPFFADTHAGGIGVAHNGNLTNAVTIRKKLVKDGAIFYSTSDTEVIIQLIAKSKRSTTVEKITDAIFQIQGGYALVMLAQNKLIGVRDPLGIRPLVIGKLKNSYVLASETCALDIIGARFLR

SEQ ID NO: 117746 - protein, 290 aa, Unknown
  Bacterial polypetide isolated from the Sargasso Sea
MKKNIKNLKKKLRIYSPKIKEECGVFGISNSMDASTLTALGLHALQHRGQEGCGIVSYDGKNYHSEKRFGLVGDNFNKEKVLKNLPGNYAIGHNRYSTTGATALRNVQPFFADTNAGGIGVAHNGNLTNAITLRKKLVEDGAIFYTTSDTETIVQLIAKSKRKDTIDKIIDALFQIQGGYALVMMTQKILIGVRDPYGIRPLVIGKLKDSYIFASETCALDIIGAKFLREVENGEIVYVHNNNLKSIKPFPVKKPRPCVFEYIYFSRPDSILSGKCVYEYRKDFGKELAK

SEQ ID NO: 117747 - protein, 299 aa, Unknown
  Bacterial polypetide isolated from the Sargasso Sea
EKLVKDGAIFRTTSDTETIVQLIAKSKRSKMIDKIIDTLFQVQGGYALVMMSNKKLIGARDPLGIRPLVLGKLKNSYVLASETCAFDIIGAKFIREIENGEVIMIEGNNLKSIKPFNKKKSRPCVFEYVYFSRPDSYLKGKCAYEYRKNFGYELAKESDDVGEIVVPVPDSGVPAAIGYSQYKKISFELGLIRNHYVGRTFIEPKQNIRSFGVKLKLSSNKSSIKNKSIVLIDDSIVRGTTCSKIVKMLYDGGAKEVHVRISSPPIKFPDFYGIDMPSKKELLAANKSLEEMRKHIEAD

SEQ ID NO: 117748 - protein, 126 aa, Unknown
  Bacterial polypetide isolated from the Sargasso Sea
MRKINEECGVFGIHDIDDASALTALGLHALQHRGQEGCGIVSFDGKTFHSEKRHGLVGDNFTNKDVLKKLPGKFAVGHNRYSTTGETSLRNIQPFFADLHGGGIAIAHNGNLTNALRLRESLVKDG

SEQ ID NO: 117749 - protein, 199 aa, Unknown
  Bacterial polypetide isolated from the Sargasso Sea
MNEECGVFGIANVKDASALTALGLHSLQHRGQEGCGIVTFDGERYYSEKRFGLVGDNFNKEKVLDNLKGNFAIGHNRYSTTGNNTLRNIQPFFADTNAGGIGVAHNGNLTNSIYLRNKLVEEGAIFYTTSDTETIVQLIAKSKRLKTIDKIIDAIFQIQGGYALVMLTQNLLVGVRDPYGIRPLVIGKLKNSYVLASET

SEQ ID NO: 117750 - protein, 188 aa, Unknown
  Bacterial polypetide isolated from the Sargasso Sea
MLKKKFKNYNPKLKEECGVFGISNVNDASAVTALGLHALQHRGQEGCGIVTFDGEKYHSEKRFGLVGDNFNKEKVLKKLPGKYAVGHNRYSTTGGTTLRNIQPFFADTNAGGISVSHNGNLTNAITLRSKLVQEGSIFYTTSDTETIVQLIAKSKRSKTEDKIIEALFQIQGGYALVMLTQKKLIGVR

SEQ ID NO: 117751 - protein, 268 aa, Unknown
  Bacterial polypetide isolated from the Sargasso Sea
REQCADSPKLTPCIFEHVYFARPDSLIDSISVYKTRMRQGAALAKKILRERPENDIDVVIPIPDTSRVAGQSLAYELGVKFREGFMKNRYIGRTFIMPGQSERKKSVRQKLNPVPLEFQDKTVLLVDDSIVRGTTCGQIIQMAREAGARQVYFASAAPPVRFPNVYGIDMPAANELIAHGRSVEEVREEIGADWLVYQDLEDLIKCSREGNPEVDGFESSVFDGEYLAGNIDDQYLQSIEAARADGAKGRGPFLGTSDGAVVGLHNDN

SEQ ID NO: 117752 - protein, 266 aa, Unknown
  Bacterial polypetide isolated from the Sargasso Sea
PVLASETCALDIIGAKYVRDVENGEIIVITDNKIESIKPFPNVNERPCIFERIYFSRPDSIIDGRSVYSYRKNLGSELAKEYKIDADVVVPIPDSGVPAALGFSQTSSIPFELGLIRNHYVGRTFIEPTQSIRQFGVKLKHSVNVSYIKNKKVILIDDSIVRGTTAKKIVKMVYDAGAKEVHLGVSCPPITHPDFYGIDTPNYDELIASNKNIDEMSSIIGTKSLFFLSLDGTYRAMGCEERDNSSPQFTDHCFTGEYPTPLIDME

SEQ ID NO: 117753 - protein, 121 aa, Unknown
  Bacterial polypetide isolated from the Sargasso Sea
MKKHIKILKKKLKNYNPRLKEECGVFGISNAKDASALTALGLHALQHRGQEGCGIVTFDGEKYYSEKRFGLVGDNFNKEKVLNNLKGNYAIGHNRYSTTGNNILRNIQPFFADTNAGGIGV

SEQ ID NO: 117754 - protein, 296 aa, Unknown
  Bacterial polypetide isolated from the Sargasso Sea
VVAMITGYGIVGFRDPHGIRPLIFGMKKNDGGHRDFMIASESVALVSQGFEIERDVSAGEAVFFDTEHNCHTQQCSDNARLTPCIFEHVYLARPDSIVDEVSVYKTRLRMGVKLAEKICRSRPDHDIDVVMPIPDSGRTSAMSLAESLGVPYREGFIKNRYIGRTFIMPGQAVRKKSVRQKLSPISLEFKDKVVCLVDDSIVRGTTCSQIIGMARDAGARKVYFCSAAPAVRFPNVYGIDMPTSEELVAYNRTDEEVAQVINADWLVYHDLDDLVECSKVGNRSIDSFECSVFDGN

SEQ ID NO: 117755 - protein, 295 aa, Unknown
  Bacterial polypetide isolated from the Sargasso Sea
KDASALTALGLHALQHRGQEGCGIVTFDGKKYYSEKRFGLVGDNFNKEEILNKLKGNYAIGHNRYSTTGDNILRNMQPFFADTNAGGIGVAHNGNLTNSISIRNKLVEDGAIFYTTSDTETIVKLIAKSKRSKTIDKVVDAIFQIQGGYALVMLTQTSLIGVRDPLGIRPLIIGKLKNSYVLTSETCALDIIGAKFIREVENGEIVVIENNELKSIKPFPPKKMRPCVFEYIYFARPDSILNGKAAYEHRKNLGVELAKENNTDADIVVPVPDSGNAAALGFAQHLSKKFELGLI

SEQ ID NO: 117756 - protein, 104 aa, Unknown
  Bacterial polypetide isolated from the Sargasso Sea
MKKIIKILKKKFKNYNPKIKEECGVFGISNNEDASTLTALGLHALQHRGQEGCGIVSFDGKKYHSEKRFGLVGDNFNKEKVLKSLPGNYAIGHNRYSTTGGTTL

SEQ ID NO: 117757 - protein, 335 aa, Unknown
  Bacterial polypetide isolated from the Sargasso Sea
GSFAIAHNRYSTTGGTTLRNIQPFYADTNTGGIGVAHNGNLTNAITLRKKLVEDGAIFYTTSDTETIVQLIARSKRGKVIDKIIDALFQIQGGYALVMLARDLLIGVRDPFGIRPLVIGKLKDSYVFASETCALDIIGAKYIRDVENGEIVYVENKKLISLKPFPLKKIRPCVFEYIYFSRPDSILNGKCAYEYRKNFGVELAKETSIDADLVVPVPDSGNAAAIGYSQHEKINFDLGLIRNHYVGRTFIEPAQKIRSLGVRLKLNANKSTIKNKKIVLVDDSLVRGTTSHKIVKMLYDFGAKEVHVRIASPEIKFPDFYGVDTPTKKELLAANK

SEQ ID NO: 117758 - protein, 252 aa, Unknown
  Bacterial polypetide isolated from the Sargasso Sea
NDLKSIKPFPKQKARPCVFEYIYFARPDSLIDGKCAYEFRKNFGSQLAKETDIDADIVLPVPDSGVPAALGYAEYSKKRFELGLIRNHYVGRTFIEPTQSIRSLGVKLKLSPTKSIVKNKSIILIDDSLVRGTTCHKIIKMLYEAGAKEVHVRIACPEIKFPDFYGVDMPTKNELLAHKKNVKEMCEYIKAKSLKFLSLEGLYVGLEKGKRNKTYPQFSDHYFTGDYPVKPSDNLGENKITQLSLLSGKSSN

SEQ ID NO: 117759 - protein, 186 aa, Unknown
  Bacterial polypetide isolated from the Sargasso Sea
MRKHIKILKKKLKNYNPRLKEECGVFGISNSKDASALTALGLHALQHRGQEGCGIVTFDGEKYYSEKRFGLVGDNFNKEKVLNNLKGNYAIGHNRYSTTGNNILRNIQPFFADTNAGGIGVAHNGNLTNSIALRNKLVEDGAIFYTTSDTETIVQLIAKSKRPKTIDKVIDAIFQIQGGYALMMLT

SEQ ID NO: 117760 - protein, 297 aa, Unknown
  Bacterial polypetide isolated from the Sargasso Sea
RYSTTGETSLRNIQPFFADLHMGGLSVAHNGNLTNALLLREALVKDGAIFRTTSDTETIVQLIAKSKREKFTDKLIDSLFQIQGGYSLVLMTNKKLVGVRDPFGIRPLVVGRLNKSFIFASETCALDIVGAKFIREVENGEIVVVENDNLKSIKPFPKQKSRPCVFEYIYFARPDSLISGKCAYEYRKNLGRELAKENNDQSDLIVPVPDSGVPAALGYAEESGIKFELALIRNHYVGRTFIEPTQNIRSLGVKLKLNPSKTLVKGKSITLIDDSLVRGTTCNKIVKMLYEAGAKEV

SEQ ID NO: 117761 - protein, 223 aa, Unknown
  Bacterial polypetide isolated from the Sargasso Sea
ARMRMGTKLAGQIKKTRPDHDIDVVIPIPDSSVTAAHQLAVDLNVPYREGFVKNRYIGRTFIMPYQEERKKSVRRKLNILDLEFEGKNVLLVDDSIVRGTTSKKIIEMAREAGAKKVYFASAAPAIKYQNLYGIDMPATAELIASNKSNDEVASEINADWLIYQTLEDLIDSVREGNPEISEFETSIFTGEYFTPLVENYLEELEISRKDELKMQREKSKAKS

SEQ ID NO: 117762 - protein, 214 aa, Unknown
  Bacterial polypetide isolated from the Sargasso Sea
MKKHIKILKKKLQNYNPRLKEECGVFGITNAKDASALTALGLHALQHRGQEGCGIVTFDGEKYYSEKRFGLVGDNFNKEKVLNNLKGNYAIGHNRYSTTGNNILRNIQPFFADTNAGGIGVAHNGNLTNSISLRNKLVEDGAIFYTTSDTETIVQLIAKSKRPKTIDKVIDAIFQIQGGYALVMLTQNSLIGVRDPYGIRPLAIGKLGNSYVLA

SEQ ID NO: 117763 - protein, 322 aa, Unknown
  Bacterial polypetide isolated from the Sargasso Sea
ESIIDRTVAALQEVEGAFSLVALHNDTLIGVRDPHGVRPLVLGRFENAWVLASETCALDIIGAEYIRDVQPGELVVIDENGIKSMRPFSSKPRKLCIFEYIYFARPDSTIDGQNVYDARKSIGRELANESGVAADIVIPVPDSGVPAALGYAEAADIPYELGIIRNHYVGRTFIEPTEQIRHLGVKLKHNANRDVIKGRRIILVDDSIVRGTTSVKIVEMMRAAGATEVHMRIASPPTTHSCFYGVDTPSRDQLLAAKNNIQEMAGIIGVNTLAFVSLDGLYRAMGMESRYGPDPKYCDACFSGEYPITPTDQLERDQVHSS

SEQ ID NO: 117764 - protein, 308 aa, Unknown
  Bacterial polypetide isolated from the Sargasso Sea
YSKKLIGIRDPYGIRPLVLGKLGDTYIFSSETCALDIIGAEYIREIENGEIVIIDKNGIESIKPFPKIDARPCVFEYIYFARPDSILKGKAVHEYRKNLGIELAKESYVEADMISPIPDSGLPAALGFANKSNIEFDMGIIRNHYVGRTFIEPTQQIRQLGVKLKHNPNKQIIKNKRIILVDDSIVRGTTSKKIVDMLYHAGAKEIHLRVSSPPIKYPDYYGIDTPNKKDLIAANLSVDEIAKQIGVKSLKFLSIEGLYKALGYKNRNNKNPQLTDHCFTGDYPVKPTDNKNLIDKNNQLSLLSNVRS

SEQ ID NO: 117765 - protein, 273 aa, Unknown
  Bacterial polypetide isolated from the Sargasso Sea
AIFYTTSDTETIVQLIAKSKRSKTIDKVIDAIFQIQGGYALVMLTQNSLIGVRDPYGIRPLLIGKLGSSYVLASETCALDIIGANFVREVENGEIVLIENNQLTSIKPFPPKKVRPCVFEYIYFARPDSLLDNKTAYEHRKNLGKELAKENDIDADIVVPVPDSGNAAALGFSQKHKMNFEHGLIRNHYVGRTFIEPSQKIRSLGVKLKLNANQTTIKNKKIILIDDSLVRGTTSHKIVKMLYDAGAKEVHVRIACPEIRYPDFYGVDTPTKK

SEQ ID NO: 117766 - protein, 249 aa, Unknown
  Bacterial polypetide isolated from the Sargasso Sea
MGAKLVREVSNGEVVVISDQGIRSFMPFPVAPYRPCIFEYIYFARPDSVVGGLSVYECRKKIGQQLAKESTNFGEVVVPVPDSGVPAALGFAEESKIPFELGIIRNHYVGRTFIEPQQSSRDFGVKLKHNVNRQAVDGKSVVLIDDSIVRGTTSVKIVELMREAGASEVHMKIASPPIKFPDFYGIDTPNQSQLLASFKSIDEMRKFIGADSLSFLSVDGLYKAMGHKNGRDNDNPAFTDHCFTGDYPT

SEQ ID NO: 117767 - protein, 208 aa, Unknown
  Bacterial polypetide isolated from the Sargasso Sea
RIRKLNLVDEIDVVIPIPDSSTTAALQLAADLKKPYRQGFVKNRYIGRTFIMPLQEERKKSVRRKLNILDLEFKDKNVLLVDDSIVRGTTSRQIIEMVREAGAKKVLFASASPPVKYQNLYGIDMAATKELIAHDKTENEIADAIGADELIYQNLEDLISSVQEGNPEIKDFETSIFTGKYPTDIDDGYLENLEEERSDIIKMSKKES

SEQ ID NO: 117768 - protein, 180 aa, Unknown
  Bacterial polypetide isolated from the Sargasso Sea
DVPYREGFVKNRYIGRTFIMPYQEERKKSVRRKLNILDLEFDGKNVLLVDDSIVRGTTSKKIIEMAREAGAKKVFFASAAPAIKYQNLYGIDMPATSELIASNRSDKDVAKEINADWLIYQKLDDLIESVKEGNPEIEEFETSIFTGKYITPLNENYLEDLENTRKDELKIQREKSKASG

SEQ ID NO: 117769 - protein, 220 aa, Unknown
  Bacterial polypetide isolated from the Sargasso Sea
MARIKEECGVFGIFDSRDAAALTALGLHALQHRGQEGCGIVTCDGKNFFAERRLGLVGDNFTKGKVLENLPGKNAIGHNRYSTTGNNLIKNVQPFFADLHSGGIAIAHNGNLSNALHLRKELVKNGSIFQTTSDTETIVQLIAKSKRTKIVDKIIDALFKIQGGYALTILTNNKLIGVRDPFGIRPLVIGKLKNSFVLASETCAFDIIGAKFIREVKNGE

SEQ ID NO: 117770 - protein, 245 aa, Unknown
  Bacterial polypetide isolated from the Sargasso Sea
MQKIKSKKYKPKLSEECGVFGISNTQEASTLTALGLHALQHRGQEGSGIVSYDGKNYHSEKRFGLVGDNFNKEKVLKKLPGKYAIGHNRYSTTGATTLRNVQPFFADTNAGGIAIAHNGNLTNAITLRKKLVEDGAIFYSTSDTETIIQLIAKSKREKKIDKIIDAIFQIQGAYALVFLTQNTLIGVRDPFGIRPLVIGKLNNSYIFASETCALDIIGAKYVREVENGEIVCIENNKLKSIKPFP

SEQ ID NO: 117771 - protein, 281 aa, Unknown
  Bacterial polypetide isolated from the Sargasso Sea
ASALAALGLHALQHRGQEGCGIVSYDGKNYHSEKRQGLVGDHFTDKKILEKLPGNFAIGHNRYSTTGETSYRNIQPFFADLHMGGLSVAHNGNLTNALLLRDNLVKEGAIFRTTSDTETIVQLIAKSIRKKFIDKLIDVLFQIQGGYSLVLLTNKKLVGVRDPFGIRPLVIGKLKNSFILASETCALDIIGANFVREVENGEIIIIENQELKSIKPFPKQKPRPCVFEYIYFARPDSIINNQCAYEYRKKLGIELAKETDIKADFIVPVPDSGVPAALGFA

SEQ ID NO: 117772 - protein, 273 aa, Unknown
  Bacterial polypetide isolated from the Sargasso Sea
MCGIVGIVAHEDVNQNLYDALTVLQHRGQDAAGIMTCAEDRVSLRKSNGMVYDVFRQDHMRRLVGPMGIGHVRYPTAGCNSSAESQPFYVNSPYGIALAHNGNLTNSDELEEELYKSDLRHINTSSDSEVILNVFAHELHKVGQQKLTPEGVFEAVRSVHNRCRGAYAVVAMITGYGIVGFRDPFGIRPLIFGSKKNKDAGRDFMVASESVALVSQGFEVERDVAPGEAVFFDTHNNCHMRQCSDHASLTPCIFEHVYLARPDSIVDEVSVYK

SEQ ID NO: 117773 - protein, 136 aa, Unknown
  Bacterial polypetide isolated from the Sargasso Sea
MQKIKYKNYSPKLKEECGVFGISNSLESSTLTALGLHALQHRGQEGCGIVSYDGKNYHSEKRFGLVGDNFNKEKILKNLPGKFAVGHNRYSTTGGAALRNIQPFFADTNAGGIAISHNGNLTNAITLRNKLVKEGA

SEQ ID NO: 117774 - protein, 288 aa, Unknown
  Bacterial polypetide isolated from the Sargasso Sea
TETIVKLIAKSKRPKKIDKVIDALFQIQGGYALVMMTQNTLIGVRDPYGIRPLVIGKLKNSYVFASETCAFDIIGAKFVREVENGEIVYVENDELKSIKPFPQKKVRPCVFEYIYFSRPDSILNGKTAYEYRKRFGAELAKEDDLDADLVVPVPDSGNAAALGYAEEKKINFDLGLIRNHYVGRTFIEPSQQIRSLGVKLKLNANVSVIKNKKIILVDDSLVRGTTSSKIVKMLYDNGAKEIHVRIASPEIKYPDFYGVDTPTKKELLAAYKTVDEIKEFIKAQSLKF

SEQ ID NO: 117775 - protein, 298 aa, Unknown
  Bacterial polypetide isolated from the Sargasso Sea
MCGLAGIYSSKPVAAELYDSLIHLQHRGQDAAGIITYKTRMHKSKGSGLVRDIFTDKKIANLKGNIGIAHNRYPTHGGFGHGEVQPFWTSVPYGIALAHNGNLTNYNELSKMITNSKTRYLNTHSDTEVLLHLFADLLHKKQQPDNDDDDEFFENLCFAVKKVFEKAQGAYSVVSLIVGKGLVAFRDPHGIRPLVKGVRVNDKGEKEYIIASENTMFYSLGFDPDGSVLPGELIYINQNGKVFKKRITKQKFNPCVFEYVYFARPDASLNDVSVYRSRLRMGQNLAEKWKKNFPNKNP

SEQ ID NO: 117776 - protein, 218 aa, Unknown
  Bacterial polypetide isolated from the Sargasso Sea
VSVIQARQNMGMKLAEKIKKHIPDEDIDVVIPIPESSITSGTKVAECLNKEVIYGFVKNRYIGRTFIMPEQDMRRRSVRRKLNPINDEFKDKNVLLVDDSIVRGTTMKEIVAMCYKAGAKKVSVASSSSEVKFPNVYGIDMPAKSELIASNRSVEEVKEFIGCDNLIYQDLSDLVDSVTELNSELNDVEKSIFTGTYPTNISDEYLEDLEKKRQAINS

SEQ ID NO: 117777 - protein, 161 aa, Unknown
  Bacterial polypetide isolated from the Sargasso Sea
MFLWDKADDKLREECGVFGISGHEEAAAVTALGLHALQHRGQEAAGIVSWDGKRFHSERRVGLVSDHFTKKPIIERIQGQMAMGHVRYSTTGEPALRNVQPLFADLSVGGFAIAHNGNLTNALKLRNELVQSGAIFQSTSDTEVLLQLIARSKSNGVINRF

SEQ ID NO: 117778 - protein, 223 aa, Unknown
  Bacterial polypetide isolated from the Sargasso Sea
MKNYNPKLKEECGVFGISNAKDASALTALGLHALQHRGQEGCGIVTFDGEKYYSEKRFGLVGDNFNKEKVLNNLKGNFAIGHNRYSTTGNNILRNIQPFFADTNAGGIGVAHNGNLTNSISLRNKLVEEGAIFYTTSDTETIVQLIAKSKRPKTIDKVIDAIFQIQGGYALVMLTQNSLIGVRDPYGIRPLVIGKLGNSYVLASETCAFDIIGAKFLREVENR

SEQ ID NO: 117779 - protein, 303 aa, Unknown
  Bacterial polypetide isolated from the Sargasso Sea
HEECAIFGIYGTNEANVNTALGLHALQHRGQEAAGIVTFDGRHFHAHRGLGHVGENFDAGSAEMQALHGHVAIGHNRYSTSGKTNAFMEIQPFSSELAFGGFALAHNGNLTNAARLRASLVDTGSLFQSSSDTEIIVHLVARSHQDTVIDRLIDAIKQIEGAFSLVCIAKDMLIGVRDPHGVRPLVLGKQGDAFVLASETCALDIVGASLVRDVAPGEMVVINENGINSRQPFQPQSHRFCVFEYIYFARPDSVLEGRGVYHARKAIGEELAKEAPADADVVVPVPDSGLPAALGFAGASKIP

SEQ ID NO: 117780 - protein, 188 aa, Unknown
  Bacterial polypetide isolated from the Sargasso Sea
MKNFNPKLKEECGVFGISNIEDASALTALGLHALQHRGQEGCGIVTFDGEQYYSEKRFGLVGDNFNKEKVLKRLKGNYAIGHNRYSTTGSNTLRNIQPFFADTNAGGIGVAHNGNLTNSIHLRKKLVEDGAIFYTTSDTETIVQLIAKSKRVKTIDKVVDAIFQIQGGYALVMLTQKSLIGVRDPHGI

SEQ ID NO: 117781 - protein, 245 aa, Unknown
  Bacterial polypetide isolated from the Sargasso Sea
MNNRLNFFKKFEVRQSHFPRIHEECGVFGISGSKDAAALTALGLHALQHRGQEGCGIVSYDGNSYHSERKFGLVGDNFTKKQSLDKLKGKIAIGHNRYSTTGGETIRNIQPFYADLHGGAISIAHNGNLTNALLLREQMVREGAIFQTTSDTETIVQLVARSKKIEIVDKLIDALLQIQGGFALSIIANGLLIGARDPLGIRPLVLGKLKNAYILASETCALDIIGAKFVREIENGEVVIISGER

SEQ ID NO: 117782 - protein, 289 aa, Unknown
  Bacterial polypetide isolated from the Sargasso Sea
SDTETIVQLIAKSKRLKTIDKIIDAIFQIQGGYALVMLTQNLLVGVRDPYGIRPLVIGKLKNSYVLASETCALDIIGAKFIREVDNGEIVLIENDKLRSIKPFPIKKIRPCVFEYIYFARPDSILNGKTAYEHRKNLGKELAKENDIDADIIVPVPDSGNAAALGFAQHLNKNYEHGLIRNHYVGRTFIEPSQKIRSLGVKLKLNANQTTIENKKIILVDDSLVRGTTSHKIVKMLYDAGAKEVHVRIACPEIKHPDFYGVDTPTKKELLAANKNNDEICEYIGAKSLK

SEQ ID NO: 117783 - protein, 310 aa, Unknown
  Bacterial polypetide isolated from the Sargasso Sea
EGCGIVSYDAISYHSERKFGLVGDNFTKKHSLDKLKGKIAIGHNRYSTTGGETIRNIQPFYADLHGGAISIAHNGNLTNALLLRDQMVREGAIFQTTSDTETIVQLVARSKKKDILNKIIDALMQIQGGYALSIIANGTLMGARDPLGIRPLVLGKFKNAFILASETCALDIIGAKFIREIENGEVVVIKDNKVESRRPFPKKQIKPCVFEYIYFSRPDSILKNKTAYEYRKNLGTYLAKETDIKPDVVVPVPDSGVPAALGFSQESGIPFELGLIRNHYVGRTFIEPTQQIRSLGVKLKLNPNKSSIKK

SEQ ID NO: 117784 - protein, 322 aa, Unknown
  Bacterial polypetide isolated from the Sargasso Sea
SDSEVLLNVFAHELQMVGAIDPSPSDLFQALQGVYKRCHGAFAAVAMIIGTGIVGFRDSFGIRPLVYGFKETDQGMEYMLASESVALDLLGFQKIADVEPGEAVFISNEGEITLQTCAEQTRLNPCIFEHVYFARPDSIIDDVSVYKSRLRMGEYLAQNILSNYSQNSHDIDVVVPVPDTGRTSALPLAHMLDVKFREGFVKNRYIGRTFIMPGQKQRRRSVRHKLATIDLEFKGKNVLIVDDSIVRGTTTKEIIQAAREAGARKVYIASAAPALRYQNVYGIDMPAREEVVAHERTEEEVADIIDADWLGYQSIDDLKSSV

SEQ ID NO: 117785 - protein, 243 aa, Unknown
  Bacterial polypetide isolated from the Sargasso Sea
MIHNGNLTNTRDLEKQLFKIDKRHTNSSSDTEMLLNVFATELQEQIHNQELEPDIIFNAVKSLHKRIQGSYASIALISGHGLLAFRDPFGIRPLVIGKRLSLTTKKEEWMVASESLVLENNDYQVVRDVDPGEAVFINLNGEFFSKQCSEKPMLFPCAFEYVYLARPDSIMNGISVYKARLKMGDYLAETIKKTINTGDVDVVMPIPDSSRPAAMQVARQLGIEYREGFFKNRYVGRTFIMPG

SEQ ID NO: 117786 - protein, 270 aa, Unknown
  Bacterial polypetide isolated from the Sargasso Sea
SDTEMLLNVFATELQEQISNQELEPDIIFDAVKSLHKRIQGSYASIALISGHGLLAFRDPFGIRPLVIGKRLSLTTNKEEWMVASESLVLENNDYQVVRDVDPGEAIFINLNGEFFSKQCSENPMLFPCAFEYVYLARPDSIMNGISVYKARLKMGDHLAETIKEQINSGDVDVVMPIPDSSRPAAMQVARQLGIEYREGFFKNRYVGRTFIMPGQHKRKKSVRQKLNAMSAEFKNKNVLIVDDSIVRGTTSKEIVQMAKDAGANKVYFT

SEQ ID NO: 117787 - protein, 246 aa, Unknown
  Bacterial polypetide isolated from the Sargasso Sea
FASETCALDIIGAKLVREVENGEIVYIEDDELKSLKPFSPQKIRPCIFEYIYFSRPDSILNGKTAYEYRKSFGVQLAKEDNLEADIVVPVPDSGTAAALGYAQEKSIHFDLGLIRNHYVGRTFIEPSQKIRSLGVKLKLNANLSVIKDKKIILIDDSLVRGTTSHKIVKMLYNVGAKEVHVRIASPEIKYPDFYGVDMPTKKELLAADKSVKEICDYINAKSLKYLTIDGLYKAMGFDKRNNIYPQ

SEQ ID NO: 117788 - protein, 130 aa, Unknown
  Bacterial polypetide isolated from the Sargasso Sea
MKNQLNFLKKFEVRQSHFPRINEECGVFGISGSKDAAALTALGLHALQHRGQEGCGIVSYDGNSYHSERKFGLVGDNFTKKQSLEKLKGKIAIGHNRYSTTGGETIRNIQPFYADLHGGAISIAHNGKFN

SEQ ID NO: 117789 - protein, 288 aa, Unknown
  Bacterial polypetide isolated from the Sargasso Sea
KLKKSYVLASETCALDIIGATFVREVENGEIILIEDNKVKSIKPFPPKKVRPCVFEYIYFARPDSILGGISAYEHRKNLGKELAKENDVDADIVVPVPDSGNAAALGFAQYLGKNFEHGLIRNHYVGRTFIEPSQKIRSLGVKLKLNANKTTIKDKNIILIDDSLVRGTTSLKIVKMLYEAGAKEVHVKIACPEIKYPDFYGVDTPTRKELLAANKSNKEICEYIGAKSLKFLSITGMYRAIGFDKRNENYPQLTDHYFTGDYPVKPIDELGDSKITQLSLLSTASNN

SEQ ID NO: 117790 - protein, 317 aa, Unknown
  Bacterial polypetide isolated from the Sargasso Sea
VLRITGNFTNALKLREKLVKEGAIFRTTSDTETIVQLIAKSKRQKMIDKVIDTLFQVQGGYALVMMSNKKLIGARDPLGIRPLVLGKLKNSFVLASETCAFDIIGANFIREIDNGEIIIIENGDLKSIKPFTTKKARPCVFEYVYFSRPDSFINGKCAYEYRKNFGYELAKECDDVGDIVVPVPDSGVPAAIGYSQHKSKSFELGLIRNHYVGRTFIEPKQNIRSFGVKLKLSSNKSSIENKSIILIDDSIVRGTTCSKIVKMLYDGGAKEVHVRISSPPIKYPDFYGIDMPSKKELLAANKNLEQMRTHIGADSLN

SEQ ID NO: 117791 - protein, 275 aa, Unknown
  Bacterial polypetide isolated from the Sargasso Sea
QIQGGYALVMLTQTSLIGVRDPFGIRPLVIGKLKNSYVLASETCALDIIGAKFIREVDNGEIVLIENDQLQSIKPFPTKKIRPCVFEYIYFARPDSILDKKTAYEHRKNLGKELAKENDIDADIIVPVPDSGNAAALGFAQHLGKNFELGLIRNHYVGRTFIEPSQKIRSLGVKLKLNANQSAIKDKKIILIDDSLVRGTTSYKIVKMLYEAGAKEVHVKIACPEIRYPDFYGVDTPTKKELLAANKTNDEICEYIGAKSLKFLSLDGMYKANWI

SEQ ID NO: 117792 - protein, 133 aa, Unknown
  Bacterial polypetide isolated from the Sargasso Sea
MCGIVGISAETNVAAEIYDSLLMLQHRGQDAAGISVCNNDDQLNSRKSMGYVRDVFQQRHMDKLVGNYGIGHVRYPTAGGAGKEFAQPMYVNSPYGISLAHNGNLTNSKQLGTQLFHAEMRHLRTDSDSEVLL

SEQ ID NO: 117793 - protein, 275 aa, Unknown
  Bacterial polypetide isolated from the Sargasso Sea
MKKYKINKIREECGVFGIHDFNDASTITALGLHALQHRGQEGCGIVSFDGKNFHSEKRHGLVGDNFTNKEILKKLPGRSAIGHNRYSTTGETSLRNIQPFFADIYGGGISVAHNGNFTNALKLRDKLVKDGAIFRTTSDTETVVQLIARSKRLKMIDKVVDTLFQVQGGYALVMMSNKKLIGARDPLGIRPLVLGKIKNSFVLASETCAFDIIGAKFIREIENGEVIVIEDNVIKSIKPFTQKKPRPCVFEYVYFSRPDSYLQGKCAYEYRKNLD

SEQ ID NO: 117794 - protein, 314 aa, Unknown
  Bacterial polypetide isolated from the Sargasso Sea
VYNHEDSAALTALGLHALQHRGQEAAGIVTFDGTKFISERHPGLVSDNFTKTSVINRLVGNSAVGHNRYSTTGATIQRNIQPFFADLWGGGFAISHNGNITNALSLRDELIRKGSIFQSTSDTETILQLVARSDADRTLDRLVDALMQISGAWALVVLTNKKLIGARDPFGIRPLVLGELDGGKILASETCALDIIGAKFIREIEPGEIIVITEDGEESIKPFPNARLRPCIFEYIYFSRPDSMLDGKSVYECRKSFGKNLAKECPAKADIVVPVPDSGVPAALGYSEESKIPFELSIIRNHYVGRTFILPTQS

SEQ ID NO: 117795 - protein, 307 aa, Unknown
  Bacterial polypetide isolated from the Sargasso Sea
MCGVVGIISSRPVNQEIYDALTVLQHRGQDSAGIMTDNNGVLCLRKSNGLVNDVFSNEHMTRLRGNMGIGHVRYPTAGTLSSSEAQPFYVNSPFGICLAHNGNLVNNEELRKHLSEVDRRHLNTESDTEALLNLFAHELQENFDGSLSPEIIFKAATHLFDKCSGGYAVVSMILNEGLVAMRDPNGIRPLILGKREVGQGTEYMIASESVALDIADFEIMRDVKPGEVIYITKEGELFSKQCVKPKSYTPCIFEFVYFARPDSIIDGMSVYKSRLRMGEYLAQRIIKKGLHHDVDVVIPIPDTSRST

SEQ ID NO: 117796 - protein, 278 aa, Unknown
  Bacterial polypetide isolated from the Sargasso Sea
DKIIDAIFHIQGGYALVMMTKNTLIGLRDPYGIRPLVIGKLKNSYVFASETCALDIIGAKFVREVENGEIVYVENDELKSLKPFSPKKVRPCVFEYIYFSRPDSILNGKTAYEYRKNYGIQLAKEDDIEADIVVPVPDSGNAAALGYAQEKKLSFDLGLIRNHYVGRTFIEPSQKIRSLGVKLKLNANLSVIKDKKIILIDDSLVRGTTSHKIVKMLYNAGAKDVHVRIASPEIKFPDFYGVDMPTKKELLAANNSVKEICNFINAKSLKYLSIDGLY

SEQ ID NO: 117797 - protein, 221 aa, Unknown
  Bacterial polypetide isolated from the Sargasso Sea
GVRDPFGIRPLIIGKLKNSYIFASETCALDIVGANFIREVENGEIVIIENNEMKSIKPFPKQRSRPCIFEYIYFARPDSLINGKCAYEYRKKLGSELAKETDINADLVVPVPDSGVPAALGYAEQSKKKFELGLIRNHYVGRTFIEPSQNIRSLGVKLKLSSTKSIVKNKSIILIDDSLVRGTTCHKIVKMLYEAGANEVHVRIACPEIKFPDFYGVDMPT

SEQ ID NO: 117798 - protein, 277 aa, Unknown
  Bacterial polypetide isolated from the Sargasso Sea
GLVREVFSQNHFERLRGNYGIGHVRYPTAGGNTKEYAQPMYVNSPYGISLAHNGNLSNTPDLAKELFHSDLRHISTDSDSEVLLNILAHEISKHKEKDPSPEIFFEAISNTFLRCEGSISVVSIITDYGLLAFRDKLGIRPLILGSRENESGGLDYMVASESAAFHSNGFKIKRDIAPGEAVFITFDGQLFSNQCEEEPKLTPCLFEFVYFARPDSIIDGVSVYEARQNMGERLAKKIKSEIPLDDIDVVMPIPESSIVSGTKVAEYLDKQIAYGFV

SEQ ID NO: 117799 - protein, 254 aa, Unknown
  Bacterial polypetide isolated from the Sargasso Sea
MKEIREECGIFGIYDSEDASTLTALGLHALQHRGQEGCGIVSFDGKNFHSEKRNGLVGDNFTNKEVLKKLPGNSAIGHNRYSTTGESSFRNIQPFFADLYGGGISIAHNGNLTNAIQLRENLVKDGAIFRTTTDTETIVQLIAKSSRSEVVDKIIDTLFQIQGGYALVIMTNKKLIGVRDPLGIRPLVLGKLKGSYILASETCALDIIGAKFIREIENGEIIIIEKESFKSLNPFPKKKSRPCIFEYIYFSRPE

SEQ ID NO: 117800 - protein, 229 aa, Unknown
  Bacterial polypetide isolated from the Sargasso Sea
GGIGVAHNGNLTNSISLRNKLVEDGAIFYTTSDTETIVQLIAKSKRPKTIDKVVDAIFQIQGGYALVMLTQNSLIGVRDPYGIRPLVIGKLGKSYVLASETCALDIIGAKFLREVENGEIVFIENNELTSIKPFPPKKVRPCVFEYIYFARPDSLINNKTAYEHRKNLGKELANENNIDADIVVPVPDSGNAAALGFSQKLKINFEHGLIRNHYVGRTFIEPSQKIRSL

SEQ ID NO: 117801 - protein, 192 aa, Unknown
  Bacterial polypetide isolated from the Sargasso Sea
MCGIVGISAETNVAAEIYDALLMLQHRGQDAAGISVCSSEDQLNSRKSMGYVRDVFQQRHMEKLVGNYGIGHVRYPTAGGAGKEFAQPMYVNSPYGISLAHNGNLTNSKQLATQLFHAEMRHLQTDSDSEVLLNIFAHELGKQREIYPSAEHIFKAVAKTHIRCDGAYAVLALISGYGMLAFRDNNGIRPLS

SEQ ID NO: 117802 - protein, 158 aa, Unknown
  Bacterial polypetide isolated from the Sargasso Sea
MCGIVAVYGTNNVVRDIYESLTVLQHRGQDASGILTNHDGKITLRKSLGLVRDGFDAKHITRLKGKLGIGHVRYPTAGHADSSAEAQPFYVNSPYGIGLAHNGNLINSTDLKKNLFSEDLRHINTKSDSEILLNIFAHELHLHSKESFTPDDVFYAVA

SEQ ID NO: 117803 - protein, 263 aa, Unknown
  Bacterial polypetide isolated from the Sargasso Sea
NFQMKKTTMMLKKKFKNFNTKIKEECGVFGISNNNDAAALTALGLHALQHRGQEGCGIVSFDGKKYHSEKRFGLVGDNFNKEKVLKKLSGNYAVGHNRYSTTGGTTLRNIQPFYADTNAGGISISHNGNLTNAITLRSKLVKDGAIFYTTSDTETIVQLIAKSKRQKTIDKIIDALFQIQGGYALVMLTQKTLIGVRDPFGIRPLVVGKIKNSYVLASETCALDIIGAKYIRDVENGEIVFIEDDKLERIKPFPKKKQRPCVL

SEQ ID NO: 117804 - protein, 287 aa, Unknown
  Bacterial polypetide isolated from the Sargasso Sea
VRDPYGIRPLLIGKMESSYVLASETCALDIIGANFLREVQNGEIVLIENNQLISIKPFPPRKVRPCVFEYIYFARPDSLIDNKTAYEHRKNLGVELAKENNINADIVVPVPDSGNAAALGFSQNLKINFEHGLIRNHYVGRTFIEPSQKIRSLGVKLKLNANQTTIKNKKIILIDDSLVRGTTSHKIVKMLYDAGAKEVHVRIACPEIRYPDFYGVDTPTKKELLAANKSNDEICQYIGAKSLKFLSIDGMYRAIGFDKRNDTYPQLTDHYFTGDYPVKPVDELGDS

SEQ ID NO: 117805 - protein, 269 aa, Unknown
  Bacterial polypetide isolated from the Sargasso Sea
MKEECGIFGISNAKDASALTALGLHALQHRGQEGCGIVTFNGKQYFSEKRFGLVGDNFNKEKLLNKLQGDYAIGHNRYSTTGENALRNIQPFFADTNAGGVGVAHNGNLTNSISLRKKLVEDGAIFYTTSDTETIVQLIAKSKRIKTIDKVVDAIFQIQGGYALVLLTQTSLIGVRDPFGIRPLVIGKLKNSYVFASETCALDIIGAKFIREVENGEIVLIENDELKSIKPFPPKKIRPCVFEYIYFARPDSILNKKTAYEHRKNLEQS

SEQ ID NO: 117806 - protein, 162 aa, Unknown
  Bacterial polypetide isolated from the Sargasso Sea
MCGIVGIVGQSSVNQTIYDALTVLQHRGQDAAGIVTVDRGAFRLRKANGLVKDVFEVKHMQRLQGNAGIGHVRYPTAGSSSASEAQPFYVNSPFGISLAHNGNLTNTVELAEGLIKKRRHVNTTSDSEVLLNLLADELQKTTSLMLTPDEVFDTIAKVHEQA

SEQ ID NO: 117807 - protein, 254 aa, Unknown
  Bacterial polypetide isolated from the Sargasso Sea
VGVFSADEPVTRIAFFGLFALQHRGQESAGFASWDGTELRIKTAMGLVAQGFTEDQISLLPGYSAIGHTRYSTTGSSHSKNAQPIRSKGPNGEIALAHNGNVVNSVELRRELIDWGCNFETSNDSEIIAHMLTYLPGSDWGQRCSSLMRRLSGAYSLTVLTKEGVMAIRDPLGVRPLCIGSLGKGWVIASETCALDHVGAKFIREVMPGEAIMVNSDGIKTIYQKPSNGRAASCIFENIYFARPDSSLDGKLVY

SEQ ID NO: 117808 - protein, 281 aa, Unknown
  Bacterial polypetide isolated from the Sargasso Sea
FASETCALDIVGANFIREVENGEIVIIEGNQISCIKPFPKLKSRPCVFEYIYFARPDSLINGKCAYEYRKNLGFELAKETNLKADLVVPVPDSGVPAALGFAEQSKKKFELGLIRNHYVGRTFIEPTQNIRSLGVKLKLNSTKSLVENKSIILIDDSLVRGTTCHKIVTMLYENGAKEVHVRIACPEIKYPDFYGVDMPTKEELLAYKKNNDEMCKYINAKSLKFLSLEGLYRALTGQKRNNIYPQFSDHYFTGDYPIKPSDNLHGLKIKQLSLLSGKSNN

SEQ ID NO: 117809 - protein, 218 aa, Unknown
  Bacterial polypetide isolated from the Sargasso Sea
MRNFDPRLKEECGVFGIANAKDASALTALGLHALQHRGQEGCGIVTFNGEQYFSEKRFGLVGDNFNKEKVLKKLPGSYAIGHNRYSTTGENTLRNIQPFFADTNAGGIGVAHNGNLTNSISLRKKLVADGAIFYTTSDTETIVQLIAKSKRAKTIDKIVDAIFQIQGGYALVMLTQNSLVGVRDPYGIRPLVIGKLKNSYVLTSETCALDINGAKFVR

SEQ ID NO: 117810 - protein, 251 aa, Unknown
  Bacterial polypetide isolated from the Sargasso Sea
KLKSIKPFPEKKIRPCVFEYIYFARPDSILNKKTAYEHRKNLGKELAKENDIDADIIVPVPDSGNAAALGFAQHLGKNYEHGLIRNHYVGRTFIEPSQKIRSLGVKLKLNANQTTIENKKIILVDDSLVRGTTSHKIVKMLYDAGAKEIHVRIACPEIRYPDFYGVDTPTKKELLAANKNNDEICEYIGAKSLKFLSIQGMYKAIGFDKRNENYPQLTDHYFTGDYPVKPIDELGDSKITQLSLLSTASNN

SEQ ID NO: 117811 - protein, 260 aa, Unknown
  Bacterial polypetide isolated from the Sargasso Sea
VKLIAKSKRIKTIDKIIDAIFQIQGGYALVMMTQNTLIGVRDPYGIRPLVIGKLKNSYVFASETCAFDIIGAKFVREVENGEIVYIENDELKSIKPFPPKKVRPCVFEYIYFSRPDSILNGKTAYEYRKNFGAQLANEDNINADLVVPVPDSGNAAALGYAEKKGLKFDLGLIRNHYVGRTFIEPSQQIRSLGVKLKLNPNISVIKDKRIILVDDSLVRGTTSSKIVKMLYDSGAKEIHVRIASPEIKFPDFYGVDTPTK

SEQ ID NO: 117812 - protein, 315 aa, Unknown
  Bacterial polypetide isolated from the Sargasso Sea
FFQSTSDTETILQLVAQSERKQIVDKLIDALFQIHGAYSLVILTNKKLIGVRDPYGIRPLVLGDLNGAPVLASETCALDIIGAKFIREIENGEIIIISEKGMESIRPFPKVAERPCIFERIYFSRPDSMLGGNTVYSYRKNLGIELAKEHQVDADIVVPVPDSGVPAALGYAQQSNTPFELGIIRNHYVGRTFIEPSQSIRQFGVKLKHNANVSYIKNKKVILIDDSIVRGTTAKKIIKMIYDAGAKEVHLGIACPPIKHPDFYGIDTPDYNELIASKNSIEEINKAIGSKSLFFLSLEGTYQAMGYDSKKYRST

SEQ ID NO: 117813 - protein, 244 aa, Unknown
  Bacterial polypetide isolated from the Sargasso Sea
MCGIVGIVQKDNCFTELYDSLIMLQHRGQDAAGITVCENGRLHSRKAKGLVKEVFSQQHFERLKGNYGIGHVRYPTAGGNSKEYAQPMYVNSPYGISLAHNGNLSNTSDLAEELFHSDLRHISTDSDSEVLLNILAHEISKRGKNEPSPDTFFDAVEMTFQRCEGSINVVSIITDYGLLAFRDKFGIRPLTLGWRQNSDGSNDYMVASESCAFASSGYELKRDIKPGEAIFITFDGELYSRMCS

SEQ ID NO: 117814 - protein, 265 aa, Unknown
  Bacterial polypetide isolated from the Sargasso Sea
MLFFNSRWILTCNDDTEYFIGVRDPYGIRPLVIGKLKNSYVLASETCAFDIIGAKFVREVENGEIVYIENDELKSIKPFPPKKIRPCVFEYIYFSRPDSILNGKTAYEYRKNFGQQLAKEDKIEADLVVPVPDSGNAAALGYAEEKGLKFDLGLIRNHYVGRTFIEPSQQIRSLGVKLKLNPNISVIKNKRIILVDDSLVRGTTSSKIVKMLYDSGAKEVHVRIASPEIKFPDFYGVDTPTKKELLAANKSTAEICEFIRAKSLK

SEQ ID NO: 117815 - protein, 288 aa, Unknown
  Bacterial polypetide isolated from the Sargasso Sea
MCGIVGISAETNVAAEIYDALLMLQHRGQDAAGISVCSAADQLNSRKSMGYVRDVFQQRHMEKLEGNYGIGHVRYPTAGGAGKEFAQPMYVNSPYGISLAHNGNLTNSKQLGNELFHAEMRHLQTDSDSEVLLNIFAHELGKQREIYPSAEHIFKAVAKTHIRCDGAYAVLALISGYGMLAFRDDNGIRPLSIGVRKGKTRNDYIISSEDALFTPLGYEKLRDVDPGEAVFIDKHGELFSQQCSDDPQKRPCIFEYVYFSRPDSKIDEISVYKARMRMGTKLAGQIKK

SEQ ID NO: 117816 - protein, 198 aa, Unknown
  Bacterial polypetide isolated from the Sargasso Sea
MKNRQNFLKKFEVRQSHVPRFNEECGVFGISGTKDAAALTALGLHALQHRGQEGCGIVSYDGNSYHSERKFGLVGDNFTKKQSLDKLKGKIAIGHNRYSTTGGETIRNIQPFYADLHGGAISIAHNGNLTNALLLREQMVREGAIFQTTSDTETIVQLVARSKKKDILNKIIDALMQIQGGYALSIIANGTLIGARDP

SEQ ID NO: 117817 - protein, 311 aa, Unknown
  Bacterial polypetide isolated from the Sargasso Sea
FFRNSSHFLLICTWGGLSVAHNGNLTNALLLRESLVKEGAIFRTTSDTETIVQLIAKSKRDKFLDRLIDALFQIQGGYALILMTNKKLVGVRDPIGIRPLVIGKLKDSYIFASETCALDIVGATFVREVENGEIVIIENNNLKSVKPFPNQKPRPCIFEYIYFARPDSLINGECAYEYRKRLGAELAKETDLKADLVIPVPDSGVPAALGYAEQSKRRFELGLIRNHYVGRTFIEPTQNIRSLGVKLKLSPTKTTVKNKSIILIDDSLVRGTTCHKIVKMLYESGAREIHVRIACPEIRFPDFYGVDMPTK

SEQ ID NO: 117818 - protein, 319 aa, Unknown
  Bacterial polypetide isolated from the Sargasso Sea
TDSDSEVLLNIFAHELGKQREIYPNAKNIFKAVSKTHLRCDGAYAVIALITGHGLIAFRDNNGIRPLSIGIRKGKTRDEYILASEDALFSSLGFTKLRDVDPGEAVFIDKNGELFTQQCSDNPQKRPCIFEYVYFSRPDSKIDEISVYKARMRMGKKLAKQISNQKSDHDIDVVIPIPDSSSIAAHQLAVSLDIPYREGFVKNRYIGRTFIMPYQEERKKSVRRKLNILDEEFQGKNVLLVDDSIVRGTTSKKIIEMARDAGANKVYFASAAPAIKYQNLYGIDMPATSELIASNRSDEEVAAEIDADWLIYQTLEDLI

SEQ ID NO: 117819 - protein, 309 aa, Unknown
  Bacterial polypetide isolated from the Sargasso Sea
TRLGPFAFAHNGNLVNAAELRDKLDDGQTEFTSTTDSELIAFAIQQAVNRGLDWKPAIIEAAAMCRGAFSLVIGTVDALYALRDSYGVRPLVFGRLGDAESGHWVVSSESCGLDIIGAAFEADVEPGELITFRLGDTEPQREQWAEPSTRMCVFEMIYFARPDSRFFGESLYSYRQRIGQILARESGVEADLVIGVPDSGIPAAIGFSQASGITFADGLIKNRYVGRTFIQPTQAMREAGIRVKLNPLPDVLAGKRVVVIDDSIVRGTTSRKLVQALRDAGATEVHMRISSPPVTHPCFYGIDTDTQDQ

SEQ ID NO: 117820 - protein, 320 aa, Unknown
  Bacterial polypetide isolated from the Sargasso Sea
GIISSRPVNQEIYDALTVLQHRGQDSAGIMTDNNGVLCLRKSNGLVNDVFSNEHMTRLRGNMGIGHVRYPTAGTLSSSEAQPFYVNSPFGICLAHNGNLVNNEELRKHLSEVDRRHLNTESDTEALLNLFAHELQENFDGSLSPEIIFKAATHLFDKCSGGYAVVSMILNEGLVAMRDPNGIRPLILGKREVGQGTEYMIASESVALDIADFEIMRDVKPGEVIYITKEGELFSKQCVKPKSYTPCIFEFVYFARPDSIIDGMSVYKSRLRMGEYLAQRIIKKGLHHDVDVVIPIPDTSRSTALQVGHHLGVNTEKASLE

SEQ ID NO: 117821 - protein, 169 aa, Unknown
  Bacterial polypetide isolated from the Sargasso Sea
MKALKTNRKSPFIKDDKLHEECGVFGVYNHEDSAALTALGLHALQHRGQEAAGIVTFDGTKFISERHPGLVSDNFTKTSVINRLVGDSAVGHNRYSTTGATIQRNIQPFFADLWGGGFAIAHNGNITNALSLRDELIRKGSIFQSTSDTETILQLVARSNADRTLDRLV

SEQ ID NO: 117822 - protein, 304 aa, Unknown
  Bacterial polypetide isolated from the Sargasso Sea
FGISNAKDASALTALGLHALQHRGQEGCGIVSFDGEKYYSEKRFGLVGDNFNKEKVLNNLKGNYAIGHNRYSTTGNNTLRNIQPFFADTNAGGIGVSHNGNLTNSISLRKKLVEEGAIFYTTSDTETIVQLIAKSKRSKTIDKVIDAIFQIQGGYALVMLTQNSLIGVRDPYGIRPLLIGKLGSSYVLASETCALDIIGANVVREVENGEIVLIENNQLTSIKPFPPKKVRPCVFEYIYFARPDSLLDDKTAYEHRKNLGKELAKENDIDADIVVPVPDSGNAAALGFSQKHKMNFEHGLIRTI

SEQ ID NO: 117823 - protein, 117 aa, Unknown
  Bacterial polypetide isolated from the Sargasso Sea
MRIYNPKLKEECGVFGISNIKDASALTALGLHSLQHRGQEGCGIVTFDGKKYYSEKRFGLVGDNFNKQKVLDYLKGNFAIGHNRYSTTGNNTLRNIQPFFADTNAGGIGVAHNGNLT

SEQ ID NO: 117824 - protein, 188 aa, Unknown
  Bacterial polypetide isolated from the Sargasso Sea
TTAALQLAAALKLPYRQGFVKNRYVGRTFIMPNQEERKKSVRRKLNILDLEFKDKNVLLVDDSIVRGTTSKRIIEMAKEAGAKKVYFSSAAPPVKFQNLYGIDMAATNELIASGKTDEEVAKAIGADWLIYQDLKDLIDSAREGNPAIENFEISIFDGKYPTSISSDYLEDLEVTRGDETKVAREKSS

SEQ ID NO: 117825 - protein, 195 aa, Unknown
  Bacterial polypetide isolated from the Sargasso Sea
EHVYFARPDSIIDDVSVYKSRLRMGEYLAQNILSNYSQNSHDIDVVVPVPDTGRTSALPLAHMLDVKFREGFVKNRYIGRTFIMPGQKQRRRSVRQKLATIDLEFKGKNVLIVDDSIVRGTTTKEIIQAAREAGARKVYIASAAPALRYQNVYGIDMPAREELVAHERTEEEVADIIDADWLVYQSIDDLKASVH

SEQ ID NO: 117826 - protein, 117 aa, Unknown
  Bacterial polypetide isolated from the Sargasso Sea
MKALKTNRKSPFIKDDKLHEECGVFGVYNHEDSAALTALGLHALQHRGQEAAGIVTFDGTKFISERHPGLVSDNFTKMSVINRLVGNSAVGHNRYSTTGATIQRNIQPFFADLWGGG

SEQ ID NO: 117827 - protein, 240 aa, Unknown
  Bacterial polypetide isolated from the Sargasso Sea
LKTLDKIVDAIFQIQGGYALVMLTQTSLIGVRDPFGIRPLVIGKLKNSYVLASETCALDIIGAKFIREVDNGEIVLIENDELKSIKPFPPKKIRPCVFEYIYFARPDSILNGKTAYEHRKNLGAELAKENNINADIVVPVPDSGNAAALGFAQHLGMNFELGLVRNHYVGRTFIEPSQKIRSLGVKLKLNANKSTIKDKKIILVDDSLVRGTTSYKIVKMLYDAGAKEVHVKIACPEIKY

SEQ ID NO: 117828 - protein, 294 aa, Unknown
  Bacterial polypetide isolated from the Sargasso Sea
SLQHRGQESAGIATSDGSLIYEHKDLGLINQVFDEDKILKLKGNISIGHTRYSTTGSNNYNNSQPIKVSGVNGDLLIGHNGNLINTEEIMQILDSWGISTFNTTSDSELIALMYVNAPGSNWGEKSKYCMGRLKGAYSIVMLNKDSLICVRDPNGFRPLVLGKYREGFIVASETCALDHVGASFIRDIQPGETIVISKNELNSSLVSNNAKKSLCSFEQIYLSRPDSILDGELTYSRRMKMGEILANEQPASADLVIDVPDSATAAAVGYANRSGIPYVSGLIKNRYVGRTFIS

SEQ ID NO: 117829 - protein, 205 aa, Unknown
  Bacterial polypetide isolated from the Sargasso Sea
DHDIDVVIPIPDSSVTAAHQLAVDLQVPYREGFVKNRYIGRTFIMPYQEERRKSVRRKLNILDLEFDGKNVLLVDDSIVRGTTSKKIIEMAREAGANKVYFASAAPAIKYQNLYGIDMPATAELIASNKSNDQVAKEINADWLIYQTLDDLIDSVREGNPEIKEFETSIFTGKYFTPLVENYLEELEISRKDELKMQREKTKAKG

SEQ ID NO: 117830 - protein, 303 aa, Unknown
  Bacterial polypetide isolated from the Sargasso Sea
MVEYFGISNYNDASALTALGLHALQHRGQEGCGIVSFDEKKYYSEKRYGLVGDNFNKEKVLKKLPGNFAIGHNRYSTTGGTTLRNIQPFFADTNAGGIGVAHNGNLTNALTIRKKLVKEGAIFYSTSDTEVIIQLIAKSKRPTTIEKIIDAIFQIQGGYALVMLAQNKLVGARDPLGIRPLVIGKIKNSYVLASETCALDIIGAKFLREVENGEIIVIENDELKSIKPFPPKKPRPCIFEYIYFSRPDSILNGKTAYEFRKKFGEQLATEDDIGADIVVPVPDSGNAAALGYSQKTKINFDLG

SEQ ID NO: 117831 - protein, 208 aa, Unknown
  Bacterial polypetide isolated from the Sargasso Sea
YMGKFLAKESNTKGDIVIPVPDSGVPAALGYAEESNTPFDLGIIRNHYVGRTFIEPTQKIRQLGIKLKHNPNKKLIKGKKVILIDDSIVRGTTAIKIIEMLKDADAAEIHMKISSPPIKYPDYYGIDTPSKDELIAAYSSIDDIKKKLGLNSLQFLSINGLYKAMGHSKRNNDNPQYTDHCFTGNYPTELVDRDSGNLSKQLSLLNDY

SEQ ID NO: 117832 - protein, 135 aa, Unknown
  Bacterial polypetide isolated from the Sargasso Sea
MKKHIKILKKKLKNYNPRLKEECGVFGISNAKDASALTALGLHALQHRGQEGCGIVTFDGEKYYSEKRFGLVGDNFNKEKVLNNLKGNYAIGHNRYSTTGNNILRNIQPFFADTNAGGIGVAHNGNLTNSISLRN

SEQ ID NO: 117833 - protein, 243 aa, Unknown
  Bacterial polypetide isolated from the Sargasso Sea
MKNFDPKLKEECGVFGVSNATDASALTALGLHALQHRGQEGCGIVTFDGEKYYSEKRFGLVGDNFNKEKVLKKLRGNYAIGHNRYSTTGENTLRNIQPFFADTNAGGIGVAHNGNLTNSISLRNKLVEDGAIFYTTSDTETIVQLIAKSKRPKTIDKVVDAIFQIQGGYALVMLTQNSLIGVRDPYGIRPLVIGKLGKSYVLASETCALDIIGAKFVRDVENGEIVLIENDELKSIKPFPPKK

SEQ ID NO: 117834 - protein, 261 aa, Unknown
  Bacterial polypetide isolated from the Sargasso Sea
QAKKNMKMLKKKFQIYNPKLKEECAVFGISDNSDASTLTALGLHALQHRGQEGCGIVSFDGKKYHSEKRFGLVGDNFSKEKVIKTLPGRFAIGHNRYSTTGGTTLRNIQPFFADTNAGGIGVSHNGNLTNAIKLRTKMVEEGSIFYTTSDTETIVKLIARSKRSKTVDRVIDALFQIQGGYALVVLTQNILIGARDPFGIRPLVVGKLKNSYVLASETCALDIIGAKYIRDVENGEIVCIEDGKLQSIKPFPQKKIRPCVL

SEQ ID NO: 117835 - protein, 280 aa, Unknown
  Bacterial polypetide isolated from the Sargasso Sea
TLTALGLHALQHRGQEGCGIVSFDGKKYHSEKRFGLVGDSFNKEKVLKSLPGNHAIGHNRYSTTGGTTLRNIQPFFADTNTGGIGVSHNGNLTNAITLRKKLVEDGAIFYTTSDTETIVQLIARSKRVKTIDKIVDALFQIQGGYSLVMLTQNTLIGVRDPFGIRPLVIGKLNNSYVFASETCALDIIGAKYIRDVENGEIVSIQDDTLVSIKPFPVKKIRPCVFEYIYFSRPDSLLNGKCAYEYRKNFGAELAKENSLKADLVVPVPDSGNAAAIGFSH

SEQ ID NO: 117836 - protein, 287 aa, Unknown
  Bacterial polypetide isolated from the Sargasso Sea
TSLVGVRDPFGIRPLVIGKLKNSYVLASETCALDIIGAKFIREVENGEIVLIENNELKSIKPFPPRKVRPCVFEYIYFARPDSMLDGKTAYEHRKNLGSELAKENDIDADIVVPVPDSGNAAALGFAQSLNVKFELGLVRNHYVGRTFIEPSQKIRSLGVKLKLNANQSTIQGKKIILVDDSLVRGTTSHKIVKMLYDAGAKEVHVRIACPEIKFPDFYGVDTPTKKELLAANKSNSEICEYIGAKSLKFLSVNGMYRAIGFDGRNESYPQLTDHYFTGDYPVKPID

SEQ ID NO: 117837 - protein, 251 aa, Unknown
  Bacterial polypetide isolated from the Sargasso Sea
MNNKLNFLKKFEVRQSHFPRINEECGVFGISGSKDAAALTALGLHALQHRGQEGCGIVSYDGNSYHSERKFGLVGDNFTKKQSLEKLKGKIAIGHNRYSTTGGETIRNIQPFYADLHGGAISIAHNGNLTNALLLREQMVREGAIFQTTSDTETIVQLVARSKKIEIVDKLIDALLQIQGGFALSIIANGLLIGARDPLGIRPLVLGKLKNAYILASETCALDIIGAKFVREIENGEVVIISGRKIISRRL

SEQ ID NO: 117838 - protein, 282 aa, Unknown
  Bacterial polypetide isolated from the Sargasso Sea
DTETIVQLIAKSKRDNTIDKIVDALFQIQGGYALVMLTQNILIGVRDPFGIRPLVIGKLKNSYVFASETCALDIIGAKYIRDVENGEIVYIENNNLKSIKPFPAKKIRPCVFEYIYFSRPDSILNGKCAYEYRKNFGKELAKETKVDADLIVPVPDSGNAAAIGYSQHVGKEFELGLIRNHYVGRTFIEPSQKIRSLGVKLKLNANKSSIKNKRIILVDDSLVRGTTSHKIVQMLYDAGAKEVHVRIASPEIKFPDFYGVDTPTKKELLASNKTNDEICKYI

SEQ ID NO: 117839 - protein, 285 aa, Unknown
  Bacterial polypetide isolated from the Sargasso Sea
ELQELGADRPDAEQIFKAVEEVHRRCSGGYAGIALIMGAGIVGFRDPLGIRPLIYGKKETATGIDYMLASESVALDALGYQRIRDVKPGEAVFISNNGEISTAICADKTRLIPCIFEYVYLARPDSIIDQVSVYKARLRMGEHLGKRIMERFPANDHDIDVVVPIPDTGRTAALPLAHQLNVKYREGFVKNRYIGRTFIMPGQSERKRSVRQKFNSIGLELKGKNVLLVDDSIVRGTTIKQIIQMARDAGARKVYLASAAPPVRYPNVYGIDMPSVNEFVANNKS

SEQ ID NO: 117840 - protein, 229 aa, Unknown
  Bacterial polypetide isolated from the Sargasso Sea
MQKKKFKSYSPKLKEECGVFGISNSEDASALTALGLHALQHRGQEGCGIVSYDGKKYYSEKRYGLVGDNFNNEKVLKKLPGKFAIGHNRYSTTGGTTLRNIQPFFADTHAGGIGVAHNGNLTNALTIRKKLVKDGAIFYSTSDTEVIIQLIAKSKRSTTEEKITDAIFQIQGGYALVLLAQNKLIGVRDPLGIRPLVIGKIKNSYVLASETCALDIIGAKFLREVKMER

SEQ ID NO: 117841 - protein, 254 aa, Unknown
  Bacterial polypetide isolated from the Sargasso Sea
WDIIGANFIREVENGEVVVITKDEVKSYHPFPEKPRRHCIFEYIYFARPDSVVDGHSVYECRKSCGRELASESHVQADMVIPVPDSGVPAAIGYAEESQIPFELGITRNHYVGRTFIEPKQSIRSFSVKLKHNANRALVEGKRIVLVDDSIVRGTTSVKIVQMMRDAGALEVHMRIAAPPITHPDFYGIDTPSKDQLLAANMDLEEMCKHLGADSLAFLTVDGLYRALGHPEGRNPELPQYTDHCFTGDYPTSL

SEQ ID NO: 117842 - protein, 262 aa, Unknown
  Bacterial polypetide isolated from the Sargasso Sea
ITETLFKIQGGYALVILTNKKLIGIRDPLGIRPLVIGKLGNSYIFASETCALDIVDAKFVREVENGEIVVVENNEIKSFKPFNKIKSRPCVFEYIYFARPDSILGGECAYEYRKRLGEQLAKESRVEADIIVPVPDSGVPAAIGYSQSSKIKFELGLIRNHYVGRTFIEPTQNIRSFGVKLKLSSTKSILKNKSIVLIDDSLVRGTTCNKIVKMLYKAGAKEVHVRIACPEIKYPDFYGVDMPTKKELLSSNKTKAEICDFL

SEQ ID NO: 117843 - protein, 282 aa, Unknown
  Bacterial polypetide isolated from the Sargasso Sea
GEVIYITKEGEFFSKQCVKPKSYTPCIFEFVYFARPDSIIDGMSVYKSRLRMGEYLAQRIIKKGLHHDVDVVIPIPDTSRSTALQVAHHLGVKYREGFIKNRYIGRTFIMPGQEIRKKSVKQKLNPIDLEIRDKNVLLIDDSIVRGTTSKKIIQMARNAGANKVFFASAAPPVKYPNVYGIDMPSTAELLASNRTEEELARYIGADWLIYQDLDDLISAVQFDESDAEAFDTSCFSGEYVTGDVTPNYLDFIENKRNDAAKAKKEIERKQIEIHDQSSMTVS

SEQ ID NO: 117844 - protein, 308 aa, Unknown
  Bacterial polypetide isolated from the Sargasso Sea
SNFHMHKANGMVRDVFRTRNMRSLPGTTGIGQVRYPTAGSASSEEEAQPFYVNAPFGIILAHNGNLTNWQQLKDEMFRIDRRHINTNSDTEVMLNVLAHELQLSSSSLQLDPAALFKAVSGVHRRVRGSYAIVSLIAGYGLLGFRDPFGIRPLCLGKQETPEGVEWILASESVAIEGIGFEFVRDIAPGEAIFIDLEGNLHSQQCATNPSLNPCIFELVYLARPDSVLDGVPVYNVRLRMGDYLAEKIKRELPDVEIDVVMPIPDSSRPAAMQVAKKLGVEYREGFFKNRYVGRTFIMPGQAMRKKSV

SEQ ID NO: 117845 - protein, 277 aa, Unknown
  Bacterial polypetide isolated from the Sargasso Sea
VVLMTRLGAFALAHNGNLVNARELRELVDDGQAEFTSTTDSELIAFAVQQAVDRGLDWSDAIEAALKLCRGAFSLAIGTPDGLFAVRDGHGIRPLVFGTLGDPATGHWVVSSETCGLEIIGARYVDDVQPGELVRFELGSAEPQRRRWSEEPNRLCVFEMIYFARPDSQFFGESLYSYRQRIGRTLACESCVEADLVIGVPDSGIPAAIGFSQESGIPYGDGLIKNRYVGRTFIQPTQAMREAGIRVKLNPLPDVLAGKRLIVIDDSIVRGHTSRKL

SEQ ID NO: 117846 - protein, 278 aa, Unknown
  Bacterial polypetide isolated from the Sargasso Sea
LTNKKLIGVRDPFGIRPLVLGEKDGSPVLASETCALDMIGAKYIRDVENGEIIIITDSGIESIKPFKRVSERPCIFERIYFASPDSIVGKKTVYTYRKALGEQLANENSIIADVVVPIPDSGVSAAIGFSQKSLIPFELGIIRSHYVGRTFIEPSQTIRQFGVKLKHSVNKSCIQNKKVILIDDSIVRGTTASKIVKMVYEAGAKEVHLGISCPPIMHPDFYGIDTPNYNELIASQSDLSEMTKLVGAKSLFFLSLAGTYKAMGCEKRNSKTPQFTDH

SEQ ID NO: 117847 - protein, 285 aa, Unknown
  Bacterial polypetide isolated from the Sargasso Sea
DSYVFASETCALDIIGAKYIRDVENGEIVYVENKKLISLKPFPLKKIRPCVFEYIYFSRPDSILNGKCAYEYRKNFGVELAKETSIDADLVVPVPDSGNAAAIGYSQHEKINFDLGLIRNHYVGRTFIEPAQKIRSLGVRLKLNANKSTIKNKKIVLVDDSLVRGTTSHKIVKMLYDFGAKEVHVRIASPEIRFPDFYGVDTPTKKELLAANKTNEEICKYIDAKSLKFLSVDGLYRAMGYEKRNSTYPQLTDHYFTGDYPVKLIDDLGDNKVTQLSLLSTKSNN

SEQ ID NO: 117848 - protein, 248 aa, Unknown
  Bacterial polypetide isolated from the Sargasso Sea
MQKKQFKIYNPKIKEECAVFGISNNQDASALTVLGLHALQHRGQEGCGIVSFDGNKYHSEKRFGLVGDNFSKEEVIKTLPGNYAIGHNRYSTTGGTTLRNIQPFFADTNAGGIGVAHNGNLTNAITLRKKMVEEGSIFYTTSDTETIVKLIARSKRVKTIDKVIDALFQIQGGYALVVMTQNILIGVRDPYGIRPLVIGKLKNSYVLASETCALDIIGAKFVREVENGEIVCIENDKLQSVKPFPPKK

SEQ ID NO: 117849 - protein, 294 aa, Unknown
  Bacterial polypetide isolated from the Sargasso Sea
RPLVIGKLNNSYIFASETCALDIIGAKFIREVENGEIVTIEKNNLKSINPFPSKKQRPCIFEYIYFARPDSILNGKCAYEYRKDFGKELAKESDVDADLVVPVPDSGNAAAIGYSQYVKKKFDLGLIRNHYVGRTFIEPVQKIRSLGVKLKLNANKSTIKNKKIVLIDDSLVRGTTCYKIVKMLYDAGAKEVHVRIASPEIKFPDFYGIDTPTKKELLAANKNNEEICKYINAKSLKFLSIDGIYRAMGFEKRNETYPQLTDHYFTGDYPVKPIDNLGDDKVAQLSLLSTASNN

SEQ ID NO: 117850 - protein, 311 aa, Unknown
  Bacterial polypetide isolated from the Sargasso Sea
QLIAKSKREKFIDKLIDTLFQIQGGYSLVLMTNKKLVGVRDPFGIRPLVVGKLKESFILASETCALDIVGAKFVREVENGEIVFVEKNELKSVKPFPKVKPRPCVFEYIYFARPDSIIENKCAYEYRKNLGIQLAKETDFEADLVVPVPDSGVPAALGFAEYSKKNFELGLIRNHYVGRTFIEPTQNIRSLGVKLKLSSTKTIVKNKSIILIDDSLVRGTTCHKIVKMLYEAGAKEVHVRIACPEIKFPDFYGVDMPTKEELLAYQKNNKQMTDYIKAKSLKFLSLNGLYRALTGKDRNSNYPQFSDHYFT

SEQ ID NO: 117851 - protein, 256 aa, Unknown
  Bacterial polypetide isolated from the Sargasso Sea
MKKTIKILKKKFKSYNSKIKEECGVFGISNNEDASTLTALGLHALQHRGQEGCGIVSFDGRKYHSEKRFGLVGDNFNKEKVLKSLPGNYAIGHNRYSTTGGTTLRNIQPFFADTNTGGIGVSHNGNLTNAITLRKKLVEDGAIFYTTSDTETIVQLIARSRRVKTIDKIVDALFQIQGGYALVMLTQNTLVGVRDPFGIRPLVIGKLNDSYVFASETCALDIIGAKYVRDVENGEIVSIQNNRLNSIKPFPARKIR

SEQ ID NO: 117852 - protein, 232 aa, Unknown
  Bacterial polypetide isolated from the Sargasso Sea
SKQCVKPKSYTPCIFEFVYFARPDSIIDGMSVYKSRLRMGEYLAQRIIKKGLHHDVDVVIPIPDTSRSTALQVAHHLGVKYREGFIKNRYIGRTFIMPGQEIRKKSVKQKLNPIDLEIRDKNVLLIDDSIVRGTTSKKIIQMARNAGANKVFFASAAPPVKYPNVYGIDMPSTAELLASNRTEEELARYIGADWLIYQDLDDLISAVQFDESDAEAFDTSCFSGEYVTGDVT

SEQ ID NO: 117853 - protein, 108 aa, Unknown
  Bacterial polypetide isolated from the Sargasso Sea
MCGIIGISAENNVAEEIYESLLMLQHRGQDAAGMVVCEPSGKLNSRKSKGYVRDVFQQNHMSNLQGNLGIGHVRYPTAGGIGKEFAQPMYVNTPYGISLAHNGNLINS

SEQ ID NO: 117854 - protein, 168 aa, Unknown
  Bacterial polypetide isolated from the Sargasso Sea
MYCKITDKLKEECGVFGIFGTEEASVLTTLGLHSLQHRGQEGAGIVSFDGKNFHTVRKQGLVGDNFNNKNILSQLPGKTAIGHVRYSTTGESKHENLQPLFANLAIGGFACAHNGNLTNTYSIKKYLVESGSIFQTTSDTEVILQLVARSQKKKIIDKLIDTLHQIKG

SEQ ID NO: 117855 - protein, 303 aa, Unknown
  Bacterial polypetide isolated from the Sargasso Sea
KRQGLVGDHFTKSDVIKKLPGNSAIGHNRYSTTGETSIRNIQPFFADLHSGGLSIAHNGNLTNAISLRDNLVKDGAIFRTTTDTETIVQLIAKSKREKIIDKIIDALFQIQGGYSLVIMTNKKLIGIRDPFGIRPLVIGKLKDSYILASETCALDIIGASFVREVENGEVVSIEDKKLKSIKPFPKQKPRPCIFEYIYFARPDSLINGKCAYEFRKNFGVQLAKENDIKADIIVPVPDSGVPAAIGFAEESKIRFEFGLIRNHYVGRTFIEPSQKIRSLGVKLKLSTTKSLVKDKSVLLIDDS

SEQ ID NO: 117856 - protein, 116 aa, Unknown
  Bacterial polypetide isolated from the Sargasso Sea
MPRFHEECGVFGISGTKDAAALTALGLHALQHRGQEGCGIVSYDGNSYHSERKFGLVGDNFTKKQSLDKLKGKIAIGHNRYSTTGGETIRNIQPFYADLHGGAISIAHNGNLTNAL

SEQ ID NO: 117857 - protein, 212 aa, Unknown
  Bacterial polypetide isolated from the Sargasso Sea
MRKSDQDKLREECGIFGVSDHSDSSALVALGLHALQHRGQEGCGIVSFDGKNYHSEKRQGLIGDHFTNPEVIKKLPGKFAIGHNRYSTTGGTSLRNIQPFFADLHMGGLSIAHNGNLTNALFLRENLVKDGAIFRTTTDTETIVQLIAKSKRDKFLDKLIDTLFQIQGGYSLVIMTNKKLVGVRDPFGIRPLVIGKLNNSFIFASETCALDI

SEQ ID NO: 117858 - protein, 146 aa, Unknown
  Bacterial polypetide isolated from the Sargasso Sea
MKNYNPKLSEECGVFGISNIEDASALTALGLHALQHRGQEGCGIVTFDGEQYYSEKRFGLVGDNFNKAKVLKRLKGNYAIGHNRYSTTGNNTLRNIQPFFADTNAGGIGVAHNGNLTNSIHLRKKLVEDGAIFYTTSDTETIVQLI

SEQ ID NO: 117859 - protein, 255 aa, Unknown
  Bacterial polypetide isolated from the Sargasso Sea
AIFINLNGEFFSKQCADNPILCPCAFEYVYLARPDSIMNGISVYKARLKMGDYLSETIKETINSGDVDVVMPIPDSSRPAAMQVARQLGIEYREGFFKNRYVGRTFIMPGQQKRKKSVRQKLNAMSAEFKNKNVLIVDDSIVRGTTSKEIVQMAKDAGANKVFFTSAAPPVRFPHVYGINMPNRDELIAYDRTISEIADQLEIDNLVYQSVENLRKSIIIDSPIKDLEMSCFTGSYVTENVNQEFLNWVENEYKS

SEQ ID NO: 117860 - protein, 264 aa, Unknown
  Bacterial polypetide isolated from the Sargasso Sea
VTFDGKKYYSEKRFGLVGDNFNKEEILNKLKGNYAIGHNRYSTTGDNILRNMQPFFADTNAGGIGVAHNGNLTNSISIRNKLVEDGAIFYTTSDTETIVKLIAKSKRNKVIDKVVDAIFQIQGGYALVMLTQTSLIGVRDPHGIRPLVVGKLKNSYVLASETCALDIIGAKFLREVENGEIVIIENNELKSVKPFPPKKVRPCVFEYIYFARPDSILNGKTAYEHRKNLGVELAKENNTDCDIVVPVPDSGNAAAVGFAQHLGK

SEQ ID NO: 117861 - protein, 151 aa, Unknown
  Bacterial polypetide isolated from the Sargasso Sea
MEYIDTSEDKLHEECGVFGIFGSPDASPLTALGLHALQHRGQEGAGIVSFDGEKFHGVRRPGLVGDHFNKQKLINRLQGSNAIGHVRYSTTGDSILKNIQPLYADLISGGFACAHNGNLTNASAFREKLCRRGSIFSSTSDTETIFALVAT

SEQ ID NO: 117862 - protein, 262 aa, Unknown
  Bacterial polypetide isolated from the Sargasso Sea
MCGIFGIFGHPKASELTFLGLHALQHRGQESAGISVSDGETIHTRRGQGLVSEVFSRDEYLEFEGNQAIGHVRYTTAGDSGLLNAQPLVFRYTGGQVAVAHNGNLVNAKRLRDQLERQGSIFQTNSDTEVVSHLIARAGPPIDHAFQDALRVIDGAYALLLMTEKQMIAAQDPRGFRPLSLGQFENAWVVSSETCALNTIGADFVREIKPGELLVFDEKGLQMRSFTGVQTRKICSFEYIYFARPDSEVDGISVHSVRKELG

SEQ ID NO: 117863 - protein, 285 aa, Unknown
  Bacterial polypetide isolated from the Sargasso Sea
SIYLRNKLVEEGAIFYTTSDTETIVQLIAKSKRLKTIDKIIDAIFQIQGGYALVMLTQNLLVGVRDPYGIRPLVIGKLKNSYVLASETCALDIIGAKFIREVDNGEIVLIENDKLKSIKPFPEKKIRPCVFEYIYFARPDSILSGKTAYEHRKNLGKELAKENNIDADIIVPVPDSGNAAALGFAQHLNKNYEHGLIRNHYVGRTFIEPSQKIRSLGVKLKLNANQTTIENKKIILVDDSLVRGTTSHKIVKMLYDAGAKEVHVRIACPEIKYPDFYGVDTPTKK

SEQ ID NO: 117864 - protein, 119 aa, Unknown
  Bacterial polypetide isolated from the Sargasso Sea
MDKLKEECGIFGIYKTNEAAVHTALGLHSLQHRGQEGAGIVSFDGKKFYSIKKEGLVGDNFNDINTLSQLPGQTAIGHVRYSTTGESKSENLQPLFANLAVGGFACAHNGNLTNSILKK

SEQ ID NO: 117865 - protein, 158 aa, Unknown
  Bacterial polypetide isolated from the Sargasso Sea
MKEECGVFGISNTKDASALTALGLHALQHRGQEGCGIVTFDGKKYYSEKRFGLVGDNFNKEEILNKLKGNYAIGHNRYSTTGDNILRNIQPFFADTNAGGIGVAHNGNLTNSISIRSKLVEEGAIFYTTSDTETIVKLIAKSKRSKTIDKIVDAIFKS

SEQ ID NO: 117866 - protein, 202 aa, Unknown
  Bacterial polypetide isolated from the Sargasso Sea
MCGIVGIAGVMPVNQSIYDALTVLQHRGQDAAGIITIDANNCFRLRKANGLVSDVFEARHMQRMQGNMGIGHVRYPTAGSSSASEAQPFYVNSPYGITLAHNGNLTNAHELRKKLFEEKRRHINTTSDSEILLNIFASELDNFRHYPLEADNIFAAIAATNRQIRGAYACVAMIIGHGMVAFRDPNGIRPLVLGERDVGDGR

SEQ ID NO: 117867 - protein, 246 aa, Unknown
  Bacterial polypetide isolated from the Sargasso Sea
KPFPAMKKRPCIFEYIYFARPDSVFGEKSIYECRKNFGHELAAEAPCSADIVVPVPDSGVPAALGYAEAAGLPFELGIIRNHYVGRTFIEPQQSTRDFGVKLKHNINRNAVSGKKVVLIDDSIVRGTTSVKIVELMRQAGAREVHMKIASPPIKYPDFYGIDTPEKAQLLASLKSEKEMATYIGADSLSFLSVDGLYRAMGHEKGRDDTNPAFTDHCFTGDYPTPLEDNNIAWLFETSQLSVRNEN

SEQ ID NO: 117868 - protein, 295 aa, Unknown
  Bacterial polypetide isolated from the Sargasso Sea
GQEGCGIVSFDGEKYHSEKRFGLVGDNFNDEKVLKKLPGKYAIGHNRYSTTGGTALRNVQPFFADTNAGGIGVAHNGNLTNAITLRSKLVQDGAIFYTTSDTETIVQLIAKSKRAKTIDKVIDAIFQIQGGYALVMMTKNTLIGVRDPYGIRPLVIGKLKNSYVFASETCALDIIGAKFIREVENGEIVYVEDDKLKSLKPFPPRKIRPCVFEYIYFSRPDSILNGKTAYEYRKNFGSQLANEEDLDADLVVPVPDSGNAAALGYAQRKGIAFDLGLIRNHYVGRTFIEPSQKIR

SEQ ID NO: 117869 - protein, 284 aa, Unknown
  Bacterial polypetide isolated from the Sargasso Sea
MLDKLREECGVFGIFQNKDSAVLTQLGLHALQHRGQEGAGIVSCDGNEFFSIRKKGLVSDNFNKLKNLKKLKGNSAIGHVRYSTAGGSIKENIQPLFANLADGGFACAHNGNLINANHLREKLTKTGSIFQTTSDTETILQLVARSKEISVEKKIIDALGKIKGAFSLVILTKDKMYGIKDPFGIRPLVIGQISNSFIFASETCALDMIGAKYVRDVENGEIVEISIHGMRSIKPFTKTNERPCIFERIYFSRPDSLIEGKTVYSYRKQLGIQLANENKLNADV

SEQ ID NO: 117870 - protein, 145 aa, Unknown
  Bacterial polypetide isolated from the Sargasso Sea
MCGIIGLVGRKGYHINQLLYDGLTVLQHRGQDAAGMMTEYEGKYHLRKSNGLVKDVFFKRHMQGLLGSVGIGHVRYPTAGSSSVAEAQPFYVNYPFGLSLAHNGNLTNAAEIETKLTNQYRRHVNTTSDSELLLNLLAMELESRS

SEQ ID NO: 117871 - protein, 210 aa, Unknown
  Bacterial polypetide isolated from the Sargasso Sea
MKIFNNDKLREECGIFGVSNLDDAATVVALGLHALQHRGQEGCGIVSFDGKNFFSEKKQGLVGDHFTKKDVINNLPGSSAIGHNRYSTTGETSLRNIQPFFADLFGGGISIAHNGNLTNALRLREILVKDGAIFRTTTDTETIVQLIAKSKRAKMIDKIVDTLFQIQGGYSLIILTNKKLIGVRDPLGIRPLVLGKLKNSYVFASETCAL

SEQ ID NO: 117872 - protein, 199 aa, Unknown
  Bacterial polypetide isolated from the Sargasso Sea
MLKKKFKNYSSKLNEECGVFGISNFDDASALTALGLHALQHRGQEGCGIVSYDGKKYYSEKRFGLVGDNFNNEKVLKKLPGNFAIGHNRYSTTGGTTLRNIQPFFADTHAGGIGVSHNGNLTNALTIRKKLVKEGAIFYSTSDTEVIIQLIAKSKRSSTVEKITDAIFQIQGGYALVMLAQNKLIGVRDPLGIRPLVIG

SEQ ID NO: 117873 - protein, 302 aa, Unknown
  Bacterial polypetide isolated from the Sargasso Sea
LIPKIKEKCGVFGISNNNDASALTALGLHALQHRGQEGCGIVTFDGDQYHSEKRFGLVGDNFNKEKVLKNLTGKYAVGHNRYSTTGGTTLRNIQPFFADTNAGGISISHNGNLTNAITLRSKLVKEGAIFHTTSDTETIVQLIAKSKRNKTIDKIIDALFQIQGGYALVMLTQKNLIGVRDPFGIRPLVIGKLNNSYVLASETCALDIIGAKFLREVENGEIVLIQDDKIESIKPFPEQKVRPCVFEYIYFSRPDSILNGKTAYEYRKNLGVELAKEDNVEGDVIVPVPDSGNAAALGYSQK

SEQ ID NO: 117874 - protein, 242 aa, Unknown
  Bacterial polypetide isolated from the Sargasso Sea
DKLREECGIFGISNHKDASTIVALGLHALQHRGQEGCGIVSFDGKTFHSEKRQGLVGDHFTKGDAIKKLPGKSAIGHNRYSTTGETSLRNIQPFFADLFGGGLSISHNGNLTNALILRENLVKDGAIFRTTSDTETIVQLIAKSKRDKTIDKIIDALFQIQGGYSIILMTNKKLIGVRDPFGIRPLVIGKLNNSFIFASETCALDLVGAKFLREVENGEIVVIENNELKGIKPFPKVKARPC

SEQ ID NO: 117875 - protein, 152 aa, Unknown
  Bacterial polypetide isolated from the Sargasso Sea
MKNRLEFLKKFEVRQSHVPRFNEECGVFGISGTKDAAALTALGLHALQHRGQEGCGIVSYDGNSYHSERKFGLVGDNFTKKHSLDKLKGKIAIGHNRYSTTGGETIRNIQPFYADLHGGAISIAHNGNLTNALLLREQMVREGAIFKQHQIP

SEQ ID NO: 117876 - protein, 271 aa, Unknown
  Bacterial polypetide isolated from the Sargasso Sea
FGKLKNSYVFASETCAFDIIGAKFVRDVENGEIVYVENDELKSIKPFPQKKVRPCVFEYIYFSRPDSILNGKTAYEYRKRFGAELAKEDNLDADLVVPVPDSGNAAALGYAEEKKINFDLGLIRNHYVGRTFIEPSQQIRSLGVKLKLNANVSVIKNKKIILVDDSLVRGTTSSKIVKMLYDNGAKEIHVRIASPEIKYPDFYGVDTPTKKELLAANKSVDEIKEFIKAKSLKFLTLDGLYRAMGFDKRNDAYPQLTDHHFTGDYPIKIID

SEQ ID NO: 117877 - protein, 303 aa, Unknown
  Bacterial polypetide isolated from the Sargasso Sea
EDASTLTALGLHALQHRGQEGCGIVSFDGTNFHSEKRHGLVGDNFTNKDVLKKLPGKFAIGHNRYSTTGETSMRNIQPFFADLHGGGIAIAHNGNLTNAIMLRESLVKSGAIFRTTSDTETIVQLIAKSKRIKIIDKIIDALFQIQGGFALTMITNKKLIGVRDPLGIRPLVLGKIKNSYILASETCALDIIGAKFIREVENGEIVVIENNTIKSIKPFPKKKSRPCVFEYIYFARPDSLLNGKSAYEYRKNLGYQLAKESNNNGDIIVPVPDSGVPAALGYAQYKKMNFELGLIRNHYVAEL

SEQ ID NO: 117878 - protein, 196 aa, Unknown
  Bacterial polypetide isolated from the Sargasso Sea
MQKKKFKNYNPKLKEECGVFGISNIDDASAVTALGLHALQHRGQEGCGIVTFDGEKYHSEKRFGLVGDNFNKEKVLKKLPGKYALGHNRYSTTGGTTLRNIQPFFADTNAGGISVSHNGNLTNAITLRSKLVQEGSIFYTTSDTETIVQLIAKSKRSKTEDKIIDALFQIQGGYALVMLTQKKLIGVRDPFGIRPL

SEQ ID NO: 117879 - protein, 196 aa, Unknown
  Bacterial polypetide isolated from the Sargasso Sea
MNDRPQHECGVFGIYGHEDAGALTALGLHALQHRGQEAAGMVTYDGKHFHAERRMGLVSDTFTKTSVLGRLKGNSAIGHVRYSTTGGTLLRNVQPLFADLALGGFAIAHNGNLTNGLTIRLELVKEGAIFQSTSDTETILQLVAKSKNKLSIDRMVDALSQIEGAYALVAITNKQLIGVRDPYGIRPLMLGELEGK

SEQ ID NO: 117880 - protein, 224 aa, Unknown
  Bacterial polypetide isolated from the Sargasso Sea
MIKKISTKVREECGVFGISNINDASALAALGLHALQHRGQEGCGIVSYDGKNYYSEKRFGLVGDNFNNEDTIKKLPGNYAIGHNRYSTTGGKILRNVQPFFADTNAGGIGVSHNGNFTNAITLRKELVKEGAIFYTTSDSETIVQLIARSKKEKNIDKIIEAISQIQGGYALVMLTKDVLIGARDIYGIRPLVIGKLNNSYVLASETCALDIIGAEFVREVKTG

SEQ ID NO: 117881 - protein, 308 aa, Unknown
  Bacterial polypetide isolated from the Sargasso Sea
GIVSYDGTNYHSEKRQGLVGDHFTKSEVIKKLPGKFAIGHNRYSTTGETSLRNIQPFFADLHMGGISIAHNGNLTNALTLRETLVKEGAIFRTTSDTETIVQLIAKSRREKIVDKLIDTLFQIKGGYALVLMTNKKLIGVRDPFGIRPLVIGRLNSSYILASETCALDIVGAKFIREVKNGEIVVVENNQINSINPFPKQKERPCVFEYIYFARPDSLINGKCAYEYRKQFGLQLAKESDINADIVVPVPDSGVPAALGYAEYSKKRFELGLIRNHYVGRTFIEPTQNIRSLGVKLKLSSTKSIVKNK

SEQ ID NO: 117882 - protein, 169 aa, Unknown
  Bacterial polypetide isolated from the Sargasso Sea
MCGIVGIVGKYPVNQALYDGLTVLQHRGQDAAGIVTVDNNTLRLRKANGLVKDVFEARHMQRLAGNIGIGHVRYPTAGSSSTAEAQPFYVNSPFGIALAHNGNLTNSHVLKEDIFRVARRHVNTTSDSEVLLNVLAHELHNSGVMELQAEHIFRAVANVHRKVKGGYAV

SEQ ID NO: 117883 - protein, 222 aa, Unknown
  Bacterial polypetide isolated from the Sargasso Sea
MKNFNPKLKEECGVFGISNIEDASALTALGLHALQHRGQEGCGIVTFDGKQYYSEKRFGLVGDNFNKEKVLKKLKGNYAIGHNRYSTTGSNTLRNIQPFFADTNAGGIGVAHNGNLTNSISLRNKLVEDGAIFYTTSDTETIVQLIAKSKRIKTIDKVVDAIFQIQGGYALVMLTQNSLIGVRDPYGIRPLVIGKLGNSYVLASETCALDIIGAKFLRDVEN

SEQ ID NO: 117884 - protein, 305 aa, Unknown
  Bacterial polypetide isolated from the Sargasso Sea
FFADLHGGGIAIAHNGNLTNALRLREDLVKDGAIFRTTSDTETIVQLIAKSKRIKIIDKIIDALFQIQGGYSLVMITNKKLIGVRDPLGIRPLILGKIKNKFVLASETCALDIIGAKFIREIENGEIVIVEDNNIKSLKPFPKKKSRPCVFEYIYFARPDSLLNGKSAYEYRKKLGYALAKESEQVGDIVVPVPDSGVPAALGYAQYKKMNFEVGLVRNHYVGRTFIEPTQSIRSLGVKLKLSANMSSIKNKSIVLIDDSLVRGTTCLKIVKMLYEAGAKEVHVKIACPEIKYPRFLWNRYALQK

SEQ ID NO: 117885 - protein, 280 aa, Unknown
  Bacterial polypetide isolated from the Sargasso Sea
MKKQKKKFRIYNPKLKEECGVFGIGNISDASTLTALGLHALQHRGQEGCGIVSFDGEKYHSEKRFGLVGDNFNKEKVLKKLPGKYAIGHNRYSTTGGSALRNVQPFFADTNAGGIGVSHNGNLTNAITLRKKLVQEGAIFYTTSDTETIVQLIAKSKREKIIDKIVDALFQIQGGYALVMMTQNTLIGVRDSYGIRPLVIGKLKNSYVFASETCALDIIGAKFIREVENGEIVYVENDELKSLKPFSPKRIRPCVFEYIYFSRPDSIINGRTAYEYRKNL

SEQ ID NO: 117886 - protein, 210 aa, Unknown
  Bacterial polypetide isolated from the Sargasso Sea
MCGVVGIISSRPVNQEIYDALTVLQHRGQDSAGIMTDNNGVLCLRKSNGLVNDVFSNEHMTRLRGNVGIGHVRYPTAGTLSSSEAQPFYVNSPFGICLAHNGNLVNNEELRKHLSEVDRRHLNTESDTEALLNLFAHELQENFDGSLSPEIIFKAATHLFDKCSGGYAVVSMILNEGLVAMRDPNGIRPLILGKREVGQVTEYMIASESV

SEQ ID NO: 117887 - protein, 235 aa, Unknown
  Bacterial polypetide isolated from the Sargasso Sea
MREIREECGIFGVHDAQDASALTALGLHALQHRGQEGCGIVSFDGKNFHSEKRNGLVGDNFTNKEILKKLPGNFAIGHNRYSTTGETSLRNIQPFFADLYGGGISVAHNGNLTNAIQLRESLVKDGAIFRTTTDTETIVQLIAKSSREKIIDKIIDAIFQIQGGYALVIMTNKKLVGVRDPLGIRPLVLGKIKNSYVLASETCALDIIGAKFIREVENGEVIVKEKGSFKSLKPF

SEQ ID NO: 117888 - protein, 254 aa, Unknown
  Bacterial polypetide isolated from the Sargasso Sea
LQPFYVNSPYGIALAHNGNLINSDILKSDLFKEDLRHINTKSDSEILLNIFAHELYLHSKEVFTPDSIFYAVAGVHRRVKGAYAVVSLITDKGIVAFRDPHGIRPLCFGHRVVGGKTETMIASESVALDSAGYTLERDVKPGEAIFIDTNGNVHTRLCAKTNSFNPCIFEYVYFARPDSIIDGISVYKARMNMGTALANNIDKAFPNNDIDVVIPIPDTSRISALELSAKLKIPFREGFIKNRYIGRTFIMSEQ

SEQ ID NO: 117889 - protein, 240 aa, Unknown
  Bacterial polypetide isolated from the Sargasso Sea
MCGLVGVVTTDDVGVCLYDTLTVLQHRGQDAAGIMTSDNGKLNLRKDNGLVKDVFRTRHMRRLTGQMGIGHVRYPTAGSSSPALAQPFYVNSPYGLSLAHNGNLTNTAELSRDLFKEDLRHINTDSDSEVLLNIFAHELQQQQQIEPTPDHIFSALSRVYDRCRGGFVAIVMITGYGILGFRDKHGIRPLVFGSRESERGKEYMIASESVALDSQGFSVERDIAPGEAVYIDVNNNLYTK

SEQ ID NO: 117890 - protein, 103 aa, Unknown
  Bacterial polypetide isolated from the Sargasso Sea
MQKKKFKKFNPKIKEECGVFGISNNNDASALAALGLHALQHRGQEGCGIVTFDGDQYHSEKRFGLVGDNFNKEKVLKNLIGKYAIGHNRYSTTGGTTLRNIQP

SEQ ID NO: 117891 - protein, 302 aa, Unknown
  Bacterial polypetide isolated from the Sargasso Sea
MAEDIYREDLRHINTTSDSEVLLNIFAHELQEQRQLKPSPEVIFKAVRRVHERIRGGYAVVAMITGYGIVAFRDPHGIRPAVFGHRDTANGPEYMVASESVALDAQDFKLDRDIAPGECVIFTEDGQLFTEQCAEQTELTPCIFEHVYFARPDSIIDGIAVYKARLRMGEKLADKIMREHPDHDIDVVIPIPDTSRSSALELANHLGVKYREGFMKNRYIGRTFIMPGQQLRKKSVKQKLNALDLEFRGKNVLLVDDSIVRGTTCEQIIEMAREAGAKNVYFASAAPAVRFPNVYGIDMPAK

SEQ ID NO: 117892 - protein, 318 aa, Unknown
  Bacterial polypetide isolated from the Sargasso Sea
LELFKQEAVFPKPKDFFAAVEKTHLRINGAYAVVALITGYGIVAFRDPLGIRPLTIGVRKGKNRNEYVVSSETALFSATGFKVLRDVEPGEAVFIDNSGKIFTQQCYPGSEKKPCIFEYVYLARPDSTIDEISVYRSRMRMGLKLANRIRELNLVDEIDVVIPIPDSSTTAALQLAADLKKPYRQGFVKNRYIGRTFIMPLQEERKKSVRRKLNILDLEFKDKNVLLVDDSIVRGTTSRQIIEMVREAGAKKVLFASASPPVKYQNLYGIDMAATKELIAHDKTETEIADAIGADELIYQTLEDLISSVQEGNPEIKD

SEQ ID NO: 117893 - protein, 237 aa, Unknown
  Bacterial polypetide isolated from the Sargasso Sea
MCGIVGIVGKYPVNQALYDGLTVLQHRGQDAAGIVTVDNKTLRLRKANGLVKDVFEARHMQRLSGNMGIGHVRYPTAGSASTAEAQPFYTNSPFGIALAHNGNLTNSEELKDELFRTARRHVNTNSDSEALLNAFAHELDIHADMHVNPDHIFRAVANLHRKIRGGYAVVAVVIGHGLVAFRDPNGIRPLVMGKRETALGTEYMVASESVALDADGFTVLRDIAPGEAVYITEDGQL

SEQ ID NO: 117894 - protein, 282 aa, Unknown
  Bacterial polypetide isolated from the Sargasso Sea
NSRKSMGYVRDTFQQRHMNKLLGNYGIGHVRYPTAGGAGKEFAQPMYVNSPYGISLAHNGNLTNSKVLARELFHAEMRHLNTDSDSEVLLNIFAHELGKQRAILPSKKHFFKAVRKTHIRCQGAYAVVALITGFGLLAFRDPRGIRPLVIGVKDGPSKQEYIVASENASFSALGFKTLRDVHPGEAVYIDVDGNLHSDQCSENAEPTPCIFEYVYLARPDSILDEISVYKARMRMGQKLAKKILKLNPDHDIDVVIPIPDSSTTAALQLAAVLKTSYRQGFV

SEQ ID NO: 117895 - protein, 137 aa, Unknown
  Bacterial polypetide isolated from the Sargasso Sea
MHKIKHECGVFGLFGIDEASVLTTLGLHSLQHRGQEGAGIVSSNDGSFYSIRKEGLVGDNFNDADTLSKLPGKHAIGHVRYSTTGDSKLENIQPFFANLATGGFACAHNGNLTNTTGLKKELVSTGSIFRTTSDTEV

SEQ ID NO: 117896 - protein, 163 aa, Unknown
  Bacterial polypetide isolated from the Sargasso Sea
MKKIIRILKKKFKNCNPKINEECGVFGISNNEDASTLTALGLHALQHRGQEGCGIVSFDGKKYHSEKRFGLVGDNFNKEKVLKSLPGNYAIGHNRYSTTGGTTLRNIQPFFADTNTGGIGVSHNGNLTNAITLRKKLVEDGAIFYTTSDTETIVQLIARSKRV

SEQ ID NO: 117897 - protein, 249 aa, Unknown
  Bacterial polypetide isolated from the Sargasso Sea
MKKHIKTLKKKLKNYNPRLKEECGVFGISNTKDASALTALGLHALQHRGQEGCGIVTFDGEKYYSEKRFGLVGDNFNKEKVLNNLKGNYAIGHNRYSTTGNNILRNIQPFFADTNAGGIGVAHNGNLTNSIALRNKLVQDGAIFYTTSDTETIVQLIAKSKRPKTIDKVIDAIFQIQGGYALVMLTQNSLIGVRDPYGIRPLVIGKLGNSYVLASETCAFDIIGAKFIREVENGEIVLIENNKLKSIKP

SEQ ID NO: 117898 - protein, 174 aa, Unknown
  Bacterial polypetide isolated from the Sargasso Sea
MQVARQLGIEYREGFFKNRYVGRTFIMPGQQKRKKSVRQKLNAMSAEFKNKNVLIVDDSIVRGTTSKEIVQMAKDAGANKVFFTSAAPPVRYPHVYGINMPNRDELIAHNRTISEIADKLEIDNLVYQSVESLRKSIIGDSPIKGLEMSCFTGDYVTGTVSKEYLNWVENEYKS

SEQ ID NO: 117899 - protein, 413 aa, Unknown
  Bacterial polypetide isolated from the Sargasso Sea
ILNILKGDYAIGHNRYSTTGNNTLRNIQPFFADTNAGGIGVAHNGNLTNSIYLRNKLVEDGAIFYTTSDTETIVQLIAKSKRSKTIDKVVDAIFQIQGGYALVMLTQTSLIGVRDPYGIRPLVIGKLGSSYVLASETCALDIIGAKFIREVENGEIVFIENNQLSSIKPFPPKKIRPCVFEYIYFARPDSLINNKTAYEHRKNLGKELAEENDIDADIVVPVPDSGNAAALGFSQKLRINFEHGLIRNHYVGRTFIEPSQKIRSLGVKLKLNANETTIKNKKIILVDDSLVRGTTSLKIVKMLYDAGAKEVHVRIACPEIKYPDFYGVDTPTKKELLAANKSNDEICEYIGAKSLKFLSINGLYRAIGFDKRNETYPQLTDHYFTGDYPIKPVDELGDSKITQLSLLSTVSNN

SEQ ID NO: 117900 - protein, 263 aa, Unknown
  Bacterial polypetide isolated from the Sargasso Sea
VLIHNGNLTNTRDLEKQLFNIDKRHTNSSSDTEMLLNVFATELQEQIHNQELEPDIIFRAVKSLHKRIQGSYASIALISGHGLLAFRDPFGIRPLVIGKRISLTTKKEEWMVASESLVLENNDYQVVRDVDPGEAVFINLNGEFFSKQCSENPMLFPCAFEYVYLARPDSIMNGISVYKARLKMGDYLAETIKQTINSGDVDVVMPIPDSSRPAAMQVARQLGIEYREGFFKNRYVGRTFIMPGQQKRKKSVRQKLNAMSAEF

SEQ ID NO: 117901 - protein, 248 aa, Unknown
  Bacterial polypetide isolated from the Sargasso Sea
MSTINNSLYSHAFDDDKLREECGVFGVYGHKDSSALTALGLHALQHRGQEAAGIVTYDGKQFYGHRAPGHVGDIFSNEAVIKRLPGTLAVGHNRYSTTGGTAQRNIQPLFAEYESGGFALAHNGNLTNASILHRDLVKRGCLFQSTSDTEVIIHLIAISDQEVVIDRLIDALKRVVGAYSLVAMTNNQMIGVRDPMGVRPLVLGFLDGAHVLASESCALDIIGADFVRDVEPGEVIVIDKDGLTSLKP

SEQ ID NO: 117902 - protein, 284 aa, Unknown
  Bacterial polypetide isolated from the Sargasso Sea
NKEEWMVASESLVLENNDYKVVRDVNPGEAVFINLNGEFFSKQCSENPRLFPCAFEYVYLARPDSIMNGISVYKARLKMGDYLAETIKRKINSGDVDVVMPIPDSSRPAAMQVARQLGIEYREGFFKNRYVGRTFIMPGQQKRKKSVRQKLNAMSAEFKNKNVLIVDDSIVRGTTSKEIVQMAKDAGANKVFFTSAAPPVRFPHVYGINMPNRDELIAHDKTISEIADKLEIDNLVYQSVENLRKSIIDDSYIEDLEMSCFTGFYVTGTVNQEYLNWVENEYQS

SEQ ID NO: 117903 - protein, 344 aa, Unknown
  Bacterial polypetide isolated from the Sargasso Sea
TETIVQLIAKSKRSKTIDKIVEAIFQIQGGYALVMLTQTSLVGVRDPYGIRPLVIGKLKDSYVLASETCALDIIGAKFVREVENGEIVLIEKNELKSIKPFQLKKVRPCVFEYIYFARPDSVLNGKTAYEYRKNLGSELAKENDINADIVVPVPDSGNAAALGFAQHLKIKFELGLVRNHYVGRTFIEPSQKIRSLGVKLKLNANQSTIKDKKIILVDDSLVRGTTSHKIVKMLYDAGAEEVHVRIACPEIKFPDFYGVDTPTKKELLAANKNNQEICQYIGAKSLKFLSINGMYRAIGFDQRNEGYPQLTDHYFTGDYPVKPIDELGDSKITQLSLLNTASNN

SEQ ID NO: 117904 - protein, 434 aa, Unknown
  Bacterial polypetide isolated from the Sargasso Sea
GNSYHSERKFGLVGDNFTKKHSLDKLKGKIAIGHNRYSTTGGETIRNIQPFYADLHGGAISIAHNGNLTNALLLREQMVREGAIFQTTSDTETIVQLVARSKKKDILNKIIDALMQIQGGYALSIIANGTLIGARDPLGIRPLVLGKFKNAFILASETCALDIIGAKFIREIENGEVVVIKDNKVESRRPFPKKQIKPCVFEYIYFSRPDSILKNKTAYEYRKNLGTYLAKETDIKPDVVVPVPDSGVPAALGFSQESGIPFELGLIRNHYVGRTFIEPTQQIRSLGVKLKLNPNQSSIKKKKVVLIDDSLVRGTTSTKIIKMLYDFGAKEVHMRIASPAIKYPDFYGVDTPTQEELLAANKNLEEMCKYIGAKSLKFLSLDGLYQALGYDERDNDNPQFTDHYFTGEYPIRPLDYLNDESLKKLSFLSLASNN

SEQ ID NO: 117905 - protein, 250 aa, Unknown
  Bacterial polypetide isolated from the Sargasso Sea
PQKRPCIFEYVYFSRPDSKIDEISVYKARIRMGSKLAHQIKKIKPDHDIDVVIPIPDSSTIAAHQLAVDLEVPYREGFVKNRYIGRTFIMPYQEERKKSVRRKLNILDLEFKGKNVLLVDDSIVRGTTSKKIIEMAREAGANKVYFASAAPAIKYQNLYGIDMPATSELIASNKSDEEVAKEINADWLIYQTLEDLIEAVRAGNPEINEFENSIFTGKYITPLIENYLEELENSRKDELKIQRERSKARG

SEQ ID NO: 117906 - protein, 234 aa, Unknown
  Bacterial polypetide isolated from the Sargasso Sea
MQKKKFKNFNPKIKEECGVFGISNNNDASALTALGLHALQHRGQEGCGIVTFDGNQYHSEKRFGLVGDNFNKEKVLKNLTGKYAIGHNRYSTTGGTTLRNIQPFFADTNAGGISISHNGNLTNAISLRSKLVKEGAIFYTTSDTETIVQLIAKSKRTEIMDKIIDALFQIQGGYALVMLTQKKLIGVRDPFGIRPLVIGKLKNSYVLASETCALDIIGAKYLREVENGEIVLIQ

SEQ ID NO: 117907 - protein, 378 aa, Unknown
  Bacterial polypetide isolated from the Sargasso Sea
YVNSPYGISLAHNGNLTNSKQLGTQLFHAEMRHLRTDSDSEVLLNIFAHELGKQREIYPSEKNIFKAVTKTHIRCDGAYAVIALITGYGLVAFRDNNGIRPLSIGVRQGKEREEYIVSSEDALFTPLGFEKLRDIDPGEAVFIDKNGKLFSQQCADNPQKRPCIFEYVYFSRPDSKIDEISVYKARMRMGTKLAGQINRTRPDHDIDVVIPIPDSSVTAAHQLAVDLNVPYREGFVKNRYIGRTFIMPYQEERKKSVRRKLNILDLEFEGKNVLLVDDSIVRGTTSKKIIEMAREAGAKKVYFASAAPAIKYQNLYGIDMPATAELIASNKSNDEVASEINADWLIYQTLEDLVDSVREGYPRISEFETSIFTGEYFT

SEQ ID NO: 117908 - protein, 381 aa, Unknown
  Bacterial polypetide isolated from the Sargasso Sea
AAELFHAERRHINTDSDSEVLLNIFALELSKQEAVFPKPKDFFAAVEKTHLRINGAYAVVALITGYGIVAFRDPLGIRPLTIGVRKGKNRNEYVVSSETALFSAAGFKVLRDVEPGEAVFIDNSGKIFTQQCFQGSEKKPCIFEYVYLARPDSTIDEISVYRSRMRMGLKLANRIRELNLVDEIDVVIPIPDSSTTAALQLAADLKKPYRQGFVKNRYIGRTFIMPLQEERKKSVRRKLNILDLEFKDKNVLLVDDSIVRGTTSRQIIEMVREAGAKKVLFASASPPVKYQNLYGIDMAATKELIAHDKTENEIADTIGADELIYQTLEDLISSVQEGNPEIKDFETSIFTGKYPTDIDDGYLENLEEERSDIIKMSKKES

SEQ ID NO: 117909 - protein, 167 aa, Unknown
  Bacterial polypetide isolated from the Sargasso Sea
MGRTFIMPYQEERKKSVRRKLNILDLEFEGKNVLLVDDSIVRGTTSKKIIEMAREAGAKKVYFASAAPAIKYQNLYGIDMPATAELIASNKSNDEVASEINADWLIYQTLEDLIDSVREGNPEISEFETSIFTGEYFTPLVENYLEELEISRKDELKMQREKSKAKS

SEQ ID NO: 117910 - protein, 315 aa, Unknown
  Bacterial polypetide isolated from the Sargasso Sea
AYALVALTADKLIGARDPLGIRPLILGKLENRFILSSETCALDIIGAKFVREIENGEVVIISGENIESIKPFPEVKKRPCIFEYIYFARPDSVFGEKSIYECRKNFGHELAAEAPCSADVVIPVPDSGVPAALGYAEAAELPFELGIIRNHYVGRTFIEPQQSTRDFGVKLKHNINRNAVKGKKVVLIDDSIVRGTTSVKIVELMRQAGAIEVHMKIASPPIKYPDFYGIDTPEKAQLLASLKSQEEMATYIGADSLSFLSVDGLYRAMGYENGRDDTNPAFTDHCFTGDYPTPLEDNNIAWLFETSQLSVRNEN

SEQ ID NO: 117911 - protein, 373 aa, Unknown
  Bacterial polypetide isolated from the Sargasso Sea
AVAHNGNLPNAVTLRNELVNDGCIFQSTSDTETILQLIARSKRGNTLARFIDALFQIEGAYALVVLTNKKLIGVRDPLGIRPLVIGELDGSYILASETCALDIIGASFVREVENGEIVVITEDGIESVKPFPPVNARPCVFEYIYFARPDSSVGGRSVYECRKSFGRELAKESGIEADIVIPVPDSGVPAAIGYAEAANIPFELGIIRNHYVGRTFIEPQQSIRAFSVKLKHNANRNLVGGKRVILIDDSIVRGTTSIKIVQMMREAGALEVHMRIASPPIKYPDFYGIDTPVQDQLLAANQTLEKMCDFIGADSLSFLSVDGLYKAMGHPEGRDPSNPLYTDHCFTGDYPTQLQDQQTDDHIKQLSLLSERR

SEQ ID NO: 117912 - protein, 491 aa, Unknown
  Bacterial polypetide isolated from the Sargasso Sea
MKTNRKSLFIKDDKLHEECGVFGVYNHEDSAALTALGLHALQHRGQEAAGIVTFDGTKFISERHPGLVSDNFTKTSVINRLVGNSAVGHNRYSTTGATIQRNIQPFFADLWGGGFAIAHNGNITNALSLRDELIRKGSIFQSTSDTETILQLVARSDADRTLDRLVDALMQISGAWALVVLTNKKLIGARDPFGIRPLVLGELDGAKILSSETCALDIIGAKFIREIEPGEIIVITEDGEESIKPFPNVRLRPCIFEYIYFSRPDSMLDGKSVYECRKSFGKNLAKECPANADIVVPVPDSGVPAALGYSEESKIPFELSIIRNHYVGRTFILPTQSNRQSSVKLKHNPDRGSIKGKSVVLVDDSVVRGTTSVKIVELMREAGASEIHMRIACPPIKYPDFYGIDTPETEQLLASNKSLDEMCKYIGADSLGFLSLDGLYKSMGYNKGRNNDSPEYTDHCFTGDYPTNLNDYKSEKIQEQLSLLSENESQN

SEQ ID NO: 117913 - protein, 311 aa, Unknown
  Bacterial polypetide isolated from the Sargasso Sea
MLKKKFKIYNPKIKEECAVFGISNNQDASALTALGLHALQHRGQEGCGIVSFDGNQYHSEKRFGLVGDNFSKEKVIKTLPGNYAIGHNRYSTTGGTTLRNIQPFFADTNAGGIGVAHNGNLTNAITLRKKMVDEGSIFYTTSDTETIVKLIARSKRAKTIDKVIDALFQIQGGYALVIMTQSTLIGVRDPYGIRPLVLGKLKNSYVLASETCALDIIGAKFEREVENGEIVCIENDKLESVKPFPQKKIRPCVFEYIYFSRPDSILNGKTAYEYRKNFGAELAKQENLNADLVVPVPDSGNAAALGYAQEK

SEQ ID NO: 117914 - protein, 398 aa, Unknown
  Bacterial polypetide isolated from the Sargasso Sea
YSTTGGTALRNVQPFFADTNAGGIGVAHNGNLTNAITLRNKLVEDGAIFYTTSDTETIVQLIAKSKRNKTIDKIIDAIFQIQGGYSLVMMTQNTLIGVRDPYGIRPLVIGKLKNSYVFASETCAFDIIGAKFVREVENGEIVYIENDELKSIKPFPLKKIRPCVFEYIYFSRPDSILNGKTAYEYRKNFGQQLAKEDKIEADLVVPVPDSGNAAALGYAEEKGLKFDLGLIRNHYVGRTFIEPSQQIRSLGVKLKLNPNISVIKNKRIILVDDSLVRGTTSSKIVKMLYDSGAKEVHVRIASPEIKFPDFYGVDTPTKKELLAANKSTAEICEFIKAKSLKFLSLNGLYLGMGFEKRNENYPQLTDHHFTGEYPVKIIDELGEDKVTQLSLLSTASNN

SEQ ID NO: 117915 - protein, 378 aa, Unknown
  Bacterial polypetide isolated from the Sargasso Sea
MGGLSIAHNGNLTNALALRETLVRDGAIFRTTSDTETIVQLIAKSKREKIVDKLIDALFQIKGGFSLVIMTNKKLIGVRDPFGIRPLVIGKLKESFILASETCALDIVGASFVREVENGEIVVVENNKINSIKPFPKQKARPCIFEYIYFARPDSLVDGKCAYEYRKNFGIQLAKETDINADIVVPVPDSGVPAALGYAEYSKKRFELGLIRNHYVGRTFIEPSQNIRSLGVKLKLSPTKSIVKNKSIILIDDSLVRGTTCLKIVKMLYEAGAKEVHVRIACPEIKFPDFYGVDMPTRKELLAFQKTNEEMCQHIKAKSLKFLSLGGLYEGLNKGKRNNTYPQFSDHYFTGDYPIKPTDNLGEEKIKQLSLLSSKSSS

SEQ ID NO: 117916 - protein, 491 aa, Unknown
  Bacterial polypetide isolated from the Sargasso Sea
MCGLAGIYSSKPVAAELYDSLIHLQHRGQDAAGIITYKNRMHKSKGSGLVRDIFTDKKIARLKGNIGIAHNRYPTHGGFGHGEVQPFWTSVPYGIALAHNGNLTNYNELSKMITNSETRYLNTHSDTEVLLHLFADLLHKKQQPDSDDEFFENLCFAVKKVFEKAQGAYSVVSLIIGKGLVAFRDPHGIRPLVKGVRVNDKGEKEYIIASENTMFYPLGFDPDGSVLPGELIYINQNGKVFKKRITKQKFNPCIFEYVYFARPDASLNDVSVYRSRLRMGQNLAEKWKKNFPNKNPDIIIPAPSTANTSALSMANSLGVRYSEGLYKNPFIGRTFIMPGQKARKKSVRYKMTPQKTEIEGKKIMIVDDSIVRGNTSREIVRMLKDFGAAEVYFAVACPPVVSPCFYGIDMPTRGELIANNKTVEEIKNYLDVDQIIYQDIQSLSEAVMRKGDHHIDQPCMACFDKNYITKEMSGERINELEKMRIKDRNGK

SEQ ID NO: 117917 - protein, 302 aa, Unknown
  Bacterial polypetide isolated from the Sargasso Sea
MCGIVGIVSKESVNQQLYDALTVLQHRGQDAAGMATSMDGRLHLRKGNGLVRDVFLDQHMQSLVGNIGIGHCRYPTAGSSSSAEAQPMYVNSPYGITLAHNGNLTNANQLQADLFAEDLRHTNTDSDSEVLLNVLAHELQMVGAIDPSPSDIFQALQGVYKRCHGAFAAVAMIIGTGIVGFRDSFGIRPLVYGFKETDQGMEYMLASESVALDLLGFQKIADVEPGEAVFISNEGEITLQTCAEQTRLNPCIFEHVYFARPDSIIDDVSVYKSRLRMGEYLAQNILSNYSQNSHDIDVVVPV

SEQ ID NO: 117918 - protein, 493 aa, Unknown
  Bacterial polypetide isolated from the Sargasso Sea
MCGVVGIVSQTEVSPLIYDALTILQHRGQDAAGIATSTNNRFFIRKQLGLVRDVIRNQHILTLRGQMGIGHVRYPTAGSEDRELAQPMYVNSPFGISISHNGNLTNIEELRETLVNKDLRHLNTDSDSEVLLNVFAHELQKQGSVKPGSKEIFAAVRSLHKRVRGAYSVVIMINGIGIVGFRDPFGIRPLIVGSKENDLIGKDYMIASESTVLDSLGYEIIDDIPAGSAVFISAEGEIESESCINNPIPTPCIFEYVYLARPDAKIDKISVHKSRLRMGEYLANKIINQRPEHDIDVVIPIPDSSTTSALQLATTLGVKYREGFVKNRYIGRTFIMPFQEKREKSVKQKLNPIDLEFQDKVVLLVDDSIVRGTTSRQIIEMARSSGAKKVYFASAAPPIRYQNVYGIDMAATTELVAHKRSEEEIEEFIKADWLIYQDLEDLIMAAQKGNEDIKQFECSIFNGKYVTDDIDDKYLKNLEDVRNDKSKISRQIN

SEQ ID NO: 117919 - protein, 384 aa, Unknown
  Bacterial polypetide isolated from the Sargasso Sea
FFADTNSGGIGVAHNGNLTNAITLRNKMVEEGSIFYTTSDTETIVKLIAKSKRPKTIDKVIDALFQIQGGYALVMMTQNTLIGVRDPYGIRPLVIGKLKNSYVFASETCAFDIIGAKFVREVENGEIVYVENDELKSIKPFPQKKVRPCVFEYIYFSRPDSILNGKTAYEYRKKFGAELAKEDNLDADLVVPVPDSGNAAALGYAEEKKINFDLGLIRNHYVGRTFIEPSQQIRSLGVKLKLNANISVIKNKKIILVDDSLVRGTTSSKIVKMLYDNGAKEIHVRIASPEIKYPDFYGVDTPTKKELLAANKSVDEIKEFIKAQSLKFLTLDGLYRGMGFDKRNDAYPQLTDHHFTGDYPVKIIDELGEDKVTQLSLLSTGSSN

SEQ ID NO: 117920 - protein, 141 aa, Unknown
  Bacterial polypetide isolated from the Sargasso Sea
MKNRLNFLKKFEVRQSHVPRFNEECGVFGISGTKDAAALTALGLHALQHRGQEGCGIVSYDGNSYHSERKFGLVGDNFTKKHSLEKLKGKIAIGHNRYSTTGGETIRNIQPFYADLHGGAISIAHNGNLTNALLLREQMVR

SEQ ID NO: 117921 - protein, 266 aa, Unknown
  Bacterial polypetide isolated from the Sargasso Sea
MCGIIGISAENNVAEEIYESLLMLQHRGQDAAGMVVCEPSGKLNSRKSKGYVRDVFQQNHMSNLQGNFGIGHVRYPTAGGIGKEFAQPMYVNTPYGISLAHNGNLTNSKKLAAELFHAERRHINTDSDSEVLLNIFALELSKQEAVFPKPKDFFTAVEKTHLRINGAYAVVALITGYGIVAFRDPLGIRPLTIGVRKGKNRNEYVVSSETALFSATGFKALRDVEPGEAVFIDNSGKIFTQQCFQDSEKKPCIFEYVYLARPDSTI

SEQ ID NO: 117922 - protein, 397 aa, Unknown
  Bacterial polypetide isolated from the Sargasso Sea
YVYAPYGIVLIHNGNLTNTRDLEKQLFNIDKRHTNSSSDTEMLLNVFATELQEQIHNQELEPDIIFDAVKSLHKRIQGSYASIALISGHGLLAFRDPFGIRPLVIGRRLSLNTKKEEWMVASESLVLENNDYQVVRDVDPGEAIFINLNGELFSKQCSANPMLCPCAFEYVYLARPDSIMNGISVYKARLKMGDYLSETIKETINSGEIDVVMPIPDSSRPAAMQVARQLGIEYREGFFKNRYVGRTFIMPGQQKRKKSVRQKLNAMSAEFKNKNVLIVDDSIVRGTTSKEIVQMAKDAGANKVFFTSAAPPVRFPHVYGINMPNRDELIAHDRTIREIADQLEIDNLVYQSVENLRKSIISDSSIKDLEMSCFTGFYVTGTVNKEYLNWVENEYKS

SEQ ID NO: 117923 - protein, 313 aa, Unknown
  Bacterial polypetide isolated from the Sargasso Sea
ALVMLTQTSLVGVRDPFGIRPLVIGKLKNSFVLASETCALDIIGAKFIREVENGEIVLIENNELKSIKPFPPRKVRPCVFEYIYFARPDSMLDGKTAYEHRKNLGSELAKENDVDADIVVPVPDSGNAAALGFAQSLNVKFELGLVRNHYVGRTFIEPSQKIRSLGVKLKLNANQSTIQGKKIILVDDSLVRGTTSHKIVKMLYDAGAKEVHVRIACPEIKFPDFYGVDTPTKKELLAANKSNSEICEYIGAKSLKFLSVNGMYRAIGFDGRNESYPQLTDHYFTGEYPVKPIDELGDNKITQLSLLNTASNN

SEQ ID NO: 117924 - protein, 218 aa, Unknown
  Bacterial polypetide isolated from the Sargasso Sea
MKNFDPKLKEECGVFGISNAKDASALTALGLHALQHRGQEGCGIVSFDGEKYYSEKRFGLVGDNFNKEKVLNNLKGNYAIGHNRYSTTGNNTLRNIQPFFADTNAGGIGVSHNGNLTNSISLRKKLVEEGAIFYTTSDTETIVQLIAKSKRSKTIDKVIDAIFQIQGGYALVMLTQNSLIGVRDPYGIRPLLIGKLGSSYVLASETCALDIIGANFVK

SEQ ID NO: 117925 - protein, 126 aa, Unknown
  Bacterial polypetide isolated from the Sargasso Sea
MQKKKYKIYNPKLKEECGVFGIANISDASALTALGLHALQHRGQEGCGIVSFDGEKYHSEKRFGLVGDNFNKEKVLKKLPGNYAIGHNRYSTTGGTALRNVQPFFADTNAGGIGVSHNGNLTNAIT

SEQ ID NO: 117926 - protein, 226 aa, Unknown
  Bacterial polypetide isolated from the Sargasso Sea
MKNFDPKLKEECGVFGISNAKDASAITALGLHALQHRGQEGCGIVTFDGEKYYSEKRFGLVGDNFNKEKVLKNLKGNFAIGHNRYSTTGNNILRNIQPFFADTNAGGIGVAHNGNLTNSISLRNKLVEDGAIFYTTSDTETIVQLIAKSKRPKKIDKIVDAIFQIQGGYALVMLTQNSLIGARDPYGIRPLVIGKLGNSYVLTSETCALDIIGGKFVREVEMEKLF

SEQ ID NO: 117927 - protein, 257 aa, Unknown
  Bacterial polypetide isolated from the Sargasso Sea
MQKIKLPIYNPKLKEECGVFGVSNSVDASALTALGLHALQHRGQEGCGIVSYDGQKYYSEKRFGLVGDNFNKQKVIKGLPGNYAIGHNRYSTTGDTSLRNIQPFFADTNTGGIGVAHNGNLTNAITLRKKLVEDGAIFHTTSDTETIVQLVAKSKRNKTIDKIIDALFQIQGGYALVMLTQNILIGVRDPFGIRPLVIGKVKDSYVFASETCALDIIGAKYIRDVENGEIVCVENGKLHSLKPFPTKKIRPCVLNTY

SEQ ID NO: 117928 - protein, 151 aa, Unknown
  Bacterial polypetide isolated from the Sargasso Sea
MKSFNSKFKEECGVFGISNAKDASALTALGLHALQHRGQEGCGIVTFDGEKYFSEKRFGLVGDNFNKEKVLNNLKGDYAIGHNRYSTTGNNTLRNIQPFFADTNAGGIGVAHNGNLTNSIYLRNKLVEDGAIFYTTSDTETIVQLIAKSKR

SEQ ID NO: 117929 - protein, 435 aa, Unknown
  Bacterial polypetide isolated from the Sargasso Sea
MKKLKEKCGVFGIHDIEDASALTALGLHALQHRGQEGCGIVSFDGKNFHSEKRQGLVGDNFTNKDVLKKLPGKFALGHNRYSTSGETSLRNIQPFFADLHGGGIAIAHNGNLTNALHLREELVKDGAIFRTTSDTETIVQLIAKSKRVKIIDKIIDALFQIQGGYALTMITNKKLIGVRDPLGIRPLVLGKIKKTYVLASETCALDIIGATFVREIENGEIVIVENNDIQSLKPFPKKKSRPCVFEYIYFARPDSLLNGKSAYEYRKNLGYALAKESENVGDIIVPVPDSGVPAALGYAQHKKMNFEVGLIRNHYVGRTFIEPTQSIRSLGVKLKLSANMSSIKNKSIVLIDDSLVRGTTCYKIVKMLYEAGAKEVHVKIACPEIKYPDFYGIDMPSKKELLAANKSLKEMKKFIGADSLSFLSLHGLYEALCNE

SEQ ID NO: 117930 - protein, 257 aa, Unknown
  Bacterial polypetide isolated from the Sargasso Sea
FSQQCSDMPQRGPCIFEYVYFSRPDSKIDEISVYKARMRMGSKLAKQIKETKPSHDIDVVIPIPDSSTTAAHQLAVDLGVPYREGFVKNRYIGRTFIMPYQEERKKSVRRKLNILDLEFQGKNVLLVDDSIVRGTTSKKIIEMAREAGANKVYFASAAPAIKYQNLYGIDMPATSELIASNKTDDEVAEEINSDWLIYQRLDDLIDAVKVGNPEIENFETSIFTGKYITPLVENYLEELENSRKDELKMQREKSQAS

SEQ ID NO: 117931 - protein, 306 aa, Unknown
  Bacterial polypetide isolated from the Sargasso Sea
NKLIGARDPLGIRPLILGKLENRFILSSETCALDIIGAKFVREIENGEVVVISGENIESIRPFPEIKKRPCIFEYIYFARPDSVFGGKSIYECRKNFGHELAAEAPCSADVVIPVPDSGVPAALGYAEAASLPFELGIIRNHYVGRTFIEPQQSTRDFGVKLKHNINRNAVRGKKVVLIDDSIVRGTTSVKIVELMRQAGAQEVHMKIASPPIKYPDFYGIDTPEKAQLLASLKSEEEMAAYIGADSLSFLSVDGLYRAMGYKNGRDGTNPAFTDHCFTGDYPTPLEDNNIAWLFETSQLSVRNEN

SEQ ID NO: 117932 - protein, 290 aa, Unknown
  Bacterial polypetide isolated from the Sargasso Sea
MKIITKILKKKFKNFNPKLKEECGVFGISDNQDASTLSTLGLHALQHRGQEGCGVVTFDGKKYHSEKRFGLVGDNFNKEEVLKSLPGSFAIAHNRYSTTGGTTLRNIQPFYADTNTGGIGVAHNGNLTNAITLRRKLVEDGAIFYTTSDTETIVQLIARSKRGKVIDKIIDALFQIQGGYALVMLAKDLLIGVRDPFGIRPLVIGKLKDSYVFASETCALDIIGAKYIRDVENGEIVYVENKKLISLKPFPLKKIRPCVFEYIYFSRPDSILNGKCAYEYRKNFGLELAK

SEQ ID NO: 117933 - protein, 290 aa, Unknown
  Bacterial polypetide isolated from the Sargasso Sea
MKNYNPKIKEECGVFGICNSADASTLVALGLHALQHRGQEGCGIVSFGNKKYHSEKRFGLVGDNFNKEKVLKNLPGNYAIGHNRYSTTGGTTIRNVQPFFADTNAGGIGVSHNGNLTNAITLRTKLVEDGAIFHTTSDTETIVQLVAKSKRKKTIDKIVDALFQIQGGYALVMLTQNTLIGVRDPFGIRPLVIGKLKNSYVFASETCALDIIGAKFVRDVENGEIVYIENDELKSIKPFPVKKTRPCVFEYIYFSRPDSILNGKCAYEHRKNFGIELAKETNVEADLVKP

SEQ ID NO: 117934 - protein, 245 aa, Unknown
  Bacterial polypetide isolated from the Sargasso Sea
MKKITKILKKKFKNFNPKLKEECGVFGISDSQDASTLSTLGLHALQHRGQEGCGVVTFDGKKYHSEKRFGLVGDNFNKEEVLKSLPGSFAIAHNRYSTTGGTTLRNIQPFYADTNTGGIGVAHNGNLTNAITLRRKLVEDGAIFYTTSDTETIVQLIARSKRGKVIDKIIDALFQIQGGYALVMLARDLLIGVRDPFGIRPLVIGKLKDSYVFASETCALDIIGAKYIRDVENGEIVYVENKKTY

SEQ ID NO: 117935 - protein, 229 aa, Unknown
  Bacterial polypetide isolated from the Sargasso Sea
MCGIVGIVQKDNCFTELYDALIMLQHRGQDAAGITISEGGTLNSRKSKGFVREVFTQRHFERLKGNYGIGHVRYPTAGGNSKEYAQPMYVNSPYGISLAHNGNLSNTKELAAELFSSDLRHISTDSDSEVLLNILAHEISKNNQKEPNPETLFKAVESTFKRCEGSINVVSIITGHGLLAFRDRYGIRPLSLGSRSNSDGTKDYMISSESAAFSSSNYDLERDLHPEKQ

SEQ ID NO: 117936 - protein, 179 aa, Unknown
  Bacterial polypetide isolated from the Sargasso Sea
MEYIDTSEDKLHEECGVFGIFGSPDASALTALGLHALQHRGQEGAGIVSFDGEKFHGVRRPGLVGDHFNKQEVIDRLKGSNAIGHVRYSTTGDSILKNIQPLYADLMSGGFACAHNGNLTNASALREKLVSRGSIFQSTSDTETILQLVAQSERKQIVDKLIDALFQIHGAYSLVILTT

SEQ ID NO: 117937 - protein, 253 aa, Unknown
  Bacterial polypetide isolated from the Sargasso Sea
MKKHIKILKKKLQNYNPRLKEECGVFGISDAKDASALTALGLHALQHRGQEGCGIVTFDGEKYYSEKRFGLVGDNFNKEKVLNNLKGNYAIGHNRYSTTGNNILRNIQPFFADTNAGGIGVAHNGNLTNSIALRNKLVEDGAIFYTTSDTETIVQLIAKSKRPKTIDKVIDAIFQIQGGYALVMLTQNSLIGVRDPYGIRPLVIGKLGNSYVLASETCAFDIIGAKFVREVENGEIVLIENNELKSIKPFPAK

SEQ ID NO: 117938 - protein, 254 aa, Unknown
  Bacterial polypetide isolated from the Sargasso Sea
EFVYFARPDSIIDGMSVYKSRLRMGEYLAQRIIKKGLHHDVDVVIPIPDTSRSTALQVAHHLGVKYREGFIKNRYIGRTFIMPGQEIRKKSVKQKLNPIDLEIRDKNVLLIDDSIVRGTTSKKIIQMARNAGANKVFFASAAPPVKYPNVYGIDMPSTAELLASNRTEEELARYIGADWLIYQDLDDLISAVQFDESDAEAFDTSCFSGEYVTGDVTPNYLDFIENKRNDAAKAKKEIERKQIEIHDQSSMTVS

SEQ ID NO: 117939 - protein, 185 aa, Unknown
  Bacterial polypetide isolated from the Sargasso Sea
MPIPDSSRPAAMQVQRQLGIEYREGFFKNRYVGRTFIMPGQQKRKKSVRQKLNAMSAEFKNKNVLIVDDSIVRGTTSKEIVQMAKDAGANKVFFTSAAPPVRYPHVYGINMPNRDELIAHNRTISQIADKLEIDNLVYQSVESLRKSIIGDSPIKGLEMSCFTGDYVTGTVNHEYLNWVENEYKS

SEQ ID NO: 117940 - protein, 438 aa, Unknown
  Bacterial polypetide isolated from the Sargasso Sea
VTFDGEKYYSEKRFGLVGDNFNKEKVLNNLKGNYAIGHNRYSTTGNNILRNIQPFFADTNAGGIGVAHNGNLTNSISLRKKLVEEGAIFYTTSDTETIVQLIAKSKRPKTIDKVIDAIFQIQGGYALVMLTQNSLIGVRDPYGIRPLVIGKLGNSYVLASETCAFDIIGAKFVREVENGELVLIENNKLKSIKPFPSKKVRPCVFEYIYFSRPDSLIGGKTAYEHRKNIGRELAKENDTNADIVVPVPDSGNAAALGFAQELKMNFEHGLIRNHYVGRTFIEPSQKIRSLGVKLKLNANQTTIKNKKIILIDDSLVRGTTSYKIVKMLYEAGAKEVHVKIACPEIRYPDFYGVDTPTKKELLAANKTNDEICEYIGAKSLRFLSIEGLYRAIGFEKRNEAYPQLTDHYFTGEYPVKLVDELGDNKITQLSLLSTGSNN

SEQ ID NO: 117941 - protein, 380 aa, Unknown
  Bacterial polypetide isolated from the Sargasso Sea
MCGIVGIVSKESVNQQLYDALTVLQHRGQDAAGMATSMDGRLHLRKGNGLVRDVFLDQHMQSLVGNIGIGHCRYPTAGSSSSAEAQPMYVNSPYGITLAHNGNLTNANQLQADLFAEDLRHTNTDSDSEVLLNVFAHELQMVGAIDPSASDIFQALQGVYKRCHGAFAAVAMIIGTGIVGFRDSFGIRPLVYGFKETDQGMEYMLASESVALDLLGFQKIADVEPGEAVFISNEGEITLQTCAEQTRLNPCIFEHVYFARPDSIIDDVSVYKSRLRMGEYLAQNILSNYSQNSHDIDVVVPVPDTGRTSALPLAHMLDVKFREGFVKNRYIGRTFIMSGQKQRRRSVRHKLATIDLEFKGKNVLIVDDSIVRGTTSKEII

SEQ ID NO: 117942 - protein, 108 aa, Unknown
  Bacterial polypetide isolated from the Sargasso Sea
MKALKTNRKSPFIKDDKLHEECGVFGVYNHEDSAALTALGLHALQHRGQEAAGIVTFDGTKFISERHPGLVSDNFTKMSVINRLVGNSAVGHNRYSTTGATIQRNIQP

SEQ ID NO: 117943 - protein, 133 aa, Unknown
  Bacterial polypetide isolated from the Sargasso Sea
MCGIVGISAETNVAAEIYDALLMLQHRGQDAAGIAVCSSEDQLNSRKSMGYVRDVFQQRHMEKLVGNYGIGHVRYPTAGGAGKEFAQPMYVNSPYGISLAHNGNLTNSKQLGNELFHAEMRHLQTDSDSEVFS

SEQ ID NO: 117944 - protein, 309 aa, Unknown
  Bacterial polypetide isolated from the Sargasso Sea
MFLWDQADDKLREECGVFGISGHEEAAAVTALGLHALQHRGQEAAGIVSYDGKRFHSERRIGLVSDHFTKKPIIERMQGQMAMGHVRYSTTGEPALRNVQPLFADLAVGGFAIAHNGNLTNALKLRNELVQSGAIFQSTSDTEVLLQLIARSKSNGVINRFVDALRQIDGAYALVALTDNKLIGARDPLGIRPLILGKLENQFILSSETCALDIIGAKFVREIENGEVVVISGENIESIKPFPEIKKRPCIFEYIYFARPDSVFGEKSIYECRKNFGHELAAEAPCSADVVIPVPDSGVPAALGYAEAA

SEQ ID NO: 117945 - protein, 289 aa, Unknown
  Bacterial polypetide isolated from the Sargasso Sea
GKIKNSYVFASETCALDIIGAKFIREVENGEIVYVEKDKLKSIKPFPLKKIRPCVFEYIYFSRPDSILNGKSAYDYRKNFGKELAKESDVDAEVIVPVPDSGNAAAIGYSQHLGKNFELGLIRNHYVGRTFIEPTQKIRSLGVKLKLNANKSSIKNKKIVLIDDSLVRGTTCYKIVKMLYDSGAKEVHVRIASPEIKYPDFYGVDTPTKKELLAANKSVEKICEYIGAKSLKFLSIDGLYKAMGFDKRNETYPQLTDHYFTGDYPIKPIDELGDNKITQLSLLSSASNN

SEQ ID NO: 117946 - protein, 461 aa, Unknown
  Bacterial polypetide isolated from the Sargasso Sea
DASALTALGLHALQHRGQEGCGIVTFDGKKYYSEKRFGLVGDNFNKEKILKNLKGNYAIGHNRYSTTGENTLRNIQPFFADTNAGGIGISHNGNLTNSISLRKKLVEDGAIFYTTSDTETIVQLIAKSKRSKTIDKIIDAIFQIQGGYALVMLTQNSLIGVRDPYGIRPLVIGKLGKSYVLASETCALDIIGAKFVRVVENGEIVLIENEKLTSIKPFPLKKVRPCVFEYIYFTRPDSIIDNKTAYEHRKNIGIELAKENDIDADIVVPVPDSGNAAALGFAQHLKINYEHGLIRNHYVGRTFIEPSQKIRSLGVKLKLNANQSTIKNKKIILIDDSLVRGTTSYKIVKMLYDSGAKEVHVKIACPEIRYPDFYGVDTPTKKELLAANKTNDEICKYIGAKSLKFLSLNGLYRAIGFEERNETYPQLTDHYFTGDYPVKPIDDLGDSKVTQLSLLSTASNS

SEQ ID NO: 117947 - protein, 137 aa, Unknown
  Bacterial polypetide isolated from the Sargasso Sea
MKIFDPKLKEECGVFGISNAKDASALTALGLHALQHRGQEGCGIVTFDGEKYYSEKRFGLVGDNFNKEKVLKNLKGNYAIGHNRYSTTGNNILRNIQPFFADTNAGGIGVSHNGNLTNTISLRNKLVEEGAIFYTTS

SEQ ID NO: 117948 - protein, 245 aa, Unknown
  Bacterial polypetide isolated from the Sargasso Sea
CIFEYVYFSRPDSKIDEISVYKARMRMGTKLAGQIKKTRPDHDIDVVIPIPDSSVTAAHQLAVDLQVPYREGFVKNRYIGRTFIMPYQEERRKSVRRKLNILDLEFDGKNVLLVDDSIVRGTTSKKIIEMAREAGANKVYFASAAPAIKYQNLYGIDMPATAELIASNKNNEEVAKEINADWLIYQTLDDLVDSVREGNPEIKEFETSIFTGKYFTPLVENYLEELEISRKDELKMQREKTKAKG

SEQ ID NO: 117949 - protein, 236 aa, Unknown
  Bacterial polypetide isolated from the Sargasso Sea
MTPAPRKLCVFELIYFARPDSKLDNNLVYSVRKQLGAQLAREHPVDADLVIGVPDSSTSAAVGYSVESGIPFSDGLIKNRYVGRTFIEPEQSLRDIGVRQKFNPLMEVIQGKRLVVVDDSIVRGTTTPHVVNLLKKSGATEVHLRVCAPPIKHPCYMGVDMASREELIASSKTVSEIKDYIDCDSLGYLSVENLLKVVDTDSGGFCDACFTGNYPIPIQLEMTKLSLEETEESQVR

SEQ ID NO: 117950 - protein, 289 aa, Unknown
  Bacterial polypetide isolated from the Sargasso Sea
MCGIIGISAENNVAEEIYESLLMLQHRGQDAAGMVVCEPSGKLNSRKSKGYVRDVFQQNHMSNLQGNFGIGHVRYPTAGGIGKEFAQPMYVNTPYGISLAHNGNLTNSKKLAAELFHAERRHINTDSDSEVLLNIFALELSKQEAVFPKPKDFFAAVEKTHLRINGAYAVVALITGYGIVAFRDPLGIRPLTIGVRKGKNRNEYVVSSETALFSATGFKVLRDVEPGEAVFIDNSGKIFTQQCFQGSEKKPCIFEYVYLARPDSTIDEISVYRSRMRMGLKLANRIREL

SEQ ID NO: 117951 - protein, 495 aa, Unknown
  Bacterial polypetide isolated from the Sargasso Sea
MCGVVGIVSQSEVSPIIYDALTILQHRGQDAAGIATSTNNRFFIRKQLGLVRDVIRNQHIVNLRGQMGIGHVRYPTAGTEDRELAQPMYVNSPFGISISHNGNLTNHEELKETLKNKDLRHLNTDSDSEVLLNVFAHELQKQGSMNPTSKEIFAAVKGLHKRVRGAYSVVIMINGIGIVGFRDPFGIRPLILGSKDSDLIGNDYMVASESTVLESLGFEVMDDIEAGSAVFINSEGEMEIESCIKNPVPTPCIFEYVYLARPDATIDNISVHKSRLRMGEYLAQKILREKPNHDIDVVIPIPDSSTTSALQLASTLGIKYREGFVKNRYIGRTFIMPFQEKREKSVRQKLNAIDLEFKDKVVLLVDDSIVRGTTSRQIIEMARSSGAKKVYFASAAPPIRFQNVYGIDMAATTELVAHNRTEEEIESFIDADWLIYQNLEDLIQAAQQGNKDIKQFECSIFDGKYVTDDIDETYLKNLEDLRSDKTKSLRQSNLN

SEQ ID NO: 117952 - protein, 107 aa, Unknown
  Bacterial polypetide isolated from the Sargasso Sea
MIKFKSDKLREECGVFGVSNTEDAATLVALGLHALQHRGQEGCGIVSFDGKNYHSEKRHGLVGDHFTSSEVLKKLPGNSAIGHNRYSTTGDNSLRNIQPFFADLQYG

SEQ ID NO: 117953 - protein, 494 aa, Unknown
  Bacterial polypetide isolated from the Sargasso Sea
MCGVVGIVSQTEVSPVIYDALTILQHRGQDAAGIATSTNNRFFLRKQLGLVRDVVRNQHILNLRGQMGIGHVRYPTAGSEDRELAQPMYVNSPFGISISHNGNLTNHEELRDSLVKKDLRHLNTDSDSEVLLNVFAHELQKQGSINPGSKEVFAAVKSLHKRVRGAYSVVIMINGVGIVGFRDPFGIRPLIVGSKERDLIGKDYMIASESTVLDSLGYEVIDDVMAGSAVFISSDGKMETESCINNPIPTPCIFEYVYLARPDAKIDKISVHKSRLRMGEFLAKKIIKERPDHDIDVVIPIPDSSTTSALQLAMTLGVKYREGFVKNRYIGRTFIMPFQEKREKSVKQKLNPIDLEFKDKVVLLVDDSIVRGTTSRQIIEMARYSGAKKVYFASAAPPIRYQNVYGIDMAATTELVAHQRTEKEIESFIMADWLIYQDLDDLISTVQVGNKKISQFECSIFDGKYVTDDIDDKYLKNLEDVRNDKSKLSRKSAN

SEQ ID NO: 117954 - protein, 343 aa, Unknown
  Bacterial polypetide isolated from the Sargasso Sea
MCGVVGIVSQTEVSPVIYDALTILQHRGQDAAGIATSTNNRFFLRKQLGLVRDVVRNQHILNLRGQMGIGHVRYPTAGSEDRELAQPMYVNSPFGISISHNGNLTNHEELRDSLVNKDLRHLNTDSDSEVLLNVFAHELQKQGSINPGSKEIFAAVKSLHKRVRGAYSVVIMINGVGIVGFRDPFGIRPLIVGSKESDLIGKDYMIASESTVLDSLGYDVIDDIKAGSAVFISSEGKMETESCINNPVPTPCIFEYVYLARPDAEIDKISVHKSRLRMGESLAKKILKERPDHDIDVVIPIPDSSTTSALQLATTLGVKYREGFVKNRYIGRTFIMPFQEKRK

SEQ ID NO: 117955 - protein, 326 aa, Unknown
  Bacterial polypetide isolated from the Sargasso Sea
MCGIVGIYSENHVASSIYDSLLMLQHRGQDAAGMSVCDVTGKINTRKSMGYVRDTFHQGHMSRLLGNYGIGHVRYPTAGGGGKEFAQPMYVNSPYGISIAHNGNLTNSKDLARELFHAEMRHINTDSDSEVLLNIFAHELGKQKAILPSKKHFFQAVRKTHVRCQGAYAVVALITGFGLVAFRDPRGIRPLVIGEKDGSTKKEYIVASENASFSALGFKTLRDVEPGEAIYIDVDGNLHSEQCSDGSQPTPCIFEYVYLARPDSTLDEISVYKARMRMGQKLAKKILRLNPNHDIDVVIPIPDSSTTAALQLAAVLKLPYRQGFVK

SEQ ID NO: 117956 - protein, 495 aa, Unknown
  Bacterial polypetide isolated from the Sargasso Sea
MCGVVGIVSKSEVSPIIYDALTILQHRGQDAAGIATSTNNRFFIRKQLGLVRDVIRNQHIVNLRGQMGIGHVRYPTAGSEDRELAQPMYVNSPFGISIAHNGNLTNHEELKETLKTKDLRHLNTDSDSEVLLNVFAHELQKQGSINPTSKEIFAAVRGLHKRVRGAYSVVVMINGIGIVGFRDPFGIRPLILGKKESDLFGDDYMVASESTVLESLGFDVMNDIEAGSAVFINSEGEMEIESCMNNPIPTPCIFEYVYLARPDATIDNISVHKSRMRMGEYLANKILKDNPNHDIDVVIPIPDSSTTSALQLASTLGIKYREGFVKNRYIGRTFIMPFQEKREKSVRQKLNAINLEFKDKVVLLVDDSIVRGTTSRQIIEMARSSGARKVYFASAAPPIRFQNVYGIDMAATTELVAHNRTEKEIESFIDADWLIYQNLDDLIKAAQQGNKHIKQFECSIFNGKYVTDDIDEKYLKNLEDLRSDKSKSLRQSNLN

SEQ ID NO: 117957 - protein, 493 aa, Unknown
  Bacterial polypetide isolated from the Sargasso Sea
MCGVVGIISSNKPVAGELYDSLIHLQHRGQDAAGIMTYNERFHIKKGTGLIRDIFDEQNMSRLLGKVGVGHTRYPTVGGFSIEEAQPVYTHVPYGIAMAHNGNIVNYTDLSKEVVEKDRRHVNSSVDIEVILHIFAHAMESNDRASDSSEFFDQICDSVKTVYGRVKGAYSVVSTIMNNGMFVFRDPHGIRPLVKGERKNDDGSVDHIFASETTMFYALGFEPTGNVLPGEVIWVEEDGTVHSRIVEEKQFTPCVFEYVYFARPDCIQNDVSVYRSRLRMGQNLANNWKNKYPDVLPDIVIPAPSTANTSALSFANELGVRYSEGLYKNPFIGRTFIMPGNEERKRSVRYKLVPQEFEISGKDVLIVDDSIVRGNTSRQIVKMIKEFGAKNVYFVSACPPVKFPCYYGVDMPTRTELTAANKTNEEIREFMGVDILMYQEVEDLKEAVTRKGEHNIDRPCMACLDGWYVTGDINEQVMESMENQRITERSVLK

SEQ ID NO: 117958 - protein, 369 aa, Unknown
  Bacterial polypetide isolated from the Sargasso Sea
MQENFDGSLSPEIIFKAATHLFDKCSGGYAVVSMILNEGLVAMRDPNGIRPLILGKREVGQGTEYMIASESVALDIADFEIMRDVKPGEVIYITKEGELFSKQCVKPKSYTPCIFEFVYFARPDSIIDGMSVYKSRLRMGEYLAQRIIKKGLHHDVDVVIPIPDTSRSTALQVAHHLGVKYREGFIKNRYIGRTFIMPGQEIRKKSVKQKLNPIDLEIRDKNVLLIDDSIVRGTTSKKIIQMARNAGANKVFFASAAPPVKYPNVYGIDMPSTAELLASNRTEEELARYIGADWLIYQDLDDLISAVQFDESDAEAFDTSCFSGEYVTGDVTPNYLDFIENKRNDAAKAKKEIERKQIEINDQSSMTVS

SEQ ID NO: 117959 - protein, 137 aa, Unknown
  Bacterial polypetide isolated from the Sargasso Sea
MCGVVGIISSRPVNQEIYDALTVLQHRGQDSAGIMTDNNGVLCLRKSNGLVNDVFSNEHMTRLRGNMGIGHVRYPTAGTLSSSEAQPFYVNSPFGICLAHNGNLVNNEELRKHLSEVDRRHLNTESDTEALLNLFAP

SEQ ID NO: 117960 - protein, 487 aa, Unknown
  Bacterial polypetide isolated from the Sargasso Sea
MLKKKFQTYDPKLKEECAVFGISDNSDASTLTALGLHALQHRGQEGCGIVSFDGKKYHSEKRFGLVGDNFSKEKVIKTLPGRFAIGHNRYSTTGGTTLRNIQPFFADTNAGGIGVSHNGNLTNAIKLRTKMVEEGSIFYTTSDTETIVKLIARSKRSKTVDRVIDALFQIQGGYALVVLTQNILIGARDPFGIRPLVIGKLKSSYVLASETCALDIIGAKYIRDVENGEIVCIEDGKLQSIKPFPQKKIRPCVFEYIYFSRPDSILNGKTAYEYRKNFGAELAKEEKIDADLVVPVPDSGNAAALGYAQQKKINFDLGLIRNHYVGRTFIEPSQKIRSLGVKLKLNANHSVIKDKKIILVDDSLVRGTTSSKIVKMLYDAGAKEVHLRIASPEIKFPDFYGVDMPTKKELLAANKTVDEIRDIISAKSLKFLSIDGLYKAMGYEKRNENYPQLTDHYFTGDYPVKIIDVLGEDKVTQLSLLSTGSNN

SEQ ID NO: 117961 - protein, 349 aa, Unknown
  Bacterial polypetide isolated from the Sargasso Sea
YTTSDTETIVKLIAKSKRPKTIDKVIDALFQIQGGYALVMMTQNTLIGVRDPYGIRPLVIGKLKNSYVFASETCAFDIIGAKFVREVENGEIVYVENDALKSIKPFPQKKVRPCVFEYIYFSRPDSILNGKTAYEYRKKFGAELAKEDNLDADLVVPVPDSGNAAALGYAEEKKINFDLGLIRNHYVGRTFIEPSQQIRSLGVKLKLNANVSVIKNKKIILVDDSLVRGTTSSKIVKMLYDNGAKEIHVRIASPEIKYPDFYGVDTPTKKELLAANKSVDEIKEFIKAKSLKFLTLDGLYRGMGFDKRNDAYPQLTDHHFTGDYPVKIIDELGEDKVTQLSLLSTGSSN

SEQ ID NO: 117962 - protein, 257 aa, Unknown
  Bacterial polypetide isolated from the Sargasso Sea
MYNPKLKEECAVFGISNTPEASTLTALGLHALQHRGQEGCGIVSFDGEKYHSEKRFGLVGDNFNDEKVLKNLPGNYAIGHNRYSTTGGTALRNVQPFFADTNSGGIGVAHNGNLTNAITLRNKMVEEGSIFYTTSDTETIVKLIAKSKRPKTIDKVIDALFQIQGGYALVMMTQNTLIGVRDPFGIRPLVIGKLKNSYVFASETCAFDIIGAKFVREVENGEIVYVEDDELKSIKPFPQKKVRPCVFEYIYFSKTQT

SEQ ID NO: 117963 - protein, 403 aa, Unknown
  Bacterial polypetide isolated from the Sargasso Sea
VSYDGKKYHSEKRFGLVGDNFNDEKVIKKLPGKYAIGHNRYSTTGGTALRNVQPFFADTNAGGIGVAHNGNLTNAITLRNKLVQDGAIFYTTSDTETIVQLIAKSKRVKTIDKIIDAIFQIQGGYALVMMTQNTLIGVRDPYGIRPLVIGKLKNSYVLASETCAFDIIGAKFVREVENGEIVYIENDELKSVKPFPPKKIRPCVFEYIYFSRPDSILNGKTAYEYRKNFGAQLAKEDKINADLVVPVPDSGNAAALGYAEEKKMKFDLGLIRNHYVGRTFIEPSQQIRSLGVKLKLNPNLSVIKNKKIILVDDSLVRGTTSSKIVKMLYDSGAKEVHVRIASPEIKFPDFYGVDTPTKKELMAANKSTDEICEFIKAKSLKFLSLNGLYLGMGFDKRIITTHS

SEQ ID NO: 117964 - protein, 411 aa, Unknown
  Bacterial polypetide isolated from the Sargasso Sea
KSLPGNYAIGHNRYSTTGGTTLRNIQPFFADTNTGGIGVSHNGNLTNAITLRRKLVEDGAIFYTTSDTETIVQLIARSKRVKTIDKIIDALFQIQGGYALVMLTQNTLIGVRDPFGIRPLVIGKLNNSYVFASETCALDIIGAKYIRDVENGEIVSVQDDKLVSIKPFPSKKVRPCVFEYIYFSRPDSLLNGKCAYEYRKNFGAELAKENSLKADLVVPVPDSGNAAAIGFSQLTKIPFDLGLIRNHYVGRTFIEPAQKIRSLGVKLKLNANKTTIKNKIIVLVDDSLVRGTTSHKIVKMLYDAGAKEVHVRIACPEIRYPDFYGVDTPTKKELLAANMNNKQICEYINAKSLKFLSIEGMYKAMGFENRNKTYPQLTDHYFTGDYPVKLIDKLGDNKVTQLSLLSTASNN

SEQ ID NO: 117965 - protein, 382 aa, Unknown
  Bacterial polypetide isolated from the Sargasso Sea
FYADLSSGGFACAHNGNLTNASMLRQNLVNDGAIFQSTSDTETILQLVARSKREYITDKLIDALFQIQGAYALVILTNKKLIGVRDPYGIRPLVLGDLKGAPVLASETCALDIIGAKYVRDVENGEIIVITDNKIESIKPFPNVNERPCIFERIYFSRPDSIIEGRSVYSYRKNLGSELAKEYKIDADVVVPIPDSGVPAALGFSQTSGIPFELGLIRNHYVGRTFIEPTQSIRQFGVKLKHSVNVSYIKNKKVILIDDSIVRGTTAKKIVKMVYDAGAKEVHLGVSCPPITHPDFYGIDTPNYDELIASNKNIDEMSSIIGTKTLFFLSLDGTYRAMGCEERDSSSPQFTDHCFTGEYPTPLIDMEQGNVSKQYSLLTEKS

SEQ ID NO: 117966 - protein, 247 aa, Unknown
  Bacterial polypetide isolated from the Sargasso Sea
VKSYKPFNKVSARPCIFEYIYFARPDSIMNGKNVYDCRKNMGKQLALELKTNADLVIPVPDSGVPAALGYAEASKIPFNLGIIRNHYVGRTFIEPTQTIRQLGIKLKHNANSSIIKNKKIVLIDDSIVRGTTAIKIVEMMRNAGASEVHMRISSPPIKFPDYYGIDTPSKNELIASKNSSEEIRKILKLDSLHFLSLDGLYHSMGHKKRDTNNPQYTDHCFTGDYPTKLIDRDEGALENQLSLLNDK

SEQ ID NO: 117967 - protein, 164 aa, Unknown
  Bacterial polypetide isolated from the Sargasso Sea
GFVKNRYIGRTFIMPEQDMRRRSVRRKLNPINDEFKNKNVLLVDDSIVRGTTMKEIVAMCYKSGAKKVSVASSSSEVKFPNVYGIDMPAKSELIASNRSLEEIKEFIGCDNLVYQDLSDLIDSVTELNSELDDVEKSIFTGVYPTNITDRYLEDLEKKRQAINS

SEQ ID NO: 117968 - protein, 301 aa, Unknown
  Bacterial polypetide isolated from the Sargasso Sea
AGVMPVNQSIYDALTVLQHRGQDAAGIITIDANNCFRLRKANGMVSDIFEARHMQRLQGNMGIGHVRYPTAGSSSASEAQPFYVNSPYGITLAHNGNLTNAHELRKKLFEEKRRHINTTSDSEILLNIFASELDNFRHYPLEADNIFAAIAATNRQIRGAYACVAMIIGHGMVAFRDPNGIRPLVMGKRDIGDGRTEYMVASESVALDTLGFEFLRDVAPGEAVYITEKGQLFTRQCADNPVSNPCLFEYVYFARPDSFIDKISVYSARVNMGTKLGEKIAREWEDLDIDVVIPIPETSCD

SEQ ID NO: 117969 - protein, 294 aa, Unknown
  Bacterial polypetide isolated from the Sargasso Sea
YPTAGSSSAAEAQPFYVNSPYGMVLAHNGNLTNAKELKEQQFKVARRHINTTSDSEVLLNVLAHELDLCDKMALRPEDIFSAVRKVHQQIRGAYAVVSLVIGHGLIGFRDPNGIRPLILGRRVDEQGQVEYMLASESVALDAIGFETVRDVAPGEAIYITEQGQLFSEQCAENPQMSSCIFEYVYFARPDSCIDKVSVYAARLNMGRKLGQKIAREWEDLDVDVVIPIPETSCDVALEIAHTLDLPYRQGFVKNRYIGRTFIMPGQTQRKKSVRRKLNAISSEFKGKKVLLVDD

SEQ ID NO: 117970 - protein, 357 aa, Unknown
  Bacterial polypetide isolated from the Sargasso Sea
ESLLMLQHRGQDAAGMVVCEPSGKLNSRKSKGYVRDVFQQTHMNNLQGNIGIGHVRYPTAGGVGKEFAQPMYVNTPYGISLAHNGNLTNSKKLAAELFHAERRHINTESDSEVLLNIFALELSKQEAVFPKPKDFFAAVEKTHLRINGAYAVVALITGYGILAFRDPLGIRPLTIGVRKGENRNEYVVSSETAHFSATGFKALRDVEPGEAVFIDNSGKIFTKQCFQGSEKRPCIFEYVYLARPDSTIDEISVYRSRMRMGLKLAEKIRKLELVDEIDVVIPIPDSSTTAALQLAADLQKPYRQGFVKNRYIGRTFIMPLQEERKKSVRRKLNILDLEFKDKNVLLVDDSIGKRHNK

SEQ ID NO: 117971 - protein, 279 aa, Unknown
  Bacterial polypetide isolated from the Sargasso Sea
MEYINTSEDKLHEECGVFGIFGSPDASTLTALGLHALQHRGQEGAGIVSFDGEKFHGVRRPGLVGDHFNKQEVINRLRGSNAIGHVRYSTTGDSILKNIQPLYADLMSGGFACAHNGNLTNASALREKLVSRGSIFQSTSDTETILQLVAQSERKQIVDKLIDALFQIHGAYSLVILTNKKLIGVRDPYGIRPLVLGDLNGAPVLASETCALDIIGAKFVREIENGEIIIISEKGMESIRPFPKVAERPCIFERIYFSRPDSMLGGNKVYTYRKNLGIE

SEQ ID NO: 117972 - protein, 275 aa, Unknown
  Bacterial polypetide isolated from the Sargasso Sea
RYYSEKRFGLVGDNFNKEKVLDNLKGNFAIGHNRYSTTGNNTLRNIQPFFADTNAGGIGVAHNGNLTNSIYLRNKLVEEGAIFYTTSDTETIVQLIAKSKRLKTIDKIIDAIFQIQGGYALVMLTQNLLVGVRDPYGIRPLVIGKLKNNYVLASETCALDIIGAKFIREVDNGEIVLIENDKLKSIKPFPEKKIRPCVFEYIYFARPDSILSGKTAYEHRKNLGKELAKENNIDADIIVPVPDSGNAAALGFAQHLNKNYEHGLIRNHYVGRTFI

SEQ ID NO: 117973 - protein, 294 aa, Unknown
  Bacterial polypetide isolated from the Sargasso Sea
SFRECLAHNGNLTNYDQLAKSLMIEDRRHLNTKSDSEVILNVFAHELQKRLDGEITARSIFGAIEAVHERCSGGYAVIIMIIGFGIVAFRDPNGIRPLILGKRKSETGEDYIVASESVALDVTHFDIDRDILPGEGLIIENNGKIQNKICSQNNSYSPCIFEFVYFARPDSIIDKLSVYKARLRMGEELASKILSERPNHDIDVVIPIPDTSRTAASQVAYNLGVKYREGFIKNRYVGRTFIMPGQEERNDSVRRKLNPIDLEFRGKNVLLVDDSIVRGTTSKQIIKLARDAGA

SEQ ID NO: 117974 - protein, 256 aa, Unknown
  Bacterial polypetide isolated from the Sargasso Sea
MEYINTSEDKLHEECGVFGIFGSPDASTLTALGLHALQHRGQEGAGIVSFDGEKFHGVRRPGLVGDHFNKQDVINRLQGSNAIGHVRYSTTGDSILKNIQPLYADLISGGFACAHNGNLTNASALREKLVSRGSIFQSTSDTETILQLVAQSERKQIVDKLIDALFQIHGAYSLVILTNKKLIGVRDPYGIRPLVLGDLNGAPVLASETCALDIIGAKFVREIENGEIIIISEKGMESIKPFPKVAERPCIFERIY

SEQ ID NO: 117975 - protein, 290 aa, Unknown
  Bacterial polypetide isolated from the Sargasso Sea
LLTGNVGMGHVRYPTAGSSNLSEAQPFYVNSPFGICLAHNGNLTNYDQLAKSLMIEDRRHLSTQSDSEVILNVFAHELQKRLDGEITAKSIFGAIEAVHDRCSGGYAVIIMIIGFGIVAFRDPNGIRPLILGKRKSETGEDYMVASESVALDVTHFDIDRDILPGEGLIIENNGKIQNKICSQKNSYSPCIFEFVYFARPDSIIDKLSVYKARLRMGEELASKILSERPNHDIDVVIPIPDTSRTAASQVAYNLGVKYREGFIKNRYVGRTFIMPGQEERNDSVRRKLNP

SEQ ID NO: 117976 - protein, 339 aa, Unknown
  Bacterial polypetide isolated from the Sargasso Sea
LGLHALQHRGQEGAGIVSFDGEKFHGVRRPGLVGDHFNKQEVINRLQGSNAIGHVRYSTTGDSILKNIQPLYADLMSGGFACAHNGNLTNASALREKLVSRGSIFQSTSDTETILQLVAQSERKQIVDKLIDALFQIHGAYSLVILTNKKLIGVRDPYGIRPLVLGDLNGAPVLASETCALDIIGAKFVREIENGEIIIISEKGMESIRPFPKVDERPCIFERIYFSRPDSMLGGNTVYSYRKNLGIELAKEHHVDADTVVPVPDSGVPAALGYAQQSNMPFELGIIRNHYVGRTFIEPSQSIRQFGVKLKHNANVSYIKNKKIILIDDSIVRGTTAKK

SEQ ID NO: 117977 - protein, 342 aa, Unknown
  Bacterial polypetide isolated from the Sargasso Sea
GDNFNNTNILSQLPGKTAIGHVRYSTTGESKPENLQPLYANLAIGGFACAHNGNLTNTYSIKKKLVESGSIFQTSSDTEIILQLVARSKKIKLVDKLIDALKQIKGAYSLIILTNKKLIGVRDPFGIRPLVLGEKDGSPVLASETCALDMIGAKYTRDVENGEIIIITENSTESIKPFKRVPERPCIFERIYFASPDSIVGKKTVYTYRKSLGEQLANENSVTADVVVPIPDSGVSAAIGFSQKSSIPFELGIIRSHYVGRTFIEPSQTIRQFGVKLKHSVNKSCIENKKVILIDDSIVRGTTASKIVKMVYEAGAKEVHLGISCPPIKHPDFYGIDTPNYN

SEQ ID NO: 117978 - protein, 276 aa, Unknown
  Bacterial polypetide isolated from the Sargasso Sea
MREECGVFGVANHEDSSALVALGLHALQHRGQEGCGIVSYDGKNYHSEKRQGLVGDHFTKSDVIKKLPGKFSIGHNRYSTTGETSLRNIQPFFADLHMGGLSIAHNGNLTNALSLRETLVKDGAIFRTTSDTETIVQLIAKSKREKIVDKLIDTLFQIKGGYALVIMTNKKLIGARDPFGIRPLVIGKLKESFILASETCALDIVGASFVREVDNGEIIIVENNKINSIKPFPKQKARPCVFEYIYFARPDSIVDGKCAYEYRKNFGIQLAKESDI

SEQ ID NO: 117979 - protein, 252 aa, Unknown
  Bacterial polypetide isolated from the Sargasso Sea
MKKNTKKQKKKFKIYNPKLKEECGVFGISNNPDASTLTALGLHALQHRGQEGCGIVSFDGKKYHSEKRFGLVGDNFNKEKVLKKLPGKFAIGHNRYSTTGGTALRNVQPFFADTNAGGIGVAHNGNLTNAITIRNKLVEEGAIFYTTSDTEVIVQLIAKSKRSKTIDKIVDAIFHIQGGYALVMMTKNTLIGLRDPYGIRPLVIGKLKNSYVFASETCALDIIGAKFVREVENGEIVYVEDDELKSLKPFSP

SEQ ID NO: 117980 - protein, 304 aa, Unknown
  Bacterial polypetide isolated from the Sargasso Sea
QKGYVRDVFQQNHMNNLQGNLGIGHVRYPTAGGIGKEFAQPMYVNTPYGISLAHNGNLTNSKKLAAELFHAERRHINTDSDSEVLLNIFALELSKQEAVFPKPKDFFTAVEKTHLRIYGAYAVVALITGYGILAFRDPLGIRPLSIGVRKGKNRNEYVVSSETALFSSTGFKFLRDVEPGEAVFIDNAGKIFSQQCSTSSQKRPCIFEYVYLARPDSTIDQISVYKSRMRMGLKLAERIRSLGLVDEIDVVIPIPDSSTTAALQLAADLKKPYRQGFVKNRYIGRTFIMPLQEERKKSVRRKLN

SEQ ID NO: 117981 - protein, 285 aa, Unknown
  Bacterial polypetide isolated from the Sargasso Sea
AGGAGKEFAQPMYVNSPYGISLAHNGNLTNSKVLARELFHAEMRHLNTDSDSEVLLNIFAHELGKQRAILPSKKHFFKAVRKTHIRCQGAYAVVALITGFGLLAFRDPRGIRPLVIGVKDGPSKQEYIVASENASFSALGFKTLRDVYPGEAVYIDVDGNLHSDQCSENAEPTPCIFEYVYLARPDSILDEISVYKARMRMGQKLAKKILKLNPEHDIDVVIPIPDSSTTAALQLAAALKLPYRQGFVKNRYVGRTFIMPNQEERKKSVRRKLNILDLELKEKMY

SEQ ID NO: 117982 - protein, 282 aa, Unknown
  Bacterial polypetide isolated from the Sargasso Sea
EECGVFGISNHIDASALVALGLHALQHRGQEGCGIVSFDGKNYHSEKRQGLVGDHFTNSEIIKKLPGKFAIGHNRYSTTGETSLRNIQPFFADLHMGGLSVAHNGNLTNALLLRESLVKDGAIFRTTSDTETIVQLIAKSKRIKFLDKLIDALFQIQGGYSLILMTNKKLVGVRDPFGIRPLVIGKLNNSFIFASETCALDIVGAKFLREVENGEIVFVENDKLESIKPFPIQKSRPCVFEYIYFARPDSLIGGKCAYEYRKNLGSELAKETDLKADFVVPV

SEQ ID NO: 117983 - protein, 289 aa, Unknown
  Bacterial polypetide isolated from the Sargasso Sea
CKRKSFKIYSPKIKEECGVFGISNSSDASTLTALGLHALQHRGQEGCGIVSFDGKQYHSEKRYGLVGDNFNKEKVLKKLPGNYAIGHNRYSTTGGTALRNIQPFFADTNAGGIGVAHNGNLTNAITLRNELVQEGAIFYTTSDTEVIVQLIAKSKRSKTIDKIVDAIFRVQGGYALVMMTKNTLIGLRDPYGIRPLVIGKLKNSYVFASETCALDIIGAKFVREVENGEIVYVENDELISLKPFSPKKVRPCIFEYIYFSRPDSILNGKTAYEYRKNYGEQLAREDDLE

SEQ ID NO: 117984 - protein, 229 aa, Unknown
  Bacterial polypetide isolated from the Sargasso Sea
MKKNTKKQKKKFKIYSPKIKEECGVFGISNNPDASTLTALGLHALQHRGQEGCGIVSFDGKKYHSEKRFGLVGDNFNKEKVLQKLPGKFAIGHNRYSTTGGTALRNVQPFFADTNAGGIGVAHNGNLTNAITIRNKLVEEGAIFYTTSDTEVIVQLIAKSKRSKTIDKIVDAIFHIQGGYALVMMTKNTLIGLRDPYGIRPLVIGKIKNSYVFASETCALDIIGAKFVR

SEQ ID NO: 117985 - protein, 350 aa, Unknown
  Bacterial polypetide isolated from the Sargasso Sea
MKSFDPKLKEECGVFGISNTNDASALTALGLHALQHRGQEGCGIVTFDGKNYYSEKRFGLVGDNFNKEKILNKLQGNYAIGHNRYSTTGSNTLRNIQPFFADTNAGGIGVAHNGNLTNSIYLRNKLVEEGAIFYTTSDTETIVQLIAKSKRKKTIDKVVDAIFQIQGGYALVMLTQKSLIGVRDPYGIRPLVIGKLKNSYILASETCALDIIGAKFIREVENGEIVLIEGDKLESIKPFPAKKVRPCVFEYIYFARPDSILTGKTAYEHRKNLGKELAKENDIDADIIVPVPDSGNAAALGFSQHLGKNFEHGLIRNHYVGRTFIEPSQKIRSLGVKLKLNANQTTIKDK

SEQ ID NO: 117986 - protein, 298 aa, Unknown
  Bacterial polypetide isolated from the Sargasso Sea
MSVDPRVVDGDSLREECGVFGIFDHADSATLTTLGLHALQHRGQEAVGIVSSDGKQFYAERRLGLVSENFTKPRIIDRLKGGNAIGHVRYSTTGDTILRNVQPLFADLAGGGFALAHNGNLTNALSLRKDLEKAGAIFQSTSDTETVLHLVARSEKTKTIDRFVDALAQVEGAYALVGLTNKKMIGVRDPLGIRPLVLGELDGSYILASETCALDIIGANFIREIENGEVVVITKRGLKSYHPFPKKKVRHCIFEYIYFARPDSIVGGHSVYECRKSLGRELAKESHVEADMIIPGAG

SEQ ID NO: 117987 - protein, 496 aa, Unknown
  Bacterial polypetide isolated from the Sargasso Sea
MCGIVGISAESNVAAEIYDALLMLQHRGQDAAGITVCNSDDKLSTRKSKGYVRDVFAQRHMEKLIGDYGIGHVRYPTAGGAGKEFSQPYYVNSPYGISLAHNGNLTNSKQLANELFHAEMRHLKTDSDSEVLLNIFAHELAKQREIYPSAENIFKAVSKTHLRCDGAYAVLALIAGHGLVAFRDNNGIRPLSIGIRKGKTRDEYVISSEDALFSSHGFKKLRDVEPGEAIFIDKNGELFSQQCADEPKKRPCIFEYVYFSRPDSKIDEISVYKARTRMGTRLASQIKNSKPDHDIDVVIPIPDSSVTAAHQLAVDLDVPYREGFVKNRYIGRTFIMPYQEERKKSVRRKLNILDLEFVGKNVLLVDDSIVRGTTSKKIIEMAREAGANKVYFASAAPAIKYQNLYGIDMPATSELIASNKSDEDVAKEINADWLIYQKLDDLIESVKEGNPEIEEFETSIFTGEYMTPLVENYLEDLENTRKDELKMQREKSTASG

SEQ ID NO: 117988 - protein, 285 aa, Unknown
  Bacterial polypetide isolated from the Sargasso Sea
MPGEGLIIKNNGKIQNKICSQNNSYSPCIFEFVYFARPDSIIDKLSVYKARLRMGEELASKILSEKPNHDIDVVIPIPDTSRTAASQVAYNLGVKYREGFIKNRYVGRTFIMPGQEERHDSVRRKLNPIDLEFRGKNVLLVDDSIVRGTTSKQIINLARNAGAKKVYFASAAPPVKYPNVYGIDMAAASELIASKKTVDQIKEEIGADWLFYQDLEALIRAVSHDNSDITGFDTSCFSGEYITNDVSEEYLKKIESIRNDQAKQKKEADMSQDSDVSKADRIASL

SEQ ID NO: 117989 - protein, 311 aa, Unknown
  Bacterial polypetide isolated from the Sargasso Sea
MKNFDPKLKEECGVFGISNTKDASALTALGLHALQHRGQEGCGIVSFDGEKYYSEKRFGLVGDNFNKEKVLNNLKGNYAIGHNRYSTTGNNTLRNIQPFFADTNAGGIGVSHNGNLTNSISLRKKLVEEGAIFYTTSDTETIVQLIAKSKRSKTIDKVIDAIFQIQGGYALVMLTQNSLIGVRDPYGIRPLLIGKLGSSYVLASETCALDIIGANFVREVENGEIVLIENNQLTSIKPFPPKRVRPCVFEYIYFARPDSLLDNKTAYEHRKNLGKELARENDIDADIVVPVPDSGNAAALGFSQKHKMNFE

SEQ ID NO: 117990 - protein, 424 aa, Unknown
  Bacterial polypetide isolated from the Sargasso Sea
GLVSQVFDQDVLARMPGELAIGHNRYSTTGSSRVCNAQPVVLMTRLGAFALAHNGNLVNARELRELVDDGQAEFTSTTDSELIAFAVQQAVDRGLDWSPAIEAALKLCRGAFSLAIGTPDGLFAVRDGHGIRPLVFGTLGDPVTGHWVVSSETCGLEIIGARYVDDVQPGELVRFELGSAEPQRRRWSEEPNRLCVFEMIYFARPDSQFFGESLYSYRQRIGRTLARESCVEADLVIGVPDSGIPAAIGFSQESGIPYGDGLIKNRYVGRTFIQPTQAMREAGIRVKLNPLPDVLAGKRLIVIDDSIVRGTTSRKLVVALRDAGATEVHMRISSPPVTHPCFYGIDTDTQDQLIAAQMTLEQIKDHLKVDSLAYLSKEGMLEAAKAESGHFCSACFDGQYPIPMDQTLLSSKLMMEPAGIAATS

SEQ ID NO: 117991 - protein, 487 aa, Unknown
  Bacterial polypetide isolated from the Sargasso Sea
MLKKKFKNFNTKIKEECGVFGISNNNDAAALTALGLHALQHRGQEGCGIVSFDGKKYHSEKRFGLVGDNFNKEKVLKKLSGNYAVGHNRYSTTGGTTLRNIQPFYADTNAGGISISHNGNLTNAITLRSKLVKDGAIFYTTSDTETIVQLIAKSKRQKTIDKIIDALFQIQGGYALVMLTQKTLIGVRDPFGIRPLVIGKIKNSYVLASETCALDIIGAKYIRDVENGEIVFIEDDKLESIKPFPKKKQRPCVFEYIYFSRPDSILNGKSAYEYRKNFGIHLAKEDNIDGDVIVPVPDSGNAAALGYSQQSKINFELGLIRNHYVGRTFIEPSQKIRSLGVKLKLNPNQTSILNKRIILVDDSLVRGTTSYKIVKMLYDAGAKEVHVRIACPEIKYPDFYGVDTPTKKELLAANKSNNEICKYIGAKSLKFLSIDGLYNAMGFESRNNNYPQLTDHHFTGDYPVKPIDDLGDDKITQLSLLSTGSDN

SEQ ID NO: 117992 - protein, 486 aa, Unknown
  Bacterial polypetide isolated from the Sargasso Sea
MCGIVGIVSSNDVNQQIYDSLLLLQHRGQDSTGIATMENTVFHIHKVKGQVNTAYRTRDMRNLIGKIGLGHVRYATKGSAESVEEAQPFYVNAPYGIVLIHNGNLTNTRDLEKQLFNVDKRHTNSSSDTEMLLNVFATELQEQINNQELEPDIIFNAVKSLHKRIQGSYASIALISGHGLLAFRDPFGIRPLVIGKRLSLTTKKEEWMVASESLVLENNDYEVVRDVDPGEAVFINLDGEFFSKQCSENPMLFPCAFEYVYLARPDSIMNGISVYKARLKMGDYLAETIKETINSGDIDVVMPIPDSSRPAAMQVARQLGIEYREGFFKNRYVGRTFIMPGQQKRKKSVRQKLNAMSAEFKNKNVLIVDDSIVRGTTSKEIVQMAKDAGANKVFFTSAAPPVRYPHVYGINMPNRDELIAHNRTISEIADKLEIDNLVYQSVESLRKSIIGDSPIKGLEMSCFTGDYVTGTVNQEYLNWVENEYKS

SEQ ID NO: 117993 - protein, 502 aa, Unknown
  Bacterial polypetide isolated from the Sargasso Sea
MCGIVAVFGSNNVVHDIYESLTVLQHRGQDASGILTNHNGKILLRKSLGLVRDGFDRKHIDRLRGHLGIGHVRYPTAGHAESSAEAQPFYVNSPYGIGLAHNGNLINSSELKINLFNEDKRHINTRSDSEILLNIFAHELDLHSKDEFSPDDVFYAVAGVHRRVRGAYAVVSLISERGIVAFRDPNGIRPLCYGTRTTGGKPEVMIASESVALDSCGYELVSDILPGEAIFIDMDGNIHKRICAETTNYTPCIFEYVYFARPDTIIDGISVYSARMKMGESLADKILQEWNDHDIDVVIPIPDTSRISALELSMKLGVPYREGFIKNRYIGRTFIMPEQSQRIKSVKRKLNAINTEFAGKNVLLVDDSIVRGTTSKQIIEMAREAGASRVYMASAAPPVKHANVYGIDMPASNEFAADGRSTNEIAELINADKLFYQDLEDLVKSVYQENSDIKNFDSSCFDGRYVTGDVTKEYLEELDELRNNASKLRENITELGDDIMVY

SEQ ID NO: 117994 - protein, 475 aa, Unknown
  Bacterial polypetide isolated from the Sargasso Sea
MKEECGVFGICSAKDAAALTALGLHALQHRGQEGCGIVSFDGKKYYSEKRFGLVGDNFNKEKVLNNLKGSYAIGHNRYSTTGNNTLRNIQPFFADTNAGGIGVAHNGNLTNSISLRNKLVEDGAIFYTTSDTETIVQLIAKSKRPKTIDKVVDAIFQIQGGYALVMLTQSSLIGVRDPYGIRPLVIGKLGSSYVLASETCALDIIGAKFLREVENGEIVLIENNELKSIKPFPQKKVRPCVFEYIYFARPDSLIDNKTAYEHRKNLGKELAKENDIKADIIVPVPDSGNAAALGFAQNLNINFEHGLIRNHYVGRTFIEPSQKIRSLGVKLKLNANETTIKNKKIILIDDSLVRGTTSHKIVKMLYDAGAKEVHVRIACPEIRYPDFYGVDTPTKKELLAANKSNDEIREYIGAKSLKFLSIDGLYRAIGFDKRNETYPQLTDHYFTGDYPVKPVDELGDSKITQLSLLSTASNN

SEQ ID NO: 117995 - protein, 383 aa, Unknown
  Bacterial polypetide isolated from the Sargasso Sea
MCGIVGISAESNVAAEIYDSLLMLQHRGQDAAGMTVCNKDDRLNTRKSMGYVRDVFQQVHMDKLIGNYGIGHVRYPTAGGAGKEFAQPMYVNSPYGISLAHNGNLTNSKQLSNELFHAEMRHLITDSDSEVLLNIFAHELGKQREIYPSAEHIFKAVTKTHIRCDGAYAVLALITGHGILAFRDNNGIRPLSIGIRQGESRDEYIVASEDSLFIPLGFKKLRDIDPGEAVFIDKEGNLFSQQCSENPLKRPCIFEYVYFSRPDSKIDEISVYKARMRMGSKLANQIKEINPNHDIDVVIPIPDSSTTAAHQLAVDLGVPYREGFVKNRYIGRTFIMPYQEERKKSVRRKLNILDLEFQGKNVLLVDDSIVRGTTSKKIIEMAR

SEQ ID NO: 117996 - protein, 488 aa, Unknown
  Bacterial polypetide isolated from the Sargasso Sea
KIFLIKKNMKKLKKKFKIYDPKIKEECAVFGISNSTDASTLAALGLHALQHRGQEGCGIVSYDGEKYHSEKRFGLVGDNFNDEKVLKKLPGKYAIGHNRYSTTGGTALRNVQPFFADTNAGGIGVAHNGNLTNAITLRNKLVQDGAIFYTTSDTETIVQLIAKSKRGKTIDKIIDAIFQIQGGYALVMMTQNILIGVRDPYGIRPLVIGKLKNSYVFASETCAFDIIGAKFVREVENGEIVYIENDELKSIKPFPPKKIRPCVFEYIYFSRPDSILNGKTAYEYRKNFGLQLAKEDKIEADLVVPVPDSGNAAALGYAEEKGLKFDLGLIRNHYVGRTFIEPSQQIRSLGVKLKLNPNISVIKDKRIILVDDSLVRGTTSSKIVKMLYDSGAKEVHVRIASPEIKFPDFYGVDTPTKKELLAANKSTAEICEFIKAKSLKFLSLNGLYLGMGFEKRNENYPQLTDHHFTGEYPVKIIDELGEDKVTQL

SEQ ID NO: 117997 - protein, 489 aa, Unknown
  Bacterial polypetide isolated from the Sargasso Sea
MKKLKKKFKIYDPKIKEECAVFGISNSTDASTLAALGLHALQHRGQEGCGIVSYDGEKYHSEKRFGLVGDNFNDEKVLKKLPGKYAIGHNRYSTTGGTALRNVQPFFADTNAGGIGVAHNGNLTNAITLRNKLVQDGAIFYTTSDTETIVQLIAKSKRGKTIDKIIDAIFQIQGGYALVMMTQNTLIGVRDPYGIRPLVIGKLKNSYVLASETCAFDIIGAKFVREVENGEIVYIENDELKSIKPFPPKKIRPCVFEYIYFSRPDSILNGKTAYEYRKNFGSQLAKEDEIEADLVVPVPDSGNAAALGYAEEKGLKFDLGLIRNHYVGRTFIEPSQQIRSLGVKLKLNPNISVIKNKRIILVDDSLVRGTTSSKIVKMLYDSGAKEVHVRIASPEIKFPDFYGVDTPTKKELLAANKSTAEICEFIKAKSLKFLSLNGLYLGMGFEKRNENYPQLTDHHFTGEYPVKIIDELGEDKVTQLSLLSTASNN

SEQ ID NO: 117998 - protein, 483 aa, Unknown
  Bacterial polypetide isolated from the Sargasso Sea
MEYINTSEDKLHEECGVFGIFGSPDASTLTALGLHALQHRGQEGAGIVSFDGEKFHGVRRPGLVGDHFNKQEVIDRLKGSNAIGHVRYSTTGDSILKNIQPLYADLMSGGFACAHNGNLTNASALREKLVSRGSIFQSTSDTETILQLVAQSERKQIVDKLIDALFQIHGAYSLVILTNKKLIGVRDPYGIRPLVLGDLNGAPVLASETCALDIIGAKFVREIENGEIIIISEKGMESIRPFPKVAERPCIFERIYFSRPDSMLGGNTVYSYRKNLGIELAKEHQVDADIVVPVPDSGVPAALGYAQQSSTPFELGIIRNHYVGRTFIEPSQSIRQFGVKLKHNANVSYIKNKKVILIDDSIVRGTTAKKIIKMIYDAGAKEVHLGIACPPIKHPDFYGIDTPDYNELIASKNSIEEINKAIGSKSLFFLSLEGTYQAMGYDSRNPDQPQFTDHCFTGEYPTSLIDREKGNISKQFSLLTEKN

SEQ ID NO: 117999 - protein, 495 aa, Unknown
  Bacterial polypetide isolated from the Sargasso Sea
MKNRQNFLKKFEVRQSHVPRFNEECGVFGISGTKDAAALTALGLHALQHRGQEGCGIVSYDGNSYHSERKFGLVGDNFTKKQSLEKLKGKIAIGHNRYSTTGGETIRNIQPFYADLHGGAISIAHNGNLTNALLLREQMVREGAIFQTTSDTETIVQLVARSKKKDILNKIIDALMQIQGGYALSIVANGTLIGARDPLGIRPLVLGKFKNAFILASETCALDIIGAKFIREIENGEVVIIKDNKVESRRPFPKKKIKPCVFEYIYFSRPDSILKNKTAYEYRKNLGTYLAKETDIKPDVVVPVPDSGVPAALGFSQESGIPFELGLIRNHYVGRTFIEPTQQIRSLGVKLKLNPNQSSIKNKKVVLIDDSLVRGTTSTKIIKMLYDFGAKEVHMRIASPAIRYPDFYGVDTPTQEELLAANKNVEEMRKYIGAKSLKFLSLDGLYKALGYDGRDNDNPQFTDHYFTGEYPIRPLDYLNDESLKKLSFLSLASNN

SEQ ID NO: 118000 - protein, 482 aa, Unknown
  Bacterial polypetide isolated from the Sargasso Sea
MKTFDPKLKEECGVFVFSNAKDASALTALGLHALQHRGQEGCGIVSFDGEKYYSEKRFGLVGDNFNKEKVLNNLKGNYAIGHNRYSTTGNNTLRNIQPFFADTNAGGIGVSHNGNLTNSISLRKKLVEEGAIFYTTSDTETIVQLIAKSKRSKTIDKVIDAIFQIQGGYALVMLTQNSLIGVRDPYGIRPLLIGKLGSSYVLASETCALDIIGANFVREVENGEIVLIENNQLTSIKPFPPKKVRPCVFEYIYFARPDSLLDNKTAYEHRKNLGKELAKENDIDADIVVPVPDSGNAAALGFSQKHKMNFEHGLIRNHYVGRTFIEPSQKIRSLGVKLKLNANQTTIKNKKIILIDDSLVRGTTSHKIVKMLYDAGAKEVHVRIACPEIRYPDFYGVDTPTKKELLAANKTNDEICEYIGAKSLKFLSIDGLYRAIGFDKRNDTYPQLTDHYFTGDYPVKPVDELGDSKITQLSLLSTASNN

SEQ ID NO: 118001 - protein, 501 aa, Unknown
  Bacterial polypetide isolated from the Sargasso Sea
MCGIVAVYGTNNVVRDIYESLTVLQHRGQDASGILTNHDGKITLRKSLGLVRDGFDAKHITRLKGKLGIGHVRYPTAGHADSSAEAQPFYVNSPYGIGLAHNGNLINSTDLKKNLFSEDLRHINTKSDSEILLNIFAHELHLHSKESFTPDDVFYAVAGVHRRVKGAYAVVTLISDRGIVAFRDPMGIRPLCFGTRVVDGKTETMIASESVALDTAGFKLERDISPGEAIFIDIDGKIHTRLCTEKSGYSPCIFEFVYFARPDTIIDGISVYSARMKMGQNLAKKIMTQWKDHDIDVVIPIPDTSRISALELSISLKVPYREGFIKNRYIGRTFIMPEQEQREKSVKRKLNAIASEFKDKNVLLVDDSIVRGTTSKQIIDMARDAGAKRVYMASAAPPVKYPNVYGIDMPASHEFAADGRTEIEISKLIGADKLFYQNLEDLISAVKDKNSPVKTFDSSCFDGNYVTGNVTEEYLNELDDLRNDVAKKKDNMDAHDDVMVY

SEQ ID NO: 118002 - protein, 508 aa, Unknown
  Bacterial polypetide isolated from the Sargasso Sea
MCGIVGIVGTSPVNQAIYDGLTVLQHRGQDAAGIITIENNTFSLRKANGLVKDVFHTRHMKRLQGTIGIGHVRYPTAGSSSSSEAQPFYVNSPFGIALAHNGNLTNAEELKEQLFSEARRHVNTTSDSEILLNIMAHELSRSDKLHLDPEDVFTAVAEVNKKVTGGYAAIAMIIGHGVVAFRDPNGIRPLVFGKRETEKGTEYMFASESVALKPDGFEFIRDVAPGEAIFVTEDGQFHSLNCADKVSYSPCIFEFVYFARPDSTIDRMSVYATRVNMGTKLGEKIAREWADKDIDVVIPIPETSCDVALEIARVLDLPYRQGFVKNRYIGRTFIMPGQEMRKKSVRQKLNAIDREFKGKNVLLVDDSIVRGTTSAQIVEMARESGAKNVYFASAAPEIRFPNVYGIDMPSAAELIAHGREVEDINASIGSDGLIFQSLTDLMAAVSQENPEITQFETSVFDGQYITGDIDQNYLNRIDKLRNDTAKSTRETAMSSGLEIHNQEENETD

SEQ ID NO: 118003 - protein, 500 aa, Unknown
  Bacterial polypetide isolated from the Sargasso Sea
MCGIIGIVGSPSTQVATSVYDGLIVLQHRGQDAAGIVTSDSENICHRRANGLVRDVFLDRHMKRLNGSMGIGHVRYPTAGSSSSDEAQPFYTNTPFGVSLAHNGNLNNTPDIISGLLEYDHRRINTSSDSEALLNLFAAEIQRSVNGRPGGMAALNEDDIFRAVERTHLRAEGSYSVVCLITGWGMVAFRDPHGIRPLFLGKREVDGFTERLVSSESVVCQSIGFENDRDISPGEAVIVRMDGETHAKNCHSVVNHTPCVFEHVYFARPDSVIDGISVHQARLRMGEALASRIESLFPDHRIDAVIPVPDSGRIAALGLSSALGVPYREGFVKNRYIGRTFIMPGQKIRKDSVRKKLNTISEEFNGKTVLIVDDSIVRGNTSRRIVQMARDAGASRVLFASSSPPIVHPNVYGIDMPAREEYVAFGKTNDEICQAIGADWLIYQDLDDLVDACTGTSGSQIEEFDCSCFNGIYVTGGITEEYLSRISRTRSDSGKEQASV

SEQ ID NO: 118004 - protein, 478 aa, Unknown
  Bacterial polypetide isolated from the Sargasso Sea
MEEACGVFGVLAAGQQVSSLCYFGLYALQHRGQEAAGIAVFEGDRVRLHKDMGLVSQVFDQDVLERMPGHLAVGHTRYSTTGSSRVCNAQPLVLMTRLGPFALAHNGNLVNAMQLRDQLQQQGCQATGTTDSELIAFALQAQVESGLDWDEAIKAAARQCQGAFSLVIGTPDALYGLRDGHGLRPLVFGSLPEADVASWVLSSETCGLDIVGSRFLDDVAAGELVRFRSGEDQPFRSRWIEETPKLCVFELIYFARPDSRFFGESLYSYRKRIGQRLAQESPVEADLVIGVPDSGIPAAIGFSQTSGIPFGDGLIKNRYVGRTFIQPTKAMREAGIRVKLNPLPDVLEGQRIVVVDDSIVRGTTSRKLVQAFRDAGALEVHMRISSPPVTHPCFYGIDTDSQDQLIAARLELEEIEAHLGVDSLAYLTREGMLHCAQEQSEHFCSACFDGNYPIPVEDGMRTSKLMLEPAGVAATLQP

SEQ ID NO: 118005 - protein, 493 aa, Unknown
  Bacterial polypetide isolated from the Sargasso Sea
MCGIVGIYSENHVASSIYDSLLMLQHRGQDAAGMSVCELTGKINTRKSMGYVRDAFQQVHMNRLLGNYGIGHVRYPTAGGGGKEFAQPMYVNSPYGISIAHNGNLTNSKDLARELFHAEMRHINTDSDSEVLLNIFAHELGKQKAILPSKKHFFQAVRKTHVRCQGAYAVVALITGFGLVAFRDPRGIRPLVIGEKDGPTKKEYIVASENASFSALGFKTLRDVEPGEAIYIDVDGNLHSEQCSDGSQPTPCIFEYVYLARPDSTLDEISVYKARMRMGQKLAKKILRLNPNHDIDVVIPIPDSSTTAALQLAAALKLPYRQGFVKNRYVGRTFIMPNQEERKKSVRRKLNILDLEFKDKNVLLVDDSIVRGTTSKRIIEMAKQAGAKKVYFSSAAPPVKFQNLYGIDMAATNELIAYGKTEEEVADAIGADWLIYQDLKDLIDSAREGNPAIENFEISIFDGKYPTSISSDYLEDLEVTRGDETKVAREKSS

SEQ ID NO: 118006 - protein, 489 aa, Unknown
  Bacterial polypetide isolated from the Sargasso Sea
MKKLKKKFKIYDPKIKEECAVFGISNSTDASTLAALGLHALQHRGQEGCGIVSYDGEKYHSEKRFGLVGDNFNDEKVLKKLPGKYAIGHNRYSTTGGTALRNVQPFFADTNAGGIGVAHNGNLTNAITLRNKLVQDGAIFYTTSDTETIVQLIAKSRRVKTIDKIIDAIFQIQGGYALVMMTQNTLIGVRDPYGIRPLVIGKLKNSYVFASETCAFDIIGAKFVREVENGEIVYIENDELKSIKPFPPKKIRPCVFEYIYFSRPDSILNGKTAYEYRKNFGQQLAKEDKIEADLVVPVPDSGNAAALGYAEEKGLKFDLGLIRNHYVGRTFIEPSQQIRSLGVKLKLNPNISVIKNKRIILVDDSLVRGTTSSKIVKMLYDSGAKEVHVRIASPEIKFPDFYGVDTPTKKELLAANKSTAEICEFIKAKSLKFLSLSGLYLGMGFEKRNENYPQLTDHHFTGEYPVKIIDELGEDKVTQLSLLSTASNN

SEQ ID NO: 118007 - protein, 493 aa, Unknown
  Bacterial polypetide isolated from the Sargasso Sea
MKKHIKILKKKLKNYNPRLKEECGVFGISNAKDASALTALGLHALQHRGQEGCGIVTFDGEKYYSEKRFGLVGDNFNKEKVLNNLKGNYAIGHNRYSTTGNNILRNIQPFFADTNAGGIGVAHNGNLTNSIALRNKLVEDGAIFYTTSDTETIVQLIAKSKRPKTIDKVIDAIFQIQGGYALVMLTQNSLIGVRDPYGIRPLVIGKLGNSYVLASETCAFDIIGAKFVREVENGEIILIENNELKSIKPFPAKKVRPCVFEYIYFSRPDSLIGGKTAYEHRKNIGRELAKENDTDADIVVPVPDSGNAAAMGFAQELKMNFEHGLIRNHYVGRTFIEPSQKIRSLGVKLKLNANQTTIKNKKIILIDDSLVRGTTSYKIVKMLYEAGAKEVHVKIACPEIRYPDFYGVDTPTKKELLAANKTNDEICEYIGAKSLKFLSIEGLYKAIGFEKRNETYPQLTDHYFTGEYPVKLVDELGDNKITQLSLLSTGSNN

SEQ ID NO: 118008 - protein, 300 aa, Unknown
  Bacterial polypetide isolated from the Sargasso Sea
NGKTREEYIISSEDALFTSMGFEKLRDIEPGEAIFIDKKGKLHSQQCSEEPIKRPCIFEYVYFARPDSKIDEVSVYKARMRMGSKLAEQIKKTKPDHDIDVVIPIPDSSTTAAHELAVGLGIPYREGFVKNRYIGRTFIMPYQEERKKSVRRKLNILDLEFQGKNVLLVDDSIVRGTTSKKIIEMARASGAKKVYFASAAPPIKYQNLYGIDMPSTSELIASNKTNDEVAKEIDADWLIYQTLDDLIDTVQVGNPEINEFETSIFTGKYITPLVENYLEDLENSRKDELKMQREKSKANG

SEQ ID NO: 118009 - protein, 493 aa, Unknown
  Bacterial polypetide isolated from the Sargasso Sea
MKKHIKILKKKLKTYNPRLKEECGVFGISNAKDASALTALGLHALQHRGQEGCGIVTFDGEKYYSEKRFGLVGDNFNKEKILNNLKGNYAIGHNRYSTTGNNILRNIQPFFADTNAGGIGVAHNGNLTNSISLRKKLVEEGAIFYTTSDTETIVQLIAKSKRPKTIDKVIDAIFQIQGGYALVMLTQNSLIGVRDPYGIRPLVIGKLGSSYVLASETCAFDIIGAKFIREVENGEIVLIEKNELKSIKPFPLKKVRPCVFEYIYFSRPDSLIGGKTAYEHRKNLGRELAKESKIDADIVVPVPDSGNAAAMGFAQELKMNFEHGLIRNHYVGRTFIEPSQKIRSLGVKLKLNANQSTIKNKKIILIDDSLVRGTTSHKIVKMLYDGGAKEVHVKIACPEIRYPDFYGVDTPTKKELLAANKTNDEICKYIGAKSLSFLSIDGLYKAIGFENRSKIYPQLTDHYFTGDYPVKLVDELGDNKITQLSLLSSASNN

SEQ ID NO: 118010 - protein, 423 aa, Unknown
  Bacterial polypetide isolated from the Sargasso Sea
MCGIVGISAETSVAAEIYDSLLMLQHRGQDAAGISVCNIDDKLNTRKSMGYVRDVFVQRHMDKLIGNYGIGHVRYPTAGGAGKEFAQPYYVNSPYGISLAHNGNLTNAKQLANELFHAEMRHLTTDSDSEVLLNIFAHELGKQREIYPSAENIFTAVAKTHIRCDGAYAVLAVITGYGLLAFRDNNGIRPLSIGIRKGKTRDEYIIASEDALFSSLGFKKFRDVEPGEAVFIDKNGEFFSQQCSDQPKKRPCIFEYVYFSRPDSKIDEISVYKARMRMGTKLASQIKDLRPDHGIDVVIPIPDSSVTAAHQLAVDLDVPYREGFVKNRYIGRTFIMPYQEERKKSVRRKLNILDLEFDGKNVLLVDDSIVRGTTSKKIIEMAREAGAKKVFFASAAPAIKYQNLYGIDMPATSELIASNRSDK

SEQ ID NO: 118011 - protein, 485 aa, Unknown
  Bacterial polypetide isolated from the Sargasso Sea
MCGIVGVVQDKDCFTELYDALVMLQHRGQDAAGITICNGDHLNSRKSKGLVREVFNQNHYERLKGNYGIGHVRYPTAGGNTKEYAQPMYVNSPYGISLAHNGNLSNTPGLAKELFHSDLRHISTDSDSEVLLNILAHEISKHKEKDPSPEIFFEAISNTFQRCEGSISVVSIITDYGLLAFRDKLGIRPLILGSRENESGGLDYMVASESAAFHSNGFKIKRDIAPGEAVFITFDGQLFSNQCEDESKLTPCLFEFVYFARPDSIIDGVSVYEARQNMGERLAKKIKAEIPLDDIDVVMPIPESSIVSGTKVAESLDKQIAYGFVKNRYVGRTFIMPEQNLRKTSVKRKLSPIYSEFKDKKILLVDDSIVRGTTMKEIVKMCYSAGAKLVSVASAAAPVKHPNVYGIDMAAKGELIASTRDIEEIKKFIGCDYLIYQDLNELVDSVTSLSDKIIDVEKSIFDGKYPTNITQEYLEVLAKRRGSKI

SEQ ID NO: 118012 - protein, 480 aa, Unknown
  Bacterial polypetide isolated from the Sargasso Sea
MYNPKLKEECAVFGISNTPEASTLTALGLHALQHRGQEGCGIVSFDGEKYHSEKRFGLVGDNFNDEKVLKNLPGNYAIGHNRYSTTGGTALRNVQPFFADTNSGGIGVAHNGNLTNAITLRNKMVEEGSIFYTTSDTETIVKLIAKSKRPKTIDKVIDALFQIQGGYALVMMTQNTLIGVRDPYGIRPLVIGKLKNSYVFASETCAFDIIGAKFVREVENGEIVYVENDELKSIKPFPQKKVRPCVFEYIYFSRPDSILNGKTAYEYRKRFGAELAKEDDLDADLVVPVPDSGNAAALGYAEEKKINFDLGLIRNHYVGRTFIEPSQQIRSLGVKLKLNANVSVIKNKKIILVDDSLVRGTTSSKIVKMLYDNGAKEIHVRIASPEIKYPDFYGVDTPTKKELLAANKSVDEIKEFIKAKSLKFLTLDGLYRGMGFEKRNDAYPQLTDHHFTGDYPVKIIDELGEDKVTQLSLLSTGSSN

SEQ ID NO: 118013 - protein, 504 aa, Unknown
  Bacterial polypetide isolated from the Sargasso Sea
MCGIVGIVGQSSVNQTIYDALTVLQHRGQDAAGIVTVDRGAFRLRKANGLVKDVFEVKHMQRLQGNAGIGHVRYPTAGSSSASEAQPFYVNSPFGISLAHNGNLTNTLELAEGLIKKRRHVNTTSDSEVLLNLLADELQKTTSLALTADEVFDTIAKVHEQARGAYAVVALIVGQGLVAFRDPFGIRPLVLGKHETPTGTEYMVASESVALDAVGFEVMRDVAPGEAIYISLDGNLYTRQCAKEPSYSPCIFEFVYFARPDSTIDNVSVYASRVNMGAKLGEKIKKEWYDHDIDVVIPIPETSCDIALEIARCMDLPYRQGFVKNRYIGRTFIMPGQQERKKSVRRKLNAINTEFKGKNVLLVDDSIVRGTTSEQIIEMAREAGAKKVYFASAAPEIRFPNVYGIDMPTSNELIAHGRDADEIAKLIGADGIIFQNLPDLVEAVRMENPEIKRFETSVFDGHYITNDVDQSYLDHLTQLRNDDAKADRNKDIGTNLELHNVCHP

SEQ ID NO: 118014 - protein, 507 aa, Unknown
  Bacterial polypetide isolated from the Sargasso Sea
MCGVVGIISSRPVNQEIYDALTVLQHRGQDSAGIMTDNKGVLCLRKSNGLVNDVFSSEHMTRLRGNMGIGHVRYPTAGTLSSSEAQPFYVNSPFGICLAHNGNLVNNDELRKHLSEVDRRHLNTESDTEALLNLFAHELQENFDGTLSPETIFNAATQLFDRCSGGYAVVSMILNEGLVAMRDPNGIRPLILGKREVGQGTEYMIASESVALDIADFEIVRDVRPGEAIYITKEGELFSKQCVKPKSYTPCIFEFVYFARPDSIIDGMSVYKSRLRMGEYLAQKIIKQGLHHDVDVVIPIPDTSRSTALQVAHHLGVKYREGFIKNRYIGRTFIMPGQEIRKKSVKQKLNPIDLEIRDKNVLLIDDSIVRGTTSKKIIQMARNTGAKKVFFASAAPPVKHPNVYGIDMPSTAELLASNRTEEELARYIGADWLIYQELDDLISAVQFDESDAEAFDTSCFSGEYVTGDVTSNYLDFIESKRNDAAKAKKEIERKQIDIQDQSSMTVS

SEQ ID NO: 118015 - protein, 462 aa, Unknown
  Bacterial polypetide isolated from the Sargasso Sea
MCGLVGVVTNDDVGVCLYDTLTVLQHRGQDAAGIMTSDNGKLNLRKDNGLVKDVFRTRHMRRLIGQMGIGHVRYPTAGSSSPALAQPFYVNSPYGLSLAHNGNLTNTAELSRDLFKEDLRHINTDSDSEVLLNIFAHELQQQQQIEPTPDHIFSALTRVYDRCRGGFAAIVMITGYGILGFRDKHGIRPLVFGSRESERGKEYMIASESVALDSQGFSVERDIAPGEAVYIDVNNNLHTKQCTPAGKHTPCIFEHVYFARPDSLMDSISVYKARLRMGERLADKLLKQRPNHDIDVVIPIPDTSRPSALELANRLGIKFREGFVKNRYIGRTFIMPGQSMRKKSVRQKLNAIELEFKGKNVLLVDDSIVRGTTCKQIIQMARDAGANKVYFASAAPGVRFPNVYGIDMPAASELIAAGRTDEEVQELIGADWLIYQNLEDLIASAADGNPEIADYECSVFNG

SEQ ID NO: 118016 - protein, 340 aa, Unknown
  Bacterial polypetide isolated from the Sargasso Sea
MKKHIKILKKKLKNYNIRLKEECGVFGISNAKDASALTALGLHALQHRGQEGCGIVTFDGEKYYSEKRFGLVGDNFNKEKVLNNLKGDYAIGHNRYSTTGNNILRNIQPFFADTNAGGIGVAHNGNLTNSIALRNKLVEDGAIFYTTSDTETIVQLIAKSKRPKTIDKVIDAIFQIQGGYALVMLTQNSLIGVRDPYGIRPLVIGRLGNSYVLASETCAFDIIGAKFVREVENGEIVLIENNELKSIKPFPAKKVRPCVFEYIYFSRPDSLIGGKTAYEHRKNIGKELAKENDTDADIVVPVPDSGNAAAMGFAPELKMNFEHGLIRNHYVGRTFIGPSQ

SEQ ID NO: 118017 - protein, 397 aa, Unknown
  Bacterial polypetide isolated from the Sargasso Sea
QEEVFRIARRHINTTSDSELLLNILAHELQQVAGLSVSAEHIFEVVTKVHKKIRGAYAVVAAIIGQGIVAFRDPHGIRPLALGKRMSELGEEWMVASESVALDAVGFQFVRDVMPGEAVFITEEGQLHTRQCAENPVTSPCIFEFVYFARPDSFIDGISVYASRVNMGRKLGEKIKREWADLDIDVVIPIPETSMDVALQIANTLDLPYRQGFVKNRYIGRTFIMPGQTMRKKSVRRKLNAISSEFKGKSVLLVDDSIVRGTTSGQIIEMARESGAKKVYFASAAPEIRFPNVYGIDMPSANELIAYGREIDQIAELIQADGLIFQDISDLVDAVREENETIQRFETSVFDGNYITADIDQEYLERIDMSRGEASRKAPVVQAELSNLDVHNIDAAD

SEQ ID NO: 118018 - protein, 470 aa, Unknown
  Bacterial polypetide isolated from the Sargasso Sea
GVFGISNNSDASTLTALGLHALQHRGQEGCGIVSFDGKKYHSEKRFGLVGDNFNKEKVLKKLPGKFAIGHNRYSTTGGTALRNVQPFFADTNAGGIGVAHNGNLTNAITIRNKLVEEGAIFYTTSDTEVIVQLIAKSKRSKTIDKIVDAIFHIQGGYALVMMTKNTLIGLRDPYGIRPLVIGKLKNSYVFASETCALDIIGAKFVREVENGEIVYIEDDELKSLKPFSPQKIRPCIFEYIYFSRPDSILGGKTAYEHRKNYGAQLAKEDDLEADIVVPVPDSGNAAALGYAQEKNIPFDLGLIRNHYVGRTFIEPSQKIRSLGVKLKLNANLSVIKDKKIILIDDSLVRGTTSHKIVKMLYNAGAKEIHVRIASPEIKYPDFYGVDMPTKKELLASDKSVKEICDFINAKSLKYLTIDGLYKAMGFDKRNNTYPQLTDHYFTGEYPVKIIDELGEEKVTQLSLLSTGSNN

SEQ ID NO: 118019 - protein, 281 aa, Unknown
  Bacterial polypetide isolated from the Sargasso Sea
MGFEKLRDIEPGEAIFIDKQGKLHSQQCAEEPIKRPCIFEYVYFARPDSKIDEVSVYKARMRMGSKLAKQIKEIKPDHDIDVVIPIPDSSTTAAHELAVGLGIPYREGFVKNRYIGRTFIMPYQEERQKSVRRKLNILDLEFQGKNVLLVDDSIVRGTTSKKIIEMARASGAKKVYFASAAPPIKYQNLYGIDMPSTSELIASNKTNDEVAKEIDADWLIYQTLDDLIDTVQAGNPEINEFETSIFTGKYITPLVENYLEDLENSRKDELKLQREKSKAKG

SEQ ID NO: 118020 - protein, 489 aa, Unknown
  Bacterial polypetide isolated from the Sargasso Sea
MKKQKIKFKNYNPKIKEECGVFGISNTKDASTLAALGLHALQHRGQEGCGIVSFDGKHYHSEKRFGLVGDNFNKEKILKKLPGNFAIGHNRYSTTGGTTLRNVQPFFADTNAGGIVVAHNGNLTNAITLRQKLVRDGAIFYSTSDTETIVQLIAKSKRNKKIDKIIDALFQIQGAYALVFLTQDTLIGVRDPYGIRPLVIGKLNNSYILASETCALDIIGAKFIREVENGEIVIIDNNKLKSIKPFPSKKQRPCVFEYIYFARPDSILNGKCAYEYRKNFGKELAKESSIDVDLVVPVPDSGNAAAIGYSQYTGNNFDLGLIRNHYVGRTFIEPVQKIRSLGVKLKLNANKSTIKNKKIVLIDDSLVRGTTCFKIVKMLYDAGAKEVHVRIASPEIKYPDFYGIDTPTKSELLAANKSNKEICKYINAKSLKFLTINGVYKAMGFEKRNQSYPQLTDHYFTGDYPVKPIDNLGDDKVTQLSLLSVASNN

SEQ ID NO: 118021 - protein, 491 aa, Unknown
  Bacterial polypetide isolated from the Sargasso Sea
MKTNRKSPFIKDDKLHEECGVFGVYNHEDSAALTALGLHALQHRGQEAAGIVTFDGTKFISERHPGLVSDNFTKMSVINRLVGNSAVGHNRYSTTGATIQRNIQPFFADLWGGGFAIAHNGNITNALSLRDELIRKGSIFQSTSDTETILQLVARSDADRTLDRLVDALMQISGAWALVVLTNKKLIGARDPFGIRPLVLGELDGAKILASETCALDIIGAKFVREIEPGEIIVITEDGEESIKPFPNARLRPCIFEYIYFSRPDSMLDGKSVYECRKSFGKNLAKECPANADIVVPVPDSGVPAALGYSEESKIPFELSIIRNHYVGRTFILPTQSNRQSSVKLKHNPDKSSIEGKRVVLVDDSVVRGTTSVKIVELIREAGASEIHMRIACPPIKYPDFYGIDTPETEQLLASNKSLDEMCKHIGADSLGFLSLDGLYQSMGYKKGRNNDSPEYTDHCFTGDYPTNLSDYKNEKTQEQLSLLSENESQN

SEQ ID NO: 118022 - protein, 304 aa, Unknown
  Bacterial polypetide isolated from the Sargasso Sea
IGIREGKTREEYIISSEDALFTSLGFEKLRDIEPGEAIFIDKKGKLHSQQCAEESIKRPCIFEYVYFARPDSKIDEVSVYKARMRMGSKLAEQIKKTKPDHDIDVVIPIPDSSTTAAHELAVGLDIPYREGFVKNRYIGRTFIMPYQEERKKSVRRKLNILDLEFQGKNVLLVDDSIVRGTTSKKIIEMARASGAKKVYFASAAPPIKYQNLYGIDMPSTSELIASNKTNDEVAKEIDADWLIYQTLDDLIETVQVGNPEINEFETSIFTGKYITPLVENYLEDLENSRKDELKMQREKSKANG

SEQ ID NO: 118023 - protein, 483 aa, Unknown
  Bacterial polypetide isolated from the Sargasso Sea
MIQIDTSEDKLHEECGVFGIFGSPDASTLTALGLHALQHRGQEGAGIVTFDGEKFHGVRRPGLVGDHFNKTEVIDRLLGSNAIGHVRYSTTGNSILKNIQPLYADLSSGGFACAHNGNLTNASILRDSLVKDGAIFQSTSDTETILQLVAKSSRQQTVDKLIDALFKIQGAYSLVILTNKKLIGVRDPYGIRPLVLGDLNGAPVLTSETCALDIIGAKYVRDVEHGEIIIISEDGMESIKPFPKVQERPCIFERIYFSRPDSIVGGKTVYTYRKNLGQELAKENHIDADVIIPVPDSGVPAALGYSQESKIPFELGIIRNHYVGRTFIEPSQSIRQFGVKLKHNANSSYIKNKKVILIDDSIVRGTTAKKIIKMVYDAGAKEVHLGIACPPIKHPDFYGIDTPDYNELIAAKSSLEEINNIIGSKSIFFLSLEGTYKAMGYEKRDNETPQFTDHCFTGDYPTSLLDREQGTVSKQFSLLSEKN

SEQ ID NO: 118024 - protein, 504 aa, Unknown
  Bacterial polypetide isolated from the Sargasso Sea
MCGIVGIVGQSSVNQTIYDALTVLQHRGQDAAGIVTVDRGAFRLRKANGLVKDVFEVKHMQRLQGNAGIGHVRYPTAGSSSASEAQPFYVNSPFGISLAHNGNLTNTVELAEGLIKKRRHVNTTSDSEVLLNLLADELQKTTSLMLTPDEVFDTIAKVHEQARGAYAVVAMIIGQGLVAFRDPFGIRPLVLGKHETPTGTEYMVASESVALDAVGFEVMRDVAPGEAIYISLDGQLYTRQCAKEPSYSPCIFEFVYFARPDSTIDNVSVYASRVNMGAKLGEKIKKEWYDHDIDVVIPIPETSCDIALEIARCMDLPYRQGFVKNRYIGRTFIMPGQQERKKSVRRKLNAINTEFKGKNVLLVDDSIVRGTTSEQIIEMAREAGAKKVYFASAAPEIRFPNVYGIDMPTSNELIAHGRDADEIAKLIGADGIIFQNLPDLVEAVRMENPEIKRFETSVFDGHYITNDVDQSYLDHLTQLRNDDAKADRNKDIGTNLELHNVCHP

SEQ ID NO: 118025 - protein, 385 aa, Unknown
  Bacterial polypetide isolated from the Sargasso Sea
MCGIVGVVSPAPVNQLIYDALLLLQHRGQDAAGIVTQQGRKFFMHKAKGMVRDVFRTRNMRALPGNVGLGQVRYPTAGNAYSEEEAQPFYVNAPFGIVLVHNGNLTNARELRTELFQTDHRHTNTESDSEVLLNVFAHELERATRGVPLQPEDVFTAVRAVHKRIKGSYAVIALIAGHGLLAFRDPHGIRPLAMGRSQDGTVMVGSESVALEGTSHVFERNINPGEAIFITLDGQVHASQCAENPQLNPCIFEFVYLARPDSVLDGISVYQARLNLGEALAKRVVSTVPPNEIDVIIPIPESSRPSATQLAHLLGVPYREGFVKNRYVGRTFIMPGQGVRKKSVRQKLNVIGSEFKGRNVLLVDDSIVRGTTSREIVQMARDAGA

SEQ ID NO: 118026 - protein, 486 aa, Unknown
  Bacterial polypetide isolated from the Sargasso Sea
MCGIVGIVQKDNCFTELYDALIMLQHRGQDAAGITICEGESLHSRKSKGFVREVFTQRHFERLKGNCGIGHVRYPTAGGNSKEYAQPMYVNSPYGISLAHNGNLSNTKALAAELFSSDLRHISTDSDSEVLLNILAHEISKNNEKKPTPETLFKAVESTFKRCEGSINVVSIITGHGLLAFRDRYGIRPLSLGSRTNADGKKEYMISSESAAFSSSNYDLERDLIPGEAIFISNTGEMHTQICSDSTTLTPCLFEYVYFARPDSVIDGVSVYQARQNMGIKLAEKIKKNIPDGDIDVVIPIPESSITSGTKVAECLNKEVIYGFVKNRYIGRTFIMPEQDMRRRSVRRKLNPINDEFKDKNVLLVDDSIVRGTTMKEIVAMCYKAGAKKVSVASSSAEVRFPNVYGIDMPAKSELIASDRSLEEIKDFIGCDNLVYQDLSDLVDSVTELNSELDGVENSIFTGAYPTDITDEYLKYLEGKRKSISS

SEQ ID NO: 118027 - protein, 493 aa, Unknown
  Bacterial polypetide isolated from the Sargasso Sea
MKKHIKILKKKLKNFDPKLREECGVFGVSNATDASALAALGLHALQHRGQEGCGIVTFDGEKYYSEKRFGLVGDNFNKEKVLKKLKGNYAIGHNRYSTTGENTLRNIQPFFADTNAGGIGVAHNGNLTNSISLRNKLVEDGAIFYTTSDTETIVQLIAKSKRPKTIDKVVDAIFQIQGGYALVMLTQNSLIGVRDPYGIRPLVIGKLGKSYVLTSETCALDIIGAKFVRDVENGEIVLIENDELKSIKPFPPKKVRPCVFEYIYFARPDSILDSKTAYEHRKNIGIELAKENDIDADIVVPVPDSGNAAALGFAQYLKINYEHGLIRNHYVGRTFIEPSQQIRSLGVKLKLNANQTTIKDKKIILIDDSLVRGTTSHKIVKMLYDAGAKEVHVKIACPEIRHPDFYGVDTPTKKELLAANKTNDEICKYIGAKSLKFLSIEGLYKAVGFDKRNETYPQLTDHYFTGDYPVKPIDELGDSKVTQLSLLSTASNN

SEQ ID NO: 118028 - protein, 510 aa, Unknown
  Bacterial polypetide isolated from the Sargasso Sea
MCGIVGVISQSPVNQLIYDSLLLLQHRGQDAAGIATADGSNFHMYKANGMVRDVFRTRNMRSLPGTYGIGQVRYPTAGSASSEAEAQPFYVNAPFGIILAHNGNLTNWQQLKDEMFRIDRRHINTNSDSEVLLNVFAHELQLSTTGLELDPASVFKAVSGVHRRLQGSYAIVSLIAGYGLLAFRDPFGIRPLCIGKLETEHGTEWMVASESVAVEGIGFEFVRDLEPGEAIFIDKAGNFHSQQCAENPTLNPCMFEYVYLARPDSCLDGVPVYNVRLRMGDYLAEKIKRELPNVPIDVVMPIPDSSRPAAMQVAAKLGVEYREGFFKNRYVGRTFIMPGQAVRKKSVRQKLNAMSIEFKDKNVLIVDDSIVRGTTSHEIVQMARDAGAKSVIFASAAPPVKFPNVYGIDMPTRGELVAHGRTDEEVAKIIGADHLIYQDVDDLRRAVRDINPKLERFEASCFDGNYITGAVTPEYLDAIERARLAPASQADRDTAGDTERSQMNLQLSVE

SEQ ID NO: 118029 - protein, 470 aa, Unknown
  Bacterial polypetide isolated from the Sargasso Sea
MYCKTTDKLREECGVFGIFGTDEASVLTTLGLHSLQHRGQEGAGIVSYDGISFHSVRKQGLVGDNFNNKSILSQLPGKTAIGHVRYSTTGESKPENLQPLFANLAIGGFACAHNGNLTNTSSIKNHLVKSGSIFQTSSDTEIILQLVARSQKKKIVDKLIDTLQQIKGAYSLVILTNKKLIGVRDPFGIRPLVLGDKDGSPVLASETCALDMIGAKYIRDIENGEIVVITESGIESIKPFNKISERPCIFERIYFASPDSIVGNKTVYTYRKALGEQLAIENNIIADVVVPIPDSGVSAAIGFSQNSKIPFELGIIRSHYVGRTFIEPSQTIRQFGVKLKHSVNRSCIQNKKVILIDDSIVRGTTASKIVKMVYEAGAKEVHLGISCPPIIHPDFYGIDTPNYNQLIASQSGLKEMTKLVGAKSLFFLSLNGTYKAMGCEKRNSKTPQFTDHCFTGEYPIDVTEILKLNR

SEQ ID NO: 118030 - protein, 246 aa, Unknown
  Bacterial polypetide isolated from the Sargasso Sea
KICSDNTTLTPCLFEYVYFARPDSVIDGVSVYQARQNMGAKLAEKIKKHIPDEDIDVVIPIPESSITSGTKVAECLNKEVIYGFVKNRYIGRTFIMPEQDMRRRSVRRKLNPINDEFKNKNVLLVDDSIVRGTTMKEIVAMCYKSGAKKVSVASSSSEVKFPNVYGIDMPAKSELIASNRSLEEIKEFIGCDNLVYQDLSDLIDSVTELNSELNDVEKSIFTGVYPTNITDGYLEDLEKKRQAINS

SEQ ID NO: 118031 - protein, 346 aa, Unknown
  Bacterial polypetide isolated from the Sargasso Sea
MCGIVGISAETNVAAEIYDSLLMLQHRGQDAAGMVVCDTEDQLNSRKSMGYVRDVFEQKHMNNLIGNYGIGHVRYPTAGGSGSEFAQPMYVNSPYGISLAHNGNLTNSKQLSAELFHAEMRHLKTDSDSEVLLNIFAHELAKQKEIYPSAEHIFKAVSKTHFRCDGAYAVLALITGHGILAFRDNNAIRPLSIGIRNGKTREEYIISSEDALFTSMGFDKLRDIEPGEAIFIDKNGKLHSQQCAEEPIKRPCIFEYVYFARPDSKIDEVSVYKARMRMGSKLAEQIKKSKPDHDIDVVIPIPDSSTTAAHELAVGLGIPYREGFVKNRYIGRTFIMSLSRGKEKNP

SEQ ID NO: 118032 - protein, 357 aa, Unknown
  Bacterial polypetide isolated from the Sargasso Sea
MCGIVGISAEKNVAEDIYEALLMLQHRGQDAAGMVVCEPSGKLNSRKSMGYVRDVFRQRHMSALSGKYGIGHVRYPTAGGAGKEFAQPMYVNTPYGISLAHNGNLTNSTNLASELFHAEKRHINTNSDSEVLLNIFALELSKQDAVFPQAQDFFAAVQKTHMRINGAYAVITVIAGHGLLAFRDPLGIRPLIIGERQGKQRKEYVIASENALFTSLGFKTVRNVLPGEAIFIDNDGNLHSQQCFDKVQNSPCIFEYVYLARPDSTIDEISVYKSRMRMGLKLASKIRKLKIDKDIDVVIPIPDSSTTAALQLAADLKKPYRQGFVKNRYIGRTFIMPFQEERKKSVRRKLNILDLEI

SEQ ID NO: 118033 - protein, 311 aa, Unknown
  Bacterial polypetide isolated from the Sargasso Sea
MKNFNPKLKEECGVFGISNAKDASVLTALGLHALQHRGQEGCGIVTFDGKQYFSEKRFGLVGDNFNKEKVIKNLKGDYAIGHNRYSTTGENTLRNIQPFFADTNAGGIGVAHNGNLTNSISLRKKLVEDGAIFHTTSDTETIVQLIAKSKRAKKIDKIVDAIFQIQGGYALVMLTQTSLIGVRDPYGIRPLVLGKLKNSYVLASETCALDIIGAKFIREVENGEIVLIENDELKSIKPFPLKKIRPCVFEYIYFARPDSILNGKTAYEYRKNLGAELAKENNLDADIIVPVPDSGNAAALGFAQYFGKNFE

SEQ ID NO: 118034 - protein, 430 aa, Unknown
  Bacterial polypetide isolated from the Sargasso Sea
MKIFKQKKIREECGVFGIHDFNDASTITALGLHALQHRGQEGCGIVSFDGKNFHSEKRHGLVGDNFTNNEILKKLPGKSAIGHNRYSTTGETSLRNIQPFFADIFSGGISVAHNGNFTNALKLRDKLVRDGAIFRTTSDTETVVQLIAKSKRPKMIDKIIDTLFQVQGGYALVMMSNKKLIGARDPLGIRPLVLGKIKNSYVLASETCAFDIIGAKFIREIENGEIVVIENNNLKSIKPFTKKRARPCVFEYVYFSRPDSYLQGKCAYEYRKEFGYELAKESDNVGDIVVPVPDSGVPAAIGYSQYKKMRFELGLIRNHYVGRTFIEPKQNIRSFGVKLKLSSNKSSIKNKSIILIDDSIVRGTTCSKIVKMLYDGGAKEVHVRIASPPIKYPDFYGIDMPSRKELIAANKNLKEMCKHIQASSLKFLSI

SEQ ID NO: 118035 - protein, 449 aa, Unknown
  Bacterial polypetide isolated from the Sargasso Sea
EVKHMQRLQGNAGIGHVRYPTAGSSSASEAQPFYVNSPFGISLAHNGNLTNTVELAEGLIKKRRHVNTTSDSEVLLNLLADELQKTTSLMLTPDEVFDTIAKVHEQARGAYAVVAMIIGQGLVAFRDPFGIRPLVLGKHETPTGTEYMVASESVALDAVGFEVMRDVAPGEAIYISLDGQLYTRQCAKEPSYSPCIFEFVYFARPDSTIDNVSVYASRVNMGAKLGEKIKKEWYDHDIDVVIPIPETSCDIALEIARCMDLPYRQGFVKNRYIGRTFIMPGQQERKKSVRRKLNAINTEFKGKNVLLVDDSIVRGTTSEQIIEMAREAGAKKVYFASAAPEIRFPNVYGIDMPTSNELIAHGRDADEIAKLIGADGIIFQNLPDLVEAVRMENPEIKRFETSVFDGHYITNDVDQSYLDHLTQLRNDDAKADRNKDIGTNLELHNVCHP

SEQ ID NO: 118036 - protein, 496 aa, Unknown
  Bacterial polypetide isolated from the Sargasso Sea
MCGIVGISAETNVAAEIYDSLLMLQHRGQDAAGISVCNSDDQLNSRKSMGYVRDVFQQRHMDKLTGNYGIGHVRYPTAGGAGKEFAQPMYVNSPYGISLAHNGNLTNSKQLGTQLFHAEMRHLRTDSDSEVLLNIFAHELGKQREIYPSEKNIFKAVTKTHIRCDGAYAVIALITGYGLVAFRDNNGIRPLSIGVRKGKEREEYIVSSEDALFTPLGFEKLRDIDPGEAIFIDKSGKLFSQQCAENPQKRPCIFEYVYFSRPDSKIDEISVYKARMRMGTKLAEQIKKTRPDHDIDVVIPIPDSSVTAAHQLAVDLNVPYREGFVKNRYIGRTFIMPYQEERKKSVRRKLNILDLEFEGKNVLLVDDSIVRGTTSKKIIEMAREAGAKKVYFASAAPAIKYQNLYGIDMPATAELIASNKSNDEVASEINADWLIYQTLEDLIDSVREGNKEISEFETSIFTGEYFTPLVENYLEELEISRKDELKMQREKSKAKS

SEQ ID NO: 118037 - protein, 509 aa, Unknown
  Bacterial polypetide isolated from the Sargasso Sea
MCGIVGIVGQEAVNQPLYDALSSLQHRGQDAAGIMTEDNGNLHLRKTNGLVRDVFQEQHMMRLTGNVGIGHVRYPTAGSSSMSEAQPFYVNSPYGIALAHNGNLVNTDELKRLVTESDHRHLNTDSDTEVLLNVFAHELGKGSAKALTPTAILSAVGEVHRRCSGAYAVVAMIIGYGIVAFRDPNGIRPLVVGSRKTGAGLERIIASESVALDALGFVLDRDILPGEAVFIDKSGKLHSREIVKEQSYSPCIFEFVYFARPDSIIDKLSVYKARLRMGEKLAEKILYLRPDHDIDVVVPVPDTSRTAAVQVAHELGVKYREGFIKNRYIGRTFIMPGQAERQASVRRKLNAIDLEFRGKNVLLVDDSIVRGTTSKQIINMARESGANKVYFASAAPPVRYPNVYGIDMPAASELVANGRTIEDIQTIIGADWLIYQNLEDLEQAVYHEEADIDFFDTSCFSGKYVAGDISPTYLNQLEVMRSDAAKAERNAMIRDKEDSEDFPQSTSIV

SEQ ID NO: 118038 - protein, 482 aa, Unknown
  Bacterial polypetide isolated from the Sargasso Sea
MKNYNPKLKEECGVFGIYNNNDASTLTALGLHALQHRGQEGCGIISYDGTNYHSEKRFGLVGDNFNKEKVLKKLSGSHAIGHNRYSTTGGTTLRNVQPFFADTNAGGIAVAHNGNLTNAITLRKKLVEDGAIFYSTSDTETIIQLIAKSKREKKIDKIIDALFQIQGAYALVFLTQNTLIGVRDPYGIRPLVIGKLDNSYIFSSETCALDIIGAKFVREVENGEIVFIENNKLKSIKPFPLKKQRPCVFEYIYFSRPDSVLNGKCAYEYRKNFGQELAKEADVEADLIVPVPDSGNAAAIGYSQFLGRKFDLGLIRNHYVGRTFIEPVQKIRSLGVKLKLNANKSTIKNKKIVLIDDSLVRGTTCYKIVKMLYDAGAKEVHVRIASPEIKFPDFYGIDTPTKKELLAANKNNEEICKYINAKSLKFLSIDGMYKAMGFEKRNNNYPQLTDHYFTGDYPVKPIDNLGDDKITQLSLLSTASNN

SEQ ID NO: 118039 - protein, 492 aa, Unknown
  Bacterial polypetide isolated from the Sargasso Sea
MCGIIGISAENNVAEEIYESLLMLQHRGQDAAGMVVCEPSGKLNSRKSKGYVRDVFQQNHMNNLQGNLGIGHVRYPTAGGIGKEFAQPMYVNTPYGISLAHNGNLTNSKKLAAELFHAERRHINTDSDSEVLLNIFALELSKQEAVFPKPKDFFSAVEKTHLRINGAYAVVALITGYGILAFRDPLGIRPLSIGIRKGKNRNEYVVSSETALFSSTGFKFLRDVEPGEAVFIDNAGKIFTQQCSTSSQKRPCIFEYVYLARPDSTIDEISVYKSRMRMGLKLAERIRSLNLVDEIDVVIPIPDSSTTAALQLAADLNKPYRQGFVKNRYIGRTFIMPLQEERKKSVRRKLNILDLEFKDKNVLLVDDSIVRGTTSKQIIEMVREAGAKKVLFASAAPPVKFQNLYGIDMAATKELVAHNKSESEIAEIIGADELIYQTLNDLISSVQEGNPEIKEFETSIFTGKYPTEIDDGYLENLEEERSDIVKMSKTKN

SEQ ID NO: 118040 - protein, 489 aa, Unknown
  Bacterial polypetide isolated from the Sargasso Sea
MKKLKKKFKIYDPKLKEECAVFGISNNEDAATLTALGLHALQHRGQEGCGIVSFDGLKYHSEKRFGLVGDNFNDEKVLKNLPGKFAIGHNRYSTTGGTALRNVQPFFADTNSGGIGVAHNGNLTNAITLRNKMVQDGSIFYTTSDTETIVKLIAKSKRVKTIDKIIDAIFQIQGGYALVMMTQNTLIGVRDPYGIRPLVIGKLKNSYVFASETCAFDIIGAKFVREVENGEIVYIENDELKSIKPFPPKKVRPCVFEYIYFSRPDSILNGKTAYEYRKNFGAQLANEDNINADLVVPVPDSGNAAALGYAEKKGLKFDLGLIRNHYVGRTFIEPSQQIRSLGVKLKLNPNISVIKDKRIILVDDSLVRGTTSSKIVKMLYDSGAKEVHVRIASPEIKFPDFYGVDTPTKKELLAANKSTNEICEFIKAKSLKFLSLSGLYLGMGFDKRNDNYPQLTDHHFTGEYPVKIIDELGEDKVTQLSLLSTASNN

SEQ ID NO: 118041 - protein, 415 aa, Unknown
  Bacterial polypetide isolated from the Sargasso Sea
MQKKKFKSYNPKLKEECGVFGISNFEDASALTALGLHALQHRGQEGCGIVSFDGNNYYSEKKFGLVGDNFNNEKVLKSLPGNFAIGHNRYSTTGGTTLRNIQPFFADTHAGGIGVAHNGNLTNALTLRQKLVKGGAIFYSTSDTEVIIQLIAKSKRSTTVEKITDAIFQIQGGYALVMLAQNKLIGVRDPLGIRPLIIGKLKNSYVLSSETCALDIIGAKFLREVENGEIVVIENDQLQSIKPFPDKKSRPCVFEYIYFSRPDSILNGKTTYEFRKKFGEQLANEDNIKADLVVPVPDSGNAAALGYSQITKINFDLGLIRNHYVGRTFIEPAQKIRSLGVKLKLNANKSSIKDKKIILIDDSLVRGTTSHKIVKMLYDAGAKEIHVRIASPEIKFPDFYGVDMPTKDELLAANK

SEQ ID NO: 118042 - protein, 385 aa, Unknown
  Bacterial polypetide isolated from the Sargasso Sea
MIKTNSIKIREECGVFGISNINDASALAALGLHALQHRGQEGCGIVSYDGKNYYSEKRFGLVGDNFNNEDTIKKLPGSFAIGHNRYSTTGGKILRNVQPFFADTNAGGIGVSHNGNFTNAITLRKKLVEDGAIFYTTSDSETIVQLIARSKKEKNIDKIIEAISQIQGGYALVMLTKNILIGARDIYGIRPLVIGKLNESYVLASETCALDIIGAEFVREVGNGEIVYVEDNELHSLKPFGNHTPRPCVFEYIYFSRPDSILKGKTAYEYRKNLGKELAREDNVDAELVVPVPDSGNAAAIGYSQQKKINFDLGLIRNHYVGRTFIEPGQQIRSLGVKLKLNANKSSIENKKIILVDDSLVRGTTSYKIVKMLYDAGAKEVHLRI

SEQ ID NO: 118043 - protein, 504 aa, Unknown
  Bacterial polypetide isolated from the Sargasso Sea
MCGIVGIVGKYPVNQALYDGLTVLQHRGQDAAGIVTVDNKTLRLRKANGLVKDVFEARHMQRLSGNMGIGHVRYPTAGSASTAEAQPFYTNSPFGIALAHNGNLTNSEELKDELFRTARRHVNTNSDSEALLNAFAHELDIHADMHVNPDHIFGAVTNLHRKIRGGYAVVAVVIGHGLVAFRDPNGIRPLVMGKRETALGTEYMVASESVALDADGFTVLRDVAPGEAVYITEDGELFSQQCAENPSYAPCIFEYVYFARPDSTIDNVSVYASRVAMGKKLGEKIKKEWAHLDIDVVIPIPETSNDAALQIAHELGLPYRQGYVKNRYIGRTFIMPGQGERRKSVKRKLNAIWQEFKGKNVLLVDDSIVRGTTSEQIIDMAREAGAKKVYFASAAPEIRFPNVYGIDMPSANELIAHGHDVESICKIIGADGLIFQSLEDLVDAVRSQNPELKRFETSVFDGVYVTNDIDQAYLNRLDAQRNEASKRKKEAELSASLDLHNEGN

SEQ ID NO: 118044 - protein, 487 aa, Unknown
  Bacterial polypetide isolated from the Sargasso Sea
MLKKKFKSYNPKLKEECGVFGISNNSDASALTALGLHALQHRGQEGCGIVTFDGDQYHSEKRFGLVGDNFNKEKVLKNLTGKYAIGHNRYSTTGGTTLRNIQPFFADTNAGGISISHNGNLTNAIKLRSKLVKEGAIFYTTSDTETIVQLIAKSKRTKTIDKIVEALFQIQGGYALVMLTQKKLIGVRDPFGIRPLVIGKLKNSYVLASETCALDIIGAKYLREVENGEIVLIEDDKIESIKPFPKQKVRPCVFEYIYFSRPDSILNGKTAYEYRKNLGIELAKEDDVEGDVVVPVPDSGNAAALGYSQQNKKNFELGLIRNHYVGRTFIEPSQKIRSLGVKLKLNPNKTSIKDKRIILVDDSLVRGTTSYKIVKMLYDAGAKEVHVRIASPEIRYPDFYGVDTPTKKELLAANKNNDEICKYIGAKSLKYLSINGLYKAIGFESRNKDYPQLTDHYFTGEYPVKPIDNLGDDKITQLSLLSTGSNN

SEQ ID NO: 118045 - protein, 392 aa, Unknown
  Bacterial polypetide isolated from the Sargasso Sea
MCGIVGISAESNVAAEIYDSLLMLQHRGQDAAGMTVCDQNDKLTTRKSMGYVRDVFQQMHMDKLIGNYGIGHVRYPTAGGNGKEFAQPMYVNSPYGISLSHNGNLTNSSQLSNELFHAEMRHLLTDSDSEVLLNVFAHELGKQREIYPSAEHIFKAVTKTHTRCEGAYAVLALITGHGILAFRDENGIRPLSIGIRKGKSRDEYIIASEDSLFIPLGFKKLRDIEPGEAIFIDKDGNLFSEQCSKMPRKSPCIFEYVYFSRPDSKIDEISVYKARMRMGSKLADQIKEIRPNHDIDVVIPIPDSSTTAAHQLAVDLGVPYREGFVKNRYIGRTFIMPYQEERKKSVRRKLNILDLEFHGKNVLLVDDSIVRGTTSKKIIEMAREAGAKKVYL

SEQ ID NO: 118046 - protein, 494 aa, Unknown
  Bacterial polypetide isolated from the Sargasso Sea
MKALKPNKNLIFNEDDKLHEECGVFGIYNHQDSAALTALGLHALQHRGQEAAGIVTFDGTKFISERHPGLVSDNFTKTSVINRLVGNSAVGHNRYSTTGATIQRNIQPFFADLWGGGFAIAHNGNITNALSLRDDLIRKGSIFQSTSDTETILQLVARSDADRTLNRLVDALMQISGAWALVVLTNKKLIGARDPYGIRPLVLGELDGAKILASETCALDIIGAKFIREIEPGEVIVITEDGEESIKPFPNARARPCIFEYIYFSRPDSMLDGKSVYECRKSFGKNLARECPSDADIVVPVPDSGVPAALGYSEESKIPFELSIIRNHYVGRTFILPTQSNRQSSVKLKHNPDRSSIKGKSVVLVDDSIVRGTTSVKIVELMREAGASEIHMRIACPPIKYPDFYGIDTPETEQLLASNKSLEEMCKYIGADTLGFLSLDGLYQSMGCSEGRNNDNPEYTDHCFTGDYPTNLNDYKSEKIQEQLSLLSENESQN

SEQ ID NO: 118047 - protein, 480 aa, Unknown
  Bacterial polypetide isolated from the Sargasso Sea
IYDSLLMLQHRGQDAAGISVCNNDDQLNSRKSMGYVRDVFQQRHMDKLVGNYGIGHVRYPTAGGAGKEFAQPMYVNSPYGISLAHNGNLTNSKQLGNQLFHAEMRHLRTDSDSEVLLNIFAHELGKQREIYPSEKNIFKAVTKTHIRCDGAYAVIALITGYGLVAFRDNNGIRPLSIGVRQGKEREEYIVSSEDALFTPLGFKKLRDIDPGEAIFIDKNGKLFSQQCADNPQKRPCIFEYVYFSRPDSKIDEISVYKARMRMGTKLAGQIKRIRPDHDIDVVIPIPDSSVTAAHQLAVDLNVAYREGFVKNRYIGRTFIMPYQEERKKSVRRKLNILDLEFEGKNVLLVDDSIVRGTTSKKIIEMAREAGAKKVYFASAAPAIKYQNLYGIDMPATAELIASNKSNDEVASEINADWLIYQTLEDLIDSVREGNPEISEFETSIFTGEYFTPLVENYLEELEISRKDELKMQREKSKAKS

SEQ ID NO: 118048 - protein, 406 aa, Unknown
  Bacterial polypetide isolated from the Sargasso Sea
KFAIGHNRYSTTGGTALRNVQPFFADTNAGGIGVAHNGNLTNAITIRNKLVEEGAIFYTTSDTEVIVQLIAKSKRSKTIDKIVDAIFHIQGGYALVMMTKNTLIGLRDPYGIRPLVIGKLKNSYVFASETCALDIIGAKFVREVENGEIVYVEDDELKSLKPFSPQKVRPCVFEYIYFSRPDSILNGKTAYEYRKNFGAQLAKEDDLEADIVVPVPDSGNAAALGYAQEKNIPFDLGLIRNHYVGRTFIEPSQKIRSLGVKLKLNANLSVIKDKKIILIDDSLVRGTTSHKIVKMLYNAGAKEIHVRIASPEIKYPDFYGVDMPTKKELLASDKSIKEICDFINAKSLKYLSIDGLYQAMGFDKRNNTYPQLTDHYFTGEYPVKIIDELGEEKVTQLSLLSTGSNN

SEQ ID NO: 118049 - protein, 466 aa, Unknown
  Bacterial polypetide isolated from the Sargasso Sea
ISNLSDASTLTALGLHALQHRGQEGCGIVSYDGKNYHSEKRFGLVGDNFNKEKVLKKLPGNYAIGHNRYSTTGGTTLRNVQPFFADTNAGGIAVAHNGNLTNAITLRKKLVKDGAIFYSTSDTETIVQLIAKSKREKKIDKIIDALFQIQGAYALVMLTKNTLIGVRDPYGIRPLVIGKLKNSYILASETCALDIIGAKFVREVENGEIVCIENNELKSFKPFPKKKQRPCVFEYIYFARPDSILNGKCAYEYRKDFGKELAKESDINVDLIVPVPDSGNAAAIGYSQHVKKKFDLGLIRNHYVGRTFIEPAQKIRSLGVKLKLNANKSTIKNKKIVLIDDSLVRGTTCYKIVKMLYDSGAKEVHVRIASPEIKFPDFYGIDTPTKKELLAANKNNDEICKYINAKSLKFLSIDGIYRAMGYEKRSNTYPQLTDHYFTGDYPIKPMDNLGDDKVTQLSLLSTSSNN

SEQ ID NO: 118050 - protein, 192 aa, Unknown
  Bacterial polypetide isolated from the Sargasso Sea
MNKTNPLILALPKGRVYKDFIPLLEKTQFAIKDDAEKSRKMLLDTNHPSVKVLIIRGWDVPTYITSGAAHIGIVGKDILMEKEEEEFIELADLGLGKCRLSLAGYEDVLSGSVRLKIATKYPKISTKFMNSIGIQPEIIYLNGAQEIAPMLGLSDAIIDLVDTGKTLTANGLTEIKTIEDISMRLIANKASM

SEQ ID NO: 118051 - protein, 184 aa, Unknown
  Bacterial polypetide isolated from the Sargasso Sea
KLTNVKIIYLHARECIEQLSLGNIDIGFSGYDLFKESQINTQKKILISKKYDFGNANLVLAIPDLWIDVQTLLDLDEVADEFKKRKKRLLRIATKYPNLTRQFLYSKGVTQFQLVKSLGSTEVAPFTGTTEIISDITSTGATLKANNLRILKDGEILKSQACLMMSKLSLKKTGIKKIINLLSR

SEQ ID NO: 118052 - protein, 177 aa, Unknown
  Bacterial polypetide isolated from the Sargasso Sea
SLRNKKIATSYPNVLKKYLKDNSIEATVINIHGSVELTPYIGMSDCICDLVSSGATLEENNLKEIKVILNSQAVLIKNKLLDKNKFNIAEMVISRMKGVINAFESKYVMLNADSNNIESICKLLPGSESPTIIPLEKKNKVAIHALCKEPVFWETMEKLKAKGASSILVMPVEKILN

SEQ ID NO: 118053 - protein, 123 aa, Unknown
  Bacterial polypetide isolated from the Sargasso Sea
FGGCHMSLAVKKNSNYSKPTDLPANCKVASKFIKTARSYFEELNIPVEIVQLTGSVELGPITGMAEAIVDLVATGKTLKENGLIKIDDLYYSTARLIGNPLSMRLDDNHLRDTILSIESTNAL

SEQ ID NO: 118054 - protein, 139 aa, Unknown
  Bacterial polypetide isolated from the Sargasso Sea
MEDKQDTLILALPKGRVYKEVIPFLQKSRFKLKDDPKKTRKLVLDTKIDQFKILLVRGWDIPAYVNAGAAHLGIVGKDILLEKESEEFIELKDLGIGKCRLSLAGKEDLLGSARMRIATKYPKSSVKFMESIGIQSEII

SEQ ID NO: 118055 - protein, 229 aa, Unknown
  Bacterial polypetide isolated from the Sargasso Sea
MTKNIINIGLPSKGRLKHDTINIFKKNKLKIYSERGERDLFGYVKKLPNIKVIYLHARECIEQLSFGNIDIGFSGYDLFKESEINMQNKILINKRYNFGNANLVLAIPDLWIDVQTLLDLDEVADEFKKKKKKLLRIATKYPNLTRQFLYSKGVTQFQLVKSLGSTEVAPFTGTAEAISDITSTGATLKANNLRVLKDGEILKSQACLMLSKLSLKKSGIKKIINLLSK

SEQ ID NO: 118056 - protein, 135 aa, Unknown
  Bacterial polypetide isolated from the Sargasso Sea
KVAKLLDLEFGGCHMSLAVKNGSNYSKPTDLPANCKVASKFTKTARAYFDNLNIPVEIVHLTGSVELGPITGMAEAIVDLVATGKTLKENGLSKIDDLFYSTARLIANPLSLRLDSNPLRDVILSIESSKDILDI

SEQ ID NO: 118057 - protein, 135 aa, Unknown
  Bacterial polypetide isolated from the Sargasso Sea
SELKVAKLLDLGFGGCHMSLAVKKNSNYSKPTDLPANCKVASKFIKTARSYFEELNIPVEIVHLTGSVELGPITGMAEAIVDLVATGKTLKENGLIKIDDLYYSTARLIGNPLSMRLDNNHLRDTILSIESTNAL

SEQ ID NO: 118058 - protein, 229 aa, Unknown
  Bacterial polypetide isolated from the Sargasso Sea
LQEEQQKKINLENARNQLEIEKRNGNWEKAGELSYQIIPNLEKNISKIENTDNLLNSTVSEEDVASVVSKWTGIPIEKMMEYERIKLLKIKGELKKSIVGQDHVLSAISKTIIRSRAGLSDPSSPLGTFMFLGSTGIGKTETAKSLAQFLFNETDSMIRIDMSEYMERHSISRLIGAPPGYIGYDEGGSLTEAVRRRPYRVILFDEIEKAHLDVLNLLLQVMDDGRLTD

SEQ ID NO: 118059 - protein, 215 aa, Unknown
  Bacterial polypetide isolated from the Sargasso Sea
MSKIVIAVPRGRITTECKNLLLKTSFAPDPLLFDKNTRKLTFKSKKRNIEYIKVRAFDACTFVAFGAAQIGIAGEDVINEFDYSEIYAPLDLNIGHCRISVAALKSLLKKEDPETWSNIRIASKYPNITKKFFYNKGIQVEIIKLSGSMELAPSLNMCRRIVDLVSTGKTLKENGLTEIEEIMKIQSKLIVNRSAYKTNMKEVSKIISEIGTFVK

SEQ ID NO: 118060 - protein, 122 aa, Unknown
  Bacterial polypetide isolated from the Sargasso Sea
GGCHMSLAVRENSHYSKPTDLPANCKVASKFTKTARSYFDELNIPVEIVHLTGSVELGPITGMAEAIVDLVATGKTLKENGLIKIDDLFYSTARLIGNPLSMRLDDNHLRDTILSIESTNAP

SEQ ID NO: 118061 - protein, 183 aa, Unknown
  Bacterial polypetide isolated from the Sargasso Sea
MFTIALPKGALLKDSISTFKRAGLDFSDALDGNNRSLTFESNCKRAKALLVRNGDVPVYVSYGQADLGIVGYDVLRESELKVAKLLDLGFGGCHMSLAVKKNSNYSKPTDLPANCKVASKFIKTARSYFEELNIPVEIVHLTGSVELGPITGMAEAIVDLVANGKTLKENGLIKIDDLYYSTA

SEQ ID NO: 118062 - protein, 114 aa, Unknown
  Bacterial polypetide isolated from the Sargasso Sea
VKKNSNYIKPTDLPANCKVASKFTKTARSYFDELNLPVEIVHLTGSVELGPITGMAEAIVDLVATGKTLKENGLIKIDDLFYSTARLIGNPLSMRLDDNDLRDTILSIESTNAL

SEQ ID NO: 118063 - protein, 74 aa, Unknown
  Bacterial polypetide isolated from the Sargasso Sea
KNKYILLNVPNTKIEEISNIFPVLKSPTILPLAEEGWSSLHSVIEENKFWEVIDELKDAGAEDILIVPIDKMVR

SEQ ID NO: 118064 - protein, 212 aa, Unknown
  Bacterial polypetide isolated from the Sargasso Sea
MFTIALPKGALLKDSISTFKRAGLDFSDALDENNRSLTFESNCKRAKALLVRNGDVPVYVSYGQADLGIVGYDVLRESELKVAKLLDLGFGGCHMSLAVKKNSNYSKPTDLPANCKVASKFIKTARFYFEELNIPVEIVHLTGSVELGPITGMAEAIVDLVATGKTLKENGLIKIDDLYYSTARLIGNPLSMRLDDNHLRDTILSIESTNAL

SEQ ID NO: 118065 - protein, 111 aa, Unknown
  Bacterial polypetide isolated from the Sargasso Sea
NSNYSKPTDLPANCKVASKFIKTARAYFEELNIPVEIVHLTGSVELGPITGMAEAIVDLVATGKTLKENGLIKIDDLYYSTARLIGNPLSMRLDDNHLRDTILSIESSNDL

SEQ ID NO: 118066 - protein, 118 aa, Unknown
  Bacterial polypetide isolated from the Sargasso Sea
MSLAVKKNSNYSKPTDLPANCKVASKFIKTARSYFEELNIPVEIVHLTGSVELGPITGMAEAIVDLVATGKTLKENGLIKIDDLFYSTARLIANPLSMRLDDNFLRDMILSIESNNAL

SEQ ID NO: 118067 - protein, 121 aa, Unknown
  Bacterial polypetide isolated from the Sargasso Sea
MGQEIYPEGILQALKEIHRRFPGLEIMITENGIADRLDEKRGSFMIDHLSHVHEAINLGIPVRNYCHWSLLDNFEWMEGFAPRFGLYEVDYKTQKRTPRASAELYKRIATSNELPSNNPHF

SEQ ID NO: 118068 - protein, 183 aa, Unknown
  Bacterial polypetide isolated from the Sargasso Sea
MDENNRSLTFESNCKRAKALLVRNGDVPVYVSYGQADLGIVGYDVLRESELKVAKLLDLGFGGCHMSLAVKKNSNYSKPTDLPANCKVASKFIKTARSYFEELNIPVEIVHLTGSVELGPITGMAEAIVDLVATGKTLKENGLIKIDDLFYSTARLIGNPLSMRLDDNHLRDTILSIESTNAL

SEQ ID NO: 118069 - protein, 217 aa, Unknown
  Bacterial polypetide isolated from the Sargasso Sea
MNKNIINIGIPSKGRLKNDTLNIFKIKKLKIYSERGERDLFGYIKNSNVKIIYLHARECIEQLSLGNIDVGFSGIDLLKESEINIQNKIKVIKKYEFGKADLVLAIPDLWIDVQTLLDLDEVADDFKKKKKKLLRIATKYPNLTRQFLYSKGVTQFQLVKSLGSTEVAPFTGTAEIISDITSTGATLKANNLRVLKDGEILKSQACLMISKLSFRKI

SEQ ID NO: 118070 - protein, 215 aa, Unknown
  Bacterial polypetide isolated from the Sargasso Sea
MTKTIIAIPRGRIINECKSILNKTSFAPDPLLFDENSRKLSFKSANKEIDYIKVRSFDVCTFVAFGAAQIGIAGDDVIKEFNYSEVYAPLNLNIGKCRVSIAALKSLLEKEDPQTWSNIRVATKYPNITKNFFQSKGIQVEVIKLNGSMELAPSLKMCRRIVDLVSTGKTLKENGLEEIEKIMQVESKLIINRSAFKTKIETVQKITEEFRNIIK

SEQ ID NO: 118071 - protein, 198 aa, Unknown
  Bacterial polypetide isolated from the Sargasso Sea
MGTLKLAIQKSGRLFDNSQNLIQSSGIEIVSKNVALKTKAKNYPLEIYYLRNSDIPKYINNGVVDIGIVGQNLLFERNNDLEVIQKLGFSKCRLSLAVPQNIKYESLQFFDGKKIATSYPNSLKKFLNQHKINAKIHQISGSVEISPGIGLADGVCDLVSTGFTLSQNRLKEVEIIMNSEAVIARSSNIKPEIQSIID

SEQ ID NO: 118072 - protein, 208 aa, Unknown
  Bacterial polypetide isolated from the Sargasso Sea
MSDKITIAVSKGRIFDEALPLLAKIDVIPKDDPQNSRKLILETNKNNVQILVIRATDVPTYVERGAAELGIAGKDVLLEYQGDGFYEPIDLGIAKCKMMLAGLKGVKKEITRPRIATKYTNITQNYFSNFGKQVEIIKLYGSMELAPILGLADQIVDLVDTGKTLEANGLVPYERIADISSRLIVNKASMKLKSTAIKSFIEKLSDVI

SEQ ID NO: 118073 - protein, 182 aa, Unknown
  Bacterial polypetide isolated from the Sargasso Sea
RELWIHLKEDKRKLIFGSSEKNIQFSILRGWDIPKFVSYGAVDIGIVGKDVLLETEEENFFEVLDLEIGKCRLSLAAKEKKVSELAGSTIASKFPKETNNFLSENFIDAEIIELKGSIEIAPILGISDFIVDLVNTGNTLKENGLKELKIIKEISTRLIVNKSKFRTKNKEIKKFIQRIKSD

SEQ ID NO: 118074 - protein, 225 aa, Unknown
  Bacterial polypetide isolated from the Sargasso Sea
MESRVKIAIQKNGRLSAESLSILKKCGIEFSDSNNKLFIKSTNMLIDLLMVRDDDIPRLVSQNIADLGIVGENVVSEKQLSDSSLKSKTILKLGFSKCRLSFAKPKEMNLDNISNKKIATSYPAIVKDYLEKKDISAEIIEIHGSVELTPFVEISDIIADLVSTGSTLESNNLTELDSIMDSQAILIQSNSITSKKLPLIDKVVSRINSVIKAKDSKYIMFNADT

SEQ ID NO: 118075 - protein, 214 aa, Unknown
  Bacterial polypetide isolated from the Sargasso Sea
MITIALSKGRIFDETMPILNAAGIVCAENPEISRKLVFKTSNKDVKIIIVRASDVPTYVERGGADIGIAGKDILDEYSGTGLYYPVDLNIAKCKMMVAAKKNFDYEKVIKNKRRLKVATKYPNTARSFFSSKGIHIDLIKLYGSMELAPIVGLSDVIVDLVSSGKTLQANNLKPVELISLISSRLIVNKAALKLDISKIKPLLNKFQEVVDDAD

SEQ ID NO: 118076 - protein, 274 aa, Unknown
  Bacterial polypetide isolated from the Sargasso Sea
MKNRLTIAIQKKGRLFNQSADLIKKSGINFSIKTDNLLAKANNMPIDILFVRSDDIPSLVSNGDADLAIVGENILLEKSLFKKTSIEKVLSLGFSKCRLSFACPENINIRSFKNKKIATSYPNTVKKYLRDRKIDASIINIHGSVELTPYIGMSDLICDLVSSGATLEANNLKEVETIMESEAVLIKNKNLSVSKNKIAEKIISRMQGVVNATESKYVMLNVDASKVKEICKLLPGSESPTVIPLENENKVAIHALYQEPIFWETMKNLNQRGS

SEQ ID NO: 118077 - protein, 150 aa, Unknown
  Bacterial polypetide isolated from the Sargasso Sea
VIKINGSVELTPYVGIADCICDLVSSGATLEANNLVEFKELLTSQAVLIANSTTSILKQKRILQLKERFKGVIDARESKYVMLNCDLSDSEKICNLLPGADAPTILPLKDKNKVAIHALCQEPVFWETMENLKKTGASSILVMPVEKVLN

SEQ ID NO: 118078 - protein, 195 aa, Unknown
  Bacterial polypetide isolated from the Sargasso Sea
MFTIALPKGALLKDSISTFKRAGLDFSDALDENNRSLTFESNCKRAKALLVRNGDVPVYVSYGQADLGIVGYDVLQESELKVAKLLDLGFGGCYMSLAVKKNSNYSKPTDLPANCKVASKFIKTARFYFEELNIPVEIVHLTGSVELGPITGMAEAIVDLVATGKTLKENGLIKIDDLYYSSARLIGNPLSMRLD

SEQ ID NO: 118079 - protein, 201 aa, Unknown
  Bacterial polypetide isolated from the Sargasso Sea
MIIALPKGRVYEDFIPLLEKTRFAIKDDVKKSRKMLLDTKHPSVKVLIIRGWDVPTYITSGAAHIGIVGKDILMEKEEEEFVELADLGLGKCRLSLAGYEDVLTGSARLKIATKYPKSSTKFMNSIGIQPEIIYLNGAQEIAPVLGLSDAIIDLVDTGKTLTANGLKEIKIIADISTRLIANKASIKTKATIINEIMEALK

SEQ ID NO: 118080 - protein, 127 aa, Unknown
  Bacterial polypetide isolated from the Sargasso Sea
MKNRLKIAIQKNGRLSNESLSILKKCGIEFSDSSNKLFIKSTNMLIDLLMVRDDDIPRLVSQNIADLGIVGENVVFEKQLSDTSLKLKTTLKLGFSRCRLSFAKPKKMNLDNINNKKIATSYPSIVK

SEQ ID NO: 118081 - protein, 159 aa, Unknown
  Bacterial polypetide isolated from the Sargasso Sea
MKDKDSFILALPKGRVYEDFIPTLQKTKFALRDDPKKSRKMLLDTEHPEVKVLIIRGWDVPTYITSGAAHAGVVGKDILMEKEEEEFVELTDLSLGKCRLSLAGRNDVLSGSSRLKIATKYPKSSTKYMNSLGIQAEVIYINGAQEIAPILGLSDAIID

SEQ ID NO: 118082 - protein, 212 aa, Unknown
  Bacterial polypetide isolated from the Sargasso Sea
MFTIALPKGALLKDSISTFKRAGLDFSDALDEDNRSLTFESNCKRARALLVRNGDVPVYVSYGQADLGIVGYDVLRESELKVAKLLDLGFGGCHMSLAVKKNSNYSKPTDLPANCKVASKFIKTARSYFEELNIPAEIVHLTGSVELGPITGMAEAIVDLVATGKTLKENGLIKIDDLFYSTARLIGNPLSMRLDDNYLRETILSIESINAL

SEQ ID NO: 118083 - protein, 212 aa, Unknown
  Bacterial polypetide isolated from the Sargasso Sea
MFTIALPKGALLKDSISTFKRAGLDFSNALDKNNRSLTFESNCKRAKALLVRNGDVPVYVSYGQADLGIVGYDVLRESELKVAKLLDLGFGGCHMSLAVKNNSNYSKPTDLPPNCKVASKFIKTARSYFDELNIPVELVHLTGSVELGPITGMAEAIVDLVATGKTLKENGLIKIDDLFYSTARLIGNPLSMRLDDNHLRDTILLIESINHT

SEQ ID NO: 118084 - protein, 207 aa, Unknown
  Bacterial polypetide isolated from the Sargasso Sea
MNKSNSLILALPKGRVYEDFIPLLEKTQFAIEDDVKKSRKMLLDTKHPSVKVLIIRGWDVPTYITSGAAHIGIVGKDILMEKEEEEFVELADLGLGKCRLSLAGYEDALTGSTRLKIATKYPKSSTKFMNAIGIQPEIIYLNGAQEIAPVLGLSDAIIDLVDTGKTLTANGLTEIKTIADISTRLIANKASIKTKSTIINEIMEALK

SEQ ID NO: 118085 - protein, 214 aa, Unknown
  Bacterial polypetide isolated from the Sargasso Sea
LIYVYYSLPKGALLKDSISTFKRAGLDFSDALDENNRSLTFESNCKRAKALLVRNGDVPVYVSYGQADLGIVGYDVLRESELKVAKLLDLGFGGCHMSLAVKKNSNYLKPTDLPANCKVASKFIKTARSYFEELNIPVEIVHLTGSVELGPITGMAEAIVDLVATGKTLKENGLIKIDDLYYSTARLIGNPLSMRLDDNHLRDTILSIESTNAL

SEQ ID NO: 118086 - protein, 214 aa, Unknown
  Bacterial polypetide isolated from the Sargasso Sea
NLLIEKDLKVPILEKLDFAKCRVSIAVPKEFKYRKIRDLNGIKIATSYPNTIKSFLVKNNIKASLHIINGSVEIAPNIGLSDAICDLVSSGSTLFKNNLKEIIKINTSEAVLVKSSILNKSKIDIIEKLRFRIRSVLKAKKSRYILLNAPNNRIKSISNILPVLKSPTVLPLEKDGWSSLHSVINEDKFWEVIDKLKEEGAEDILVCPIEKMVL

SEQ ID NO: 118087 - protein, 212 aa, Unknown
  Bacterial polypetide isolated from the Sargasso Sea
MFTIALPKGALLKDSISTFKRAGLDFSDALNENNRSLTFESNCKRARALLVRNGDVPVYVSYGQADLGIVGDDVLRESELKVAKLLDLGFGGCYMSLAVKNNSNYSKPTDLPANCKVASKFTKTARSYFDELNIPAEIVHLTGSVELGPITGMAEAIVDLVATGKTLKENGLTKIDDLFYSTAKLIGNPLSMRLDDNHLKDTILSIESTNAL

SEQ ID NO: 118088 - protein, 194 aa, Unknown
  Bacterial polypetide isolated from the Sargasso Sea
FKKAGLDFSNALEENNRSLTFESNCKRAKALLVRNGDVPVYVSYGQADLGIVGYDVLRESELKVAKLLDLGFGGCHMSLAVKKNSNYLKPTDLPANCKVASKFTKTARSYFEELNIPVEIVHLTGSVELGPITGMAEAIVDLVATGKTLKENGLIKIDDLYYSTARLIGNPLSMRLDDNHLRDTILSIESTNAL

SEQ ID NO: 118089 - protein, 217 aa, Unknown
  Bacterial polypetide isolated from the Sargasso Sea
MITVALAKGALLKDSVARFAAAGLDFSAVLDKDNRQLMLPTPCGRARALLVRNGDVPTYVAYGQAQLGVVGYDVLKEHQLPVAQLVDLGFGGCRMAVAVKASSGYERAADLPPHCRVASKFTHCAREYFDQLDLPVELVHLNGSVELGPITGMSEAIVDLVATGRTLRENGLVAIEDLFHTTARLVGHPLSMRLDNGSLSSIVEAVRTVSNAAGAAA

SEQ ID NO: 118090 - protein, 212 aa, Unknown
  Bacterial polypetide isolated from the Sargasso Sea
MFTIALPKGALLKDSISTFKRAGLDFSDALEKNSRSLTFESNCKRAKALLVRNGDVPVYVSYGQADLGIVGYDVLRESELKVAKLLDLGFGGCHMSLAVKKNSNYSKPTDLPANCKVASKFIKTARSYFEELNIPVEIVHLTGSVELGPITGMAEAIVDLVATGKTLKENGLIKIDNLFYSTARLIGNPLSMRLDDNHLRDTILSIESTNVT

SEQ ID NO: 118091 - protein, 192 aa, Unknown
  Bacterial polypetide isolated from the Sargasso Sea
MFTIALPKGALLKDSISTFKKAGLDFSNALEENNRSLTFESNCKRAKALLVRNGDVPVYVSYGQADLGIVGYDVLRESELKVAKLLDLGFGGCHMSLAVKKNSNYSKPTDLPANCKVASKFIKTARFYFEELNIPVEIVHLTGSVELGPITGMAEAIVDLVATGKTLKENGLIKIDDLYYSTARLIGNPLSM

SEQ ID NO: 118092 - protein, 193 aa, Unknown
  Bacterial polypetide isolated from the Sargasso Sea
GRIYNEIRQLLENSGIHLKEDKRKLIFGSSEKNIQFSILRGWDIPKFVSYGAVDIGIVGKDVLLETEEENFFEVLDLEIGKCRLSLAAKEKKVSELAGSTIASKFSKETNNFLSENFIDAEIIELKGSIEIAPILGISDYIVDLVNTGNTLKENGLKELKVIKEISTRLIVNKSKFRTKNKEIKKFIQRIKSD

SEQ ID NO: 118093 - protein, 45 aa, Unknown
  Bacterial polypetide isolated from the Sargasso Sea
TGNTLKENGLHEIQVIREISTRLIVNKAALKTKSALINEILEIFK

SEQ ID NO: 118094 - protein, 87 aa, Unknown
  Bacterial polypetide isolated from the Sargasso Sea
PNIAKKYFENIGFQCSILELYGSIELAPVLGLSDFIVDIVETGKTLKENGLRVHDTITKVSSLLIANRVSYKIKRKEINSFVDRIKL

SEQ ID NO: 118095 - protein, 201 aa, Unknown
  Bacterial polypetide isolated from the Sargasso Sea
MIIALTKGRILEETLPLFERAGIVPSESLKKSRKLLFETNIKNVQFMLLRGSDVATYVEFGSADMGVVGKDLILEHGSDGFYEPLDLGIAQCRLMTAVRSDRKIVSGRIVVATKYINIAKEYFADQGKQIELIKLNGALELAPALGLADAIVDIVDTGKTLKANGLVPQDLIADISSRVIVNKASMKIKHKIVSEIIGLLN

SEQ ID NO: 118096 - protein, 142 aa, Unknown
  Bacterial polypetide isolated from the Sargasso Sea
MSQTLTIALSKGRILDDTLPLLKEAGIELTEDLEKSRKLIFPTTDPTVRLLIVRATDVPTYVEHGAADLGVAGKDVLLEYGSQGLYEPLDLKIANCKLMTAGPVDAPEPTGRLKVATKFVNVARRYYAEQGRQVDVIKLYGS

SEQ ID NO: 118097 - protein, 209 aa, Unknown
  Bacterial polypetide isolated from the Sargasso Sea
AVPRGRIIEECKQILNKTSFAPDPSLYNPSTRKLTFNSKDPLINFIKVRAFDVCTFVAFGAAQIGIAGEDVIREFDYSEVYAPCDLNIGHCRLSVAAPSKLIKKEEPSTWSNIRIATKYPNITKNFFAKKGVQVETIKLNGSMELAPSLSMCRRIVDLVSTGKTLKENGLKEVEQILKVQSKLIVNRSAYKTKTSKIEFIIKQIDKIVL

SEQ ID NO: 118098 - protein, 188 aa, Unknown
  Bacterial polypetide isolated from the Sargasso Sea
MILYYFDKDTRKLTFKSKKRNIEYIKVRAFDACTFVAFGAAQIGIAGEDVINEFDYSEIYAPLDLNIGHCRISVAALKSLLKKEDPETWSNIRIATKYPNITKKFFYNKGIQVEIIKLSGSMELAPSLNMCRRIVDLVSTGKTLKENGLTEIEEIMKIQSKLIVNRSAYKTNMNEVSKIISEIGTFIK

SEQ ID NO: 118099 - protein, 251 aa, Unknown
  Bacterial polypetide isolated from the Sargasso Sea
MNERIKIAIQKSGRLTEHSTTLLQKCGLIISHTKDQLIGYGENMPFDIMFVRDDDIPGLIQENLCEIGIVGANVAIEKQLSYESSQLPSQFVLESSLDFGHCKLSFAYPETSSIRSVNDLEGKTIATSYPFTVKNYFAENQINATVTEFSGAVELAPSLGKAEAICDLVSSGNTIKAHNLVLGETILESVATVLKSNSNQSAFKQMWIDKIIERINGVLQVNESKYIMMHAPKDAINEITTLSAWNRVTNG

SEQ ID NO: 118100 - protein, 77 aa, Unknown
  Bacterial polypetide isolated from the Sargasso Sea
DYASAVRQGARLRVATKYVETAREHFAAKGVHVDLIKLYGSMELAPLVGLADAIVDLVSSGGTLKANNLVEVEEIMA

SEQ ID NO: 118101 - protein, 121 aa, Unknown
  Bacterial polypetide isolated from the Sargasso Sea
NGLVEKDVIFRSKAVLIKRADGELSDEKETLVNRLMPRVDGVLLAKESKYIMLHAPKAYLEQVKSLLPGAENPTVLPLAGNEEQVAIHVVSTETLFWETMEKLKALGCSSILVMPIEKMMG

SEQ ID NO: 118102 - protein, 70 aa, Unknown
  Bacterial polypetide isolated from the Sargasso Sea
MSPATESKRLRIAMQKSGRLSVDSQALLTSCGLKINLREQRLIAHVENMDIDILRVRDDDIPGLVMDGVC

SEQ ID NO: 118103 - protein, 178 aa, Unknown
  Bacterial polypetide isolated from the Sargasso Sea
MIRLAISKGRILEQALETLEKVNISCQVNPFNSRKLIIPTNLENLEIIIIKASDVPLYIDSGKIDLGIVGVDTLMEDDKNNHFRLCDMTISKCKLVVAGKAKTKYFNNMKVATKYPKVAKKYFENIGFQCSILELYGSIELAPVLGLSDFIVDIVETGKTLKENGLREHDIIANVSSL

SEQ ID NO: 118104 - protein, 215 aa, Unknown
  Bacterial polypetide isolated from the Sargasso Sea
MNKKIIIAVPRGRITDECKSILKKTSFSPDPLLFSEKSRKLTFKSKNSKINYIKVRAFDVCSFVAFGAAQIGIAGDDVIKEFDYSEVYAPINLKVGYCRLSVAAPKKMLKDEDPSTWSSIRIATKYPYLTKQFFANKGVQVEAIKLNGSMELAPSLNMCRRIVDLVSTGKTLKENGLKEVEKIIDVQSKLIVNRSAYKTQNKEIEKIINEIKNNI

SEQ ID NO: 118105 - protein, 200 aa, Unknown
  Bacterial polypetide isolated from the Sargasso Sea
MYLAISKGRILEESLKLLERLNIKCEESPLDSRKLIFRTNDKNLKIIIVRASDVPTYVESGKVDMGIVGKDTLLEKNSNDLLRLKDLKIARCRLVIAGKKGVSLVSNMKIATKYPTITQKYFQSQGLPCTILKLYGSIELAAVLGMTDAVVDLVETGNTLKENGLSEVKIIENISSYLVVNKTSYRFNKEYVDKFISKIS

SEQ ID NO: 118106 - protein, 196 aa, Unknown
  Bacterial polypetide isolated from the Sargasso Sea
MLLKTSFAPDPLLFDKDTRKLTFKSKKRNIEYIKVRAFDACTFVAFGAAQIGIAGEDVINEFDYSEIYAPLDLNIGHCRISVAALKSLLKKEDPETWSNIRIATKYPNITKKFFYNKGIQVEIIKLSGSMELAPSLNMCRRIVDLVSTGKTLKENGLTEIEEIMKIQSKLIVNRSAYKTNMNEVSKIISEIGTFVK

SEQ ID NO: 118107 - protein, 95 aa, Unknown
  Bacterial polypetide isolated from the Sargasso Sea
MSQSLTIALSKGRILDDTLPLLKAAGIELTEDLEKSRKLIFPTTDPNVRLLIVRATDVPTYVEHGAADVGVAGKDVLMEYGSQGLYEPLDLKIAR

SEQ ID NO: 118108 - protein, 202 aa, Unknown
  Bacterial polypetide isolated from the Sargasso Sea
MSGNVLKLGIPKGSLEEATVKLFARAGYNIRIQSRSYFPSIDDVEIECMLIRAQEIARYVADGVLDAGLTGKDWIMENRADVEEIAPLVYSKVSARPVRWVLAVPNDSSIQSAKDLQGKRIATEVVNLTTDWLKGHGVTANVEFSWGATEVKAPKLVDAIVEVTETGSSLKANNLRIVDTLMESTTRFIMNKTASKDNWKRK

SEQ ID NO: 118109 - protein, 254 aa, Unknown
  Bacterial polypetide isolated from the Sargasso Sea
MPFDIMFVRDDDIPGLIQENLCEIGIVGANVAIEKQLSYESSQLPSQFVLESSLDFGHCKLSFAYPETSSIRSVNDLEGKTIATSYPFTVKNYFAENQINARVTEFSGAVELAPSLGKAEAICDLVSSGNTIKAHNLVLGETILESVATVLKSNSNQSAFKQMWIDKIIERINGVLQVNESKYIMMHAPKDAINEITTLLPGTESPTVIPLDGISDTVAVHVVCKETVFWETLEELKEVGASSILVVPVEKMLM

SEQ ID NO: 118110 - protein, 235 aa, Unknown
  Bacterial polypetide isolated from the Sargasso Sea
MNERIKIAIQKSGRLTEHSTTLLQKCGLIISHTKDQLIGYGENMPFDIMFVRDDDIPGLIQENLCEIGIVGANVAIEKQLSYESSQLPSQFVLESSLDFGHCKLSFAYPETSSIRSVNDLEGKTIATSYPFTVKNYFAENQINARVTEFSGAVELAPSLGKAEAICDLVSSGNTIKAHNLVLGETILESVATVLKSNSNQSAFKQMWIDKIIERINGVLQVNESKYIMMHAPKRC

SEQ ID NO: 118111 - protein, 167 aa, Unknown
  Bacterial polypetide isolated from the Sargasso Sea
INYIKVRSFDVCTFVAFGAAQVGIAGDDVIQEFDYSEVYAPLELKIGHCRLSVAALETLIDKEDPSTWSNIRIATKYPNIARNFYANKGVQVEAIKLNGSIELAPVLQMCKRVVDLVSTGRTLKENGLVEVEKIIDVQSKLIINRSAYKTKTKEIESIINNIRKIIK

SEQ ID NO: 118112 - protein, 215 aa, Unknown
  Bacterial polypetide isolated from the Sargasso Sea
MSKIVIAVPRGRITKECKSLLLKTSFAPDPLLFDKDTRKLTFKSKKRNIEYIKVRAFDACTFVAFGAAQIGIAGEDVINEFDYSEIYAPLDLNIGHCRISIAALKSLLKKEDPETWSNIRIATKYPNITKKFFYNKGIQVEIIKLSGSMELAPSLKMCRRIVDLVSTGKTLKENGLIEIEEIMKIQSKLIVNRSAFKTSKDEVSNIISEIDTFVK

SEQ ID NO: 118113 - protein, 205 aa, Unknown
  Bacterial polypetide isolated from the Sargasso Sea
MIRLAISKGRILEQAIEILRNININCELDPLDSRKLIIPTNMKNLEIVVIKASDVPIYIDSGRVDLGIVGIDTLLEDTIANHYRLLDLQISKCKLVVAGKPNTAYFNNMKIATKYPNAAKKYFEEIGLQCSILKLYGSIELAPVLSLSDFIVDIVESGKTLKENGLKEFDKIFDISSLLIANKVSYKIKKEEINSFIDRVRTHDK

SEQ ID NO: 118114 - protein, 297 aa, Unknown
  Bacterial polypetide isolated from the Sargasso Sea
MNERIKIAIQKSGRLTEHSTTLLQKCGLIISHTKDQLIGYGENMPFDIMFVRDDDIPGLIQENLCEIGIVGANVAIEKQLSYESSQLPSQFVLESSLDFGHCKLSFAYPETSSIRSVNDLEGKTIATSYPFTVKNYFAENQINAKVTEFSGAVELAPSLGKAEAICDLVSSGNTIKAHNLVLGETILESVATVLKSNSNQSAFKQMWIDKIIERINGVLQVNESKYIMMHAPKDAINEITTLLPGTESPTVIPLDGISDTVAVHVVCKETVFWETLEELKEVGASSILVVPVEKMLM

SEQ ID NO: 118115 - protein, 95 aa, Unknown
  Bacterial polypetide isolated from the Sargasso Sea
IATKYPNITKKFFYNKGIQVEIIKLSGSMELAPSLNMCRRIVDLVSTGKTLKENGLTEIEEIMKIQSKLIVNRSAYKTNMNEVTKIISEIGTFVK

SEQ ID NO: 118116 - protein, 171 aa, Unknown
  Bacterial polypetide isolated from the Sargasso Sea
MDSRKLIFRTNDKNMKIIIVRASDVPTYVESGKVDMGIVGKDTLLEKNSNDLLRLKDLQIAKCRLVIAGKKGVSLVSNMKIATKYPTITQKYFQSQGLPCTILKLYGSIELAAVLGMTDAVVDLVETGNTLKENGLSELKIIENISSYLVVNKTSYRFNKEYVDKFISKIS

SEQ ID NO: 118117 - protein, 112 aa, Unknown
  Bacterial polypetide isolated from the Sargasso Sea
MKSLLKKEDPETWSNIRIATKYPNITKKFFYNKGIQVEIIKLSGSMELAPSLNMCRRIVDLVSTGKTLKENGLTEIEEIMKIQSKLIVNRSAYKTNMNEVSKIISEIGTFVK

SEQ ID NO: 118118 - protein, 297 aa, Unknown
  Bacterial polypetide isolated from the Sargasso Sea
MKERIKIAVQKSGRLTEHSITLLQKCGLIISHTKDQLIGYGENMPFDIMFVRDDDIPGLIQENLCEIGIVGANVAREKQLSYESSRSSSNFDLESSLDFGHCKLSFAYPESSSIRSVNDLDGKTIATSYPFTVKNYFTKNSIDANVTEFSGAVELAPSLGKADAICDLVSTGNTLRAHNLMAGETILESVATVLKSKSEQSEFKSMWIEKIIERINGVLQVNESKYIMMHAPKNAINEITKLLPGTESPTVIPLDGVNDTVAVHVVCKETVFWETLEELKDVGASSILVVPVEKMLM

SEQ ID NO: 118119 - protein, 208 aa, Unknown
  Bacterial polypetide isolated from the Sargasso Sea
MEDAQDSLILALPKGRVFEDIIPMLKGSELELFDDPNKTRKLLLDTKNSKFKILLVRGWDVPTYVTAGAAHLGIVGKDILIEKESEEFIELKDLEIGKCRLSLAGKKDLLLGSTRMKIATKYPKSSIKFMESIGIQSEIIYLHGAQEIAPSLGLSDAIIDLVESGNTLKDNGLHEIQVIREISTRLIVNRAALKTKSGLINELLEVFS

SEQ ID NO: 118120 - protein, 288 aa, Unknown
  Bacterial polypetide isolated from the Sargasso Sea
MINKITIAIQRKGRLFDSSKDLLIKSGINFSTSGDKLLARSSNMNIDILLVRDDDIPSLVSKGVADLGIVGQNVLAEQVASNKKITAKSVLNLGFSKCRLAFAKPVNSKLRSLKNKIIATSYPGLVKKFLKAKNISAEVIKINGSVELTPYIGIADCICDLVSSGATLEANNLTEFKTLLNSEAVLIASSSYVKIKDKNILDLIKRFEGVINAAESKYVMLNAETKSIDKICKLLPGADSPTIIPLQQENKVAIHALCSEPVFWETMEKLKSNGASSILVMPVEKILN

SEQ ID NO: 118121 - protein, 142 aa, Unknown
  Bacterial polypetide isolated from the Sargasso Sea
SGAAHLGVVGKDILIEKESEEFIELRDLGTGKCRLSLAGKKDLLLGSTRMKIATKYPKSSIRFMESIGIQSEIIYLHGAQEIAPLLGLSDAIIDLVETGNTLKENGLHEIQVIREISTRLIANKAALKTKSALINEILEIFK

SEQ ID NO: 118122 - protein, 120 aa, Unknown
  Bacterial polypetide isolated from the Sargasso Sea
MLDNTRLRIAMQKSGRLSDDSRELLARCGIKINLHTQRLIAMAENMPIDILRVRDDDIPGLVMDGVVDLGIIGENVLEEELLNRRAQGEDPRYFTLRRLDFGGCRLSQATPVDEAWDGPA

SEQ ID NO: 118123 - protein, 87 aa, Unknown
  Bacterial polypetide isolated from the Sargasso Sea
MSANTESKRLRIAIQKSGRLSQDSQALLTSCGLKINLREQRLIAHVENMAIDLLRVRDDDIPGLVMDGVCDLGIIGENVLEEMSLQR

SEQ ID NO: 118124 - protein, 231 aa, Unknown
  Bacterial polypetide isolated from the Sargasso Sea
MSNSKRLRIAVQKSGRLSDDSIALLKAIGIKLNIRDRLLIAHSTNEPIDLLRVRDDDIPGLVMDGVVDLGFIGENELEEKSLERKAAGKPFEYETLRRLDYGGCRLSIAVPNEMDYDGVQSLDGKEVATTYPYLLERYFEEQGINSKAVMLTGSVEVAPRAGVADAICDLVSTGATLEANGLVEKEEIFRSKAVLIKRVGGDMSNEKQALINRMMPRVDGVLLAKESKYIM

SEQ ID NO: 118125 - protein, 150 aa, Unknown
  Bacterial polypetide isolated from the Sargasso Sea
MLTIALSKGRILDDTLPLLAAAGIEPTENPDKSRKLIIPTTQDDVRLLIVRATDVPTYVEHGAADLGVAGKDVLMEYGGQGIYEPLDLQIAKCKLMTAGKVGAPEPKGRLRVATKFVNVAKRYYAEQGRQVDIIKLYGSMELAPLVGLAD

SEQ ID NO: 118126 - protein, 113 aa, Unknown
  Bacterial polypetide isolated from the Sargasso Sea
NDLPLKACLIQRDGEMTEAKQQLIDKLLTRIQGVIQARESKYIMMHAPSERLDEVIALLPGAERPTILPLAGDQQRVAMHMVSSETLFWETMEKLKALGASSILVLPIEKMME

SEQ ID NO: 118127 - protein, 174 aa, Unknown
  Bacterial polypetide isolated from the Sargasso Sea
MLTIALSKGRILDDTLPLLAAAGIEPTENPDKSRKLIIPTTQDDVRLLIVRATDVPTYVEHGAADLGVAGKDVLMEYGGQGIYEPLDLQIAKCKLMTAGKVGAPEPKGRLRVATKFVNVAKRYYAEQGRQVDIIKLYGSMELAPLVGLADKIIDVVDTGNTLRANGLEPQELIA

SEQ ID NO: 118128 - protein, 150 aa, Unknown
  Bacterial polypetide isolated from the Sargasso Sea
MLTGSVEVAPRAGLADAICDLVSTGATLEANGLMQGDTILESNACLIQNKDLTDQSKLDLINTLMPRLRGVRQAKESKYIMLHAPKAKLDEVCDLLPGTGQPTLLSLAGSDDYVALHMVSSETLFWETMEQLKALGANSILVMPIEKMME

SEQ ID NO: 118129 - protein, 239 aa, Unknown
  Bacterial polypetide isolated from the Sargasso Sea
MTVTTNRLRIAIQKSGRLSQDSQALLTSCGLKINLREQRLIAHVENMDIDLLRVRDDDIPGLVMDGVCDLGFVGENVLEEVSLQRQLDNETYDYTVLARLDFGGCRLSIAVPQEEDYKSVKDLEGRTIATTYPRLLNRYLKQNGVNCRIVNLKGSVEVAPRAGLADAICDLVSTGATLEANGLKEVEVIYRSKAVLIQRRDLADEKQLKLIKKLMPRIQGVMQANESKYIMLHAPRARL

SEQ ID NO: 118130 - protein, 300 aa, Unknown
  Bacterial polypetide isolated from the Sargasso Sea
MTVTTNRLRIAIQKSGRLSQDSQALLTSCGLKINLREQRLIAHVENMDIDLLRVRDDDIPGLVMDGVCDLGFVGENVLEEESLQRQMDNESYDYTVLARLDFGGCRLSIAVPQEEDYQSVKDLEGRTIATTYPRLLNRYLKQNGVNCRIVNLKGSVEVAPRAGLADAICDLVSTGATLEANGLKEVEVIYRSKAVLIQRRDLADEKQLKLIKKLMPRIQGVMQANESKYIMLHAPRARLQEVIALLPGAENPTLLPLAGNDDLVALHVVSSETLFWETMEQLKGLGASSILVLPIEKMME

SEQ ID NO: 118131 - protein, 326 aa, Unknown
  Bacterial polypetide isolated from the Sargasso Sea
MAVPINQLKRETKEYHFEFVNFERDKIMTESNRLRIAIQKSGRLSTDSQQLLKSCGVKFSINEQRLIAHADNMPIDLLRVRDDDIPGLVMDGVVDLGIIGENVLEEEQIERQTLNKPAEYVKLRQLDFGACRLSLAVPTEFSYANASSLEGLRIATSYPNLLRRFMQQKGINYRDCMLKGSVEVAPRAGLADGICDLVSTGATLEANGLYETEVIYRSMACIIQSTQTQTPSKQALIDRILSRVNGVIRARESKYILLHAPTETLDQIVALLPGAENPTVLPLNDDTNRVAIHAVSTEDLFWDTMEELTALGASSILVMPIEKMMG

SEQ ID NO: 118132 - protein, 332 aa, Unknown
  Bacterial polypetide isolated from the Sargasso Sea
MLARPIPARHRNQLNHATKEYHFEFVNFERDKTMTESNRLRIAIQKSGRLSTDSQQLLKSCGVKFSINEQRLIAHADNMPIDLLRVRDDDIPGLVMDGVVDLGIIGENVLEEEQIERQTLNKPAEFVKLRQLDFGACRLSLAVPSEFSYADASSLEGLRIATSYPNLLRRFMQQKGISYRDCMLKGSVEVAPRAGLADGICDLVSTGATLEANGLYETEVIYRSMACIIQSTQTQTPSKQALIDRILSRVNGVIRARESKYILLHAPTETLDQIVALLPGAENPTVLPLNDDTNRVAIHAVSTEDLFWDTMEQLTALGASSILVMPIEKMMG

SEQ ID NO: 118133 - protein, 299 aa, Unknown
  Bacterial polypetide isolated from the Sargasso Sea
MSNTNRLRIAIQKGGRLSKDCQDLLKQLGVKLNLREQRLIAHSTNMPIDVLRVRDDDIPGLVMDGVCDLGIVGENVLVEVQAERERQGVPSEVSKLAKLDFGYCRLALAWPQELGPRDKSWFEGKRIATTYPEILTQWLKREGINASTVMLTGSVEVAPRAGLSDAICDLVSTGATLEANGLIQGDTILESNACLIQNKDLQDEDKLALINKLMPRLRGVKQAKESKYIMLHAPKTKLDEICEILPGSGQPTLLALAGNEEYVALHMVSSETLFWETMEQLKALGANSILVMPIEKMME

SEQ ID NO: 118134 - protein, 298 aa, Unknown
  Bacterial polypetide isolated from the Sargasso Sea
METQRLRIAMQKSGRLSQDSQALFKSCGLKINLREQRLIAHVENMPIDILRVRDDDIPGLVMEGVVDLGIIGENVLEEVQLIRASQGQPFAVKTLKQLDFGGCRLSLAVPDDVNYTGPQSLAGKRIATSYPGLLKRFFDEKGLSFKSVMLGGSVEVAPRAGLADAICDLVSTGATLEANGLKEVEVIYRSKAVLVQAPNPLSDSKQKIIDTLLPRIQGMQQARESKYIMLHAPKDKLDAITDLLPGAERPTIMQLAGETNQVALHVVSSETLFWETMEQLKALGASSILVLPIEKMME

SEQ ID NO: 118135 - protein, 232 aa, Unknown
  Bacterial polypetide isolated from the Sargasso Sea
MSSMPQTSSSPAVSAPLTLALSKGRIFEETLPLLAAAGIEVAEDPETSRKLILPTTDANVRVIIVRATDVPTYVEYGAADFGVAGKDVLLEHGGSGLYQPVDLDIARCRMSVAVAAGFDYANAVRQGARLRVATKYVETAREHFAAKGVHVDLIKLYGSMELAPLVGLADAIVDLVSSGNTLRANNLVEVEEIMQISSRLVVNQAALKLKRAALRPILDAFERASKAGTAAA

SEQ ID NO: 118136 - protein, 217 aa, Unknown
  Bacterial polypetide isolated from the Sargasso Sea
MTAPLTLALSKGRIFEETLPLLAAAGVQVTEDPETSRKLILPTTNPDLRVIIVRASDVPTYVEYGAADFGVAGKDVLVEHGGSGLYQPIDLNIARCRMSVAVSAGFDYASAVRQGARLRVATKYVETAREHFAAKGVHVDLIKLYGSMELAPLVGLADAIVDLVSSGGTLKANNLVEVEEIMAISSRLVVNQAALKLKRTALKPILDAFERASQNGG

SEQ ID NO: 118137 - protein, 264 aa, Unknown
  Bacterial polypetide isolated from the Sargasso Sea
MSNEDPFKPIISKISKGKTLTSSDADTAFSLIMSGSVTNAQIGAFLMGLSLNGETSDIIASGANMLRQNAIKIKSDSNTIDTVGTGGDGAHTLNISSAAAFVVAGAGVKVAKHGSRSLSSKSGAADVLSELGINLDCSFSLVQEALDKIGICFLMAPRHHVAMKHVGPSRVELGIRTIFNLLGPLSNPAFVKRQMVGVFDKRWLLPFAEALKKMGSTNAWIIHGRDGLDEVSISEITDVVELKKGKINEFSLDPSLYGFEKTRS

SEQ ID NO: 118138 - protein, 304 aa, Unknown
  Bacterial polypetide isolated from the Sargasso Sea
MNYDLNFKNILKMFTDEKELSYQLSKSAFEIIMTGKATDAQISSFLTAIKMQNHNPTVIAAGAEILRDKCSKIKCKENTIDVVGTGGDNLGTLNISTAVSFVLAGTNIPVAKHGNYSATSKSGAANVLKSLSVNIDCELNIVERCLDEIGICFLLAPKHHIAMKYVGKIRQEMGIRTIFNLLGPLSNPALVKRQLLGVYDKSLILPFAESLKTLGSTHAWIVHGSDGLDEVTITGETYCAELKNGKIKEFSINPSDIDLPTAKISDIVGGEPEENAKEIIELFNGKKSKFRDVVILNSASALVA

SEQ ID NO: 118139 - protein, 231 aa, Unknown
  Bacterial polypetide isolated from the Sargasso Sea
RSNTRKSGSAEALEALGVKINLEVDEVERCLRDLNICFCYAINHHPAMRFAGPIRKDLGVPTVFNLLGPLTNPAGAKSQLIGVPNVGLTSKIAQVLKRLGSERVMVVHGYDGLCELTVTSPTHVAELREGKIREYEITPEELGLKTGKLEEIGIDSPEESARIMKSIFSGDEQGTAREIALANAAGALVVAGQVENLAEGVVLATKTVDNGKAAEKLNDLINFSWANHKAN

SEQ ID NO: 118140 - protein, 87 aa, Unknown
  Bacterial polypetide isolated from the Sargasso Sea
MEKYLEKIKNKQNLSFNESKAAFEILMNGEAKDQEIFDFLTLLSVKGESSNELAGGVYVLRDKSKRVNVDNCIDTCGTGGDGMNTLN

SEQ ID NO: 118141 - protein, 117 aa, Unknown
  Bacterial polypetide isolated from the Sargasso Sea
MILKDIKDKIFKSEDLTVEETVFIFNLIMSGKLNDIEIAAVLIALKTKVESKNEILGAAKCMREKSKKITSSEETVDTCGTGGDMSGTLNISTSAAIVAASAGAKIAKHGNRSISSK

SEQ ID NO: 118142 - protein, 92 aa, Unknown
  Bacterial polypetide isolated from the Sargasso Sea
MKIYLDKLNNKENLTFEESKSAFNILMNGKASEDEIFNFLTLLSLKGEVSSEIAGGVYVLREKSKRVNYGECIDTCGTGGDGMNTLNISTAS

SEQ ID NO: 118143 - protein, 307 aa, Unknown
  Bacterial polypetide isolated from the Sargasso Sea
NGDRSPVKKTNAVFDAIDSSDLNAFSFFDKEGALTRAGQADVSLPLGGVPIGVKELHNVKGWPDTSASLVFADRISQFDGTMIQRLKSAGANLIGLTTASEFGGLNCSTTKLNGITHNPWNKDLTPGGSSGGSAAAVAGGIVTLGTGGDGGGSIRIPAGFCGLVGMKGTAGRIPRGPHTGIGPMTVVSGCLSRSVRDTARWYDICAGFDPRDPYSLPKEHGWEAQLGTTDFSGARVVVSPDLGSAMISGPVRALIIETAEEITKVAGLQRVDVDIDLPPIDWEWAIANQSGLYKELGDLWPDCEDQR

SEQ ID NO: 118144 - protein, 269 aa, Unknown
  Bacterial polypetide isolated from the Sargasso Sea
MGIPQSIVHQILEHQDLTESDAHDVAMTFLSGEASTDDMVTVLSALHKKGESVSEILGFIRAMRTHMTPLSFTESPIMDICGTGGSLPNRFNVSTCAAMVLGAMGHSVAKHGNRGSKKPNGSFDFLDALGIAYELTPDGHQEMMTRHGATFLFARQYHPAVRHVVNARKQLTSPSIFNLIGPFCNPASPSIQVIGAPSKRLAKKLAMVGDALSYDTFAVITSDIGLDECSTVGKSHIEGNRNGQAFQLELDPTTLGIHHQLSDITISPT

SEQ ID NO: 118145 - protein, 251 aa, Unknown
  Bacterial polypetide isolated from the Sargasso Sea
MSSEDPFKPIISKISKGKTLTSSDADTAFSLIMSGSVTNAQIGAFLMGLSLNGETSDIIASGANMLRQNAIKIKSDSNTIDTVGTGGDGAHTLNISSAAAFVVAGAGVKVAKHGSRSLSSKSGAADVLSELGINLDCSFSIVQEALDKIGICFLMAPRHHVAMKHVGPSRVELGIRTIFNLLGPLSNPAFVKRQMVGVFDKRWLLPFAEALKKMGSTNAWIIHGRDGLDEVSISEITDVVELKKGKISEFL

SEQ ID NO: 118146 - protein, 98 aa, Unknown
  Bacterial polypetide isolated from the Sargasso Sea
MTRSLSEITKDIINFKKISFEEMKYVFSTIMDGNASDVEISSLLVSLNMRGETEEDIAAGATILREKSLKIDAPLNAIDIVGTGGDKLGTYNISTASA

SEQ ID NO: 118147 - protein, 61 aa, Unknown
  Bacterial polypetide isolated from the Sargasso Sea
MLEKLSYKILDNPSEIEKSFKKNNFCFLFAQYHHLAMKNVGNVRKLLGTRTIFNLLGPLTN

SEQ ID NO: 118148 - protein, 212 aa, Unknown
  Bacterial polypetide isolated from the Sargasso Sea
QCLGVNIDAPLRTIERCIEEVGIGFLFAPLMHKAMKHAVGVRKALGFRTFFNLLGPLTNPANANSQILGVFDSKWVNPLAEVLRDLGSKHAMVVHGFDGLDEITLTSETQISELRNGNITNYTLNPKKFGYSLCSSEDLRGGAPEINAKIIRDILKGEKGCKTDIILLNAGAAIYVAGKAETIEQGIVIAAKSISSGEANKKLEELCQASNS

SEQ ID NO: 118149 - protein, 104 aa, Unknown
  Bacterial polypetide isolated from the Sargasso Sea
MDQFLEKLRNKTNLNFDESKNAFKILMNGEATDQQIYDFLTLLSDKGEVSDEIAGGVYILRDKSKRVKVKNCIDTCGTGGDGKDTLNISTASALLLASMGIKVA

SEQ ID NO: 118150 - protein, 85 aa, Unknown
  Bacterial polypetide isolated from the Sargasso Sea
MKAFNLIMNGSVSDIQISSFLSILQKSGVRADHMIGAIEVMRSKMVTVAAPENSMDTCGTGGDGKNSLNISTATAFVLASHGIPI

SEQ ID NO: 118151 - protein, 103 aa, Unknown
  Bacterial polypetide isolated from the Sargasso Sea
MRQFIEKIKIKEDLTFEESKSAFQLLMEGKAKDQEIFDFLTLLSAKGESSDEIAGGVFVLRDKSKRVNVKNCVDTCGTGGDGMNTLNISTASAILLASMGVKV

SEQ ID NO: 118152 - protein, 307 aa, Unknown
  Bacterial polypetide isolated from the Sargasso Sea
RGKVRTCEKDQVRIAIDFLVAEEVDPSVKVDFLEAFAQKGERAEELEEFVSCFRGLARDPHLEEIAPHAIDLCGTGGDKAGSFNVSTFVSFVVAAAGVPVIKHGNRSISSSCGSADLLEAIGIPLDPELDLIREGLDKLGFAFLFAPSFHPAFKHIAPVRKELAGRGIITVFNLLGPMINPAQPAYQVLGVYDPRHIEKMGKALRGNGLKGAVVVHGKIDDPVISGVDEITSCGENLVFGFGPISTDGVESWSPRNWGMQDQPFEHLAGGDLDENLRIMKLLLEGKAPEGLRTTVIMNAATAFLTVA

SEQ ID NO: 118153 - protein, 103 aa, Unknown
  Bacterial polypetide isolated from the Sargasso Sea
MITEAINKLMSLESLDFNESTEVMTKIMTGEVSEVQLSAFLTSLQMKGATSDEIAGMATIMREKSNQITLDYDLVDTCGTGGDGQNLFNISTACIFVAAAMGL

SEQ ID NO: 118154 - protein, 94 aa, Unknown
  Bacterial polypetide isolated from the Sargasso Sea
MKQFIDKIGAKQDLTFSESKEAFKILMEGKANDKEIFDFLTLLSNKGESSDEIAGGVYILREKSKRVNVEDCIDTCGTGGDGMNTLNISTAIQL

SEQ ID NO: 118155 - protein, 107 aa, Unknown
  Bacterial polypetide isolated from the Sargasso Sea
MKIYLDKLKNKENLTFEESKSAFNILMNGKASEDEIFNFLTLLSLKGEVSSEIAGGVYVLREKSKRVNNDECIDTCGTGGDGMNTLNISTASAVLLASIGIKVAKHG

SEQ ID NO: 118156 - protein, 101 aa, Unknown
  Bacterial polypetide isolated from the Sargasso Sea
MKQFIDKIKNKENLSFEESKAAFELLMEGKANDQEIFDFLTLLSAKGEASNEIAGGVYVLRDKSKRVNVDDCVDTCGTGGDGMNTLNISTASALLLASMGV

SEQ ID NO: 118157 - protein, 88 aa, Unknown
  Bacterial polypetide isolated from the Sargasso Sea
MDEIIKKLKNKQNLSFEESKSAFEDMMTGKVKEDQIHDFLTFSSTKGETSEEIAGGVYILRDKATKVNVPENTIDTCGTGGDGKNTLN

SEQ ID NO: 118158 - protein, 232 aa, Unknown
  Bacterial polypetide isolated from the Sargasso Sea
VTKHGNKSISSKTGSAHFLLEAGADIAHDRSLLESIFEQTGFIFLFAPLHHSSMRYVMPARQKIGKKTIFNLLGPHTNPCSARKQLIGVYKRSLVETFSSVAKELEMEHVIVVHGNDGLDEISITDDSFISELKEGKIKNYDVSPKDFGLSYGNFESIKASSPQESFEKVSLAFAGKEGSVQDMIAINSAAALKLSGIVKSMKDGVELSKSAMNEGLAQSKLESYVKMSNNL

SEQ ID NO: 118159 - protein, 95 aa, Unknown
  Bacterial polypetide isolated from the Sargasso Sea
MEHFLDKLRNKENLNFEESKNAFEILMNGKANDKQIFDFLTLLSEKGEVSDEIAGGVYILREKSKRVRVNDCIDTCGTGGDGKDTLNISTASALL

SEQ ID NO: 118160 - protein, 175 aa, Unknown
  Bacterial polypetide isolated from the Sargasso Sea
MIDNELQKLKGKIDLSRQEMLDVMDLIMSGSLQDNEIEEFLIAMNEKGASISEISSAASVMRDKSLKFNIGDGTHIDTCGTGGTGLHIFNCSTASAFVAAACGAKVTKHGNKSISSKTGSADFLLEAGADISHDRSLLESIFRKTGFIFLFAPLHHSSMRYVMPARQKIGKETIF

SEQ ID NO: 118161 - protein, 211 aa, Unknown
  Bacterial polypetide isolated from the Sargasso Sea
AGANINHDRNHLKEILNEVGFIFLFAPLHHQAMKFVMPARQRIGKKTIFNLLGPHTNPCNAKRQILGVYDKGLLKTFGNVSNLLKMDHVLVVHGNDGLDEISITDKTFVTELKDGNLNQFVIQPEDFGLSRANITALKAETPEESLELINAAFEGKESPVQDMISLNAGASLYLSSASNSIKDGVSLAKELLNNGKAKQTFSSYIEMTNSL

SEQ ID NO: 118162 - protein, 96 aa, Unknown
  Bacterial polypetide isolated from the Sargasso Sea
MKDFVDKIRAKQDLSFDESKAAFEILMEGKANDQEIFDFLTLLSEKGETSNEIAGGVYILREKSKRVNVNNCIDTCGTGGDGMNTLNISTASALLL

SEQ ID NO: 118163 - protein, 120 aa, Unknown
  Bacterial polypetide isolated from the Sargasso Sea
MKQFIDKIRDKEDLSFEESKTAFELLMEGKANEQEIFDFLTLLSAKGEVSNEIAGGVYVLRNKSKRVNVQNCVDTCGTGGDGMNTLNISTASALLLASMGVKIAKHGNKAVSSKCGSGDV

SEQ ID NO: 118164 - protein, 194 aa, Unknown
  Bacterial polypetide isolated from the Sargasso Sea
RQSFTLAMKNVAPARKIIGKRTAFNLLGPLCNPAKVRHQMIGVFADNYIERIAKIMQKNFSDTVLTVRSDDGMDELSTTSKNKACLLKNEEITEFIIDPSKYNLEKGDLADIQISTKKEAIDSFVKVLNNTSNKTMKEITILNAAGGLLVGGFSNKFEECVELAKQTVNNGKAFEKLKQFAKENNALDKLEEFN

SEQ ID NO: 118165 - protein, 248 aa, Unknown
  Bacterial polypetide isolated from the Sargasso Sea
LNISRATAFVLAASGIPIAKHGNRALTSKCGSADVLKALNINVDMETSKIEDCLKNTGICFMFAPNHHPAMKYVAQVRQLLGFRTIFNMLGPLLNPANVRNQLVGVYSKEVFNIYKDVFEKEDKNVCLIAGHDGNDEISLSGINLIFTNKNGIMQFDPKILDCPKMIYDEIKGSDAIFNADRIIEIFRGKKDTFYNTVCANAAFGVLINKSEDFNEKNILKAFNEVQLIIKSGEPLRIIDQLSKFTNL

SEQ ID NO: 118166 - protein, 203 aa, Unknown
  Bacterial polypetide isolated from the Sargasso Sea
RNHLKEILNEVGFIFLFAPLHHQAMKFVMPARQRIGKKTIFNLLGPHTNPCNAKRQILGVYDKGLLKTFGNVSNLLKMHHVLVVHGNDGLDEISITDKTFVTELKDGNLNQFEIQPEDFGLSRANITALKAETPEESLELINAAFEGKESPVQDMISLNAGASLYLSSASNSIKDGVSLAKELLNNGKAKQTFSSYIEMTNSL

SEQ ID NO: 118167 - protein, 66 aa, Unknown
  Bacterial polypetide isolated from the Sargasso Sea
MKNAAEGIQSLLNKVAIGQTLSEHEAENAFDIIMSGDATPAQIGGFLMALRVRGETVEEITGAARI

SEQ ID NO: 118168 - protein, 104 aa, Unknown
  Bacterial polypetide isolated from the Sargasso Sea
MITTEDFKKKIEILSNGKYLTYDEGMSAFEYIMTGNATDILISSFLTSLKIIFINSGISHELIAAGADIMREKAIKINAPDDTIDIVGTGGDGHNTLNISTATA

SEQ ID NO: 118169 - protein, 198 aa, Unknown
  Bacterial polypetide isolated from the Sargasso Sea
TESKSDIKNHNLGFMFAPSYHPAMKYAMNVRSDLKLKTVFNILGPLCNPALVKSQAMGTFDKNLTEIQAKVLKNLGSKNVMTFCSDEGLDELTTTGKTKVTHFMNGGKIRSFEFEPENIGLKRSNINDLKGGTPDQNAKIIIEILKGAEGPKTDIVLLNAAAGIIVGGKAENFQDAFKIAKLSIENGNAIKVLEGLKS

SEQ ID NO: 118170 - protein, 230 aa, Unknown
  Bacterial polypetide isolated from the Sargasso Sea
KIAKHGNRSVSSKVGSADLIEKLGLSMDVDLNESLSSIKNTNFSFLFAPNFHKSMKNVSHIRKDLKMRTIFNILGPLVNPLRPKSQIMGVYDMELVPIMAKVLQKQGVKNALVVHGFDGMDEISICSKTFIAEVNGKEILEYEFNPEDYGFKLSSSESLVIESSDQSKEITDGIFNNKIKDSRRDICILNAGAGLYISGNAESLEDAFVLVESKLDSGEINASFQEILAK

SEQ ID NO: 118171 - protein, 108 aa, Unknown
  Bacterial polypetide isolated from the Sargasso Sea
MNNLEKLISNISAGKNLTFEESKTIFLNIMSGNMTEDLIHNFLINLSNKGETAEEIAGGVHVLREKALKVRASEDIVDTCGTGGDGKSTLNISTASSLLLASMGIKVA

SEQ ID NO: 118172 - protein, 177 aa, Unknown
  Bacterial polypetide isolated from the Sargasso Sea
YQQYFNILGPLTNPAGASNQLIGISSYESAEKVAEALKILGTKNSIVVNGHNNLDEISVEGNTNIWQVDKEKVKRRRARISDFGLPESKLDNLIVDSVEESVSTIKDIFDGQGADPLEKSNISSRRNAVIINAAAALVASGKTNSFQDASEMAKTSLDSGAAQSKLIELIELSNKMD

SEQ ID NO: 118173 - protein, 163 aa, Unknown
  Bacterial polypetide isolated from the Sargasso Sea
MNFNQYFQKVFDKKNLLKKEAEDAFKLIMSAKVSNIEISSFLVALSLKGIAHNELLSAVKVLRAKSIKINTKGTIVDTCGTGGDKKQTLNISTATAILAAASGVKVAKHGNKSVSSNSGSSDVLEKLGVNISAPKNKVEKCLESSKLCFLMAPLYHKAMKNVS

SEQ ID NO: 118174 - protein, 160 aa, Unknown
  Bacterial polypetide isolated from the Sargasso Sea
MIDNELQKLKGKIDLSRQEMLDVMDLIMSGSLQDIEIEEFLIAMNEKGASINEISSAASVMRDKSLKFNIGDGTHIDTCGTGGTGLHIFNCSTASAFVAAACGAKVTKHGNKSISSKTGSADFLLEAGADISHDRGLLESIFRKTGFIFLFAPLHHSSMR

SEQ ID NO: 118175 - protein, 157 aa, Unknown
  Bacterial polypetide isolated from the Sargasso Sea
MNPFSKIMPKLLNNLDLSINESEEVFAYIISGNATEIEMAAFLATLSIKGPCSNELIGAVNSLKPHVINPLSLNIDTIDIVGTGGDGLKTYNISTAVAFIVASSGLYVAKHGSTAVSSKSGASDVLTELGINISVDNNILNKCLKEANICFLFAPKF

SEQ ID NO: 118176 - protein, 96 aa, Unknown
  Bacterial polypetide isolated from the Sargasso Sea
MNQNLKSFVPLAYNNKLDKNLTSEAFNIIMSGEATDGQIAAFLTALQKNNVNKDHVIGALEVMQDKMIPVNVPKNAIDTCGTGGDGIGSLNVSTAT

SEQ ID NO: 118177 - protein, 201 aa, Unknown
  Bacterial polypetide isolated from the Sargasso Sea
IGFMMAPLYHKAMKNVAPTRLELGTRTIFNLLGPLSNPADAKFQLVGVYDSKWAEPMAEVLKKLGSKRVWIVHGSDGLDEITTTGPTEVVELNDGVIKRFSLAPEDVGFSRSELSDLKGGSSAENAQLMKGLLAGKKDPIRDIVLLNAGAMIFIGGGVASLRDGVKLAAESIDSGKAKEKLDALINVSNSSRKIISEKHSI

SEQ ID NO: 118178 - protein, 61 aa, Unknown
  Bacterial polypetide isolated from the Sargasso Sea
PSQHSVLKHVIGPRKEIAHKSIFNILGPLTNPASTLNQVMGVYDEKGLKPVAKVHQYLGRK

SEQ ID NO: 118179 - protein, 257 aa, Unknown
  Bacterial polypetide isolated from the Sargasso Sea
DTCGTGGDGMNTLNISTASALLLASMGVKIAKHGNKAVSSKCGSGDVLEALNIEINLEPNDIESQIKKNNFGFMFAPNYHSAMKYVGPTRKKIGKRTIFNMIGPLSSPALVKRQVVGVFEKKLLKTFANALKSLDIKFAWVVNSEDGLDEISPFARTNVIQLKNNVISEIVIDPKKLDINADKFENLVGDDAKFNANKMLEIFKGEDNDFSKAVCLNAAAGLIVNETHEEFSEAYKNAREHILSSEVIKHLETIQNA

SEQ ID NO: 118180 - protein, 275 aa, Unknown
  Bacterial polypetide isolated from the Sargasso Sea
QYLKSRCKKINVNGDFMDTCGTGGDKKGSFNLSTATSILLSTFDIKISKHGNRSVTSKSGSFDVLEALNIKIRKEQNHHKKNLKKNNICFLFAPYFHEILKNVADIRKSLPFRTIFNLLGPLLNPIDLKFQLMGVSDKINLETHARCLSKLNLKKAWVVYNEKGYDELTTTSKNYFIEIKKDKVSKINILEPQKLGFKIRKEQELKGGTPQENGFIMKRLFEGESGAIRDNVILNSAAGLMICNKAKHIEDGIKMASTNLDNGSGLKKLNDLINS

SEQ ID NO: 118181 - protein, 181 aa, Unknown
  Bacterial polypetide isolated from the Sargasso Sea
PVRNALKSRTLFNLLGPLVNPAAPDYQLLGVYDPKLCRVMAQALKQLGLTRAWVVHGSGCDEVALHGTTYVCELKDGVITEFSLTPDDFGVSLMPLSALAGGEPGENAAATLAILTGQGQAAHNAAVAINVAAMLKIAGLGDDLKVNTRAVLELLQSGRAYNTLSQFIALSQSAAKEAQHG

SEQ ID NO: 118182 - protein, 186 aa, Unknown
  Bacterial polypetide isolated from the Sargasso Sea
MFAQDFHTAMKFVSKVRKNLGTRTIFNLLGPLLNPANTKKQLIGVYDKKWVNIHINVLKKLESEHVLVVHGQDGLDEISLSNKSYISELKNNKINEYIFNPEDIGYELIDINEIKGGDSEYNAKQIMKMLSGEFSNFQKIVEINAGAVIYLSGKANNLKDGAILAKKCINDGLAKSYINSLINYLK

SEQ ID NO: 118183 - protein, 484 aa, Unknown
  Bacterial polypetide isolated from the Sargasso Sea
MSLNVVTLLYLVASVCFIQALKGLSNPKTARTGNTFGMVGMAIAILTTIALIVKQANALGSNLGLGLGLLLVALVIGGAIGAFVAARVEMTKMPELVAAMHSLIGLAAVCIAYAVVSEPAAFGLVDPENTLPGFLPYGNRIELFIGTFVGAITFSGSVIAFGKLSGKYKFRLFQGAPVVYAGQHLINLFLAIGMLGFGVIFFLTQSWLPFIIMTLIAFVLGVLIIIPIGGADMPVVVSMLNSYSGWAAAGIGFSLNNPMLIIAGSLVGSSGAILSYIMCRAMNRSFFNVILGGFGNEAGAAAAGGSAEQRPVKSGSADDASFMLGNAETVVIVPGYGLAVARAQHALKELTDKLVEKGIEVKYAIHPVAGRMPGHMNVLLAEAEVPYDMVYEMDDINGEFGQVDVVLVLGANDVVNPAAKNDPKSPIAGMPIIEAYKARTVIVNKRSMAAGYAGLDNDLFYMDKTMMVFGDAKKVIEDMVKAVE

SEQ ID NO: 118184 - protein, 101 aa, Unknown
  Bacterial polypetide isolated from the Sargasso Sea
MDQFLEKLRNKINLNFDESKNAFKILMNGEASDQQIYDFLTLLSDKGEVSDEIAGGVYILRDKSKRVKVENCIDTCGTGGDGKDTLNISTASALVVSKYGC

SEQ ID NO: 118185 - protein, 121 aa, Unknown
  Bacterial polypetide isolated from the Sargasso Sea
MKEILKKLKNKKNLTFDESKTAFSEIMSGKVNEEIIHDFLTFSSAKGETSYEIAGGVYVLRDKATKVNVSDDTVDTCGTGGDGKNTLNISTAAALLLSSFGVKVAQHGNKSVSSSVGLLMF

SEQ ID NO: 118186 - protein, 304 aa, Unknown
  Bacterial polypetide isolated from the Sargasso Sea
MIDNELQKLRGKFDLSRQEMLEVMDLIMSGSLQENEIEEFLIAMNEKGASINEISSAASVMRDKSLKFNIGDGTHIDTCGTGGTGLHIFNCSTASAFVAAACGAKVTKHGNKSISSKTGSADFLLEAGADISHDRSLLESIFRKTGFIFLFAPLHHSSMRYVMPARQKIGKKTIFNLLGPHTNPCSARKQLIGVYKRSLVETFSSVAKELEMEHVIVVHGNDGLDEISITDDSFISELKDGKIKNYQVSPKDFGLSYGNFESIKALSPQESFEKVSLAFAGKEGSVQDMIAINSAAALKLSGIV

SEQ ID NO: 118187 - protein, 254 aa, Unknown
  Bacterial polypetide isolated from the Sargasso Sea
GANTFNISTAVAFVSASCGVKIAKHGNKSASGKVGSADVLLNLGLNLDCSLEKVIDAVSEIGITFLFAPVWHKSLIKLAPLRKTLGIRTVFNQLGPLVNPLRPNAQVLGVASEDLLKPMGSALLKMGMNRSIVVHGSGGLDEASLQGENKLVFVDNGELRFSEINISDFNHENISNEKLVVSDSESNEEILKAVLNGSGQKSHIDVVALNSALVLWAAGIEDDLNEGFKKALFSINQGDPWKKFLLLKNYLDTN

SEQ ID NO: 118188 - protein, 217 aa, Unknown
  Bacterial polypetide isolated from the Sargasso Sea
MIYNELQKLKGKIDLSRQEMLDVMDLIMSGSLQDNEIEEFLIAMNEKGASINEISSAASVMRDKSLKFNIGDGTHIDTCGTGGTGLHIFNCSTASAFVAAACGAKVTKHGNKSISSKTGSADFLLEAGADISHDRSLLESIYRKTGFIFLFAPLHHSSMRYVMPARQKIGKKTIFNLLGPHTNPCSARKQLIGVYKRPLVETFSSVAKELEMEHVIV

SEQ ID NO: 118189 - protein, 311 aa, Unknown
  Bacterial polypetide isolated from the Sargasso Sea
KQDLTFEESKSAFNILMNGEATEDEIYDFLTLLSIKGEVSDEIAGGVYVLRKKSKRVNIQNCVDTCGTGGDGMNTLNISTASALLLSSMGVKVAKHGNKAVSSKCGSGDVLEALNININLEPKDIENQINTNYFGFMFAPNYHNAMKFVGPTRKKIGKRTIFNMIGPLSSPALVERQVVGVFDKKLLKIFASALYNLNIKCAWIVNSEDGLDEISPYAKTNVVQLKDNKISEITIDPNELNIDANKFEDLVGDDAKFNANKIINIFEGEDNDFSKAVCLNAAAGLIVMEKFSNFKDAYNITREHILSGITS

SEQ ID NO: 118190 - protein, 289 aa, Unknown
  Bacterial polypetide isolated from the Sargasso Sea
SGVKSHHVIAAIEVMRTKMLSINTPLNTMDTCGTGGDGKNSLNISTATAFVLAASGIPIAKHGNRALTSKCGSADVLKALNINIDMETSKLEDCLRNTGICFMFAPNHHPAMKHVAQVRQLLGFRTIFNMLGPLLNPANVRNQIVGVYSKEVFNIYKEVFEKEDKNVCLIAGHDGNDEISLSGINLIFTNKNGIMQFDPKILECPKIIDDEIKGSDAIFNADRIIEIFKGKKDTFYNTVCANAAFGILINQSKDFNEINILKSFNEVQLIIESGEPLRIIDQLSKFTNL

SEQ ID NO: 118191 - protein, 215 aa, Unknown
  Bacterial polypetide isolated from the Sargasso Sea
MDQILEKLNNKQNLTFEESKSAFEILMTGKASDEQIFNFLTLLSEKGEVADEIAGGVFVLRDKSKRVNVSDCIDTCGTGGDGMNTLNISTASALLLASMDIKVAKHGNKAVSSKCGSGDVLEALKIKIDLEPEDIEKEIYTNNFGFMFAPNYHSAMRFVGPVRKKIGKRTIFNMIGPLSNPALVERQVVGVFDKKLLKIFAEGLKNLNLKFAWIV

SEQ ID NO: 118192 - protein, 277 aa, Unknown
  Bacterial polypetide isolated from the Sargasso Sea
MVVFHVLRNKSKRVNVLDCVDTCGTGGDGKNTLNISTASAILLASMGVKVAKHGNKAVSSKCGSGDVLETLNININLEPKQIEDQINKNNFGFMFAPNYHRAMKYVGPTRKKIAKRTIFNMIGPLSSPALVDKQVVGVFDKKLLKIFANALKNLNIKFAWIVNSEDGLDEISPYAKTNVVQLKEDKITEITIDPIDLNIDAQNFKNLLGDDAKFNADKMINIFKGEDNDFSKAVCLNAAAGLIVTEKFSNFKEAYNNSREHILSGSSFKHLEKIQSV

SEQ ID NO: 118193 - protein, 153 aa, Unknown
  Bacterial polypetide isolated from the Sargasso Sea
MRQIIEKIRNKGNLSFNESKRAFEILMSGKAQDQEIFDFLTSLSDKGETSEEIAGGVYILREKSKRVEINNCIDTCGTGGDGMNTLNISTASALLLASMGVKVAKHGNKAVSSKCGSGDVLDELNININLEPEQIKDQIIKHNFGFMFAPKLS

SEQ ID NO: 118194 - protein, 205 aa, Unknown
  Bacterial polypetide isolated from the Sargasso Sea
MEQILEKLRNKNDLSFEESKSAFELLMTGQANEDQIYDFLTLLSDKGEVSDEIAGGVYVLREKSKRVKVKNCVDTCGTGGDGMNTLNISTASALLLASMGTKVAKHGNKAVSSNCGSGDVLEALNIKIDLEPSDIEKEINDNNFGFMFAPNYHSAMRFVGPVRKKIGKRTIFNMIGPLSSPALVTRQVVGVFDKKLLKIFAESLK

SEQ ID NO: 118195 - protein, 267 aa, Unknown
  Bacterial polypetide isolated from the Sargasso Sea
SKRVKVKDCVDTCGTGGDGMNTLNISTASALLLASMGTKVAKHGNKAVSSKCGSGDVLEALKIKINLEPTDIEKEINNNNFGFMFAPNYHSAMRFVGPVRKKIGKRTIFNMIGPLSNPALVDRQVVGVFDKKLLKIFAEGLKNLNIKFAWIVNSEDGLDEISPYAKTNVIQLKNGKISEIIIDPTVLNINAEKFDNLVGDDANYNASKMIEIFKGKDNDFSKAVCLNAAAGLIVNEKYSEFLDAYNYSREFILSGKPYIHLEKIQNV

SEQ ID NO: 118196 - protein, 155 aa, Unknown
  Bacterial polypetide isolated from the Sargasso Sea
MDISSALEKIISRENLNIEQTRDLFLRIMSGHATEAQIAAILIALRVKGECPEELAGAALVMRELSTKVEVDLPNLIDTCGTGGSGSKLFNISTASTFVCAGAGAHIAKHGNRKMTSSCGSADVLEAAGVNLSLNAEQIASCIKTAGVGFLFAPQ

SEQ ID NO: 118197 - protein, 117 aa, Unknown
  Bacterial polypetide isolated from the Sargasso Sea
MSQDFRKYIQMAYENDLNLASTKEVFSLIMNGDVDEIQISSFLSLLQKSKIKPHHIIGAIEVMKSKMLKVNSDFKLMDTCGTGGDGKNSLNISTATAFVLTAMGIKIAKHGNRALTS

SEQ ID NO: 118198 - protein, 134 aa, Unknown
  Bacterial polypetide isolated from the Sargasso Sea
MKQFIEKIKTKENLSFEESKAAFELLMEGKAADHEIFDFLTLLSAKGEASDEIAGGVFVLRSKSKRVNVENCVDTCGTGGDGMNTLNISTASALLLASMGIKVAKHGNKAVSSKCGSGDVLEALNIKIDLEPND

SEQ ID NO: 118199 - protein, 153 aa, Unknown
  Bacterial polypetide isolated from the Sargasso Sea
MENILEKLKKKENLTFEESKAAFSKLMEGEASDNEIYQFLTLLSDKGEVAEELAGGVYVLRNKSKRVNIQNCVDTCGTGGDGKNTLNISTASAILLSSMGIKVAKHGNKAVSSKCGSGDVLEELNININLEPYEIEEQINKNNFGFMYAPNYH

SEQ ID NO: 118200 - protein, 186 aa, Unknown
  Bacterial polypetide isolated from the Sargasso Sea
MKNFIEKLKNREDLSFDESKIAFEILMEGKASEQEIYDFLTQLSSKGEVSDEIAGGVHVLRNKSKRVNIKNCVDTCGTGGDGKNTLNISTASALLLASMGVKVAKHGNKAVSSKCGSGDVLEALNIKINLEPAEIEEQISKKNFGFMFAPNYHSAMKHVGPTRKKIGKRTIFNMIGPLSSPALVEN

SEQ ID NO: 118201 - protein, 168 aa, Unknown
  Bacterial polypetide isolated from the Sargasso Sea
MNIYLDKLNKRQDLTFDESKAAFEIIMEGKASDQEIFDFLTLLSSKGEVSDEIAGGVYVLRHKSKRVKVKNCVDTCGTGGDGMNTLNISTASAIMLASMDIKVAKHGNKAVSSKCGSGDVLEALNIKINLEPNEIENQINKNNFGFMFAPNYHSAMKFVGPTRKKIGK

SEQ ID NO: 118202 - protein, 159 aa, Unknown
  Bacterial polypetide isolated from the Sargasso Sea
MKQFIEKIKNKEDLSFNESKAAFELLMDGKAEDQEIFDFLTLLSEKGEASNEIAGGVFVLRKKSKRVSVENCVDTCGTGGDGMNTLNISTASALLLASMGIKVAKHGNKAVSSKCGSGDVLEALKIKIDLEPNDIETQIDKNNFGFMFAPNYHNAMKFV

SEQ ID NO: 118203 - protein, 170 aa, Unknown
  Bacterial polypetide isolated from the Sargasso Sea
MEKFLNKLSNRQNLTFEDSKEAFEILMNGKASDKEIYDFLTFLSSKGEVSDEIAGGVYVLREKSKRVNVKDCVDTCGTGGDGKNTLNISTASALLLSSMGIKVAKHGNKAVSSKCGSGDVLEALNIKINLEPKDIENQINKNNFGFMFAPNYHSAMKYVGPTRKKIGKRT

SEQ ID NO: 118204 - protein, 143 aa, Unknown
  Bacterial polypetide isolated from the Sargasso Sea
MKQFIEKIKSRENLSFEESKAAFELLMEGKAEDQEIFDFLTLLSAKGEASDEIAGGVFVLRNKSKRVNVENCVDTCGTGGDGMNTLNISTASALLLASMSVKVAKHGNKAVSSKCGSGDVLEALNIKINLEPNNIENQINKNN

SEQ ID NO: 118205 - protein, 112 aa, Unknown
  Bacterial polypetide isolated from the Sargasso Sea
MSDAITKLKQGQNLSLEESKSLFSDLMEGKHEEGQIIEILEALIKKGETKDELAGGIFILRNKATKVSADPNTIDTCGTGGDGQNSLNISTAAAIVLASMGIKVAKHGNKAV

SEQ ID NO: 118206 - protein, 224 aa, Unknown
  Bacterial polypetide isolated from the Sargasso Sea
MEKFLSKLKLKQDLSFEESKTAFEVLMNGKASEAEIFDFLTFLSAKGEVSDEIAGGVYVLRNKAKRVNVENCVDTCGTGGDGKNTLNISTASALLLASMGIKVAKHGNKAVSSKCGSGDVLEALNIKIDLEPKKIEEQINKNNFGFMFAPNYHNAMKYVGPTRKKIGKRTIFNMIGPLSSPALVKRQVVGVFDKKLLKIFAQALKNLNLKKALIINSQDGLDEI

SEQ ID NO: 118207 - protein, 130 aa, Unknown
  Bacterial polypetide isolated from the Sargasso Sea
MCEKVKELLSDAAQGPISFKNAEIVFENIMDGNLSEVEISSFLTSLKVRGESIDELTAAASIMKKKSLKVLNGEDSIDIVGTGGDGMNTLNISTASSLTVASTGMRVAKHGNRKISSLAGASDTLEILGI

SEQ ID NO: 118208 - protein, 182 aa, Unknown
  Bacterial polypetide isolated from the Sargasso Sea
MKQFIQKIKNKENLSFEESKKAFRLLMEGKAEDQDIFDFLTLLSVKGETSDEIAGGVFVLRDKSKRVSVEGCIDTCGTGGDGMNTLNISTASALLLSSMGIKVAKHGNKAVSSKCGSGDVLEALNIKIDLEPNDIETQINKNNFGFMFAPNYHSAMKFVGPTRKKIGKRTIFNLIGPLSSPA

SEQ ID NO: 118209 - protein, 139 aa, Unknown
  Bacterial polypetide isolated from the Sargasso Sea
MEINTIKNKLFAQQDLTVNESVDLFELIMNGKLSEIDISAILIALKLKGESKNEILGAAKIMRSKSMKISSPDNTVDTCGTGGDMSNTLNISTAASLVAASCGVKIAKHGNKSVSSKSGSADMLEHIGYKFSDNPKNLE

SEQ ID NO: 118210 - protein, 247 aa, Unknown
  Bacterial polypetide isolated from the Sargasso Sea
MNNFLTKLNKNENLTFEESKNAFNTLMEGKASDNEIYDFLTLLSKKGEVADEIAGGVYVLREKSKRVNVENCVDTCGTGGDGMNTLNISTASALLLSSMGVKVAKHGNKAVSSKCGSGDVLEALNIKINLEPNDIEYQIKKNNFGFMFAPNYHSAMRFVGPTRKKIGKRTIFNMIGPLSSPALVKRQVVGVFDKKLLKIFANALYNLDNKFAWIVNSEDGLDEISPYAKTNIVQLKDKKISEITIDP

SEQ ID NO: 118211 - protein, 118 aa, Unknown
  Bacterial polypetide isolated from the Sargasso Sea
ASASAAVDLRVVIERLCDGENLSASEAEASMDALLDADPAQIAAFLVLLRAKGETGEEMAGLARAMKARGVPVHAGDDVLDIVGTGGDDAGTVNISTGSCILAASAGAKVAKHGNRSV

SEQ ID NO: 118212 - protein, 122 aa, Unknown
  Bacterial polypetide isolated from the Sargasso Sea
MKQFIDKIKNKENLTFEESKTAFQILMEGKANDQEIFDFLTLLSAKSETSDEVAGGVYVLRDKSKRVNVENCVDTCGTGGDGMNTLNISTASALLLSSMGVKVAKHGNKAVSSKCGSGDVLE

SEQ ID NO: 118213 - protein, 293 aa, Unknown
  Bacterial polypetide isolated from the Sargasso Sea
FIDKINAKQDLSFDESKAAFEILMEGRANDNEIFDFLTLMSAKGESSEEIAGGVYVLRGKSKRVNIDNCVDTCGTGGDGMNTLNISTASALLLSSMEVKVAKHGNKAVSSKCGSGDVLEALNIKINLEPADIEAQINKNNFGFMFAPNYHSAMRFVGPTRKKIGKRTIFNMIGPLSSPALVKRQVVGVFDRKLLNIFANALNNLDIKFAWIVNSEDGLDEISPYAKTNVVQLKDNKISEIIIDPKKFNVNADKFENLIGDDAKFNADKMINIFKGEDNDFSKACMFKCSCGFD

SEQ ID NO: 118214 - protein, 216 aa, Unknown
  Bacterial polypetide isolated from the Sargasso Sea
CGSADVLEALKININLKPNEVEESIKNLNFAFMFAPNYHSAMKHVGPARKKMGKKTIFNLIGPLSSPAQVKRQVVGVFDKKWMKPFAEALKENNVVHAYIVHSDDGMDEISPFAKTNVVELKDGKINEFIIDPKELGLNSGNKENLKGKNAEYNSEKIIEIYKGTSNEFSQSVALNTAAGLIVAGKENDFKNAFKKASEHINSGKVFEHIRKLQSK

SEQ ID NO: 118215 - protein, 199 aa, Unknown
  Bacterial polypetide isolated from the Sargasso Sea
MKQFIEKIKNKENLSFEESKKAFELLMEGKANEQEIFDFLTLLSTKGEVSNEIAGGVYVLRNKSKRVNVQNCVDTCGTGGDGMNTLNISTASALLLASMGVKVAKHGNKAVSSKCGSGDVLEALNIEINLEPNDIESQIEKNNFGFMFAPNYHSAMKYVGPTRKKIGKRTIFNMIGPLSSPALVKRQVVGVLKKSYKNI

SEQ ID NO: 118216 - protein, 262 aa, Unknown
  Bacterial polypetide isolated from the Sargasso Sea
MDQILVKLRSKKNLSFEESKSAFELLMTGKANEDQIYDFLTLLSEKGEVSNEIAGGVYVLREKSKRVEVADCVDTCGTGGDGMNTLNISTASALLLASMGTKVAKHGNKAVSSKCGSGDVLEALKVKINLEPIDIEKQINDNNFGFMFAPNYHSAMRFVGPVRKKIGKRTIFNMIGPLSNPALVDRQVVGVFDKKLLKIFAEGLKNLDIKFAWIVNSEDGLDEISPYAKTNVIQLKKGEISEIVIDPQVLNIDAEKFDNFNW

SEQ ID NO: 118217 - protein, 232 aa, Unknown
  Bacterial polypetide isolated from the Sargasso Sea
MKKILEKLTNKENLTFEESKDSFEILMEGKASDQEIFDFLTLLSAKGEVSDEIAGGVHVLRDKSKRVNVENALDTCGTGGDGKNTLNISTASAILLSSMGVKVAKHGNKAVSSKCGSGDVLEALNININQEPKQIEEQISENNFGFMFAPNYHSAMKYVGPTRKKIGKRTIFNMIGPLSSPALVERQVVGVFDKKLLKIFANALKNLNIKFAWIVNSEDGLDEISPYSKNQY

SEQ ID NO: 118218 - protein, 211 aa, Unknown
  Bacterial polypetide isolated from the Sargasso Sea
MKTFLEKLKKKQDLSFEESKLAFNFLMNGEANESEIFDFLTLLSLKGEVSEEIAGGVYILREKSKRVNVQNCVDTCGTGGDGMNSLNISTASALLLASMDIKVAKHGNKAVSSKCGSGDVLEALNIKINLEPKEIEDQINTNNFGFMFAPNYHSAMKFVGPTRKKIGKRTIFNMIGPLSSPALVERQVVGVFDKKLSKIFANGLKNLKIKF

SEQ ID NO: 118219 - protein, 303 aa, Unknown
  Bacterial polypetide isolated from the Sargasso Sea
MEKATDDEMFDFLTLLSLKGEVSDEIAGGVYVLRDKSKRVNVQNCVDTCGTGGDGMNTLNISTASALLLASMGIKVAKHGNKAVSSKCGSGDVLEELNININLEPNEIEDQINKNNFGFMFAPNYHSAMRFVGPTRKKIGKRTIFNMIGPLSSPALVERQVVGVFDKKLLKVFPNALNNLKIKFAWVVNSEDGLDEISPYAKTNVVQLKDNKISEITIDPNELNIDANKFEDLIGDDAKFNADKMINIFKGEDNDFSKAVCLNAAAGLIVGEKFSEFTDAYNNAREFILSGKTFTHLEKIRNV

SEQ ID NO: 118220 - protein, 238 aa, Unknown
  Bacterial polypetide isolated from the Sargasso Sea
MKDFDKIISKISSKDGLTDDESYFSFSYILEGNANEDQIEKFLLGLRERGEKIEEITSATKVMREKSSKVIAPENAIDTCGTGGSGSGKYNISTAASLVAAGAGSIIAKHGNRTSLSSKSGSSQVLEELGVKLDIDAKKITECMEKSNIGFMFAPNHHPAMKYVGPVRQKLKIRTIFNILGPLSNPANVKKQLLGVFDKKWIRPMAETLKNLGSHRALLVNGSDGFDELTTTGISYVA

SEQ ID NO: 118221 - protein, 238 aa, Unknown
  Bacterial polypetide isolated from the Sargasso Sea
ALLLASMGVKVAKHGNKAVSSKCGSADVLEALKININLEPNQIEEQIKNKNFGFMFAPNYHTAMKYVGPTRKKIGKRTIFNMIGPLSSPALVERQVIGVFDNKLLKIFANALKDLNLKFAWIVNSEDGLDEISPYAKTNVVQLKNNEISEFIIDPNELNVNADKFENLVGDDAKFNSDKILKIFQGEDNDFSKAVCLNAAAGLMISEKYDDFKIAYNYTKGFIKSGAAFKYIKILQNV

SEQ ID NO: 118222 - protein, 171 aa, Unknown
  Bacterial polypetide isolated from the Sargasso Sea
MESSLKKLKDKIDLSFDETKEIFTKIMEGEASEIEMYDFLTLLSNKGEVSNEIAAGVYVLREKSSRVNVENAIDTCGTGGDGKNTLNISTASALLLASMGIKVAKHGNKAISSKCGSGDVLEKLNININLDAKSVENNINKLNFGFMFAPNFHSAMKHVSPIRKKIAKDYF

SEQ ID NO: 118223 - protein, 251 aa, Unknown
  Bacterial polypetide isolated from the Sargasso Sea
MKQYIDKIKDKQDLTFDESKAAFEILMGGKASDQEIYDFLTLLSAKGEASDEIAGGVYVLRNKSKRVNVDNCIDTCGTGGDGMNTLNISTASALLLSSMGVKVAKHGNKAVSSKCGSGDVLEALNIKINLEPNEIEDQIKKNNFGFMFAPNYHSAMRFVGPTRKKIGKRTIFNMIGPLSSPALVKKQVIGVFDKKLLNIFANALNNLDIKFAWIVNSEDGLDEISPYAKTNIIQLKDNKISEIVIDPKELT

SEQ ID NO: 118224 - protein, 146 aa, Unknown
  Bacterial polypetide isolated from the Sargasso Sea
MSSNLSNPEILNILLEGKDLDDFSARSLMKRWLNDEISDVQTGAFLSALRAKGCTGIELCSMAEELLNVCELPLARPNLYMVDTCGTGGDGANTFNISTAVAFVASSCGVKIAKHGNKSASGKVGSADVLSSLGLNLNCPLEKVIS

SEQ ID NO: 118225 - protein, 257 aa, Unknown
  Bacterial polypetide isolated from the Sargasso Sea
MRLFIDKIKKQKDLSFDESKAAFELLMEGKANDQEIFDFLTLLSTKGEAANEIAGGVYVLRDKSKRVNVDNCVDTCGTGGDGMNTLNISTAAALLLASMGIKVAKHGNKAVSSKCGSGDVLEALNIKINLEPKDIEDQINKNNFGFMFAPNYHTAMKYVGPIRKKIGKRTIFNMIGPLSSPALVKRQVVGVFEKKLLEIFAYALKNLNIEFAWIVNSEDGLDEISPYAKTNVIQLKENKISKIIIDPKELDINAEKI

SEQ ID NO: 118226 - protein, 317 aa, Unknown
  Bacterial polypetide isolated from the Sargasso Sea
DKALKTILEEAITQSLSDKKAKLLFKRIMSGVFSEVQLSAILAALRARGETIEEIIGATKAMREHSKKIAGDLNAIDIVGTGGDGKGTLNISTASAIVVSGAGIKVAKHGNKNISSKSGAANVLESLGVNIMMTPEMAQSCLEEIGICFMMAPIFHPAMKNVMPVRNDLGIRTLFNILGPMTNPAGVKKQLTGTFSEKLLEPMAKTLLSLGTKSAWLVHGKDGTDEISSSDLTQVVEIRNGTIKKFTFNPVEYGFKFQPFEELIGGDPVFNASRLEHLLEGKPGAYRDSVLLNSAAAIYISGATNDIEEAINFAIRS

SEQ ID NO: 118227 - protein, 212 aa, Unknown
  Bacterial polypetide isolated from the Sargasso Sea
DMLENIGYRFSDDPKIIEDQLKRNNFCFMFAQYHHSAMKYVINVRKTLGTRTIFNLLGPLTNPANATNQLLGVYDKKWLNTHCEVLKELGSNNVMVVHGVDGLDEITLSQNTHICELKDQTIHNYILDPREIGYDYISLEEIKGGDPQYNAKCFLKMIDGNFNQFQHIVELNAGAAIYLAGKCSNIKEGALIANKTISEGKTKEFITKITNE

SEQ ID NO: 118228 - protein, 180 aa, Unknown
  Bacterial polypetide isolated from the Sargasso Sea
MNITSAISKITSGLNLKENEMSDVMLDLLEGRTTDAQIGAFLIALNMKGETVEEVLGAAKIMRKLSAKVEVNKDKLVDTCGTGGSGIGIFNVSTTAAFVACACGARVAKHGNRSATRKSGSADLLEVAGVSLELNPSQVSDCIENVGLGFMFAPGHHSAMKHVIGPRKEIAHKSIFNILG

SEQ ID NO: 118229 - protein, 188 aa, Unknown
  Bacterial polypetide isolated from the Sargasso Sea
SFLFAPNFHPAMKHIAPIRQALKIRTVFNILGPLTNPAKPSFYLLGAFSSEMASLMASSLSGMDMNRAFVVHGLNGWDEPTPASNFELFDVREGSISHTIIDPSEYGIKKCKEEDLKGGTSEVNAKALLKVFEGKDKSAHEDALILNAGLALQVSGEAKELRDGIEIAKETIKNGKAEDFLSSLRNDE

SEQ ID NO: 118230 - protein, 255 aa, Unknown
  Bacterial polypetide isolated from the Sargasso Sea
LLTLLYIKGETYEEIKAFSFYLKSKAKNFKIKDELMDTCGTGGDNKNSFNFSTATSIVLSSFNIKIAKHGNRSVTSKSGSFDVLEALGIKLSSKINVIKSYYEKNGICFLFAPFYHPILGNVSDVRKSLFFRTIFNLLGPLLNPVKLSYQLLGVSNEENLNTHAKCLKDLNVKTGWVVHNLMGYDELTTTSKNKFIEIKNDKISKIKILDPKDFGFKRNKEADLRGGTAKENAFLMKNAFKGETGPIRDNIVLNS

SEQ ID NO: 118231 - protein, 187 aa, Unknown
  Bacterial polypetide isolated from the Sargasso Sea
MKQFLEKLKIKQDLSFEESKSAFNILMNGEANDEEIFDFLTLLSQKGEVSDEIAGGVYVLREKSKRVNVQNCVDTCGTGGDGMNTLNISTASALLLASMGIKVAKHGNKAVSSKCGSGDVLEALNIKINLEPNEIEEQINTNNFGFMFAPNYHSAMKFVGPTRKKIGKRTIFNMIGPLSNPALVQDK

SEQ ID NO: 118232 - protein, 253 aa, Unknown
  Bacterial polypetide isolated from the Sargasso Sea
SALRAKSSTGVELSSMAKELLNVCELPVARPNLYLVDTCGTGGDGANTFNISTAVAFVAASCGVKIAKHGNKSASGKVGSADVLLNLGLNLNCSLEKVINAVSEIGITFLFAPVWHKSLIKLAPLRKTLGIRTIFNQLGPLVNPLRPNAQVLGVASEDLLKPMGSALLNMGMNRAIVVYGSGGLDEASLQGKNKLVFVENGELRFSEINISDFNHENIDNENLVVSDLDSNEEILKSVLNGSGHKSHIDVVAL

SEQ ID NO: 118233 - protein, 185 aa, Unknown
  Bacterial polypetide isolated from the Sargasso Sea
MKQFIEKIKNKENLSFEESKAAFDLLMDGKAKEQEIFDFLSLLSTKGETSDEIAGGVFVLRNKSKRVNVENCIDTCGTGGDGMNTLNISTASALLLASMGVKVAKHGNKAVSSKCGSGDVLEALNIKIDLEPNDIETQINKNNFGFMFAPNYHSAMRFVGPTRKKIGKRTIFNMIGPLSSPALVK

SEQ ID NO: 118234 - protein, 227 aa, Unknown
  Bacterial polypetide isolated from the Sargasso Sea
TGGDGKDTLNISTASALLLSSIGIKVAKHGNKAVSSKCGSADVLEALNININLEPKDIENQIKNNHFGFMYAPNYHSAMKYVGPTRKKIGKRTIFNMIGPLSSPANVEKQVVGVFDKKLLDIFANALKDLNIKFAWIVNSNDGLDEISPYDKTIVKQLRNGEINEMIIDPKELKVNAEGFDKIVGNDAKYNSQKIIDVFKGKDDDFSKAVSLNAAEGLIISEREENF

SEQ ID NO: 118235 - protein, 233 aa, Unknown
  Bacterial polypetide isolated from the Sargasso Sea
SMDVKVAKHGNKAVSSKCGSADVLEALNININLEPNQIEEQIKNNNFGFMFAPNYHSAMKYVGPTRKKIGKRTIFNMIGPLSSPALVERQVIGVFDNKLLKVFANALKNLNLKFAWIVNSEDGLDEISPYAKTNVVQLKNNEISEFIIDPNELNVNADKFENLVGDDAKFNSDKILNIFQGEDNDFSKAVCLNAAAGLIVSEKYDDFKIAYNYTRGFIKSGAAFKYVKNIQNV

SEQ ID NO: 118236 - protein, 129 aa, Unknown
  Bacterial polypetide isolated from the Sargasso Sea
MNITAAISKITSGLSLNESEMSDVMLDLLEGRATDAQIGAFLIALDMKGETVEEVLGAAKIMRKLSAKVEVNKDKLVDTCGTGGSGIGIFNVSTTAAFVACACGARVAKHGNRSATRKSGSADLLEAAG

SEQ ID NO: 118237 - protein, 314 aa, Unknown
  Bacterial polypetide isolated from the Sargasso Sea
LKKKQDLSFEESKLAFNVLMNGQATDDEIFDFLTLLSLKGEVSDEIAGGVYVLRDKSKRVNVQNCVDTCGTGGDGMNTLNISTASALLLSSMSIKVAKHGNKAVSSKCGSGDVLEALNININLEPKEIEDQINKNNFGFMFAPNYHNAMKFVGPTRKKIGKRTIFNMIGPLSSPALVERQVIGVFDKKLLKIFAMALSNLNIKFAWIVNSEDGLDEISPYAKTNVVQLKNNNISEITIDPKDLKINANKFEDLVGDDALFNSNKIIEIFKGEDNDFSKAVCLNAAAGLIVSEKYKDFNLAYNYARGFIKSGRAY

SEQ ID NO: 118238 - protein, 152 aa, Unknown
  Bacterial polypetide isolated from the Sargasso Sea
MKALLQELLKGKRLRFDEAKQALLDIGKGNCNNSIISSFLTVFMMRGIEGEELEGFRSAMLELCNPIDLGSVKTIDMCGTGGDGKNTFNISTTSSFVVAAAGIKVAKHGNYGVSSGVGSSNVIEYLGYAFKGDEASLKSEIEHVGITFFHAP

SEQ ID NO: 118239 - protein, 172 aa, Unknown
  Bacterial polypetide isolated from the Sargasso Sea
MKELLQKLLASEALSFEEAREMILWIMSEEAVTVQAAALLALLQAKGVTVEEMAGAALAMRERASGIKAPANAIDTCSTGGNGISTFNISTCAAIIAAGAGAIVAKHGNRSNTRKSGSAEALEALGVKINLEVDEVERCLRDLNICFCYAINHHPAMRFAGPIRKDLGGSTV

SEQ ID NO: 118240 - protein, 244 aa, Unknown
  Bacterial polypetide isolated from the Sargasso Sea
NISTASALLLASMGVKVAKHGNKAVSSKCGSADVLEALNININLEPKQIEEQIKNNNFGFMFAPNYHSAMKYVGPTRKKIGKRTIFNMIGPLSSPALVERQVIGVFDNKLLKIFANALKNLNLKFAWILNSEDGLDEISPYAKTNIVQLKNNEISEFIIDPNELNINADKFENLIGDDAKFNSDKILNIFEGEDNDFSKAVCLNAAAGLMISEKYDDFKIAFNYTRGFIKSGAAFKYIKSLQNV

SEQ ID NO: 118241 - protein, 178 aa, Unknown
  Bacterial polypetide isolated from the Sargasso Sea
MDKFLLKLKNGENLSFEESKKSFEIIMEGNASDEEIYSFLTLLSKKGETSDEIAGGVYILRNKSKRVNIKDAIDTCGTGGDGKNTLNISTASALLLASMGIKVAKHGNKAVSSKCGSGDVLEALNVKIDLDPKNIETQISKNNFGFMFAPNYHSAMKYVGPTRKKIGKRTIFNMIGPL

SEQ ID NO: 118242 - protein, 231 aa, Unknown
  Bacterial polypetide isolated from the Sargasso Sea
GIKVQKHGNKALSSKCGSADVLERLKININLQPDGVAKSIEKNNFGFMFAPNYHLTMRYVAPIRKKIGQRTIFNLLGPLSSPANVKKQVIGVFAKKWLVPFANALKNLESKHAWIVHSEDGMDEISPFTVTNVVELKNNEINEIIIDPKKIGVNFNNPDNLKGKDADYNANKIIDVFSGDKNEFSEAICLNSAAALIVCNKFNVYEEAYEFSKKHLESDKVLTHLKKIQTF

SEQ ID NO: 118243 - protein, 120 aa, Unknown
  Bacterial polypetide isolated from the Sargasso Sea
MNEILKKLKNKKNLTFEESKTAFSDIMSGKVNEEIIYDFLTFSSAKGETSDEIAGGVYVLRDKATKVNVPDDTIDTCGTGGDGKNTLNISTAAALLLSSFGVKVAKHGNKSVSSKCGSAD

SEQ ID NO: 118244 - protein, 168 aa, Unknown
  Bacterial polypetide isolated from the Sargasso Sea
MREYIEKIRNKLNLSFEESKSAFEILMEGKATDQEIFDFLTLLSTKGETSEEIAGGVYVLRDKSKRVNTENCIDTCGTGGDGKNTLNISTASALLLASMGVKVAKHGNKAVSSKCGSGDVLEALNVKINLDPKDIEKQIDINNFGFMFAPNYHSAMRFVGPTRKKIGK

SEQ ID NO: 118245 - protein, 107 aa, Unknown
  Bacterial polypetide isolated from the Sargasso Sea
MTEIVEILKNGQDLSFEQSKTLFSDLMEGKHSDDSIIEILESLIRKGETKDEIAGGIYVLRNKANKVKTTPDTIDTCGTGGDGQNSLNISTAAAIVLASMGVKVAKH

SEQ ID NO: 118246 - protein, 118 aa, Unknown
  Bacterial polypetide isolated from the Sargasso Sea
MDQFLEKLRNKINLNFDESKNAFKILMNGEASDQQIYDFLTLLSDKGEVSDEIAGGVYILRDKSKRVKVENCIDTCGTGGDGKDTLNISTASALLLASMGIKVAKHGNKAVSSKCGSA

SEQ ID NO: 118247 - protein, 186 aa, Unknown
  Bacterial polypetide isolated from the Sargasso Sea
MKHFIEKIKNNENLSFEESKAAFKLLMEGKVNEQDIFDFLTFLSAKGEASDEIAGGVYILREKSKRVNVDNCIDTCGTGGDGMNTLNISTASALLLASMGIKVAKHGNKAVSSKCGSGDVLEALNININFDTEDIETQINENNFGFMFAPNYHSAMRFVGPTRKKIGKRTIFNMIGPLSSPALVKR

SEQ ID NO: 118248 - protein, 284 aa, Unknown
  Bacterial polypetide isolated from the Sargasso Sea
MKQYIDKIKNKQNLSFEESKAAFELLMEGNANEEEIYNFLTILSAKGESSDEIAGGVYVLRNKSKRVNVEDCIDTCGTGGDGMNTLNVSTASAILLSSMGIKVAKHGNKAVSSKCGSGDVLEALKININLEPNEIENQINKNNFGFMFAPNYHSAMRFVGPTRKKIGKRTIFNMIGPLSSPAFVNKQVVGVFDKKLLKTFANALKNLDIKSAWIVNSEDGLDEISPYAKTNVIQLKNKVISEITIDPIQLNINAEKFENLIGNDAQFNASKMIDIFKGEDNDFS

SEQ ID NO: 118249 - protein, 279 aa, Unknown
  Bacterial polypetide isolated from the Sargasso Sea
MEKILNKLKNKENLTLDESKFAFMNIMEGKSSEDQIYGFLTYLSDKGETSDEIAGGVYVLREKSKRVNVQNCIDTCGTGGDGKNTLNISTASALLLSSMGIKVAKHGNKAVSSKCGSGDVLEELNIDINLEPNQIENSINKNNFGFMFAPNYHSAMKHVGPTRKKIGKRTIFNMIGPLSSPALVERQVVGVFDSNLLEIFANALKNLKIKFAWIVNSEDGLDEISPYAKTNIVELKNNQITKKIIDPKELNINANNFKNILGGDSKYNAEKMTNILKEK

SEQ ID NO: 118250 - protein, 138 aa, Unknown
  Bacterial polypetide isolated from the Sargasso Sea
MREIIKKLEERIDLDNQIMTDAVSQIMSGEVEDPMIEDFLIKLNAKGITESEISSAAQVMRSKSLSIDLGNGAHVDTCGTGGTGLNIFNCSTAASFVAAAGGAQITKHGNKGVSSKSGSADLLMIAGANINHDRNHLK

SEQ ID NO: 118251 - protein, 284 aa, Unknown
  Bacterial polypetide isolated from the Sargasso Sea
GEVSDEIAGGVYVLREKSKRVTVTGCVDTCGTGGDGMNTLNISTASALLLASMGTKVAKHGNKAVSSKCGSGDVLEALKVKINLEPGDIEKEINDNNFGFMFAPNYHSAMRFVGPVRKKIGKRTIFNMIGPLSNPALVDRQVVGVFDKKLLKIFAEGLKNLNIKFAWIVNSEDGLDEISPYAKTNVIQLKNGEISEIVIDPLVLNINAEKFDNLVGDDANYNANKIIEIFKGIDNDFSKAVCLNAAAGLIVNEKYSKFLDAYNYSREFILSGKPYIHLEKMQNV

SEQ ID NO: 118252 - protein, 111 aa, Unknown
  Bacterial polypetide isolated from the Sargasso Sea
MDQILEKLKNKQDLTFEESKTAFEILMTGKASDDEIFNFLTLLSEKGEVSDEIAGGVFVLREKSKRVNVSDCIDTCGTGGDGMNTLNIFTASALLLASMGTKVAKHGNKAV

SEQ ID NO: 118253 - protein, 270 aa, Unknown
  Bacterial polypetide isolated from the Sargasso Sea
MTGKASDEQIFTFLTLLSEKGEVSEEIAGGVFVLREKSKRVNIENCVDTCGTGGDGMNTLNISTASALLLSSMGVKVAKHGNKAVSSKCGSGDVLEALDIKINLEPKDIEAQINKKNFGFMFAPNYHSAMRFVGPTRKKIGKRTIFNMIGPLSSPALVNRQVVGVFDKKLLKIFANALSNLDIKFAWIVNSEDGLDEISPYAKTNVIQLKNKEISEIVIDPKELNINADKFENLVGDNAKFNANKMIDIFKGEDNDFSKAVCLNAAAGLI

SEQ ID NO: 118254 - protein, 195 aa, Unknown
  Bacterial polypetide isolated from the Sargasso Sea
MDQILKKLKNKKDLTFEESKSAFEILMTGKASDEQIFNFLTLLSEKGEVSEEIAGGVFVLREKSKRVSVSDCIDTCGTGGDGMNTLNISTASALLLASMGTKVAKHGNKAVSSKCGSGDVLEALRIKIDLEPGDIEKEINTNNFGFMFAPNYHSAMRFVGPVRKKIGKRTIFNMIGPLSNPALVQRQVVGVFDKK

SEQ ID NO: 118255 - protein, 141 aa, Unknown
  Bacterial polypetide isolated from the Sargasso Sea
MDHILEKLKNKQNLTFEESKSAFEILMTGKASDEHIFSFLTLLSEKGEVADEIAGGVFVLREKSKRVNISDCIDTCGTGGDGMNTLNISTASALLLASMGTKVAKHGNKAVSSKCGSGDVLEALKIKIDLEPENIEKEINT

SEQ ID NO: 118256 - protein, 118 aa, Unknown
  Bacterial polypetide isolated from the Sargasso Sea
MTTDFKEFIQLAYEDSLDLNSTKKAFMQIMNGEISEIQISSFISLLQKSGVKSHHVIAALEVMRKKMLSINVPSNTMDTCGTGGDGKNSLNISTATAFVLAASGIPVAKHGNRALTSK

SEQ ID NO: 118257 - protein, 103 aa, Unknown
  Bacterial polypetide isolated from the Sargasso Sea
MSSNLSNSEILNNLLEGRDLDELTSRSLMQKWLNDEISDVETGAFLSAFRAKSSTGVELSSMAEELLNVCELPVARPNLYLVDTCGTGGDGANTFNISTAVAF

SEQ ID NO: 118258 - protein, 156 aa, Unknown
  Bacterial polypetide isolated from the Sargasso Sea
LMEGKAKDQEIFDFLTLLSAKGETSDEIAGGVYVLRDKSKRVNVDNCIDTCGTGGDGMNTLNISTASALLLSSMGVKVAKHGNKAVSSKCGSGDVLEALNIKINLEPNDIEGQININNFGFIFAPNYHSAMRFVGPTRKKIGKRTIFNMIGPLSSP

SEQ ID NO: 118259 - protein, 192 aa, Unknown
  Bacterial polypetide isolated from the Sargasso Sea
MKIFLEKLSNKQDLTFEESKAAFEILMNGKATDDEIFNFLTLLSSKGEGSDEIAGGVYVLRNKSKRVSVDNCIDTCGTGGDGKNTLNISTASALLLASMGIKVAKHGNKAVSSKCGSGDVLESLKIKINLEPADVEKQINKYNFGFMFAPIYHSAMKYVGPTRKKIGKRTIFNMIGPLSSPALVQRQVCRCF

SEQ ID NO: 118260 - protein, 134 aa, Unknown
  Bacterial polypetide isolated from the Sargasso Sea
MDEIIKKLKNKKNLNFEESKSAFENMMSGKVNEEQIYDFLTFSSAKGETSDEIAGGVYILREKANKVNVPDDTIDTCGTGGDGKNTLNISTAAALLLSSFGVKVAKHGNKSVSSKCGSADVLKKLNININLGPK

SEQ ID NO: 118261 - protein, 269 aa, Unknown
  Bacterial polypetide isolated from the Sargasso Sea
FLTLLSEKGEVSEEIAGGVFVLREKSKRVNVNDCIDTCGTGGDGMNTLNISTASALLLASMGTKVAKHGNKAVSSKCGSGDVLEALKIKINLEPKDIEREINTNNFGFMFAPNYHSAMKFVGPTRKKIGKRTIFNMIGPLSNPALVDRQVVGVFDKKLLKIFAEGLKNLQLKFAWIVNSEDGLDEISPYAKTNVVQLKDGQISEIKIDPHSLGVNADNFKNLVGDDAKFNANKMIEIFKGEEHDFSKAVCLNAAAGLIVGQKFYDFSEA

SEQ ID NO: 118262 - protein, 202 aa, Unknown
  Bacterial polypetide isolated from the Sargasso Sea
GEAILKVGVGFMFAPAHHSAMKHVITARKQIGVRTVFNLLGPLTNPAGAPNQVIGVYSVDWIRPILEVLRELGSSHVLVVAAEDGLDEISNISATTIGELQNGEISLFKVSPEELGVDRINSHEIFQVDSADASLAILKKALTYELKPAGDIVALNAGAAIYAANLADSLQGGVVKAKSLLTSGVALARLESLVQFSLEAGN

SEQ ID NO: 118263 - protein, 171 aa, Unknown
  Bacterial polypetide isolated from the Sargasso Sea
MLGPLTNPAGVKHQVVGVFSQALCRPLAEVLKRLGSQHILVVHSRDGLDEFSLASATHVAELKDGQITEYEVLPEDLGLKSQSLVGLAVESPEASLALIRDALTKRKSEAGQKAADMIALNAGAALYAADLASSLKQGVQLAHDALHTGLAWEKLQELVSFTAVFKEENAG

SEQ ID NO: 118264 - protein, 185 aa, Unknown
  Bacterial polypetide isolated from the Sargasso Sea
MKQFIEKIKNKEDLSFEESKAAFELLMDGKVKDQEIFDFLTLLSAKGEASDEIAGGVFVLRNKSKRVRVENCVDTCGTGGDGMNTLNISTASALLLASMGVKVAKHGNKAVSSKCGSGDVLEALNIKINLEPNDIEGQINKNNFGFMFAPNYHSAMRFVGPTTKKIGKRTIFNMIGPLSSPALVK

SEQ ID NO: 118265 - protein, 149 aa, Unknown
  Bacterial polypetide isolated from the Sargasso Sea
MKKFLLKLKSKENLSFEESKAVFEMLMNGKASDDEIFEFLTLLSAKGEVSDEIAGGVYVLRDKAKRVNVQNCIDTCGTGGDGKNTLNISTASAILLASMGIKVAKHGNKAVSSKCGSGDVLEALNIRINLEPKDIENQININNFGFMFA

SEQ ID NO: 118266 - protein, 205 aa, Unknown
  Bacterial polypetide isolated from the Sargasso Sea
YKITNNVKDLENSFSNKNFCFLFAQNHHSAMKNVINVRKNLATRTIFNLLGPLTNPAKASKQLLGVYSRDLVSMHCNCLKELGSEKAMVVHGLDGLDEISLSDNTLINELKDNKVLEYSFDPRDYGYDLIKLEDIKGGDPEYNANCFNKMINGDYKEFQMIVEINAGATIYLSNLRNNLKDSFELAKKTIEEGITKNFVNSLINE

SEQ ID NO: 118267 - protein, 227 aa, Unknown
  Bacterial polypetide isolated from the Sargasso Sea
KLKKKQDLSFEESKSAFNILMNGEANDTEIFDFLTLLSSKGEVADEIAGGVYVLREKSKRVNVQNCVDTCGTGGDGMNTLNISTASALLLASMGIKVAKHGNKAVSSKCGSGDVLEELNIKINLEPNEIEDQIDKNNFGFMFAPNYHSAMKFVGPTRKKIGKRTIFNMIGPLSSPALVNRQVVGVYDKKLLKVFANALNNLSIKFAWIVNSEDGLKKISPYAKTNIV

SEQ ID NO: 118268 - protein, 282 aa, Unknown
  Bacterial polypetide isolated from the Sargasso Sea
MDQILEKLKNKQDLTFEESKTAFEILMTGKASDDEIFSFLTLLSEKGEVSNEIAGGVFVLREKSKRVNVSDCIDTCGTGGDGMNTLNISTASALLLASMGTKVAKHGNKAVSSKCGSGDVLEALKIKIDLEPEDIEKEINTNNFGFMFAPNYHNAMRFVGPVRKKIGKRTIFNMIGPLSNPALVERQVVGVFDKKLLKIFSEGLKNLNLKFAWIVNSEDGLDEISPYAITNVVQLKDGQISEIKIDPNALGVNADNFKNLVGDDAQYNADKMIEIFKGEDND

SEQ ID NO: 118269 - protein, 97 aa, Unknown
  Bacterial polypetide isolated from the Sargasso Sea
MSEITDYIEKINNKKSLSVLESYNAFMSIMSGDCVDGDISNFLIGLKNKGESIDEIIGAVRAIREKMTTINVPDGAIDIVGTGGDGYKTLNISTASA

SEQ ID NO: 118270 - protein, 86 aa, Unknown
  Bacterial polypetide isolated from the Sargasso Sea
MSNFQKILDNLKNSQDLSSDEAFIVSEKMFEGSLADDQIKDILLLLNEKSICSNELIGFARAMRKISTKVEINHKVIDSCGTGGDG

SEQ ID NO: 118271 - protein, 223 aa, Unknown
  Bacterial polypetide isolated from the Sargasso Sea
NKAVSSKCGSADVLEALNININLEPKDIENQIKKNHFGFMFAPNYHSAMKYVGPTRKKIGKRTIFNMIGPLSSPANVEKQVVGVFDKKLLDIFANALKDLNIKFAWIINSNDGLDEISPYDKTIVKQLKNGEINEMIIDPKELKVNAEGFDKIVGNDAKFNSQKIIDIFKGNDDDFSKAVSLNAAAGLIISEREDNFKYAYEKARDHLLSGKTYSHLEKLRNV

SEQ ID NO: 118272 - protein, 247 aa, Unknown
  Bacterial polypetide isolated from the Sargasso Sea
AIIAAGAGAVVAKHGNRSNTRKSGSAEALEALGVNINLELDEVEKCLQDLKICFCYAINHHPAMRFAGPIRKDLGVPTVFNLLGPLTNPAGAKNQLIGVPNVELTSKIAQVLKRLGSERVLVVHGYDGLCELTVTSPTHVAELREGNIKEYEVTPEKLGLKTGKLEEISIDNPEESAMIMERIFSGDEKGTAREIALANAAGALVVSGQVENLEEGVDMAAKTVDNGKAAEKLNDLIKFTWANHQAK

SEQ ID NO: 118273 - protein, 273 aa, Unknown
  Bacterial polypetide isolated from the Sargasso Sea
FLTIFMIRNITIEELNGFRKALIELSLKIDLEEFDPIDLCGTGGDEKDTFNISTLASFVTAGSGVKVAKHGNYGVSSSCGSSNVLESLGLIFDNDSNKIKEAVDKANICFLHAPLFHPAMKNVAPVRKELGLKTFFNMLGPMVNPTMPKKQIVGVYNLELARIYNYLYQLTDINYNIIHSLDGYDEISLTGNTKVYSRKSEFILESEDFNLKNINPVDIKGGIDIKSSAKIFMNVLNGDGSNDQENVVCANASLAIAISKKISILDALKKQKN

SEQ ID NO: 118274 - protein, 168 aa, Unknown
  Bacterial polypetide isolated from the Sargasso Sea
MESSLKKLKEKTDLSFDETKDIFSKIMSGDASEIEIYDFLTLLSDKGEVSSEIAAGVYVLRKKSSRVNAENAIDTCGTGGDGKNTLNISTASALLLASMGIKVAKHGNKAVSSKCGSGDVLEKLNININLDANAVENSIKKFNFGFMFAPNFHSAMKYVGPVRKKIGK

SEQ ID NO: 118275 - protein, 240 aa, Unknown
  Bacterial polypetide isolated from the Sargasso Sea
AAAIVLASMGVKVAKHGNKAVSSNCGSADVLEALKININLKPDEAEESIKKFNFAFMFAPNYHSAMKHVGPARKKIGKKTIFNLIGPLSSPAQVKRQVIGVFDKKWMKPFAEALKDNGVVHAFIVHSEDGMDEISPFAKTNVVELKDKTIKEFTINPKTFGINSSNKENLNGKNAEYNAEKIIEIFKGKKNEFSQSVALNVAAGLIVSDKENDFKISYEKATNHLNSGNVFQHLVKIQSN

SEQ ID NO: 118276 - protein, 234 aa, Unknown
  Bacterial polypetide isolated from the Sargasso Sea
MDQILEKLKNKQDLTFEQSKSAFEILMTGKASDEQIFSFLTLLSEKGEVADEIAGGVFVLREKSKRVNVSNCIDTCGTGGDGMNTLNISTASALLLASLGTKVAKHGNKAVSSKCGSGDVLEALKIKIDLEPRDIEKEININNFGFMFAPNYHSAMRFVGPVRKKIGKRTIFNMIGPLSNPALVERQVVGVFDKKLLKIFAEGLKNLNLKFAWIVNSEDGLDEISPYANTNVIQ

SEQ ID NO: 118277 - protein, 258 aa, Unknown
  Bacterial polypetide isolated from the Sargasso Sea
IDTCGTGGDGKNTLNISTASALLLASMNVKVAKHGNKAVSSKCGSGDVLEELKIKINLDPKNVEIQINKYNFGFMFAPNYHSAMKYVGPTRKKIGKRTIFNMIGPLSSPALVQRQVVGVFDKKLLKIFGNGLKNLNIKFAWIVNSNDGLDEISPYDKTNVVQIKDDQISEIVIDPKDLGISVNKFEDLLGDDAKFNANKIIDIFKGKDNDFSKAVCLNAAAGLIVSENHNRFIDAYQNAREHILSGKTYEHLKIIQNG

SEQ ID NO: 118278 - protein, 266 aa, Unknown
  Bacterial polypetide isolated from the Sargasso Sea
EASEVMREIMRAGMDQTDGTKATEAQFGALLTALRMKGESVEEIVGMAVAMREFSKKLDIEARPLLDTAGTGGSGRKRFNASTAAAFVAAAAGAKVAKHGNRAMSSRSGAADFLEALGAEVSIDSKAVRRCFDDTGMGFLFAPMFHPAMKFAGPLRPTLGVRTIFNILGPLTNPAGANCHVLGAADLEIAEKLASALTQLEMRHAVVVVGHDGVDDISVVDDSTLFEIKEGSVDRQIVSPESIGLKRHAESEIVGGTAEDNAQIWR

SEQ ID NO: 118279 - protein, 247 aa, Unknown
  Bacterial polypetide isolated from the Sargasso Sea
GGDGQNSLNISTASAIVLASMGVKVAKHGNKAVSSNCGSADVLEALKININSNPKEAEESIKNYNFAFMFAPNYHSAMKHVGPARKKMGKKTIFNLIGPLSSPAQVKRQVIGVFDKKWMKPFAEALKENGVVHAYIVHSEDGMDEISPFEKTNVVELKEGHIAQFSIDPKKLGLNSANKENLKGKNAEYNSRKIIEIYKGTYNEFSQSVALNVAAGLIVSGKENNFRIAFEKASEHLTSGEVFKHLN

SEQ ID NO: 118280 - protein, 214 aa, Unknown
  Bacterial polypetide isolated from the Sargasso Sea
IAGGVYVLREKSKRVTVTGCVDTCGTGGDGMNTLNISTASALLLASMGTKVAKHGNKAVSSKCGSGDVLEALNIKIDLEPNDIEKEINDNNFGFMFAPNYHSAMRFVGPVRKKIGKRTIFNMIGPLSNPALVDRQVVGVFDKKLLKIFAESLKNLNIKFAWIVNSEDGLDEISPYTKTNVIQLKNGEISEIVIDPHELNINAEKFENLIGDDAK

SEQ ID NO: 118281 - protein, 194 aa, Unknown
  Bacterial polypetide isolated from the Sargasso Sea
MKQILEKLKNKQDLTFEESKTAFEILMTGKASDNEIFNFLTLLSEKGEVSDEIAGGVFVLREKSKRVNVTDCIDTCGTGGDGMNTLNISTASALLLASMGTKVAKHGNKAVSSKCGSGDVLEALKIKIDLEPVDIEKEININNFGFMFAPNYHSAMKFVGPVRKKIGKRTIFNMIGPLSNPALVERQVVGVFDK

SEQ ID NO: 118282 - protein, 281 aa, Unknown
  Bacterial polypetide isolated from the Sargasso Sea
MLDVMDLIMSGSLQDIEIEEFLIAMNEKGASINEISSAASVMRDKSLKFNIGDGTHIDTCGTGGTGLHIFNCSTASAFVAAACGAKVTKHGNKSISSKTGSADFLLEAGADISHDRGLLESIFRKTGFIFLFAPLHHSSMRYVMPARQRIGKKTIFNLLGPHTNPCSARKQLIGVYKRSLVETFSSVAKELEMEHVIVVHGNDGLDEISITDDSFISELKDGKIKNYQVSPKDFGLSYGNFESIKALSPQESFEKVSLAFAGREGSVQDMIAINSAAALKL

SEQ ID NO: 118283 - protein, 200 aa, Unknown
  Bacterial polypetide isolated from the Sargasso Sea
MIDNELQKLKGKIDLSRQEMLDVMDLIMSGSLQDNEIEEFLIAMNEKGASINEISSAASVMRDKSLKFNIGDGNHIDTCGTGGTGLHIFNCSTASAFVAAACGAKVTKHGNKSVSSKTGSADFLLEAGADISHDRNLLGSIFRKTGFIFLFAPLHHSSMRYVMPARQKIGKKTIFNLLGPHTNPCSARKQLIGVYKRSLD

SEQ ID NO: 118284 - protein, 159 aa, Unknown
  Bacterial polypetide isolated from the Sargasso Sea
MELAFADNLDLEATKAVFKLIMEGNVNEVQISSFLSLLQKSGIKAHHINGALDVMKSKMIKIKSPKGSIDTCGTGGDGKNSLNISTATAFVLAAKGIPIAKHGNRALTSNCGSADVLKSLKINIDMDISKLEDCLNKTGICFMFAPNHHPAMKYVGPVR

SEQ ID NO: 118285 - protein, 247 aa, Unknown
  Bacterial polypetide isolated from the Sargasso Sea
MEQILEKLRNKTDLSFEESKSAFELLMTGQANEDQIYDFLTLLSDKGEVSDEIAGGVYVLREKSKRVKVTDCVDTCGTGGDGMNTLNISTASALLLASMGTKVAKHGNKAVSSKCGSGDVLEALNIKIDLEPSDIEKGINDNNFGFMFAPNYHSAMRFVGPVRKKIGKRTIFNMIGPLSSPALVERQVVGVFDKKLLKIFAEGLKNLNIKFAWIVNSDDGLDEISPYAKTNVIQLKNGEISEITIDP

SEQ ID NO: 118286 - protein, 170 aa, Unknown
  Bacterial polypetide isolated from the Sargasso Sea
MKEILNRLTNYETLSEKEARDIIIQISEGKLNTSEISSFLTIFMIRNITIDELNGFRKALIDLSLKIDLKEFDTIDLCGTGGDEKDTFNISTLASFVTAGSGVKVAKHGNYGVSSSCGSSNVLEYLGINFTNDYDKIKRAVDKANICFLHAPLFHPAMKNVAPVRKELRL

SEQ ID NO: 118287 - protein, 178 aa, Unknown
  Bacterial polypetide isolated from the Sargasso Sea
SAMKHVANVRKQLGTRTIFNLLGPLTNPASTKKQLLGVFEKKWVNIHCEVLKELGSYHSIVVHGFDGLDEISLSGPSYISELKDGTIKDYIFDPKDFGYEYIKNEEIIGKDAEYNARAFIELLDGPNNSFQKIVEINSGAAIYLSGISKSLKEGFELAQKTILNKNAKNYFENMIKNQ

SEQ ID NO: 118288 - protein, 129 aa, Unknown
  Bacterial polypetide isolated from the Sargasso Sea
MDQILEKLKNKQDLTFEESKTAFEILMTGKASDDEIFSFLTLLSKKGEVSDEIAGGVFVLREKSKRVNVSDCIDTCGTGGDGMNTLNISTASALLLASMGTKVAKHGNKAVSSKCGSGDVLEALKLKLI

SEQ ID NO: 118289 - protein, 147 aa, Unknown
  Bacterial polypetide isolated from the Sargasso Sea
MKQILEKLSKKEDLTFEESKSAFELLMTGKASEEEIYDFLTLLSDKGEVSDEIAGGVYVLREKSKRVNVNDCIDTCGTGGDGMNTLNISTASALLLASMGTKVAKHGNKAVSSKCGSGDVLEALKIKIDLEPIDIEKVINDNNFGFM

SEQ ID NO: 118290 - protein, 176 aa, Unknown
  Bacterial polypetide isolated from the Sargasso Sea
MSTHLTNVLNVQHAIEQLTIKQSLSYSQSKALFNEIMQGNMSDIELTALLISLKMKGEVSDEIAGAAASMRENAVAFNTTCSQLADSCGTGGDGSNTINISTTAAIVAAAAGINMVKHGNRSVSSNSGSADLLKALGINIDMSPEQAAKCLEQTHFTFLFAPHYHSGVRHAMGVRT

SEQ ID NO: 118291 - protein, 330 aa, Unknown
  Bacterial polypetide isolated from the Sargasso Sea
MNKYIEKLKIKKNLSFDESKDAFEILMNGKASDNEIFDFLTLLSSKGEVSDEIAGGVYVMRNKSRRVKVQNCLDTCGTGGDGMNTLNISTASAILLASMGVKVAKHGNKAISSKCGSGDVLEALKIGINFEPNEIEDQISKNNFGFMFAPNYHSAMKHVGPTRKKIGKRTIFNMIGPLSSPALVDKQVIGVFEKKLLRIFAEALKNINIKFAWIVNSEDGLDEISPYAKTNVFQLKDGEISEFTIDPEELNVKADKFENLIGDDAKFNANKIIEIFSGVDNDFSKAVSLNAAAGLMVMEKNFNFKDSYESARKFLLSGQTINHLRILQNV

SEQ ID NO: 118292 - protein, 302 aa, Unknown
  Bacterial polypetide isolated from the Sargasso Sea
GKANEKEIFDFLTLLSTKGESSGEIAGGVFVLRNKSKRVNVENCVDTCGTGGDGMNTLNISTASALLLASMNVKVAKHGNKAVSSKCGSGDVLEALKIKINLEPKEIEDQINKNNFGFMFAPNYHSAMRFVGPTRKKIGKRTIFNMIGPLSSPALVKRQVVGVFDKKLLRIFANALNNLDIKFAWIVNSEDGLDEISPYAKTNVIQLKDNKISEIVIDPKDLKINADKFENLVGDDAKFNAEKMINIFKGEDNDFSKAVCLNAAAGLIVNENHKEFTEAYKDAREHILSNKVIEHLETIQNA

SEQ ID NO: 118293 - protein, 335 aa, Unknown
  Bacterial polypetide isolated from the Sargasso Sea
MKILLEKLLSAKDLSFKESYEMILWIMSEDAIAVQAASMLVLLQAKGVSVDEMAGAALAMREKAKFISAPENSIDTCSTGGNGISTFNISTCAAIIASAAGAVVAKHGNKSNTRKSGSAEALEALGVNLSLELNKVEKCLNDLGICFCYAINHHPAMRFAGPIRKDLGVPTIFNLLGPLTNPAGVKNQLIGVPNKELTLKIAQVLKRLGSNRVMVVNGQDGLCELTVTTSTNITELRNNEIKEYVINPLDLGLTKGKLDDIRIENPDHSADMIKRIFDGTEKGTARDIALVNAAGALVVAGLSNDLKEGIELSRKTLESGKAEEKMKKLINYTNK

SEQ ID NO: 118294 - protein, 330 aa, Unknown
  Bacterial polypetide isolated from the Sargasso Sea
MKQYIEKLRSKKNLTFEESKSVFQILMEGKASDQEIYDFLILLSDKGESSDEIAGGVYILREKSKRVKVDDCIDTCGTGGDGMNTLNISTASAILLASMGTKVAKHGNKAVSSKCGSGDVLEALKINIHLEPKDIEHQINNNNFGFMFAPNYHSAMRFVGPTRKKIGKRTIFNMIGPLSSPALVKRQVIGVFDKELLKTFANALINLDMKFVWIVNSEDGLDEISPYAKTNIIQLKDNEISEIVIDPKELNVNAGKFENLVGDDAKFNADKMINIFKGEDNDFSKAVCLNAAAGLIVNETHQNFADAYKDAREHILSNKVNKHLEKIQNA

SEQ ID NO: 118295 - protein, 242 aa, Unknown
  Bacterial polypetide isolated from the Sargasso Sea
SFVLAANDIPVAKHGNKALTSKCGSADVLSALGININMPIEFLEDCLKEVGICFMFAPNHHPAMKYVGPVRQQIGVRTIFNILGPLLNPGNVDNQIIGVFGNDVLNIYKEVFNKREGKNAFIILGYEGMDEISTEGENFIYSNVYGEKIFNPVDLKLKEPIKSELIGDDPNYNANRIIDIFTGKKDSFYEIVSINAAFAFLLSSNEEPNTRNINKYYELARSIIDTGSAENKLKDLISFSNK

SEQ ID NO: 118296 - protein, 258 aa, Unknown
  Bacterial polypetide isolated from the Sargasso Sea
MDKVLSKLKLSQNLNFNESKDAFDFIMEGKANEDQIFSFLTLLSNKGETAEEIAGGVFVLRDKSKRVNVENCIDTCGTGGDGMNTLNISTASALLLASMGVKVAKHGNKAVSSKCGSGDVLEALNIKINLEPNEIENQIDKNNFAFMFAPNYHKAMKHVGPTRKKIGKKTIFNMIGPLSSPALVKRQVVGVFDKKLLKTFADALNNLDIKFAWIVNSEDGLDEISPYAKTNIIQLKDKKITEIIVDPKKLNVNADKLK

SEQ ID NO: 118297 - protein, 196 aa, Unknown
  Bacterial polypetide isolated from the Sargasso Sea
MSEVMLDLLEGRATDAQIGAFLIALNMKGETVQEVLGAAKIMRQLSAKVEVNKENLVDTCGTGGSGIGIFNVSTTAAFVACACGARVAKHGNRSATRNSGSADLLEAAGVSLELNPSQVADCIENVGLGFMFAPSHHSAMKHVIGPRKEIAHKSIFNLLGPLTNPASTLNQVMGVYDEKWLKPVDKVHQYLGSKNV

SEQ ID NO: 118298 - protein, 338 aa, Unknown
  Bacterial polypetide isolated from the Sargasso Sea
MSNFNNIIRDIKKHKALKKEDIKFCFNFILEGKANELEIENFLIGLNDKGITIDDITAGVEVLREKSSKVNIPENAIDTCGTGGDKSGTYNISTAATIVAAGAGCIIAKHGNRALTSKSGSSQVLEELGVKINSSSENILNCIDKSNIGFMFAANHHSAMKYVGPVRQKIKERTIFNLLGPLSNPGNVKKQLIGVFNTKWLNPLAETLKKLGSKHVMLVCGSDGLDEITTTTKTYVAELKNNEIINYEINPEDYGLNKADPSELIGDTPTINAQKILKLLDGEKGAFRNIVILNAAAAIYVFGIAENIKHGVELANKSIDEGSAKSSLEKLIKASNEK

SEQ ID NO: 118299 - protein, 139 aa, Unknown
  Bacterial polypetide isolated from the Sargasso Sea
MKDFINKINNKEDLTLNEMQEAINSIMSGMSDDDDIESFLIGLNRKGVSETEVTAAAIVMKEKSLKFDIGDGSHIDTCGTGGTGHHTFNCSTASSFVAAAGGAKITKHGNKAISSKSGSADFLTQSGANINHEREKLIS

SEQ ID NO: 118300 - protein, 337 aa, Unknown
  Bacterial polypetide isolated from the Sargasso Sea
MIDNELQKLKGKIDLSRQEMLDVMDLIMSGSLQDNEIEEFLIAMNEKGASINEISSAASVMRDKSLKFNIGDGTHIDTCGTGGTGLHIFNCSTASAFVAAACGAKVTKHGNKSISSKTGSADFLLEAGADISHDRSLLESIFRKTGFIFLFAPLHHSSMRYVMPARQKIGKKTIFNLLGPHTNPCSARKQLIGVYKRPLVETFSSVAKELEMEHVIVVHGNDGLDEISITDDSFISELKDGKIKNYQVSPKDFGLSYGNFESIKALSPQESFEKVSLAFAGREGPVQDMIAINSAAALKLSGIVKSLNEGVELSKSAMNEGLAQSKLESYVKMSNNL

SEQ ID NO: 118301 - protein, 330 aa, Unknown
  Bacterial polypetide isolated from the Sargasso Sea
MKEILNRLITYKTLNENESKEILIRISNGELNNSQISSFLTVFMMRNITLEELKGFRDALLELCIKVNLEEFNAIDLCGTGGDGKDTFNISTLASFVTAGSGCKVAKHGNYGVSSGCGSSNVLESLGLKFTNDYDTLRNAIDKSGICFLHAPLFHPAMKNVAPVRRELGMKTFFNMLGPLVNPSMPNKQIVGVFNLELARIYNYLLQKSNKKYSIIYSLDGYDEISLTNDTKIYSNNYERILKSKEFELENLKASEIKGGFDIPSSSKIFMNVLNGAGTESQNNVVCANAGIAISISKNISIKEGFELAKESLISSKALDSFNKLKKIMA

SEQ ID NO: 118302 - protein, 330 aa, Unknown
  Bacterial polypetide isolated from the Sargasso Sea
MKEILNRLTNYETLTEKEASDIIIQISEGKLNTSEISSFLTIFMIRNITIEELSGFRKALIDLSLKIDLDEFDTIDLCGTGGDEKDTFNISTLASFVTAGSGVKVAKHGNYGVSSSCGSSNVLEHLGINFTNDYDKIKNAVDKANICFLHAPLFHPAMKNVAPVRKELRLKTFFNMLGPMVNPSMPKKQMVGVYNLELARIYNYLYQNTNIEYNIIHALDGYDEISLTGNTKVYSRSNEFILESKDFNLDNIDADLIKGGKDVESSSKIFMSVLNGIGSNEQENVVCANASMAISLSKNVSIIEAFEIAKESIKSKSALRCFEKLIELMK

SEQ ID NO: 118303 - protein, 267 aa, Unknown
  Bacterial polypetide isolated from the Sargasso Sea
MDQILEKLKNKQNLTFEESKSAFEILMTGKATDEQIFNFLMLLSEKGEVSEEIAGGVFVLREKSKRVNVNDCIDTCGTGGDGMNTLNISTASALLLASMGTKVAKHGNKAVSSKCGSGDVLEALKIKINLEPKDIEREINTNNFGFMFAPNYHSAMKFVGPTRKKIGKRTIFNMIGPLSNPALVDRQVVGVFDKKLLKIFAEGLKNLQLKFAWIVNSEDGLDEISPYAKTNVVQLKDGQISEIKIDPYSLGVNADNFKNLVGDDAKL

SEQ ID NO: 118304 - protein, 63 aa, Unknown
  Bacterial polypetide isolated from the Sargasso Sea
MLASMGVKVAKHGNKAVSSKCGSADVLEALNININSEPKQIEEQIKIIILALCSHPNYHSAMK

SEQ ID NO: 118305 - protein, 242 aa, Unknown
  Bacterial polypetide isolated from the Sargasso Sea
AFVAAACGAKVTKHGNKSISSKTGSADFLLEAGADISHDRGLLESIFRKTGFIFLFAPLHHSSMRYVMPARQRIGKKTIFNLLGPHTNPCSARKQLIGVYKRSLVETFSSVAKELEMEHVIVVHGNDGLDEISITDDSFISELKDGKIKNYQVSPKDFGLSYGNFESIKALSPQESFEKVSLAFAGREGSVQDMIAINSAAALKLSGIVKSLKEGVEFSKSAMNEGLAQSKLESYVKMSNNL

SEQ ID NO: 118306 - protein, 224 aa, Unknown
  Bacterial polypetide isolated from the Sargasso Sea
MKYNIGDKVTNKNVKYVIKYLFQTDNITHQAIIIYQLNKLINDSDILLSLRDYIFKNSNKIKQYPNSLDTCGTGGDGLKTLNISTTVAILLSSVGIPIAKHGNRAASSLSGSSDIISELKIPNEKNSKKIIKRISNDKFVYLNAPFFYPNLSRVGEVRKKIGIKTIFNYMGPTLNPLGAKFQILGTIDKSSAEIMSKILSKIKNKKFTIFFSEDGLDEISIFAP

SEQ ID NO: 118307 - protein, 161 aa, Unknown
  Bacterial polypetide isolated from the Sargasso Sea
MSQSILALVQQSLKGETLSFEQSHQFFSAVVKGEVEPVLLTALLVALKMRGEKAEEIAGAAAAMRAAAATFPATVAGAIDCCGTGGDGSNTINISSTAALVAASMGLPVAKHGNRSVSSQSGSADLLEQLGINIQMSPATAANALSQCNSSFLFAPLYHAG

SEQ ID NO: 118308 - protein, 168 aa, Unknown
  Bacterial polypetide isolated from the Sargasso Sea
MDSFIKKLNNNQDLSFNESKSAFKLLMEGKANESQIFDFLTSLSKKGEVSDEIAGGVYVLREMSKRVNVKNAVDTCGTGGDGKNTLNISTASALLLGGMSIKVAKHGNKAVSSKCGSGDVLEELKININLDSSDIEKEINRNNFGFMFAPNFHSAMKYVGPTRRRIGK

SEQ ID NO: 118309 - protein, 187 aa, Unknown
  Bacterial polypetide isolated from the Sargasso Sea
FFFAPNFHPAMKHIAPIRKALKIRTVFNILGPLTNPAKPSFYLLGAFSSEMASLMASSLSGMEMSRAFVVHGLNGWDEPTPASKFELFDVSKDSISHKIIDPSELGMDKCKEEDLKGGTSEVNAKALLEVFDGKDNGAHEDALVLNAALSLQVAGKAADLIEGIEIARQTIVSGKAKDFVSGLTNGD

SEQ ID NO: 118310 - protein, 327 aa, Unknown
  Bacterial polypetide isolated from the Sargasso Sea
MKFKIDDLITKRNVEYAIKYLFDSDNISHQAIIIHQLNKLINNSDILLSLRKFIFKNSNKIKQYPNSLDTCGTGGDGLKTLNISTTVAILLSSVEIPVAKHGNRAASSLSGSSDIISELNISSEKDSKKIINKITNDKFVYLNAPFFYPNLSKVGEVRKKLGIKTIFNYMGPTLNPLGAKYQILGTVNKNSAEIMLKILSKINNKNSTIFFSDDGLDEISIFAPTNFYFKRGINITKKRISHTKYKKYLSSRLNFKDIKGNTPSYNANRLIELFQGKKDSYRDITIINSIYAMQTIKPTYKFDECYDILTNSLDTSKALNHLNNIKK

SEQ ID NO: 118311 - protein, 123 aa, Unknown
  Bacterial polypetide isolated from the Sargasso Sea
MEDIIKKVKNKQNLNFEESKSVFENMMSGKVSDEQIHDFLTFSSAKGETSDEIAGGVYVLRDKATRVKSTDETIDTCGTGGDGKNTLNISTAAALLLSSFGIKVAKHGNKSVSSKCGSADVFQ

SEQ ID NO: 118312 - protein, 242 aa, Unknown
  Bacterial polypetide isolated from the Sargasso Sea
MEQILEKLRNKTDLSFEESKSAFELLMTGQANEDQIYDFLTLLSDKGEVSDEIAGGVYVLREKSKRVKVTDCVDTCGTGGDGMNTLNISTASALLLASMGTKVAKHGNKAVSSKCGSGDVLEALNIKIDLEPRDIEKEINDNNFGFMFAPNYHSAMRFVGPVRKKIGKRTIFNMIGPLSSPALVKRQVVGVFDKKLLKIFAEGLKSLNIKFAWIVNSEDGLDEISPYAKTNVIQLKNGEISE

SEQ ID NO: 118313 - protein, 110 aa, Unknown
  Bacterial polypetide isolated from the Sargasso Sea
MKKILEKLFDHNYLEYEESKKVLKEISSKKYNNSQVASFLTVFKMRNPSVQEIEGFRDALLDLCVKIDLSSDFETIDLCGTGGDGKNTFNISTISSFVVAGAGYKVTKTW

SEQ ID NO: 118314 - protein, 321 aa, Unknown
  Bacterial polypetide isolated from the Sargasso Sea
MDQILEKLKNKKDLTFEESKAAFEILMTGKASDDEIFDFLTFLSEKGEVSDEIAGGVFVLREKSKRVNVSDCIDTCGTGGDGMNTLNISTASALLLASMGTKVAKHGNKAVSSKCGSGDVLEALKIKIDLEPDDIEKEINTNNFGFMFAPNYHSAMRFVGPVRKKIGKRTIFNMIGPLSNPALAERQVVGVFDKKLLKIFAEGLKNLNLKFAWIVNSEDGLDEISPYAITNVIQLKDGQISEIKIDPNALGVNADNFKNLVGDDAKFNADKMIEIFKGKDNDFSKAVCLNAAAGLIVGEKFSDFSEAYNYTREFILSGKTF

SEQ ID NO: 118315 - protein, 150 aa, Unknown
  Bacterial polypetide isolated from the Sargasso Sea
MKQFIDKIKNKDDLSFEDSKAAFELLMEGKATEQEIFDFLTLLSAKGEVSNEIAGGVYVLRNKSKRVNVQNCIDTCGTGGDGMNTLNISTASALLLASMGVKVAKHGNKAVSSKCGSGDVLEALNIEINLEPNDIESQIEKNNFGFMFAP

SEQ ID NO: 118316 - protein, 185 aa, Unknown
  Bacterial polypetide isolated from the Sargasso Sea
IYHPAMKNVMPVRQELGYRTVFNILGPLTNPASVNYQLIGVYEKSLAIKMIEVLRNLNTKRAWVVHGSDGTDEISITGETYVVELDRGKIKEFKINPEDVNLKSCDFSEILGGSPKFNAQKIEQLVNGEKNGFFYSVILNSAVALNISEKVKNIQDGIRLASDTLLSGKTKKLIENLRVTKTSLQ

SEQ ID NO: 118317 - protein, 126 aa, Unknown
  Bacterial polypetide isolated from the Sargasso Sea
MKSEIIKNKLFEQKNLTSEETKFIFNLIMSAEISEIDTAAILIALKIKSETAEEIYGAANIMKEKSLKISASDDTIDTCGTGGDNKGTLNISTSSAIIAASAGAKVAKHGNRSISSNSGSADMLKN

SEQ ID NO: 118318 - protein, 330 aa, Unknown
  Bacterial polypetide isolated from the Sargasso Sea
MKEIIEKLKSKQNLSFEESKLAFEILMDGKASDDEMFSFLTILSSKGEVSEEIAGGVYVLRNKSKRVNASDCVDTCGTGGDGKNTLNISTASALLLASMGIKVAKHGNKAVSSKCGSGDVLEALNIKINLGPKEIEEQISKNNFGFMFAPNYHSAMKYVGPTRKKIGKRTIFNMIGPLSSPALVNRQVVGVFDKKLLKIFANALKNLNIKFAWIVNSEDGLDEISPYAKTNVVQLKNNEISDFIIDPNELNINADNFENLLGDNAKFNSNKMIDIFKGEDNDFSKAVCLNAAAGLIVIDKHTNFKDSYNEARNYILSGKTYNYLNSLQNA

SEQ ID NO: 118319 - protein, 335 aa, Unknown
  Bacterial polypetide isolated from the Sargasso Sea
MSSKFKTLLDAPADNFDELKFYFHHLLSGDCDDDEIIESLNEMSEYGINQKILEPLTSTLKDKSSPLEIGTNDYIDTCGTGGSGLNIFNCSTLSALVVATAGGKVLKHGNKSVTSKSGSADFLQRAGINLDHSIELVKEAFEIFNFAFLFAPSFHSSLKHVANARKQINKRTAFNVAGPLAHPGNPKFQIIGTSDKKLNEDIINILKKRKLKRAMVVTAEDGVDEISICSKTYVHELKNDEINQFVLDPEEFNMQLANLNDIQVNTAEEAYVFGLDILNGKRGNGFNMVALNAGAALYTLGINNNLSDGIENAINVLHSGRVLLLLNKYAKFTNQ

SEQ ID NO: 118320 - protein, 330 aa, Unknown
  Bacterial polypetide isolated from the Sargasso Sea
MEKILKKLENKEDLSFDESVNAFETIMEGKANDQQMQDFLTLLSVKGEQASEIAGGVYVLRNKSKRVKIKDAIDTCGTGGDGKNTLNISTASALLLSALGIKVAKHGNKAVSSKCGSGDVLEKLKININLEPSAIENCIDKNGFGFMFAPNYHSAMRYVGPIRKKIGKRTIFNMIGPLSSPALVNRQVVGVFDIKLLNIFAEALKNLKIKFAWIVHSNDGLDEISPYDITNVCQLNDGKIDNIKINPKDLGINSSNFENLIGKESDYNAEKIIEIFSGKDNDFSTAVCLNAAAGLIVSEKFTDFKNAYNHSKEFILSGKTLDHLKNIQNV

SEQ ID NO: 118321 - protein, 182 aa, Unknown
  Bacterial polypetide isolated from the Sargasso Sea
MIDNELQKLRGKIDLSSQEMLDVMNLIMSGSLQDNEIEEFLIAMNEKGASINEISSAASVMRDKSLKFNIGDGTHIDTCGTGGTGLHIFNCSTASAFVAAACGAKVTKHGNKSVSSKTGSADFLLEAGADISHDRSLLESIFRKTGFIFLFAPLHHSSMRYVMPARQKIGKKTIFNLLGPHT

SEQ ID NO: 118322 - protein, 330 aa, Unknown
  Bacterial polypetide isolated from the Sargasso Sea
MKKFIDKIKNKKDLSFDESKAAFELLMEGKVNDQEIFDFLTLLSAKGEASNEIAGGVYVLRNKSRRVNVKNCIDTCGTGGDGMNTLNISTASAILLSSMGVKVAKHGNKAVSSKCGSGDVLEALNIKINLEPKDIEVQIDKNNFGFMFAPNYHSAMKYVGPTRKKIGKRTIFNMIGPLSSPALVKKQVVGVFEKKLLKIFANALKNLDIKFAWIVNSEDGLDEISPYAKTNIVQLKDNIISEITIDPNELKINADKFENLVGNDAKFNANKMIDIFKGEDNDFSKAVCLNAAAGLIVNETHKHFTEAYNDARKHILSNKVNDHLQSIQNA

SEQ ID NO: 118323 - protein, 247 aa, Unknown
  Bacterial polypetide isolated from the Sargasso Sea
MKQFLEKLKNKQDLSFEESKSAFNILMNGEANDEEIFDFLTLLSLKGEVSDEIAGGVYVLREKSKRVNVQNCVDTCGTGGDGMNTLNISTASALLLASMGIKVAKHGNKAVSSKCGSGDVLEALNIKINLEPNEIEKQINTNNFGFMFAPNYHSAMKFVGPTRKKIGKRTIFNMIGPLSNPALVQRQVVGVFDKKLLKIFANSLKNLKIKFAWIVNSEDGLDEISPYSKTKVVQLKDDKISEILIDP

SEQ ID NO: 118324 - protein, 164 aa, Unknown
  Bacterial polypetide isolated from the Sargasso Sea
MSLSLLELVQKSLKGEALSFEQSHAFFSAVVKGDVEPVLLTALLVALKIRGETADEIAGAAAAMREAATAFPTSVAGAIDCCGTGGDGSNTINISSTAAIVAASMGLPVAKHGNRSVSSQSGSADLLEHLGINIQMSPATAAKAKSQSNSSFLFAPLYHAGIKH

SEQ ID NO: 118325 - protein, 232 aa, Unknown
  Bacterial polypetide isolated from the Sargasso Sea
MSINVAKHGNKAVSSKCGSADVLEALNININLEPKDIENQIKKNHFGFMFAPNYHSAMKYVGPTRKKIGKRTIFNMIGPLSSPANVEKQVVGVFDKKLLDIFAGALKDLNIKFAWVVNSNDGLDEISPYDKTIVKQLRNGEINEMIIDPKELKVNAEGFDKIVGNDAKFNSQKIIDIFKGNDDDFSKAVSLNAAAGLIISEREDNFKYAYEKARDHLLSGKTYSHLENLRDA

SEQ ID NO: 118326 - protein, 246 aa, Unknown
  Bacterial polypetide isolated from the Sargasso Sea
MTVDFKEFIQLAYEDSLDLKSTKKAFMQIMNGEISEIQISSFISLLQKSGVKSHHVIAALEVMRKKMLSINAPLNTMDTCGTGGDGKNSLNISTATAFVLAASGIPIAKHGNRALTSKCGSADVLKALNINIDMETSKLEDCLRNIGICFMFAPNHHPAMKHVAQVRQLLGFRTIFNMLGPLLNPANVRNQIVGVYSKEVFDIYKDVFEKEDKNICLIAGHDGNDEISLSGINLIFTNKKMELCSL

SEQ ID NO: 118327 - protein, 257 aa, Unknown
  Bacterial polypetide isolated from the Sargasso Sea
MIDNELQKLREKIDLSRQEMLYVMNLIMSGSLQDNEIEEFLIAMNEKGASISEISSAASVMRDKSLKFNIGDGTHIDTCGTGGTGLHIFNCSTASAFVAAACGAKVTKHGNKSISSKTGSADFLLEAGADISHDRSLLESIFRKTDFIFLFAPLHHSSMRYVMPARQKIGKKTIFNLLGPHTNPCSARKQLIGVYKRSLVETFSSVAKELEMEHVIVVHGNDGLDEISITDDSFISELKDEKIKNYQVSPKDFGLSY

SEQ ID NO: 118328 - protein, 330 aa, Unknown
  Bacterial polypetide isolated from the Sargasso Sea
MKEILNRLTNYETLSEKEARDIIIQISEGKLNTSEISSFLTIFMIRNITIDELNGFRKALIDLSLKVDLREFDTIDLCGTGGDEKDTFNISTLASFVSAGSGSKVAKHGNYGVSSSCGSSNVLEYLGINFTNDYDKIKRAVDKANICFLHAPLFHPAMKNVAPVRKELRLKTFFNMLGPMVNPSMPKKQMVGVYNLELARIYNYLYQNTDVEYNIIHALDGYDEISLTGNTKVYSRSNEFILESKDFELDDIHKDSIKGGKDVKSSSKIFMNVLNGKGTTEQENVVCANASMAISLSKKVTIIEAFELAKDSLLSSKALDSFNKLKDIMK

SEQ ID NO: 118329 - protein, 330 aa, Unknown
  Bacterial polypetide isolated from the Sargasso Sea
MEQILEKLRNKTDLSFEESKSAFELLMTGQANEDQIYDFLTLLSDKGEVSDEIAGGVYVLREKSKRVKVTDCVDTCGTGGDGMNTLNISTASALLLASMGTKVAKHGNKAVSSKCGSGDVLEALNIKIDLEPSDIEKEINDNNFGFMFAPNYHSAMRFVGPVRKKIGKRTIFNMIGPLSSPALVKRQVVGVFDKKLLKIFAEGLKSLNIKFAWIVNSDDGLDEISPYAKTNVIQLKNGEISEIIIDPQLLNINTEKFDNLVGNDAKYNASKMIEIFKGKDNDFSKAVCLNAAAGLIVNEKYSEFSKAYKYAREFILSGKPYIHLEKIQNA

SEQ ID NO: 118330 - protein, 147 aa, Unknown
  Bacterial polypetide isolated from the Sargasso Sea
MEIKSFKNKLFSQQDLTSDESMHLFELIMSGKLSEIDITAILTSLKLKGETKDEILGATKIMRSKSMKISSSVNTVDTCGTGGDMSDTLNISTAASLVAASCGIKIAKHGNKSVSSKSGSADMLENIGYKFSDDPKFIEDQLSRNNF

SEQ ID NO: 118331 - protein, 330 aa, Unknown
  Bacterial polypetide isolated from the Sargasso Sea
MKKFIEKLKNKIDLDFEESKDAFEILMDGKATDQEIFDFLTLLSAKGEVSNELAGGVYVMRNKSKRVNVKNCLDTCGTGGDGMNTLNISTASALLLSSMGIKVAKHGNKAVSSKCGSGDVLEALKIKINLEPNEIEKQINKYNFGFMFAPNYHSAMKHVGPTRKKIGKRTIFNMIGPLSSPAHVNRQVIGVFDKKLLRTFAEALNNLNVKFAWIVNSEDGLDEISPYAITHVYQVKDGKISKLTIDPKKLNINADRFENLIGSDANFNADKMIDIFKGTDNDFSKAVCLNAAAGLIVMEVNSSFKESYEAVRKFILSGKTMDYLQSIQNA

SEQ ID NO: 118332 - protein, 254 aa, Unknown
  Bacterial polypetide isolated from the Sargasso Sea
MKDILEYLFEYNKLDYDQAKKILIEINSNKYSNSEISSFMTVFKMRNPSIEEMEGFRDALLELCVKINFDQFNTVDLCGTGGDGKDTFNISTISSFIVAGAGFKVTKHGNYGVSSNCGSSNVLEYLGVKFTNNESHLKKCLDKFNICYLHAPLFHPSMKNVAPIRRELGFKTFFNLLGPLVNPSRPNNQLTGVYNLEIARIYGYIFKNTQINFSIVYALDGYDEISLTNDFKLITNNHEIISDSKFFNFQRTSS

SEQ ID NO: 118333 - protein, 228 aa, Unknown
  Bacterial polypetide isolated from the Sargasso Sea
VAKHGNKAVSSKCGSADVLEALNININLEPHQIENQIRKNNFGFMFAPNYHSAMKYVGPTRKKIGKRTIFNMIGPLSSPALVDRQVIGVFDKKLLKIFANALKNLNLKFAWIVNSEDGLDEISPYAKTHVVQLKNNEISEFNIDPNELNVNADKFENLIGNDAKFNSDKILNIFQGEDNDFSKAVCLNAAAGLMISEKYNDFKVAYNFSTDFIKSGSAFEYIRNLQNV

SEQ ID NO: 118334 - protein, 330 aa, Unknown
  Bacterial polypetide isolated from the Sargasso Sea
MKQFIEKIKKKENLTFDESKTAFELLMEGKAEDQEIFDFLTLLSAKGESSDEIAGGVFVLRNKSKRVNVENCVDTCGTGGDGMNTLNISTASALLLSSMGVKVAKHGNKAVSSKCGSGDVLEALNIKINLEPNDIENQINDHNFGFMFAPNYHSAMRFVGPTRKKIGKRTIFNMIGPLSSPALVKRQVIGVFDKKLLKIFADALKNLDIKFAWIVNSEDGLDEISPYAKTNIIQLKDGVISEIIIDPNKLNINADKFENLIGNDATFNADRIINIFKGEDNDFSKAVCLNAAAGLVVNETHQNFDKAYDDARKHILSGQTFNQLEKIQNG

SEQ ID NO: 118335 - protein, 331 aa, Unknown
  Bacterial polypetide isolated from the Sargasso Sea
MKQFIDKIGAKQDLTFLESKEAFKKLMEGKANDQEIFDFLTLLSEKGESSDEIAGGVYILREKSKRVNVDNCIDTCGTGGDGMNTLNISTASALLLASMDIKVAKHGNKAVSSKCGSGDVLEALNININLEPNEIEQQIYKNNFGFMFAPNYHSAMKFVGPTRKKIGKRTIFNMIGPLSSPALVKKQVIGVFDKKLLKIFANALKSLNIKFAWIVNSDDGLDEISPYAKTKVMQLKNNEITEIIIDPKKFKVNADKFDNLVGQDAKFNAEKMLNIFKGEDNDFSKAVCLNAAAGLVVSEKYENFELAYNYARGFIKTGAPYKHLLKIQNVQ

SEQ ID NO: 118336 - protein, 160 aa, Unknown
  Bacterial polypetide isolated from the Sargasso Sea
MNEHIKPLIEAAASGPLSHDEAVNAFEILFEGSATLAQIGGLLMAMRTRGESVTEYAAAASVMRSKCIKVKAPNNSIDIVGTGGDGVGTLNISTATAFVVAGAGVTVAKHGNKNLSSKSGAADALSASGVNVMVGKEIVEKAIAEVGIGFMMAPMHHPAI

SEQ ID NO: 118337 - protein, 279 aa, Unknown
  Bacterial polypetide isolated from the Sargasso Sea
MYSFKEIISSLNNKNDLSKDEAFFISESMFKGTLSDSEIKNVLVALNTKGICTDEIVGFAKAMRKISTKVVTDEKVIDCCGTGGDGINTFNISTCSAFISAASGVKVAKHGNKAITSNSGSADVLHDAGAKLDLSPEKVSQCINEVNFGFMFAPLHHQAMKNVAASRKEIAPNKTIFNMLGPITNPANAQIQLIGVFGKSAMHLVADSLMELGTSRAIILNSRDGMDEASIYAETDIIEIKDDVKTQYTINPKDYGISGKNIDSIKTSNERSSLDFMLS

SEQ ID NO: 118338 - protein, 292 aa, Unknown
  Bacterial polypetide isolated from the Sargasso Sea
MGSNLTESEMSKVMLDLLEGKTTDAQIGAFLIALNMKGESVEEVLGGAKIMRQLSAKVEVKTDNLVDTCGTGGSGIGIFNVSTTAAFLACACGARVAKHGNRSATRNSGSADLLEAAGVSLELSPSQVSHCIESVGLGFMFAPSHHSAMKHVIGPRKEIAHKSIFNILGPLTNPASTPNQVMGVYEEKWMQPVAEVHLSLGSKNVMVVHSEDNLDEISISSKTKVAELREGKISRYVISPEDFGLELQSLDELKVNSPEESLSMAKKALKGEHTAASSMVALNAGAALYVSG

SEQ ID NO: 118339 - protein, 273 aa, Unknown
  Bacterial polypetide isolated from the Sargasso Sea
MIESIKKVVKKENLNENEAFEIMLELMKGNLDDVQIAALLVGLRSKGETVDEITGFAKAMRHTMIELDLNFPAIDMCGTGGDYSGTFNISTASSIVVAGAGIKVAKHGNRSMTSKSGSADVLEALNVDINKSNENCIRSLEKNNICFMFAPNFHPAVKNAMNVRSKLKIKTVFNILGPLCNPANVKNQAMGVFEPSLTKIQTQVLKNLGSKNVMVFNGDDGLDELTTTCDSNISYFLNDSKIINLKFDPKSIGISLSKHEDLQGGTSDINAKI

SEQ ID NO: 118340 - protein, 270 aa, Unknown
  Bacterial polypetide isolated from the Sargasso Sea
MREKSLKINSPQNTIDTCGTGGDMKDTLNISTSAAIVAASAGVTIAKHGNRSVSSKSGSADMLEKIGYKITNNVEDLENSLSNKNFCFLFAQNHHSAMKNVINVRKNLATRTIFNLLGPLTNPAKAGKQLLGVYSKNLVSMHCNCLKELGSEKAMVVHGLDGLDEISLSDNTLINELKDNKILEYSFDPRDYGYDLIKLEDIKGGDPEYNANCFNKMINGDYREFQMIVEINAGAAIYLSNLRNNLKDSFELAKKTIEGRNYKKFCKLTN

SEQ ID NO: 118341 - protein, 264 aa, Unknown
  Bacterial polypetide isolated from the Sargasso Sea
SSELIDIVGTGGDGSHSFNISTGAALLSAACGLKVAKHGNRSVSSKSGSADLLEFLGYRFPMDADGVKAQIKKNGFSFLFAPNFHPAMKHIAPIRQALKARTVFNILGPLTNPANPSFYLLGAFSSEMASLMASSLSGMDMNRAFVIHGLNGWDEPTPASNFELFDVREGSISHTIIDPSEYGIKKCKEEDLKGGTSEVNAEALLKVFEGKDKSAHEDALILNAGLALQVSGEAKELRDGIEIAKETIKSGKAEDFLSSLRNNE

SEQ ID NO: 118342 - protein, 225 aa, Unknown
  Bacterial polypetide isolated from the Sargasso Sea
MDKFLDKLRNKQNLSFEESINAFQILMDGKANDDEIFKFLTYLSEKGEVSDEIAGGVAVLRDKATKVNVQNCIDTCGTGGDGKDTLNISTASALLLASMEVKVAKHGNKAVSSKCGSADVLEALKVNINLDSKGVENQINKNHFGFMFAPNYHSAMKYVGPTRKKIGKRTIFNLIGPLSSPAKVERQVVGVFDRNLLKIFSSALKNLNIKFAWVVNSEDGLNEIS

SEQ ID NO: 118343 - protein, 272 aa, Unknown
  Bacterial polypetide isolated from the Sargasso Sea
MIQDFINQLERKEDLDFHSMQSAIESIMTGEVDDLSIEAFLLALNEKGIQETEITAAARVMKEKSLTYPLGDGDHIDTCGTGGSGLHTFNCSTASSFVAAAGGAAVTKHGNKAVSSKSGSADLLLAAGADIAHDRAKLENIFKRVGFVFLFAPLHHESMKYVMPARQKIGKKTLFNLLGPHTNPCGAKRQILGVYQKDLVRTFASVAKNLSMEHVLIVHGFDGLDEISITDSTYVAELKDNTISEYEISPKDYGLSLGTLPEISATSPDDSC

SEQ ID NO: 118344 - protein, 271 aa, Unknown
  Bacterial polypetide isolated from the Sargasso Sea
MTKEILDKLCNFNDLSEKEVNFFFSELMSGNLSEGISAAILVALKIKKPSKEEIFYASNYLLNSLDLNSTRNNNYIDLCGTGGDGKSSINVSTISSLILSSLDVKVAKHGNRSVSSNVGSADLFEALNVSFDKDYKDALVNIKNKNLTFLFAPNFHSSMKNVAKIRKDIATRTIFNVLGPLINPLKPSHQLLGVYDSQLLEPIAETLMLQGLNSAMVVHSFDGMDEISISDKTHVIELRNDKISKYVFNPTDYGFTIGNSDKLVIKNVEES

SEQ ID NO: 118345 - protein, 220 aa, Unknown
  Bacterial polypetide isolated from the Sargasso Sea
MDVKDFKNYIFLITEKQILTYEEAKSCFKFIMSGKATDILISSFLTSLKINLMINGFSSEIIAAGADIMRDKAISVKTPENAIDVVGTGGDGHNTFNISTATAFVVAGADVPVAKHGNYSATSKSGAANVLESLGVNINNSVENIQDCINECGICFFFAPKHHSAMKFVMNVRKELGFRTIFNLLGPLSNPGFVKKQIVGVYSKELLIPFVKALKKLGST

SEQ ID NO: 118346 - protein, 241 aa, Unknown
  Bacterial polypetide isolated from the Sargasso Sea
AAGGYVAKHGNRGVSSKSGSADLIEKAGINLDMKPEEVARCVEQIGVGFMFAPAHHGAMKHAIGPRRELGCRTIFNILGPMTNPAGVTRQLIGVFTRELCRPMAEVMQRLGAEHIMVVCSKDGLDEISLATVTHVAELKDGEITEYDLTPEDLGIKSQSLVGLTVDGADESLALIKAAFGRSHDETTEKARDMIALNAGAAIYVAGLAKTTKEGVDMALDAMGSGLAAGKMSELADFSQCF

SEQ ID NO: 118347 - protein, 241 aa, Unknown
  Bacterial polypetide isolated from the Sargasso Sea
MDQFLEKLRNKINLNFDESKDAFKILMNGDASEQQIYDFLTLLSEKGEVSDEIAGGVYILRDKSKRVKVENCIDTCGTGGDGKDTLNISTASALLLASMGVKVAKHGNKAVSSKCGSADVLEALNININLEPKQIEEQIKNYNFGFMFAPNYHLAMKYVGPTRKKIGKRTIFNMIGPLSSPALVERQVIGVFDNKLLKIFANALKNLNLKFAWIVNSEDGLDEISPYAKTNIVQLKNNEIS

SEQ ID NO: 118348 - protein, 201 aa, Unknown
  Bacterial polypetide isolated from the Sargasso Sea
MQIQTALAKIVESNNLSREESAQVFNLIMTGETTDAQIGAFLAAMRVKGETAEELAGAAETMRNLSSKVPLNSTEKLVDTCGTGGSGLKLFNISTAAAFVASASGALVAKHGNRKMTSFCGSADVLEAAGIKLELTPEQIADCINQIGIGFMFAPVHHSAMRYAGPVRQELSIRTMMNILGPMTNPAQAKRQVIGVFAREW

SEQ ID NO: 118349 - protein, 287 aa, Unknown
  Bacterial polypetide isolated from the Sargasso Sea
VDDIAAAANVMRQKAQTIKAPDIAMDIVGTGGDGFGTYNISTACAFVVAGCGIPVAKHGNKAVSSKSGAADVLSSLGIKLDCDMSLVERALVEANITFLMAPRHHAAMRHVGPTRAALGVRTIFNLLGPLSNPALVKRIMVGVFDQSYCASFAHVLAQLGATHAWVVHGADGLDEVSTTGKTHVAALHNGTVTEFTISPDDIGLRTASLDQLRGGDGDHNARYLRALLEGETGPYHDVVLFNAAAALVAGGHAEDLQEAAIQAQEALDSGKALAALDNLIAITNDKA

SEQ ID NO: 118350 - protein, 248 aa, Unknown
  Bacterial polypetide isolated from the Sargasso Sea
ISKIVSNQDLRKQEMSSVMFEILEGKATDSQIGAFLIALSMKGETVEEVIGAVEVMRELSEKVKTDLTHLVDTCGTGGSGIGIFNVSTASAFVASQCGAKVAKHGNRSATRSSGSADLLEQAGVPLTLKPSEVADCIKNIGLGFMFAPAHHSAMKHVVGPRKEIAQKSIFNVLGPLTNPASAKRQVMGVYDKKWMKPITNVLKELGSEHTMIVHSKDGLDEISIASPTLVIEMKDGDISEYTINPRRL

SEQ ID NO: 118351 - protein, 256 aa, Unknown
  Bacterial polypetide isolated from the Sargasso Sea
DTCGTGGDMSGTLNISTSAAIVAASAGAKIAKHGNRSISSKSGSADMLEKLGYRISNNVKYLEASLKKNNFCFMFAQFHHSAMKYVINVRKMLGTRTIFNLLGPLTNPANSKYQILGVFDKKWVKIHCEVLRDLGSQHALVVHGEDGLDEISLSAKTKIAELRNGRIKEYTFNPNEYGYDLINLKDIQGKDAGYNARQFIKMLDGKHKKFQHIVELNAGAALYVGGKTKNLKDGFSLSKYVIENSITKQYLNKIIS

SEQ ID NO: 118352 - protein, 199 aa, Unknown
  Bacterial polypetide isolated from the Sargasso Sea
MSNIKEKLKKGQNLSFEESKILFSELMEGKHDESSIIDILENLLAKGETKEELAGGIYVLREKANKVNTDENTIDTCGTGGDGQNSLNISTAAAIVLASMGVRVAKHGNKAVSSNCGSADVLQALKIKINLSPKEVEENIKKLNFAFMFAPNYHSAMKHVGPARKKMGKKTIFNLIGPLSSPAQVKRQVIGVFDKKWMK

SEQ ID NO: 118353 - protein, 143 aa, Unknown
  Bacterial polypetide isolated from the Sargasso Sea
MDHFLEKLRNKINLNFDESKNAFKILMNGEGSDQQIYDFLTLLSDKGEVSDEIAGGVYILRDKSKRVKVENCIDTCGTGGDGKDTLNISTASALLLASMGVKVAKHGNKAVSSKCGSADVLEALNININLEPNQIEEQIKNDN

SEQ ID NO: 118354 - protein, 219 aa, Unknown
  Bacterial polypetide isolated from the Sargasso Sea
MKEYLLKINENNDLSFDEMKSAIQMVMTGQIDQSEIELFLLGLNKKGISEDEITAAASVMKEKSLNFDIGDGSHIDTCGTGGTGIHTFNCSTASSFVAAAGGAKITKHGNKAISSKSGSADFLIEVGADINHDREKLITIFNQIGFVFLFAPLHHQAMKHVMPARQKIAQKTIFNLLGPHTNPCNAKRQVIGVYDMSLLKTFAQVSKNLDMEHVLIVHG

SEQ ID NO: 118355 - protein, 255 aa, Unknown
  Bacterial polypetide isolated from the Sargasso Sea
MDQTLILNKILEHQNLNIEESMYIFNKIMSGELDDIKITSILIGLKLKGETKEEIIGAAKVMREKSLKINSPQNTIDTCGTGGDMKDTLNISTSAAIVAASAGVTIAKHGNRSVSSKSGSADMLERIGYKITNNVEDLENSLSNKNFCFLFAQNHHSAMKNVINVRKNLATRTIFNLLGPLTNPAKASKQLLGVYSRDLVSMHCNCLKELGSEKAMVVHGFDGLDEISLSGNTLINELKDNKVLEYSFDPRDYGY

SEQ ID NO: 118356 - protein, 175 aa, Unknown
  Bacterial polypetide isolated from the Sargasso Sea
MSNSVKKLKTGQNLSFDESKFLFTELMEGKYDENSVIEILEAFIKKGETKDEIAGGIFVLRNKANKVIADEDTVDTCGTGGDGQNSLNISTAAAIVLASMGIKVAKHGNKAVSSNCGSADVLEALKININLNPKEAENNIKKFNFAFMFAPNYHSAMKHVGPARKKMGKKTIFNL

SEQ ID NO: 118357 - protein, 249 aa, Unknown
  Bacterial polypetide isolated from the Sargasso Sea
MKDTLNISTSAAIVAASAGVKIAKHGNRSVSSKSGSADMLEKIGYKISNDINELEKSLNNNNFCFLFAQNHHSAMKNVINVRKNLGTRTIFNLLGPLTNPANAKKQLLGVYSKDLVNIHCNCLKELGTEKALVVYGLDGLDEITLSDKTYVNELKDNKIIEFIFDPKEHGYDLINIEDIKGGDPEYNAKCFNKMIAGNYKQFQEIVEVNAGMAIYLSGIVSNLGEGFSLAKKVIEEGITKNFVNLLINE

SEQ ID NO: 118358 - protein, 269 aa, Unknown
  Bacterial polypetide isolated from the Sargasso Sea
MSNFQNILDNLKKGQDLSSDEAFIISEKMFEGSLADDQIKDILLLLNKKNICSNELIGFARAMRKISTKVEIKDKVIDSCGTGGDGLNTFNISTCSSFIAAACGVKVAKHGNKAITSSSGSADLLHDAGAKIDLAPEHVSKCIEHINFGFMFAPLHHQAMKNVANTRKSIAPDKTIFNILGPITNPANAKIQLIGVYNNEVMHLIANALLELGTLRALIINSRDGMDEASIYTKTDVLEIKNNSIISYSIDPKDFGIRGNSIEEIKNEL

SEQ ID NO: 118359 - protein, 134 aa, Unknown
  Bacterial polypetide isolated from the Sargasso Sea
MNNLLEKLINKIDLTEKEAYNMMISIMSGDYDDIQISGMLTALRCKGETVKEITGFARAMRKKMVSVKLNVPAIDMCGTGGDSKGTFNISTAATFVVAGSGVNVAKHGNRSMTSKSGSADVLQALGISINRDIN

SEQ ID NO: 118360 - protein, 266 aa, Unknown
  Bacterial polypetide isolated from the Sargasso Sea
PEDAIDVVGTGGDGAGTLNISTATALVVAGTGVPVAKHGNHAASSKSGAADVLSELGINLQADVPTVERAIREAGIGFLLAPSYHSSMRHVGPTRVEMGVRTIFNILGPLANPASVKRLLVGTFAHEWVEPMAQVLGNLGTERAWVVHGADGLDELTITGPSYVAELSNGKVTKRELSPSDAGLPTASLNDIKGGAPAENAQALRELLDGRKGAYRNITLYGASAALLIAGKVDTLIDGAALAAAAIDDGKAANALAKLVEITNAS

SEQ ID NO: 118361 - protein, 248 aa, Unknown
  Bacterial polypetide isolated from the Sargasso Sea
MEGKHDDNAIIDILESFLKKGETKDELAGGIYVLRDKATKVRANQETIDTCGTGGDGQNSLNISTAAAIVLASMGVKVAKHGNKAVSSNCGSADVLEALKININLKPNEAEECIKKYNFAFMFAPNYHSAMKHVGPARKKMGKKTIFNLIGPLSSPAQVKRQVVGVFDRKWMKPFAEALKENNVIHALIVHSDDGMDEISPFAKTNVIELKDGNIKNFSIDPKTLGISEGDKKNIKGKNAEYNSEMIV

SEQ ID NO: 118362 - protein, 311 aa, Unknown
  Bacterial polypetide isolated from the Sargasso Sea
RSTPSRSECSFFVNQVFSGGVDKDVVTKILRLFNDVGFNAVQLSGFAESMRKASKKVICKKDVVDNCGTGGDAMHTFNISTTASLIASCCEVSVAKHGNKSITSNSGSADLLSGVGININLSPEAVSKCIEKLNFGFMFAPLHHSSMRYVADSRKEIAPEKTIFNLLGPLTNPAGAKKQLIGVYDPKYMNIIAETLSNLGTERARIVHSHDGLDEISLFDQTSITSLSNNNIKSYDFEPSDYFDISTSKIDDIRVSSIDESVDMFRSVINNEPGPARDISILNSAFLLSIAYDDISISEGIKLCRNALKRS

SEQ ID NO: 118363 - protein, 150 aa, Unknown
  Bacterial polypetide isolated from the Sargasso Sea
MLNAGPLLEQIMLRESLSQTEAYSLFNSIMHGEQSEVMIASVLTALKMKKESPSEIAGAASAMVANALPFPTPSYEFADIVGTGGDGHNTINISSAAGVVAASCGVKVAKHGNRSVSSKSGSADLFRQFGLNLEISPETSRKCLDEANFT

SEQ ID NO: 118364 - protein, 322 aa, Unknown
  Bacterial polypetide isolated from the Sargasso Sea
KILEHKNLNMEESMYIFNKIMSGELDDIKITSILIGLKLKGETKEEIIGAAKVMREKSLKINSPENTIDTCGTGGDMKDTLNISTSAAIVAASAGVTIAKHGNRSVSSKSGSADMLEKIGYKITNNVEDLENSLSNKNFCFLFAQNHHSAMKNVINVRKNLATSTIFNLLGPLTNPAKASKQLLGVYSRDLVSMHCNCLKELGSEKAMVVHGLDGLDEISLSDNTLINELKDNKVLEYSFDPRDYGYDLIKLEDIKGGDPEYNANCFNKMINGDYREFQMIVEINAGAAIYLSNLRNNLKDSFELAKKTIEEGITKNFVNSL

SEQ ID NO: 118365 - protein, 245 aa, Unknown
  Bacterial polypetide isolated from the Sargasso Sea
MDEIIKRLKNKQNLSFEESKSVFESIMSGKVKEEQIHDFLTSSSAKGETSDEIAGGVYVLRNKATQVNVPDNTVDTCGTGGDGKNTLNISTGAALLLSSFGTKVAKHGNKSVSSKCGSADVLEKLNININLGAKQVETSINKNNFGFMFAPGYHSAMKYVGPIRKRIGKRTIFNLIGPLSSPAKVKRQVVGVFDKRLLKVFAEALKNLNLKKALIVNSQDGLDEISPYANTDIAMLSDGKVKESV

SEQ ID NO: 118366 - protein, 158 aa, Unknown
  Bacterial polypetide isolated from the Sargasso Sea
MDIKEAISTVVSGKSLSIGDASAVMNTIMDGEATPSQLGAFLTGLHLKGETPPEIAGMANVMREKALNVHVSEDVADTCGTGGDGKNTFNISTAAAFVAASCGIPVAKHGNRAASGSCGSADVLEALGVKIDLEPEAVAKCITEVGMGFMFAPVFHPF

SEQ ID NO: 118367 - protein, 283 aa, Unknown
  Bacterial polypetide isolated from the Sargasso Sea
ETAEEIAGGVYVLRNKAEQVNVPDITIDTCGTGGDGKSTLNISTASALLLSSFGIKVAKHGNKSVSSKCGSADVLEKLNININLGPKEVETSIKNYNFGFMFAPGYHSAMKYVGPVRKKIGKRTIFNLIGPLSSPAKVKRQVVGVFDKKLLKIFAEALKNLGLKKALIVNSQDGLDEISPFANTNIVELSEGKIKESILNPKDLGISAASFDNIVGKDSGFNADKMKEIFQGKDNDFSIAVCLNAAAGLLVAEKSTSFKESYDNLRKHILSGKVIHHVTKLVK

SEQ ID NO: 118368 - protein, 199 aa, Unknown
  Bacterial polypetide isolated from the Sargasso Sea
MKKAAEGIQSLLNKVAAGQTLSEHEAENAFDIIMSGDATPAQIGGFLMALRVRGETVDEITGAARIMRSKALMINAPEDAIDIVGTGGDASGTLNISTGAAIVVAGCGVPIAKHGNRALSSRAGAADVLTSLGVNIDCEMTLIEKSIREAKIGFMMAPRHHSATRHVAGPRVELATRTLFNILGPLSNPAGVKSLLVGV

SEQ ID NO: 118369 - protein, 282 aa, Unknown
  Bacterial polypetide isolated from the Sargasso Sea
TAAAIVMKEKSLKFDIGDGSHIDTCGTGGTGLHTFNCSTASSFVAAAAGAKITKHGNKAISSKSGSADFLAQSGANINHEREKLISIFDKVGFVFLFAPLHHEAMKFVMPVRQKIAEKTIFNLLGPHTNPCSAKKQVLGVYDEQLVKMFSNVAKNLDMKHVMIVHGDDGLDEISICSETIVSELKDNNISEYKISPKDYGLNLSSFDQITANSSDESLLLVNSAFNGESSAVQDMIALNSGAALYVASVVNSISDGVEMAFDCMNNGQAAQKLADYVRVSNE

SEQ ID NO: 118370 - protein, 297 aa, Unknown
  Bacterial polypetide isolated from the Sargasso Sea
SRLLMNRWLNDEISDVQTGAFLSALRAKGCTGDELYSMAEELLNVCELPVSRPDLYMVDTCGTGGDGANTFNISTAVAFVSSSCGVKIAKHGNKSASGKVGSADVLMNLGLNLNCSSEKVISAVNEVGITFLFAPIWHKSLIKLAPLRKDLGIRTVFNQLGPLVNPLRPNAQVLGVASESLLEPMGSALLKLGMNRAIVVHGSGGLDEASLQGENKLIFVEKGKLRFSKINISDFEYENISNEKLVVSDRDTNEEILKSVLNGSGQQSHINVVALNAALVLWVAGIEDDLHEGFKKA

SEQ ID NO: 118371 - protein, 311 aa, Unknown
  Bacterial polypetide isolated from the Sargasso Sea
KNAFRFLMNGEASDQQIYDFLTLLSDKGEVSDEIAGGVYILRDKSKRVKVEDCIDTCGTGGDGKDTLNISTASALLLASMGVKVAKHGNKAVSSKCGSADVLEALNININLEPKQIEEQIKNNNFGFMFAQNYHSAMKYVGPTRKKIGKRTIFNMIGPLSSPALVERQVIGVFDNKLLKIFANALKNLNLKFAWIVNSEDGLDEISPYAKTNIVQLKNNEISEFIIDPDELNINADKFENLIGDDAKFNSYKILNIFEGEDNDFSKAVCLNAAAGLMISEKYNDFKIAYNYTRGFIKSGAAFKYIKSLQNV

SEQ ID NO: 118372 - protein, 276 aa, Unknown
  Bacterial polypetide isolated from the Sargasso Sea
GFATAMRNASQKVITTNDVVDNCGTGGDGLQTFNVSTTASLIASSCGVCVAKHGNKAVTSKSGSADLLEFAGVNLEITPEQVSACLSELSFGFMFAPLHHSSMRFVASSRKEISPQKTIFNLLGPLTNPAGAKRQLIGVYSKKFMRPMAETLINLGTSRAMIVHSFDGLDEISIFDKTYVLEVDDGNIKEYVIDPENYFSSKYKLSDIVVNDVESSLSMTKEVFKEKNIPAKNIAIINAAAIIYISGIVSTLDEGIKISEESISSGKVTNKLDDLI

SEQ ID NO: 118373 - protein, 217 aa, Unknown
  Bacterial polypetide isolated from the Sargasso Sea
MKDFINKINNKEDLTLNEMQEAINLIMSGMSDDEDIESFLIGLNEKGVSETEVTAAAIVMKEKSLKFDIGDGSHIDTCGTGGTGLHTFNCSTASSFVAAAAGAKITKHGNKAISSKSGSADFLAESGANINHEREKLISIFDKVGFVFLFAPLHHEAMKFVMPVRQKIAEKTIFNLLGPHTNPCSAKKQVLGVYDEKLVKMFSNVAKNLDMKHVMIV

SEQ ID NO: 118374 - protein, 266 aa, Unknown
  Bacterial polypetide isolated from the Sargasso Sea
AFDQILLQKIEEKKIIEFLTSLSKKNESVDEILGAIKSIKKKANIIKGFKSSFDTCGTGGDGSKTFNISTTSAIVIASTGVRVAKHGNKAVSSLTGSADVLSELGININLDKTKIIDCLNKINLCFLFAPNFHPILKNVADIRKKIGKRTIFNILGPLLSPVECKKQIMGVYDVNILSKVAEVLKKLGTEHAWVVSGNKEFDELTTTGKNYVVEIKNNTIKELEIDSTSFGLEKSKKEDLIGGDSKKNAEIIKGILKGELSGPKKI

SEQ ID NO: 118375 - protein, 222 aa, Unknown
  Bacterial polypetide isolated from the Sargasso Sea
TDAQIGAFLMGMRMKSETIDEIVGAASVMRELAAPVVIDAERLVDTCGTGGDGMNIFNVSTAAAFVVAAAGGKVAKHGNRAVSGKSGSADLLEAAGVYLGLKPEQVARCVESVGVGFMFAPSHHGAMKHAIGPRRELGLRTLFNMLGPMTNPAGAKHQVIGVFSQALCRPMAEVLQRLGSEHVLVVHAQDGLDEISLAAPTFIAELRNGTVSEYRIQPEDFG

SEQ ID NO: 118376 - protein, 274 aa, Unknown
  Bacterial polypetide isolated from the Sargasso Sea
GIFVLREKATKVRADQNTIDTCGTGGDGQNSLNISTAAAIVLASMGVKVAKHGNKAVSSNCGSADVLEALKININLKPNEAEESIKNFNFAFMFAPNYHSAMKHVGPARKKMGKKTIFNLIGPLSSPAQVKRQVIGVFDKKWMKPFAEALKDNGVVHAFIVHSEDGMDEISPFAKTSVVELKDSVIKEFIIDPKILGIDSANKENLKGKNAEYNSEKIIEIFKGKINEFSQSVALNVAAGLIVSGKESDFKISYEKAVKHLSSGQVFKHLVKIQ

SEQ ID NO: 118377 - protein, 277 aa, Unknown
  Bacterial polypetide isolated from the Sargasso Sea
IYDFLTLLSDKGEVSDEIAGGVYILRDKSKRVKVANCIDTCGTGGDGKDTLNISTASALLLASMGVKVAKHGNKAVSSKCGSADVLEALNININLEPKQIEEQIKNKNFGFMFAPNYHSTMKYVGPTRKKIGKRTIFNMIGPLSSPALVERQVIGVFDNKLLKIFANALKNLNLKFAWILNSEDGLDEISPYAKTNIVQLKNNEISEFIIDPNELNINADKFENLIGDDAKFNSDKILNIFQGEDNDFSKAVCLNAAAGLMISEKYDNFKIAYNYTR

SEQ ID NO: 118378 - protein, 150 aa, Unknown
  Bacterial polypetide isolated from the Sargasso Sea
MTKIIEKLKIGENLSFDQSKVLFTDLMEGKHSEDLIIEILESFIKKGETKDELAGGIFVLRNKANKVKTDPNTIDTCGTGGDGQNSLNISTAAAIVLASMGVKVAKHGNKAVSSNCGSADVLEALNIDINLKPEEAENSINKFNFAFMFA

SEQ ID NO: 118379 - protein, 298 aa, Unknown
  Bacterial polypetide isolated from the Sargasso Sea
MEGKHNEREIIEILDAFLKKGETKDELAGGIYILREKASKVKTDENTIDTCGTGGDGKNSLNISTAAAIVLSSMGVKVAKHGNKAVSSNCGSADVLEALKIKIDLNPEEAEESIKKFNFAFMFAPNYHAAMKHVGPARKKMKKKTIFNLIGPLSSPAQVKRQVIGVFNKKWMKPFAEALRENNVVHAYIVHSDDGMDEISPFDKTNVVELKEGIIKEFTIDPKNLGLNSTNRENLKGKNAVYNSEKIIEIYKGKNNEFSQSVALNVAAGLIVSGKENNFKTAFENASKHLNSGKVFQH

SEQ ID NO: 118380 - protein, 265 aa, Unknown
  Bacterial polypetide isolated from the Sargasso Sea
DIVGTGGDGIGTYNISTATAFVVAGAGVPVAKHGNKAVSSKSGAADVLSSLGIRVDCEMALVRRALVEAGICFLMAPRHHSAMRHVAPVRAELGVRTIFNMLGPLANPALVRRIMVGVFDPDLCVPFARALSSLGTTHAWVVHGADGLDEVSTTGPTRVAALAGGNIEEFTISPDDLGLASVSIDALRGGTPEENAASLRDVLNGAEGAYRDVVIFNAAAALVGGGHAANLGDGAERATASIASGRAMTALESLVAITNSEAESA

SEQ ID NO: 118381 - protein, 263 aa, Unknown
  Bacterial polypetide isolated from the Sargasso Sea
AKSSTGVELSSMAEELLNVCELPVARPNLYLVDTCGTGGDGANTFNISTAVAFVAASCGVKIAKHGNKSASGKVGSADVLLNLGLNLNCPLERVIKAVSEIGITFLYAPVWHKSLIKLAPLRKTLGIRTVFNQLGPLVNPLRPNAQVLGVASEDLLKPMGSALLKMGMNRAIVVHGYGGLDEASLQGENKLVFVNNGELRFSEINISDFNHENISNEKLVVSDPESNEKILKSVLNGSGQKSHIDVVALNSALVLWAAGIEDN

SEQ ID NO: 118382 - protein, 277 aa, Unknown
  Bacterial polypetide isolated from the Sargasso Sea
AGGVYILRDKSKRVKVEDCIDTCGTGGDGKDTLNISTASALLLASMGVKVAKHGNKAVSSKCGSADVLEALNININLEPNQIEEQIKNINFGFMFAPNYHSAMKYVGPTRKKIGKRTIFNMIGPLSSPALVERQVIGVFDNKLLKIFANALKNLSLKFAWIVNSEDGLDEISPYAKTNVVQLKNNEISEFIIDPNELNVNAEKFENLVGDDAKFNSDKILNIFQGEDNDFSKAVCLNAAAGLMISEKYDDFKIAYNYTRNFIKSGAAFKYIKNLQNV

SEQ ID NO: 118383 - protein, 122 aa, Unknown
  Bacterial polypetide isolated from the Sargasso Sea
MKIIIEQLLNQQDLTQKEAKDIMRQIMSGEYDNSQISGFLVAMRAKGEKSFEIAGFAEAMREKMTTISISNDAIDMCGTGGDASGTFNVSTAASFVVAGAGVKVAKHGNRSMTSKSGSADVL

SEQ ID NO: 118384 - protein, 263 aa, Unknown
  Bacterial polypetide isolated from the Sargasso Sea
MSNSLENLKKGQDLSLEESKTLFGELMEGKYNEKVIIEILEALIKKGETKNELAGGIYVLRKKASKVRVDTNSIDTCGTGGDGQNSLNISTAAAIVLASMGVKVAKHGNKAVSSNCGSADVLEALKININLNPKEAEESIKKLNFAFMFAPNYHSAMKYVGPARKKMGKKTIFNLIGPLSSPAQVKRQVVGVFDKKWMRPFAEALKDNNVIHAYIVNSDDGMDEISPFAKTNVVELKDGNIKEFSINPNELGVTSGNKENLKG

SEQ ID NO: 118385 - protein, 161 aa, Unknown
  Bacterial polypetide isolated from the Sargasso Sea
MDEILKKLQSKQSLSFEESKQAFENMMSGRLKDNQIHDFLTFSSAKGETSSEIAGGVYVLRDKATKVNVPDDTVDTCGTGGDGKNTLNISTAAALLLSSFGVKVAKHGNKSVSSKCGSADVLEKLGISISLGAKEVEESIKNYNFGFMFAPGYHSAMKFVG

SEQ ID NO: 118386 - protein, 194 aa, Unknown
  Bacterial polypetide isolated from the Sargasso Sea
MDQFLEKLRNKINLNFDESKDAFKILMNGDASDQQIYDFLTLLSDKGEVSDEIAGGVYILRDKSKRVKVENCIDTCGTGGDGKDTLNISTASALLLASMGVKVAKHGNKAVSSKCGSADVLEALNININLEPKQIEEQIKNNNFGFMFAPNYHSAMKYVGPTRKKIGKRTIFNMIGPLSSPALVERQVIGVFDN

SEQ ID NO: 118387 - protein, 303 aa, Unknown
  Bacterial polypetide isolated from the Sargasso Sea
MIELLKKLMGREDLTFQEASELIQWVMSEDAVAVQASALLVLLQAKGINDEEMAGAAYAMRGRVSKINAPEDVIDTCSTGGNGISTFNISTCAAIIAAAAGAKVAKHGNRSNTRKSGSAEALEALGVNINLGIEEVERCLVEIDLCFCYAVNHHPAMRYAGPIRRELGVPTVFNLLGPLTNPAGAKNQLIGVPTPQLTGMMTKVLNRLESRRILAVHGEDGLCELTVTAPTLVSELRDGTIREYTITAEEMGLRPGKLDDIRTDSAEESAQMILAILSGEDQGTPRDMALINSSGALVVAGLA

SEQ ID NO: 118388 - protein, 214 aa, Unknown
  Bacterial polypetide isolated from the Sargasso Sea
MDQFLEKLRNKINLNFDESKNAFKILMNGEASDQQIYDFLTLLSDKGEVSDEIAGGVYILRDKSKRVKVENCIDTCGTGGDGKDTLNISTASALLLASMGVRVAKHGNKAVSSKCGSADVLEALKININLEPKQIEEQIKNYNFGFMFAPNYHSAMKYVGPTRKKIGKRTIFNMIGPLSSPALVERQVIGVFDNKLLKIFANALKNLNLKFAWI

SEQ ID NO: 118389 - protein, 186 aa, Unknown
  Bacterial polypetide isolated from the Sargasso Sea
MSNIKEKLKKGQNLSFEESKILFSELMEGKHNESSIIDILENLLAKGETKDELAGGIYVLREKASKVNTDENTIDTCGTGGDGQNSLNISTAAAIVLASMDVRVAKHGNKAVSSNCGSADVLEALKININLNPKEAEESIQKFNFAFMFAPNYHSAMKHVGPARKKMGKKTIFNLIGPLSSPAGVK

SEQ ID NO: 118390 - protein, 272 aa, Unknown
  Bacterial polypetide isolated from the Sargasso Sea
MSNFVENLKKGQSLSFEESKVLFNGLMEGKYNENSIIQILESLTKKGESKDELAGGIFVLREKSTKVKADQNTIDTCGTGGDGKNSLNISTAAALVLASMNVKVAKHGNKAVSSNCGSADVLEALKININLKPDEAEESIKKFNFAFMFAPNYHSAMKHVGPARKKMGKKTIFNLIGPLSNPALVKRQVIGVFDKKWMKPFAEALSENGVIHAFIVHSEDGMDEISPFAKTNVVELKNKTIKEFIIDPQTLGINSTNTENLKGKNAEYNSKK

SEQ ID NO: 118391 - protein, 326 aa, Unknown
  Bacterial polypetide isolated from the Sargasso Sea
MDIQAAIAQAIEGKDLTRTDMVSVMDAIMSGEAADAQIGGFLVALRIKGETIDEIRGAAEVMREKSTKIKTTHSVIVDTCGTGGDHSSTFNISTTAAFVAAGAGLCVAKHGNRSVTSQSGSADVLAVLGVNTEASPEVVGQCLDDVGIGFLFAVALHGAMKHAIGPRRELATRTVFNALGPLTNPAGATRQVVGVYSPNLTEMLANVLSGLGSEHAFVVHGSDGLDEVTTTGPTRVSEFKTDSVSTYEISPGDFGLDTAAPEDLKGGEPAENAEILKGVLSGEKGPRRDIVLINSALALVAGGKAESLEEGVALAAKTIDSGAATE

SEQ ID NO: 118392 - protein, 234 aa, Unknown
  Bacterial polypetide isolated from the Sargasso Sea
MIELLKKLMGREDLTFQEASELIQWVMSEDAVAVQASALLVLLQAKGITDEEMAGAAYAMRGRVSKIKAPQDVIDTCSTGGNGISTFNISTCAAIIAAAAGAKVAKHGNRSNTRKSGSAEALEALGVNINLGIEEVERCLVEIDLCFCYAVNHHPAMRYAGPIRRELGVPTVFNLLGPLTNPAGAKNQLIGVPTPQLTGKMTKVLNRLESRRILAVHGEDGLCELTVTAPTLVS

SEQ ID NO: 118393 - protein, 219 aa, Unknown
  Bacterial polypetide isolated from the Sargasso Sea
MSDISTKLKQGQNLSFKDSKSLFSDLMEGKHTESQIIEILEALIKKGETKDELAGGIFVLRDKATKVSCDPSTIDTCGTGGDGQNSLNISTAAAIVLASMGVKVAKHGNKAVSSNCGSADVLEALKININLKPNEAEDSIKNFNFAFMFAPNYHSAMKHVGSARKKMGKKTIFNLIGPLSSPAQVKRQVIGVFDKKWMMPFAEALKENNVVHAYIVHSD

SEQ ID NO: 118394 - protein, 170 aa, Unknown
  Bacterial polypetide isolated from the Sargasso Sea
MLNAGPLLEQIMLRESLSQTEAYSLFNSIMHGEQSEVMIASVLTALKMKKESPSEIAGAASAMVANALPFPTPTYEFADIVGTGGDGHNTINISSAAGVVAAACGVKVAKHGNRSVSSKSGSADLFRQFGLKLEISPETSRKCLDEANFTFLFAPVYHAGMRHAAPVRAA

SEQ ID NO: 118395 - protein, 152 aa, Unknown
  Bacterial polypetide isolated from the Sargasso Sea
MNQTLILKKIFEKKNLSIEESTYIFSKIMNGELDDIIITSILIGLKLKGETKEEIIGAAKVMREKSLKINSPQNTIDTCGTGGDMKDTLNISTSAAIVAASAGVTVAKHGNRSVSSKSGSADMLEKIGYKISNNVQELENSLSNQHFFSICS

SEQ ID NO: 118396 - protein, 215 aa, Unknown
  Bacterial polypetide isolated from the Sargasso Sea
MIEKAIGKLVENIHLTSDEAESVMDQIMNGDATEAQIGAYLVALRMLGESPDEIIGSVRSMRSKSTKIKSRHSEIVDVVGTGGDGTHTFNISTTSALVVSATGQPVAKHGNRSVSSSSGAADVLKELGVNIDISSEKVGRCLDEVGIAFLFAPLLHGAMKHAIGPRRELSMRSIFNVMGPLTNPANADTLLVGVYSEMLTELIADVLSKIRCKRA

SEQ ID NO: 118397 - protein, 261 aa, Unknown
  Bacterial polypetide isolated from the Sargasso Sea
IDIVGTGGDGSGTLNISTGAALVTAGCGITIAKHGNRALSSRSGAADVLGALGVNIDCEMTKIEKSIRKAKIGFMMAPRHHSATRHVAGPRVELATRTIFNILGPLSNPAGVNRLLVGVFAREWVEPMAKVLGNLGAERAWVVHGSDGLDELTTTGNSYVSALENGKITNFQVSPSDAGIPIANPEDLKGGDAKDNAAAMMGMLEGKLSAFRNIVIYTAGAALIVAGKAQNLKDGAEIAANAIDGGHAKRALEKLIIITNE

SEQ ID NO: 118398 - protein, 267 aa, Unknown
  Bacterial polypetide isolated from the Sargasso Sea
MKSVMMGKITDIQLSGVLIALRIKKENSDEVTGFARAMREKMIKIDLDYEAIDMCGTGGDYHGTFNISTAACFVTAGAGVKIAKHGNKAISSSSGSANVLESLGININKSVAASKSDIKNHNLGFMFAPSYHPAMKYAMNVRNDLKLKTVFNILGPLCNPASVKSQAMGTFDKNLTEIQAKVLKNLGSKNVMTFCSDEGLDELTTTGKTKVTQFMNGGELKNFEFEPENIGLKRSNIKDLKGGTPDENAKIIIEILQGAEGPKTDIV

SEQ ID NO: 118399 - protein, 280 aa, Unknown
  Bacterial polypetide isolated from the Sargasso Sea
SEIAGGVYVLRDKANKVNVPDDTVDTCGTGGDGKNTLNISTAAALLLSSFGVKVAKHGNKSVSSKCGSADVLEKLGISISLSAKEVEESINNYNFGFMFAPGYHSAMKFVGPVRKKIGKRTIFNLIGPLSSPAQVKRQVVGVFDKKLLKIFAEALKNLKLKKALIVNSEDGLDEISPYAKTNVVELEDESIKEFILDPKEMGINANNFNNIVGKEPDYNAEKIKEVFQGKDNDFSIAICLNAAAGLIVSDKIKSFKEGYDQLRKHILSGKVENHLSKLVK

SEQ ID NO: 118400 - protein, 254 aa, Unknown
  Bacterial polypetide isolated from the Sargasso Sea
MDKILEKLKSKTNLNFEESKFAFEEIMSGKVNEDDIYKFLTYSSAKGETSDEVAGGVFVLRDKASKVSVPDDTIDTCGTGGDGKNTLNISTAAAILLSSFGVKVAKHGNKSVSSKCGSADVLEKLKININLGPKEVETSIKNNNFGFMFAPGYHSAMKYVGPIRKKIGKRTIFNLIGPLSSPAKVKRQVVGVFDKKLIKIFAVALKNLNLKKAFIVNSEDGLDEISPYANTNVAELSEGSIKEYVLNPNDLNIK

SEQ ID NO: 118401 - protein, 293 aa, Unknown
  Bacterial polypetide isolated from the Sargasso Sea
QKLLVSEALSFEESREMILWIMSEDAVSVQAAALLALLQAKGVTVEEMAGAALAMRKRASGIKAPENAIDTCSTGGNGISTFNISTCAAIIAAGAGAVVAKHGNRSNTRKSGSAEVLEALGVNINLDLDEVEKCLRDLDICFCYAINHHPAMRFAGPIRKDLGVPTVFNLLGPLTNPAGAKSQLIGVPNVELTSKIAQVLKRLGSERVLVVHGLDGLCELTVTSPTHVAELREGNIKEYEITPEKLGLKTGKLEEITIDTPEESARIMERIFSGDEKGTAREIALANAAGALV

SEQ ID NO: 118402 - protein, 268 aa, Unknown
  Bacterial polypetide isolated from the Sargasso Sea
KASKVKTDENTIDTCGTGGDGQNTLNISTASAIVLASMGVKVAKHGNKAVSSNCGSADVLEALNVNINLKPNEVEESIKKFNFAFMFAPNYHSAMKHVGPARKKIGKKTIFNLIGPLSNPAQVKRQVVGVFDKKWMIPFAEALNENGVIHAYIVHGDDGMDEISPFAKTKVVELKNGMIKEFIIDPKILGINSFNKENLKGKNAEYNSEKIIEIYKGKINEFSHSVALNAAAGLIVSGKENDYKVSYQKAKEYLNSGKVFEYLNKIQS

SEQ ID NO: 118403 - protein, 181 aa, Unknown
  Bacterial polypetide isolated from the Sargasso Sea
MEQERILIKIFNKENLNIEESAFIFNKIMSGELDDIKITSILIGLKLKGETEEEIIGAAKVMRDKSLKIVSPPNTIDTCGTGGDMKDTLNISTSAALVAASAGIKIAKHGNRSVSSKSGSADMIEHLGLKITDDLKKLEQSLIEKNFCFLFAQNHHTAMKNVINVRKNLGTRTIFNLLGPL

SEQ ID NO: 118404 - protein, 228 aa, Unknown
  Bacterial polypetide isolated from the Sargasso Sea
HGNKAISSKSGSADFLAQSGANINHEREKLISIFDKVGFVFLFAPLHHEAMKFVMPVRQKIAEKTIFNLLGPHTNPCSAKRQVLGVYDEKLVKMFSNVAKNLDMKHVMIVHGDDGLDEISICSETIVSELKDNKISEYKISPKDYGLKVSSFDQIAANSSDESLLLVNSAFNGESSAVQDMIALNSGAALYIANVVDSISDGIEMAFDCMNNGQAAQKLADYVRVSNE

SEQ ID NO: 118405 - protein, 245 aa, Unknown
  Bacterial polypetide isolated from the Sargasso Sea
MKDFINKINNKEDLTLNEMQEAINLIMSGLSDDDDIESFLIGLNEKGVSETEVTAAAIVMKEKSLKFDIGDGSHIDTCGTGGTGLHTFNCSTASSFVAAAAGAKITKHGNKAISSKSGSADFLAQSGANINHEREKLISIFDKVGFVFLFAPLHHEAMKFVMPVRQKIAEKTIFNLLGPHTNPCSAKRQVLGVYDKKLVKMFSNVAKNLDMKHVMIIHGDDGLDEISICSETIVSELKDNKISEY

SEQ ID NO: 118406 - protein, 204 aa, Unknown
  Bacterial polypetide isolated from the Sargasso Sea
MKVLLDKIINGSDLNVEESFNIMNDLMSGKLDDIQISALLIALRCKGESVSEILGFAKSMRQKMMKMPLQKDALDICGTGGDSLGTFNISTATCFVISGAGVPVAKHGNRSMTSKSGSADVLQSLGVNINKTVEESRNDIDKFGLGFMFAPQYHPAMKYAVNARSTLGIRTIFNLLGPLCNPAKVKYQAMGIFNSDFLEKQIKV

SEQ ID NO: 118407 - protein, 195 aa, Unknown
  Bacterial polypetide isolated from the Sargasso Sea
MTDEMKSLIYAASEGPLSTAQAKLAFDILFEGKATPSQVGGLLMAMRARGESVSEYSAAAEAMRSRCISVNAPPGSIDIVGTGGDGIGTLNISTASAFVVAGAGVNVAKHGNKNLSSKSGAADALTSLGINVMVDASVVESEIQHAGIGFMMAPMHHPATKHVMPIRQELGCKTIFNILGPLTNPAGVKRQLSGA

SEQ ID NO: 118408 - protein, 147 aa, Unknown
  Bacterial polypetide isolated from the Sargasso Sea
MDEIIKKLKNKQNLNFEESKSAFENMMSGKVSEDQIHDFLIYSSTKGETSDEIAGGVYILRDKAAKVNSPDGTIDTCGTGGDGKNTLNISTAAALLLSSFGVKVAKHGNKSVSSKCGSADVLEKLNISISLSPKEVEASINNNNFGF

SEQ ID NO: 118409 - protein, 196 aa, Unknown
  Bacterial polypetide isolated from the Sargasso Sea
METKKILEAINLASSNEDLDFELAKLSMNEIMSGEVTPSQFGAFIMAMKMKGETPIEIAGLATAMREKSLKIELDEPLLDTCGTGGDGLKTFNISTAVAFVVAGAGIKVAKHGNRAISGSSGSADALEELGVKITLTPYSVKKCIQEIGIGFIFAQSFHPAMKFASPLRKEIGIPTIFNILGPLTNPAGASNQLIG

SEQ ID NO: 118410 - protein, 246 aa, Unknown
  Bacterial polypetide isolated from the Sargasso Sea
MNDILKKLKNKKNLTFEESKTAFSDIMSGEVNEEIIYDFLTFSSAKGETSDEIAGGVYVLRDKAAIVNVPDDTVDTCGTGGDGKNTLNISTGAALLLSSFGVKVAKHGNKSVSSKCGSADVLEKLGISISLGAKEVEESIKNYNFGFMFAPSYHSAMKFVGPVRKKIGKRTIFNLIGPLSSPAKVKRQVVGVFDKKLLKIFAEALKNLKLKKALIVNSEDGLDEISPYVKTNIVELEGENIKEYIL

SEQ ID NO: 118411 - protein, 255 aa, Unknown
  Bacterial polypetide isolated from the Sargasso Sea
MSNFVESLKRGQNLSFEESKALFNKLMEGKYNENLIIEILESLIKKGETKDELAGGIFVLREKATKVKVELDTIDTCGTGGDGQNSLNISTAAAIVLASMGVKVAKHGNKAVSSNCGSADVLEALKININLKPNEAEESIKKFNFAFMFAPNYHSAMKHVGPARKKMGKKTIFNLIGPLSSPAQVKRQVVGVFDKKWMKPFAEALKENGVIHAFIVHSEDGMDEISPFVKTYVVELKDSIIEEFIIDPKILGIDT

SEQ ID NO: 118412 - protein, 235 aa, Unknown
  Bacterial polypetide isolated from the Sargasso Sea
ACGLKVAKHGNRSVSSKSGSADLLEFLGYRFPTDADGVKAQISMNGFSFLFAPNFHPAMKHIAPIRKALKIRTVFNILGPLTNPAKPSFYLLGAFSSEMASLMASSLSGMEMSRAFVVHGLNGWDEPTPASKFELFDVSKDSISHKIIDPSELGMDKCKEEDLKGGTSEVNAKALLKVFDGKDNGAHEDALVLNAALSLQVAGKAADLIEGIEIARQTILSGKAKELLSGLTNGD

SEQ ID NO: 118413 - protein, 249 aa, Unknown
  Bacterial polypetide isolated from the Sargasso Sea
MLDTLNISTAASLVAASCGVKIAKHGNKSVSSKSGSADMLEHIGYKITDQIEELETQLNENNFCFMFAQYHHTAMKYVINVRRSLGTRTIFNLLGPLLNPANAKNQLLGVYDKKWLNTHCETLKDLGSQNVLVVHGCDGLDEITLTDNTFICELKNNSINRYTFDPREIGYEYILLQDIKGGDPKYNSDCFLKMINGDNKKFQSIVEINAGATLYLAGMAKSIKEGSQIVAKAINEGKTKSFITKIING

SEQ ID NO: 118414 - protein, 167 aa, Unknown
  Bacterial polypetide isolated from the Sargasso Sea
MDQNLIINQIFNGEDLTIEDSTFLFNKIMSGELDDIKITAILIGLKLKGEKIDEIIGAAKVMKEKSIKINSPDNTIDTCGTGGDMKNTLNISTSAAIVAASAGVKIAKHGNRSVSSKSGSADMLESIGYKISSDVNELEKSLNDNNFCFLFAQNHHNAMKNVANVRK

SEQ ID NO: 118415 - protein, 190 aa, Unknown
  Bacterial polypetide isolated from the Sargasso Sea
MEIKSFKNKLFSQQDLTSDESMHLFELIMTGKLTEIDIAAILTSLKIKGETKDEILGATKIMRSKSLKISSSVNTVDTCGTGGDMSDTLNISTASSLVAASCGIKIAKHGNKSVSSKSGSADMLENLGYKFSDDPQIIEDQLSRNNFCFMFAQYHHSAMKYVINVRKALGTRTIFNLLGPINKSSKCHKS

SEQ ID NO: 118416 - protein, 139 aa, Unknown
  Bacterial polypetide isolated from the Sargasso Sea
MNHDLKDFLAQLLNGQDLTEDQSEELMTALAEGSVEPALAGALLVSLRMKGESAEEVRGFANGMRKAAKGVVLENSSELIDIVGTGGDGSQSFNISTGAALLSAACGLKVAKHGNRSISSKSGSADLLEFLGYRFPMDA

SEQ ID NO: 118417 - protein, 159 aa, Unknown
  Bacterial polypetide isolated from the Sargasso Sea
MNNEFKKYIKLALFDDLDLESTKTAFSMIMSGEIGEIQISSFISLIQKSGVKAHHVIGALDVMKSKMVSIKAPIRAMDTCGTGGDGKNSLNISTATAFVLAAKGIAVAKHGNRALTSQCGSADVLKALNVNVEMETAKIEDCLIKNSICFMFAPNHHQQ

SEQ ID NO: 118418 - protein, 227 aa, Unknown
  Bacterial polypetide isolated from the Sargasso Sea
MSETLKPLITRLCNGELISFEEMQTAFSILMSGEATVAQITSFMIALKMRGETASDIAAGASQMRANAISIKAPNNSIDIVGTGGDGANSLNISTAAAIIVAGCGVPVAKHGNKAVSSKSGAADILSELGINLECDFTQIERAIAQAKIGFLMAPRHHPTLRFVGPTRVELGIRTIFNLLGPLSNPAFVDKALIGVYDTKWGRPFAEALKLLGTEHAFIVHGDGGLD

SEQ ID NO: 118419 - protein, 244 aa, Unknown
  Bacterial polypetide isolated from the Sargasso Sea
MDQTLILNKILEQQNLNIEESMYIFNKIMSGELDDIKITSILIGLKFKGETKEEIIGAAKVMREKSLKINSPENTIDTCGTGGDMKDTLNISTSAAIVAASAGVTIAKHGNRSVSSKSGSADMLEKIGYKITNNVEDLENSLSNKNFCFLFAQNHHSAMKNVINVRKNLATRTIFNLLGPLTNPAKASKQLLGVYSRDLVSMHCNCLKELGSEKAMVVHGLDGLDEISLSDNTLINELKDNKVL

SEQ ID NO: 118420 - protein, 168 aa, Unknown
  Bacterial polypetide isolated from the Sargasso Sea
MDHFFEKLRNKINLNFDESKNAFKILMNGEASDQQIYDFLTLLSDKGEVSDEIAGGVYILRDKSKRVKVENCIDTCGTGGDGKDTLNISTASALLLASMGVKVAKHGNKAVSSKCGSADVLEALNININLEPNQIEEQIKNYNFGFMFAPNYHSAMRYVGPTRKKIGK

SEQ ID NO: 118421 - protein, 309 aa, Unknown
  Bacterial polypetide isolated from the Sargasso Sea
LVMNQILTGSVSEDQIKTFLFSLSSKGESIEEVIGSAEVMRSLSTKVSVKTKYLVDTCGTGGVGSGIFNVSTTAAFVASSCGAKVAKHGNRSATRKSGSADLLEVAGVSLDLNPEQVKDCIENVGLGFMFAPAHHSAMKYAIGPRKELGIKTIFNLLGPLTNPAGALNQVLGVFDYKWVRPLAEVLKGLGSENVLVLHSEDGLDEFSSATSTYVAELRNGEIKEYSISPDDFELKILPIENLTADSPEESLQIAKEALRGKNQAAAQMVAMTSGAALYVAGLASTLKEGIDMSLQSISEKRGIEKLEEL

SEQ ID NO: 118422 - protein, 210 aa, Unknown
  Bacterial polypetide isolated from the Sargasso Sea
MNEILKKLKNKKNLTFEESKTAFSDIMSGKVNEKIIYDFLTLSSAKGETSNEIAGGVYILRDKATKVNVPDDTVDTCGTGGDGKNTLNISTAAALLLSSFGVKVAKHGNKSVSSKCGSADVLEKLGISISLGAKEVEESVKNYNFGFMFAPGYHSAMKFVGPVRKKIGKRTIFNLIGPLSSPAKVKRQVVGVFDKKLLKIFAEALKNLKL

SEQ ID NO: 118423 - protein, 309 aa, Unknown
  Bacterial polypetide isolated from the Sargasso Sea
ISYKNAELVFENIMDGKLSEIEISSFLTSLKVRGESIDELTAAASIMREKSLKVLNGEDSVDIVGTGGDGMNTLNISTASSLTVASTGMRVAKHGNRKISSLAGASDTLEILGINTLMEPKIAQKSLEQFNFCFMLAPLYHPAMKNVMPVRQELGFRTVFNILGPLTNPASVKYQLIGVYKKSLAIKMIEVLRNLNTKRAWVVHGSDGTDEISITGETFVIELDEGNIKEFKISPKDAELKSGNFSEILGGSPKFNAQKIEQLVNGDKSSFFYSVIFNSAAALAISEKVKIFKMELGWPLKRYFLEKQR

SEQ ID NO: 118424 - protein, 277 aa, Unknown
  Bacterial polypetide isolated from the Sargasso Sea
AGGVYILREKATPVKVSDDAIDTCGTGGDGKNTLNISTAAALLLSSFGVRVAKHGNKSVSSKCGSADVLEKLNININLGPKEVEANINKNNFGFMFAPGYHAAMKYVGPVRKKIGKRTIFNLIGPLSSPAKVKRQVVGVFDQKLLMIFAQALKNLNIKKALIVNSQDGLDEISPYANTNVIELNEGKIKEFVLNPKDLNINAGKLENIIGKEPEYNAQKIKEIFQGKDNDFSIAVCLNAAAGLLVSEKLNNFKEGYEKLREHILSGKVMPHIIKLQI

SEQ ID NO: 118425 - protein, 305 aa, Unknown
  Bacterial polypetide isolated from the Sargasso Sea
MSSNLSNVEILKILLEGRNLDDITSRSLMQRWLNDEISDVETGAFLSALRVKGCTGIELSSMAEEILKVCELPLARPNLYMVDTCGTGGDGANTFNISTAVAFVAASCGVNIAKHGNKSASGKVGSADVLLNLGLNLNCSLEKVISSVNEIGITFLFAPVWHKSLIKLAPLRKTLGIRTVFNQLGPLVNPLRPNAQVLGVATEDLLEPMGSALLKMGMDRVIIVHGSGGLDEASLQGENKLVFVEKGKLRFSKINISDFNHDNISNEKLVVSESDSNEEILMSVLNGTGQKSHKDVVALNAALVL

SEQ ID NO: 118426 - protein, 228 aa, Unknown
  Bacterial polypetide isolated from the Sargasso Sea
MKDFINKINNKEDLTLNEMQEAINLIMSGMSYDDDIESFLIGLNEKGVSETEVTAAAIVMKEKSLKFDIGDGSHIDTCGTGGTGLHTFNCSTASSFVAAAAGAKITKHGNKAISSKSGSADFLVQSGANINHEREKLISIFDKVGFVFLFAPLHHEAMKFVMPVRQKIAEKTIFNLLGPHTNPCSAKKQVIGVYDKKLVKMFSNVAKNLDMKHVMIVHGDDGLDEISI

SEQ ID NO: 118427 - protein, 33 aa, Unknown
  Bacterial polypetide isolated from the Sargasso Sea
AGVTIAKHGNRSVSSKSGSADMLEKIGYKIQVT

SEQ ID NO: 118428 - protein, 189 aa, Unknown
  Bacterial polypetide isolated from the Sargasso Sea
MDIKDFKNYIFLITEKQILNYEEAKSCFEFIMSGNASDILISSFLTSLKINLMVNGFSPEIIAAGADIMREKALKIDLPNDAIDIVGTGGDGHNTLNISTASAFVVAGTEITVAKHGNYAASSKSGSADVLESLGININNNIENINECFEECGICFFIAPKHHSAMKYVMNVRKELGFRTIFNLLGPSQ

SEQ ID NO: 118429 - protein, 294 aa, Unknown
  Bacterial polypetide isolated from the Sargasso Sea
LSMKGETVKEVIGAVEVMRELSAKVKTDLTHLVDTCGTGGSGIGIFNVSTASAFVASQCGAKVAKHGNRSATRSSGSADLLEQAGVPLTLKPSEVADCIKNIGLGFMFAPAHHSAMKHVVGPRKEIAQKSIFNVLGPLTNPASAKRQVMGVYDKKWMRPITNVLKELGSEHTMIIHSEDGLDEISIASPTFVIEMNDGDISEYTINPEDFNFKTSTLDGLQVNSPEESLNLIKLALVDKHQEASSMISMAAGAALYVSEVSSSLEAGIILANECVKDGGGIEKLNQLVEYSSKF

SEQ ID NO: 118430 - protein, 134 aa, Unknown
  Bacterial polypetide isolated from the Sargasso Sea
MNEIIEKLRKRQDLSFEQSKSAFENIMTGKAKEEEIYDFLIASSSKGETAEEIAGGVYVLRDKATKVNVTDDAIDTCGTGGDGKNTLNISTAAALLLSSFGVKVAKHGNKSVSSKCGSADVLEKLSIKYKSWSK

SEQ ID NO: 118431 - protein, 198 aa, Unknown
  Bacterial polypetide isolated from the Sargasso Sea
MKDFINKINNKEDLTLNEMQEAINLIMSGMSDDEDIESFLIGLNRKGVSETEVTAAAIVMKEKSLKFDIGDGSHIDTCGTGGTGLHTFNCSTASSFVAAAGGAKITKHGNKAISSKSGSADFLTQSGANINHEREKLISIFDKVGFVFLFAPLHHEAMKFVMPVRQKIAEKTIFNLLGPHTNPCSAKRQVLGVYDKKL

SEQ ID NO: 118432 - protein, 144 aa, Unknown
  Bacterial polypetide isolated from the Sargasso Sea
MIEIIEKLKKGQNLSFEESKTLFNELMEGKYNENSVIEILEFLIKKGETKDELAGGIFVLRKKATKVRTDESTIDTCGTGGDGKNSLNISTAAAIVLASMGVKVAKHGNKAVSSNCGSADVLEALRININLKPNEAEESIKKLN

SEQ ID NO: 118433 - protein, 309 aa, Unknown
  Bacterial polypetide isolated from the Sargasso Sea
MTFQEASELIQWVMSEDAVAVQASALLVLLQAKGITDEEMAGAAYAMRGRVSKINAPQDVIDTCSTGGNGISTFNISTCAAIIAAAAGAKVAKHGNRSNTRKSGSAEALEALGVNINLGIEEVERCLVEIDLCFCYAVNHHPAMRYAGPIRRELGVPTVFNLLGPLTNPARAKNQLIGVPTPQLTGKMTKVLNRLESRRILAVHGEDGLCELTVTAPSLVSELRDGTIREYTITAEEMGLRPGKLDDIRTDSAEESAQMILAILSGEDQGTPRDMALINTSGALVVAGLADDLKQGVSLASEAVDSGRA

SEQ ID NO: 118434 - protein, 252 aa, Unknown
  Bacterial polypetide isolated from the Sargasso Sea
MNKTEEIIKDIKKGKNLSFEESKSIFLNIMSGNISDDLIFEFLTSLSLKGETADEIAGGVYVLREKALKVNSKENIIDTCGTGGDGKNTLNISTASSLLLASMGIKVAKHGNKALSSKCGSADVLERLKININLQPDGVVKSIEENNFGFMFAPNYHRAMKYVASIRKKIGKRTIFNLLGPLSSPANVKRQVVGVFEKRWLHPFAEALKNLNSERAWIVHSEDGMDEISPFEITNIVELKENKITELMIDPK

SEQ ID NO: 118435 - protein, 299 aa, Unknown
  Bacterial polypetide isolated from the Sargasso Sea
DIKITSILICLKLKGETKEEIIGAAKVMREKSLKINSPQNTIDTCGTGGDMKDTLNISTSAAIVAASAGVTIAKHGNRSVSSKSGSADMLEKIGYKITNNVEDLENSLSNKNFCFLFAQNHHSAMKNVINVRKNLATRTIFNLLGPLTNPAKASKQLLGVYSRDLVSMHCNCLKELGSEKAMVVHGLDGLDEISLSDNTLINELKDNKVLEYSFDPRDYGYDLIKLEDIKGGDPEYNANCFYKMINGDYREFQMIVEINAGAAIYLSNLRNNLKESFDLAKKIIEEGVTKNFVNSLINE

SEQ ID NO: 118436 - protein, 218 aa, Unknown
  Bacterial polypetide isolated from the Sargasso Sea
MIQDFINQLEKKEDLDFHSMKHAIESIMTGKVDDHSIEAFLLALNAKGIQETEITAAARVMKEKSLTISLGDGDHIDTCGTGGSGLHIFNCSTASSFVAAAGGAAVTKHGNKAVSSKSGSADLLLAAGADIAHDREKLETIFRRVGFIFLFAPLHHKSMKYVMPARQKIGKKTLFNLLGPHTNPCGAKRQILGVYQKDLVRAFASVAKNLSMEHALIV

SEQ ID NO: 118437 - protein, 80 aa, Unknown
  Bacterial polypetide isolated from the Sargasso Sea
EFATKVDVPAEVSDHFVDIVGTGGDGANTFNISTASMFVAAAAGARIAKHGGRGVSSKSGSADVLEALGVNIMLTPEQVA

SEQ ID NO: 118438 - protein, 245 aa, Unknown
  Bacterial polypetide isolated from the Sargasso Sea
LNISTAAAIVLASMGVKVAKHGNKAVSSNCGSADVLEALKININLKPDEAEQSIRELNFAFMFAPNYHSAMKHVGPARKKIGKKTIFNLIGPLSNPAQVKRQVVGVFHKKWMKPFAEALKQNKVLHAYVVHSDDGFDEISPFAKTNVVELKDNNLNEFIIDPKELGINSVNKNNLKGKNALYNSQKIIEIYKGNFNEFSQAVALNVAAGLIVSGKEDNFKNAYEKTTIHLKSGKVFQHLNKLQLT

SEQ ID NO: 118439 - protein, 275 aa, Unknown
  Bacterial polypetide isolated from the Sargasso Sea
LTTDETSFIFDLIMTGKISEIEMSAILISLKIKSETKEEILGATLCMREKSLKINTEEDTVDTCGTGGDMSGTLNISTSAAIVAASAGIKVAKHGNRSISSKSGSADMLEKLSYKILDNPSEIEKSLKKNNFCFLFAQYHHSAMKHVGNVRKLIGTRTIFNLLGPLTNPASAKKQLLGVYDKKWVKIHCEVLKQLGSKHALVVHGNDGLDEISLSGVTHISELKDEKIIQYIFDPKDYNYKYIKNSEIKGGDANYNAKKFIEMLDGKFKEFQHIV

SEQ ID NO: 118440 - protein, 127 aa, Unknown
  Bacterial polypetide isolated from the Sargasso Sea
MSDLIENLKKGHSLSFEESKILFNELMEGKYNESSIIEILESLLKKGETKDELAGGIFVLREKAIKVKTDEDTIDTCGTGGDGQNSLNISTAAAIVLASMGVKVAKHGNKAVSSNCGSADVLEALKI

SEQ ID NO: 118441 - protein, 243 aa, Unknown
  Bacterial polypetide isolated from the Sargasso Sea
MAKGFKPILARLVEGQPLTSEQAHAFFAACLRGEPTPAQVAAAVTALRIRGETVDEIAAFAGAMRDAALTLDHPYEVIDTCGTGGDGQHTYNISTAAALVLAGAGLKVAKHGNRAISSKSGSSDVLSILGVNLAASPAQQRRALDEAGICFLFAPAYHGAMRHVGPVRSEIGFRTVFNLLGPLSNPASAKRQVMGVYDPRLLEPLAEVLGRLGATRAWTVHGQGLDELATSGPTEVAEWKDGA

SEQ ID NO: 118442 - protein, 179 aa, Unknown
  Bacterial polypetide isolated from the Sargasso Sea
MSNFVKNLKKGQDLSFEESKALFNELMEGKYDENSIIEILESLLKKGETKDELAGGIFVLREKATKVESDQNTIDTCGTGGDGQNSLNISTAAAIVLASMGVKVAKHGNKAVSSNCGSADVLEALKININLKPNEAEESIKNFNFAFMFAPNYHSAMKHVGPARKKMGKKTIFNLIGPL

SEQ ID NO: 118443 - protein, 276 aa, Unknown
  Bacterial polypetide isolated from the Sargasso Sea
TKISAPDASIDIVGTGGDAFGTLNISTGAALVVAACGVPVAKHGNRALSSRSGAADVLTALGVNIECEMRLIEESIKHAGFGFMMAPRHHSATRHVAGPRVELATRTIFNVLGPLSNPAGVKRLLVGVFSEKWVEPLAHVLGKLGAEKAWVVHGSDGLDEMTLSGPTHVAEYENGLVNTFECSPADAGLREAPIKSIQGGDAAYNADALTALLNGEHGPYRDIVCYTSAGALVVAGVANQLSEGVEIAQRAIDQGHAKKTLQLLIEITNERSSTEI

SEQ ID NO: 118444 - protein, 290 aa, Unknown
  Bacterial polypetide isolated from the Sargasso Sea
NELIGFARAMRKISTKVEINDKVIDSCGTGGDGLNTFNISTCASFIAAACGVKVAKHGNKAITSSSGSADLLHDAGAKIDLAPEHVSKCIEHINFGFMFAPLHHQAMKNVANTRKSIAPDKTIFNMLGPITNPANAKIQLIGVYNNEVMHLIANALLELGTSRALIINSRDGMDEASIYTETDVLEIKNNSIDSYSIDPKDFDIRGNSIEEIKTNSERSSLDIIYTVINNIDSDARKISLLNAALLVMLFKNISLRDALSECNDALENYLVRDKFNQYIDFTNQVSKNVK

SEQ ID NO: 118445 - protein, 175 aa, Unknown
  Bacterial polypetide isolated from the Sargasso Sea
MNLPDAIRKVSRGEDLGREEMGQVMRIIMSGDATPAQIGAVLTALHIKGETVEELTGAATVMREFAASVSVQADQVADSVGTGGDGASLFNVSTASALVACAAGAVMAKHGNRAATGKSGSADVLEAAGVNITLSPEQVAKTIDAVGIGFMFAPTHHGATRHAVGPRREIGVRTL

SEQ ID NO: 118446 - protein, 169 aa, Unknown
  Bacterial polypetide isolated from the Sargasso Sea
MEKYLKKLELGENLTLQESIGAFEILMNGRANDNEIYNFLTLLSKKGEVSTEIAGGVSVLRNKAKKVNVDDCIDTCGTGGDGKDTLNISTASALLLSSMGINVAKHGNKAVSSKCGSADVLEALNININLKPKDIENQIKKNHFGFMFAPKLSKRNEICWPNQKKNGKR

SEQ ID NO: 118447 - protein, 177 aa, Unknown
  Bacterial polypetide isolated from the Sargasso Sea
MLHLMRLIMRGELSPVMSAAIITGLRVKKETIGEITAAATVMREFARHVEVQDNSNFVDIVGTGGDGSQTFNISTATMFVSAAAGAKVAKHGGRGVSSKSGSADVLEALGVNIDLQPDQVAASIAETGMGFMFAPNHHPAMKNIAPVRRELGVRTIFNILGPLTNPAGAPNQLMGVF

SEQ ID NO: 118448 - protein, 274 aa, Unknown
  Bacterial polypetide isolated from the Sargasso Sea
MNIKEALGRIVVQLDLTTEEMQAVMREIMTGQCTDAQIGAFLMGMRMKSETIDEIVGAASVMRELAAPVVIDAERLVDTCGTGGDGMNIFNVSTAAAFVVAAAGGKVAKHGNRAVSGKSGSADLLEAAGVYLGLKPEQVARCVESVGVGFMFAPSHHGAMKHAIGPRRELGLRTIFNMLGPMTNPAGAKHQVIGVFSQALCRPMAEVLQRLGSEHVLVVHAQDGLDEISLAAPTFIAELKDGKVSEYRIQPEDFAIKSQSLIGLTVDNAEQSLA

SEQ ID NO: 118449 - protein, 344 aa, Unknown
  Bacterial polypetide isolated from the Sargasso Sea
MFSNPSNSEILNNLLEGRDLDDLTSRSLMQRWLNDEISDVETGAFLSALRAKSSTGVELSSMAEELLNVCELPVSRPNLYLVDTCGTGGDGANTFNISTAVAFVSASCGVKIAKHGNKSASGKVGSADVLLNLGLNLDCSLEKVIKAVSQIGITFLFAPVWHKSLIKLAPLRKTLGIRTVFNQLGPLVNPLRPNAQVLGVASEEQLEPMGSALLKMGMNRAIVVHGSGGLDEASLQGENKLVFVDNGELRFSEINISDFNHGNISNEKLVVSDKESNDEILKSVLNGSGQKSHIDVVALNSALVLWVAGIEDDLNEGFNKALFSINQGDPWKKFLLLKNYLNAN

SEQ ID NO: 118450 - protein, 310 aa, Unknown
  Bacterial polypetide isolated from the Sargasso Sea
MFKGTLSDSEIKNVLVALNAKGICTDEVIGFAKAMRKISTKVVTDEKVVDCCGTGGDGINTFNISTCSAFISAASGVKVAKHGNKAITSNSGSADVLHDAGAKLDLSPEKVSQCINEVNFGFMFAPLHHKAMKNVAASRKEIAPNKTIFNMLGPITNPANAQIQLIGVFDKSAMHLVADSLMELGTSKAIILNSRDGMDEASIYAETDIIEIKDSIKTQYTINPKDYGITGKDFDSIKTSSEKSSLDFIFSVINNEESDAKEICVLNAALSVMLYKDIELNDSISQCRESLSEYKVRDKFNQYIDFTNQV

SEQ ID NO: 118451 - protein, 331 aa, Unknown
  Bacterial polypetide isolated from the Sargasso Sea
MTNLIDILKNGKNLSFDESKTLFNELMEGKYNDSAIIEILESLSKKGETKDELAGGIFVLREKATKVEADQNTIDTCGTGGDGQNSLNISTAAAIVLASLGVKVAKHGNKAVSSNCGSADVLEALKININLKPNEAEESIKKFNFAFMFAPNYHSAMKYVGPARKKMGKKTIFNLIGPLSSPAQIKRQVVGVFHKKWMKPFAEALKDNGVIHAYIVHSDDGMDEISPFAKTSVVELKDKKIKEFIIDPKTLGINCKDKESLKGKNAEYNSEKIIEIFKGKKNEFSQSVALNVAAGLIVSGKETDFKTAFEIATKHLNSGNVFQHLTKIQSF

SEQ ID NO: 118452 - protein, 338 aa, Unknown
  Bacterial polypetide isolated from the Sargasso Sea
MNIQEGISKVVSNQDLQKQEMSSVMFEILEGKATDAQIGAFLIALSMKGETVEEVIGAVEVMRELSAKVKTDLTHLVDTCGTGGSGIGIFNVSTASAFVASQCGAKVAKHGNRSATRSSGSADLLEQAGVPLALKPTEVADCIKNIGLGFMFAPAHHSAMKHVVGPRKEIAQKSIFNVLGPLTNPASAKRQVMGVYDKKWMKPITNVLKELGSEHTMIVHSKDGLDEISIASPTLVVEMKDGDISEYTINPEDFNFTTSSLNGLQVNSPEESLNLVKLGLADKHPEASSMISMAAGAALYVSEVSSSLEAGIRLANECVKDGGGIEKLNQLVEYSSKF

SEQ ID NO: 118453 - protein, 331 aa, Unknown
  Bacterial polypetide isolated from the Sargasso Sea
MTDIVEKLKKGENLSFEESKSLFTDLMEGKHQEDSIIEILESFTKKGETKDELAGGIFVLRDKANKVKTDPNTIDTCGTGGDGQNSLNISTAAAITLASMDVKVAKHGNKAVSSNCGSADVLEALKININLKPNEVENSIDKTNFAFMFAPNYHSAMKHVGPARKKMGKKTIFNLIGPLSSPAQVTRQVVGVFDKKWMKPFAEALRENNVVHAYIVHSEDGMDEISPFAKTNIVELKDANISEFTIDPKKFGINASNRNNLKGKNAAYNSLKIIEIFKGISNEFSHAVALNVAAGLIVSGKENDFEDSFKKASIHLKSGNVFQHLSKIRSI

SEQ ID NO: 118454 - protein, 285 aa, Unknown
  Bacterial polypetide isolated from the Sargasso Sea
MIELLKKLMGREDLTFQEASELIQWVMSEDAVAVQASALLVLLQAKGITDEEMAGAAYAMRGRVSKIKAPEDVIDTCSTGGNGISTFNISTCAAIIAAAAGAKVAKHGNRSNTRKSGSAEALEALGVNINLGIEEVESCLVEIDLCFCYAVNHHPAMRYAGPIRRELGVPTVFNLLGPLTNPAGAKNQLIGVPTPQLTGKMTKVLNRLESRRILAVHGEDGLCELTVTAPTLVSELRDGTIREYTITAEEMGLRSGKLADIRTDSAEESAQMILAILSGEDEGTP

SEQ ID NO: 118455 - protein, 340 aa, Unknown
  Bacterial polypetide isolated from the Sargasso Sea
MKELLQKLLASEALSFEEAREMILWIMSEEAVTVQAAALLALLQAKGVTVEEMAGAALAMRERASGIKAPANAIDTCSTGGNGISTFNISTCAAIIAAGAGAIVAKHGNRSNTRKSGSAEALEALGVKINLEVDEVERCLRDLNICFCYAINHHPAMRFAGPIRKDLGVPTVFNLLGPLTNPAGAKSQLIGVPNVELTLKIAQVLKRLGSERVMVVHGYDGLCELTVTSPTHVAELREGNINEYEITPEELGLKTGKLDEIGIDSPEESARIMKSIFSGDEKGTAREIALANAAGALVVAGQVENLKEGVVLAAKTVDNGKAAEKLNDLIKFSWENHQAS

SEQ ID NO: 118456 - protein, 305 aa, Unknown
  Bacterial polypetide isolated from the Sargasso Sea
MKGNLDDIQIAALLVGLRSKGETVDEITGFAKAMRQTMIELDLNFPAIDMCGTGGDYSGTFNISTASSIVVAGAGIKVAKHGNRSMTSKSGSADVLEALNVDINKSNENCIRSLEKNNICFMFAPNFHPAVKNAMNVRSKLKIKTVFNILGPLCNPANVKNQAMGVFEPSLTKIQAHVLKNLGSKNVMVFNGDDGLDELTTTCDSNISYFLNDSKIINLKFDPKSIGISLSKHKDLQGGTSDINAKIILDILNGKKGPNRDIVLLNAAAGIMVGGKATSLKEGYSLAEESVDSLSALKALKGIQK

SEQ ID NO: 118457 - protein, 335 aa, Unknown
  Bacterial polypetide isolated from the Sargasso Sea
MKDFINKINNKEDLTLNEMQEAINLLMSGMSDDDDIESFLIGLNEKGVSETEVTAAAIVMKEKSLKFDIGDGSHIDTCGTGGTGLHTFNCSTASSFVAAAAGAKITKHGNKAISSKSGSADFLAQSGANINHEREKLISIFDKVGFVFLFAPLHHEAMKFVMPVRQKIAEKTIFNLLGPHTNPCSAKKQVLGVYDEKLVKMFSNVAKNLDMKHVMIVHGDDGLDEISICAETTVSELKDNNISEYKISPKDYGLNLSSFDQIAANSSDESLLLVNSAFNGESSAVQDMIALNSGAALYVASVVNSISDGVEMAFDCMNNGQAAQKLADYVRVSNE

SEQ ID NO: 118458 - protein, 282 aa, Unknown
  Bacterial polypetide isolated from the Sargasso Sea
MTSTWPQLLELLLRGGELEGDQAAALMQAWLAEELEPVQTGAFLAALRCRSYRSVELAAMAKVLRSASPLPCARPALPLVDTCGTGGDGADSFNISTAVAFTAAACGVVVAKHGNRSASGKVGSADVLEGLGLQLQAPLQQVVGALEQAGITFLFAPGWHPALKSLAPLRRCLGVRTVFNLLGPLVNPLQPDAQVLGVATEDLVEPMAGALQLLGLKRAVVVHGHGGLDEASLSGINQLMVLENGQLRRDELDPQQLGLQLQPISAVAGGDLACNQEILKAV

SEQ ID NO: 118459 - protein, 336 aa, Unknown
  Bacterial polypetide isolated from the Sargasso Sea
MKEYLQKINNGQDLLLDEMKSAINQIMSGTVSDADIESFLTGLNNKGISENEITGAAVVMKQKSLKIDVNCKENIDTCGTGGTGIHTFNCSTASAFVAAAGGAKITKHGNKAISSKSGSADFLTQAGADIGHDREKLGFIFENVGFIFLFAPLHHEAMKYVMPVRQKISEKTIFNLLGPHTNPCNAKKQIIGVYDEKLLKTFCNVSKNLEMEHVMIVHGSDGLDEITITGRTSIVELKDNNINEFNISPKDFGLSLATLDDIYAKSSEDSLRLVEQAFAGEKSPVQDMIALNSGAALYISGVVDSIGDGVDQSFKLMNNGEAQAKLASYVEISNQL

SEQ ID NO: 118460 - protein, 343 aa, Unknown
  Bacterial polypetide isolated from the Sargasso Sea
MNNIEKIVDILESGQQPSRSECSFFVNKVFSGGVDKDVITKILRLFNNVGFDAPQLSGFAESMRKVSKKVICKKNIVDNCGTGGDAMHTFNISTTSSLIASCCEVSVAKHGNKSITSNSGSADLLSGVGIKINLSPEAVSNCIEKLNFGFMFAPLHHSSMRYVAESRKEIAPEKTIFNLLGPLTNPAGAKKQLIGVYDSKYMKVIAETLSDLGTERAKIVHSNDGLDEVSLFDLTSITSLKNHKIESYDFDPSDHFDISRSKIDDIRVSSIDESVNMFRGVVNNEPGPARDISILNSAFLLSIAYDDISISEGIKLCRKALDKSLVRDKLEELITLTQSYEDA

SEQ ID NO: 118461 - protein, 230 aa, Unknown
  Bacterial polypetide isolated from the Sargasso Sea
MIQEFIEQLENKEDLDFHSMQSAIELIMTGEVDDSFIERFLLALNEKGISEKEITAAANVMKDKSLTFDIGNGDHIDTCGTGGSGLHTFNCSTASAFVAAAGGASVTKHGNKAVSSKSGSADLLIAAGADIVHEREKLETIFNRVGFVFLFAPLHHQSMKYVMPARQKIGKKTLFNLLGPHTNPCGAKRQILGVYEKNLVKSFASVAKNLSMDHVLIVHGFDGLDEITIT

SEQ ID NO: 118462 - protein, 335 aa, Unknown
  Bacterial polypetide isolated from the Sargasso Sea
MKDFINKINNKEDLNLNEMQEAINLIMSGMSDDDDIESFLIGLNEKGVSETEVTAAATVMKEKSLKFDIGDGSHIDTCGTGGTGLNTFNCSTASSFVAAAGGAKITKHGNKAISSKSGSADFLVQSGANINHEREKLISIFDKVGFVFLFAPLHHEAMKFVMPVRQKIAEKTIFNLLGPHTNPCSAKRQVLGVYDEKLVKMFSNVAKNLDMKHVMIVHGDDGLDEISICSETIVSELKDNKISEYKISPKDYGLNVSSFDQIAANSSYESLLLVNSAFNGESSAVQDMIALNSGAALYIANVVDSISDGIEMAFDCMNNGQAAQKLADYVRVSNE

SEQ ID NO: 118463 - protein, 249 aa, Unknown
  Bacterial polypetide isolated from the Sargasso Sea
MKEVLEKINNQVNLSMIEMQDAMSQIMSGKVNDIDMESFLIGLNTKGISEEEITAAAMIMREKSLQIDIGDGSHIDTCGTGGTGLHTFNCSTASAFVAAAGGAKITKHGNKAISSKSGSADFLEEAGANINHDRSMLDNIFNEIGFIFLFAPLHHQAMKYVMPVRQKIAAKTIFNLLGPHTNPCNSKRQLLGVYDKNLLSTFSQVAKNLDMKHVLVVHGDDGLDEISVTSETSISELKDMQIKEYKISP

SEQ ID NO: 118464 - protein, 188 aa, Unknown
  Bacterial polypetide isolated from the Sargasso Sea
MEKIIEKLKNKENLSFEESKSSFEDIMSGKVKEQQIHDFLILSSKKGEVSDEIAAGVFVLRNKANHVNVSDDTIDTCGTGGDGKNTLNISTAAALLLSSFGVKVAKHGNKSVSSKCGSADVLEKLNININLGPKEVEKNINNNNFGFMFAPGYHSAMKYVGPVRKKIGKRTIFNLIGPLSSPAKVKRQ

SEQ ID NO: 118465 - protein, 326 aa, Unknown
  Bacterial polypetide isolated from the Sargasso Sea
MSFNLSNAEILNNLLEGRDLDALTSRSLMQRWLHGEISDVETGAFLSALRAKSCTGIELSSMAEELLNVCELPVARPNLYLVDTCGTGGDGANTFNISTAVAFVAASCGVKIAKHGNKSASGKVGSADVLLNLGLNLDCSLEKVIKAVSVIGITFLFAPVWHKSLIKLAPLRKTLGVRTVFNQLGPLVNPLRPNAQVLGVASEDLLKPMGSALLKMGMKRAIVVHGTGGLDEASLQGENKLVFLDNGELRFSEINISDFNHENISNEKLVVSDHESNEEILKSVLDGSGQKSHIDVVALNSALVLWAAGIEDDLNEGFNKALFSIN

SEQ ID NO: 118466 - protein, 304 aa, Unknown
  Bacterial polypetide isolated from the Sargasso Sea
PSQFGALMSALAMKEETSTELAGMASIMREYSLKIKSKENSIDVCGTGGSGLKWLNISTASAIIVSSLGIPVAKHGNRAMSGNSGSADVLEELGVKIQIDPQKVEDCLHEIDLAFIFAQSFHPSMKFAAPLRREIGIRTIFNFLGPLTNPAGVKKQIIGTPNSIVAKKIAEAAKILNSERIITISGESGADEIEIDNKTKFYDSKNEFKEEIINFTKGYDSKYLIVSSPKESAKKIVDSFNLKSVSSDEEKKSVLHSILINSSIALYLNESSSNLDECYQIAEENVYNGKALKKLNQLIEITNK

SEQ ID NO: 118467 - protein, 347 aa, Unknown
  Bacterial polypetide isolated from the Sargasso Sea
MNATSIQPLLDILFQGKALTREQTASLFSALIQGEMNEAVMAAMLMALKIRGETIAEISGAADAMRAAAKPFPYSESSRSQGIIDIVGTGGDGFNTINISTTAAFVAAAAGAKVAKHGNRSVSSKSGSSDLLAQFGIDLTMSPELAGRCLESLNLCFLFAPHYHGGVKHAVPVRQALKTRTLFNVLGPLINPARPEFMLLGVYSPELVTPIARVLQALGTQRAMVVHGSGLDEVALHGSTQVAELKDGEIIEYQLTPADFGVPQAHITELEGGEPAQNAQITQSILQGQGSDAHTHAVAINAGCALYLCGLSDSVKAGTALALNTIKSGKAFELLNQLAKVSSEAQE

SEQ ID NO: 118468 - protein, 336 aa, Unknown
  Bacterial polypetide isolated from the Sargasso Sea
MKNFIKTLNSNKHLNLEEMQEAINQIMTGMVVEEDIESFLLGLNKKGITEDEITAAAIVMKDKSLKFDIGDGSQIDTCGTGGTGLHTFNCSTASSFVAAAGGAKITKHGNKAISSKSGSADFLLESGADISHDRNKLKAIFEDVGFIFLFAPLHHQAMKYVMPARQKIAEKTIFNLLGPHTNPCGAKRQVLGVYDKNLVSTFSNVAKNLDMEHVLVVHGDDGLDEISICSETLVSELKEHKINQYKISPKDFGLNLASYDEIVANSSKESLGLVNEAFDGKNSAVQDMIALNSGAALYISNITNTINDGVEMSFELMNNGKAAEKLAAYVRVSNKK

SEQ ID NO: 118469 - protein, 241 aa, Unknown
  Bacterial polypetide isolated from the Sargasso Sea
MHHHLNTLYQGQSLSRESTRDAFGQVVRGEVDPIVLASLLTALKIKGETPEEIAGAAEALLAEARDFPRPDYEFCDIVGTGGDGLNTINVSTTSALVAAACGLKVAKHGNRSVSSKSGSSDLLDKMGIKLDMSPAQARRCLDELGICFLFAPQYHAGVRHAMPVRQALKTRTLFNVLGPLINPARPTYQLMGVYAPELVRPIAETLLALGLKTGMVVHGAGLDEIAIHGPNQVAQIRDGEI

SEQ ID NO: 118470 - protein, 254 aa, Unknown
  Bacterial polypetide isolated from the Sargasso Sea
GTGGDGKDTLNISTASALLLASMGVKVAKHGNKAVSSKCGSADVLEALNININLEPNQIEEQIKNNNFGFMFAPNYHSAMKYVGPTRKKIGKRTIFNMIGPLSSPALVERQVIGVFDNKLLKVFANALKNLNLKFAWIVNSEDGLDEISPYAKTNVVQLKNNEISEFIIDPNELNVNAGKFENLVGDDAKFNSDQILNIFQGEDNDFSKAVCLNAAAGLIVSEKYDDFKIAYNYTRGFIKSGAAFKYVKNIQNV

SEQ ID NO: 118471 - protein, 339 aa, Unknown
  Bacterial polypetide isolated from the Sargasso Sea
MEKINRDLTFDEMSSVMSEILNGKNSDEEIAEFLKDLSDKGETNEELRAMFTKMNEYSVNINPRCHGNLIDVCGTGGDNLQTFNISTAASFVIAGAGGNVAKHGNRSVSGISGSADIFEYFGFDLNSEPWMVEEMIEKIGIGFMFAPKFHPAMKNVAPARKIIGKRTAFNLLGPLCNPAKVRHQMIGVFADNYIERIARIMQKNFSDTVLTVRSDDGMDELSTTSKNKACLLKNEEITEFIIDPSKYNMEKGNLSDIQISTKKEAIESFVKVLNNTSNKTMKEITILNAAGGLLVGGLCDKFEEGIELARQTVDNGKAFEKLKQFVKENNSLEKLEEFN

SEQ ID NO: 118472 - protein, 293 aa, Unknown
  Bacterial polypetide isolated from the Sargasso Sea
MKKYLEKIINEENLSVDESMSLMSMIMDGELNPSQVTSIIVALRCKGESLNEILGFAQAMRNNMKKAAINVPSIDMCGTGGDSFGSFNISTVASFVVAGAGIHVAKHGNRSISSKCGSADVLEELGIDIDVSISKTILNIEKNKLGFLYAPKYHPAMKFAAEARNSIKIKTIFNLLGPLTNPANAQAQSMGIFNKDLTEQQAKVLQKLGVKRGMVFCGYDGLDEITITTKTRISLFDENSDVRSYDFNPEDYGYRIHGKHSILGGSSKDNAKITIDILKGEKGPKRDIVILNA

SEQ ID NO: 118473 - protein, 256 aa, Unknown
  Bacterial polypetide isolated from the Sargasso Sea
MQDAINLIMSGMVDDDAIESFLIGLNTKGISEIEVTAAATVMKEKSLKFDIGDGKHIDTCGTGGTGLHTFNCSTASSFVAAAGGAKITKHGNKAVSSKSGSADFLSESGANINHEREKLISIFDKVGFVFLFAPLHHEAIKYVMPVRQKIAKKTIFNLLGPHTNPCSAKRQIIGVYDKEFVKMFSNVAKNLDMEHVMIVHGDDGLDEISICSETTISELKDNQINEYKISPKDFGLSISSFDQITANSSNESLFTC

SEQ ID NO: 118474 - protein, 339 aa, Unknown
  Bacterial polypetide isolated from the Sargasso Sea
MKKINGDLTFGEMSQVMSGILNGRNDDQEIADFLRDLSNKGETNEELRAMFTKMNEYSVNINPRCHGTLIDVCGTGGDNLQTFNISTAAAFVIAGAGGNVAKHGNRSVSGISGSADIFEYFGFDLNSEPWVVEEMIEKIGIGFMFAPKFHPAMKNVAPARKIIGKRTAFNLLGPLCNPAKVRHQMIGVFADNYIERIAKIMQKNFSDTVLTVRSDDGMDELSTTSKNKACLLKNEEITEFIIDPSKYNLEKGNLIDIQISTKKEAIDSFVKVLNNTSNKTMKEITILNAAGGLLVGGFSNKFEECVELAKQTVNNGKAFEKLKQFAKENNALDKLEEFK

SEQ ID NO: 118475 - protein, 339 aa, Unknown
  Bacterial polypetide isolated from the Sargasso Sea
MNHDLKDFLAQLLNGQDLTEDQSEELMTALAAGSVEPALAGALLVSLRMKGESAEEVRGFANGMRKAAKEVVLENSSELIDIVGTGGDGSHSFNISTGAALLSAACGLKVAKHGNRSVSSKSGSADLLEFLGYRFPMDADGVKAQIKKNGFSFLFAPNFHPAMKHIAPIRQALKARTVFNILGPLTNPANPSFYLLGAFSSQMATLMASSLSGMDMNRAFVIHGLNGWDEPTPASNFELFDVREGSISHTIIDPSEYGIKKCKEEDLKGGTSEVNAEALLKVFEGKDKSAHEDALILNAGLALQVSGEAKELRDGIEIAKETIKSGKAEDFLSSLRNDE

SEQ ID NO: 118476 - protein, 195 aa, Unknown
  Bacterial polypetide isolated from the Sargasso Sea
MEINNLKNKLFLQKDLTADESADLFELIMNGKLSEIDMSAILIALKLKGEAKNEIFGASKIMRSKSMKISSPDNTVDTCGTGGDMSNTLNISTAASLVAASCGVKIAKHGNKSVSSKSGSADMLEYIGYKFSDDPKRLEDQLNKNNFCFMFAQYHHSAMKYVINVRKSLGTRTIFNLLGPLTNPANTKNQLLGVY

SEQ ID NO: 118477 - protein, 344 aa, Unknown
  Bacterial polypetide isolated from the Sargasso Sea
MSSNLSNAEILNNLLEGRDLDELTSKSLMKRWLNDEISDVETGAFLSALRAKSSTGVELSSMAEELLNVCELPVARPNLYLVDTCGTGGDGANTFNISTAVAFVAASCGVKIAKHGNKSASGKVGSADVLLNLGLDLNCSLEKAITAVSEIGITFLFAPVWHKSLIKLAPLRKTLGIRTVFNQLGPLVNPLRPNAQVLGVASEDLLKPMGSALLKMGMNRAIVVYGSGGLDEASLQGENKLIFVENGELRFSEINITDFNHENISNEKLVVSDIDSNEEILKSVLNGSGQKAHIDVVALNSALVLWAAGIEDDLKEGFNKALFSIKQGDPWEKFLLLKDYLHTN

SEQ ID NO: 118478 - protein, 342 aa, Unknown
  Bacterial polypetide isolated from the Sargasso Sea
MQIQTALAKIVESKNLSREESAQVFNLIMTGETTDAQIGAFLAAMRVKGETAEELAGAAETMRSLSSKVPLTSTEKLVDTCGTGGSGLKLFNISTAAAFVASASGALVAKHGNRKMTSFCGSADVLEAAGIKLELTPEQIADCINQIGIGFMFAPAHHSAMRYAGPVRQELSIRTMMNILGPMTNPAQAKRQVIGVFAREWQEKIARVLQMLGSVHALVVHSEGLDEIRLDAPTHVVELKDDTITEYTISPRDFGIAEATPEELQKLSADSVSKSLELVKESLSQPDSLAANIVALNAGAAIYTSGVTDDLKSGVSAAQTIIAEKSGLAKLKELALLSSKET

SEQ ID NO: 118479 - protein, 347 aa, Unknown
  Bacterial polypetide isolated from the Sargasso Sea
MSATSIQPLLDILFQGKALTREQTASLFSTLIQGEMNEAVMAAMLMALKIRGETIAEISGAADAMRAAAKPFPYPASSRSQGIIDIVGTGGDGFNTINISTTAAFVAAAAGAKVAKHGNRSVSSKSGSSDLLAQFGIDLTMSPELASRCLESLNLCFLFAPHYHGGVKHAVPVRQALKTRTLFNVLGPLINPARPEFMLLGVYSPELVTPIARVLQALGTQRAMVVHGSGLDEVALHGSTQVAELKDGEIIEYQLTPADFGVPQAQISELEGGEPAQNAQITQSILQGQGSDAHTHAVAINAGCALYLCGLSDSVKAGTTLALNTIKSGKAFELLNQLAKVSSEAQE

SEQ ID NO: 118480 - protein, 206 aa, Unknown
  Bacterial polypetide isolated from the Sargasso Sea
MIELLKKLMGREDLTFQEASELIQWVMSEDAVAVQASALLVLLQAKGITDEEMAGAAYAMRERVSKINAPEDVIDTCSTGGNGISTFNISTCAAIIAAAAGAKVAKHGNRSNTRKSGSAEALEALGVNINQGIEQVERCLVEIDLCFCYAVNHHPAMRYAGPIRRELGVPTVFNLLGPLTNPAGAKSQLIGVPTPQLTGKMTKVLN

SEQ ID NO: 118481 - protein, 284 aa, Unknown
  Bacterial polypetide isolated from the Sargasso Sea
MLNAGPLLEQIMLRESLSQTEAYSLFNSIMHGEQSEVMIASVLTALKMKKESPSEIAGAASAMVANALPFPTPSYEFADIVGTGGDGHNTINISSAAGVVAASCGVKVAKHGNRSVSSKSGSADLFRQFGLNLEISPETSRKCLDEANFTFLFAPVYHAGMRHAAPVRAAMKTRTLFNILGPLANPAGPTHGVFGVYSPELLEPYAKTLMLLGQHRAMIVHGDGLDELALHGESMIYDLEHGDIRKLTVTAEDFGLPHYPLSAIEGGEPEENRQFVEAALNGEG

SEQ ID NO: 118482 - protein, 315 aa, Unknown
  Bacterial polypetide isolated from the Sargasso Sea
SAIEFIMTGEVDDLSIEKFLLALNEKGISEKEITAAAIVMKDKSLTFNIGNGDHIDTCGTGGSGLNTFNCSTASSFVAAAGGALVTKHGNKAVSSKSGSADLLIAAGADIAHDREKIETIFDRVGFVFLFAPLHHQSMKYVMPARQKIGKKTLFNLLGPHTNPCGAKKQILGVYDKDLVKSFAAVAKNLSMEHVLIVHGFDGLDEITITNKTYVAELKDNSINEYEISPKDFGLNFGQLSEIIAQSSDDSLQLIREAFSGEKSAVQDMIALNSGAALYLAKVVHSIADGVELSFELMNNGMAADKLASYVRVSNS

SEQ ID NO: 118483 - protein, 337 aa, Unknown
  Bacterial polypetide isolated from the Sargasso Sea
MNINEAILELMKSKDLSKDQISSVIRQILTGECADSQISAFLVSLSIKGETVDEVIGAAEVMRELSEKVIVNIENLVDTCGTGGDGSGLFNVSTSAAILAAAAGAKVAKHGNRSASSTSGSADLLEQAGVNLALSPDQVRNCIEEVGVGFMFAPAHHSAMKHVMGPRKELGIRTIFNLLGPLTNPAGAKNQVLGVFDKTWVRPIAEVLRGLGSDRVMVIHSEDGLDEFSVEAATLVAELREGEIREYTVTPEDLGVNRSSISLLKVASPQESLVIAKDSLSGENTVGSEMISIASGAALYVSGLVSSLKDGFKESQLIIEEEKAIKKLDELISFTNR

SEQ ID NO: 118484 - protein, 350 aa, Unknown
  Bacterial polypetide isolated from the Sargasso Sea
MGSSRVMSPASTPWSGLLEQLLGGENLSAAQATDLMQAWLSESLTPVQTGAFLAGLRAKGMEAEELAAMAAVLRQACPLPCARPDRFLVDTCGTGGDGADTFNISTAVAFTAAACGVEVAKHGNRSASGKVGSADVLEGLGLNLKAPLQAVIDAIPAAGVTFLFAPAWHPALVNLAPLRRSLGVRTVFNLLGPLVNPLKPQAQVLGVARDDLLDPMAGALQRLGLERAVVVHGAGGLDEASLAGPNDLRLIEAGAIRSLQLRPEELGLSTANLEALKGGDLQRNQTILQQVLQGHGEPAQRDVVTLNTALVLWAAGVDTDLASAAARAARTLDEGLPWTRLETLREHLAR

SEQ ID NO: 118485 - protein, 280 aa, Unknown
  Bacterial polypetide isolated from the Sargasso Sea
AEELLNVCDLPVARPNLYMVDTCGTGGDGANTFNISTAVAFVAASCGVNIAKHGNKSASGKVGSADVLLNLGLNLNCSLEKVISAVNEIGITFLFAPVWHKSLIKLAPLRKALGIRTVFNQLGPLVNPLRPNAQVLGVASEDLLEPMGSALLKMGMNRVIVVHGSGGLDEASLQGENKLVFVEKGKLRFSKINISDFNHENVSNEKLVVSDGESNEEILNSVLKGSGKKSHKDVVALNTALVLWAAGIEDDLHEGFNKALFSINQGNPWKKFLLLKTYLS

SEQ ID NO: 118486 - protein, 339 aa, Unknown
  Bacterial polypetide isolated from the Sargasso Sea
MNHNLEDFLAMLLDGKDLLEDQSEELMTAMTEGEVEPALAGALLVALRMKGESAEEVRGFANGMRKAAKEVELENSSELIDIVGTGGDGSHSFNISTGAALLSAACGLKVAKHGNRSVSSKSGSADLLEFLGYRFPTDADGVKAQMSMNGFSFLFAPNFHPAMKHIAPIRKALKIRTVFNILGPLTNPAKPSFYLLGAFSSEMASLMASSLSGMEMSRAFVVHGLNGWDEPTPASKFELFDVSKDSISHKIIDPSELGMDKCKEEDLKGGTSEVNAKALLEVFDGKDNGAHEDALVLNAALSLQVAGKAADLIEGIEIARQTIVSGKAKELLSGLTNGD

SEQ ID NO: 118487 - protein, 338 aa, Unknown
  Bacterial polypetide isolated from the Sargasso Sea
MNEFSDILIKIQKSEYLSREDLKFAYNFILDGKANDIEIEDFLIGLNNKGITIDDIICGVEVLREKSFKVEVPVDAIDTCGTGGDNSGTFNISTAVTFVTAGAGAIVAKHGNRALSSKSGSSQVLEELGININIKPNKISDCINKSNVGFMFAPNHHSAMKYVGPIRQKLKVRTIFNLLGPLINPGSVKKQLLGVYNKKWLNPLIETLQELGSTDVMLVCGSDGLDEITTTSETYIAELKNNKITNYTIKPEDFGINRANPDELIGDTPKVNAQKILKLLDGEKGAFRDIVIINSAAAIYIAGIAESIEHGLKFANTSIDNGNAKTSLEKLVKASNEK

SEQ ID NO: 118488 - protein, 184 aa, Unknown
  Bacterial polypetide isolated from the Sargasso Sea
MSEITDYIEKINNKQSLSVLESYNAFMSIMSGDCVDDDISNFLIGLKNKGESIDEIIGAVRAIREKMTTIMVPDGAIDIVGTGGDGYKTLNISTASALVVASNSIKVAKHGNRSVSSISGSSDILTELGVNIDIKPDSCVECINETNICFLFAPLFHGSFKHVAKVRAELKTRTIFNILGPMCN

SEQ ID NO: 118489 - protein, 339 aa, Unknown
  Bacterial polypetide isolated from the Sargasso Sea
MKKINGDLTFDEMSSVMSEILNGKNNDEEIAEFLTDLSNKGETNEELRAMFTKMNEYSVNINPRCHGTLIDVCGTGGDNLQTFNISTAASFVIAGAGGNVAKHGNRSVSGISGSADIFEYFGFDLNSEPWVVEEMIEKIGIGFMFAPKFHPAMKNVAPARKIIGKRTAFNLLGPLCNPAKVRHQMIGVFADNYIERIAKIMQKNFSDTVLTVRSDDGMDELSTTSKNKACLLKNEEITEFIIDPSKYNLEKGNLADIQISTKKEAIDSFVKVLNNTSNKTMKEITILNAAGGLLVGGFSNKFEECVELAKQTVNNGKAFEKLKQFAKENNALDKLEEFN

SEQ ID NO: 118490 - protein, 253 aa, Unknown
  Bacterial polypetide isolated from the Sargasso Sea
MNFKLLKEKIFNFQNLTVDETSLVFNLIMTGKISEIEISAILIALKLKSETKEEILGASICMREKSIKINTEEDTIDTCGTGGDMSGTLNISTSAAIVAASAGVKIAKHGNRSISSKSGSADMLEKLSYKILDNPNELEKSIKEHNFCFLFAQYHHSAMKHVGNVRKLLGTRTIFNLLGPLTNPANTKKQLLGVYDKKWVNIHCEVLKELGSKHALVVHGDDGLDEISLSGITHISELKNEKIIQYIFDPRVL

SEQ ID NO: 118491 - protein, 268 aa, Unknown
  Bacterial polypetide isolated from the Sargasso Sea
MSSNLSNAEILNNLLERRDLDELTSRSLMQRWLNDEITDVETGAFLSALRAKSSTGVELSAMAEELLNVCELPVARPNLYLVDTCGTGGDGANTFNISTAVAFVAASCGAKIAKHGNKSASGKVGSADVLLNLGLNLNCSLEKVIKAVSEIGITFLFAPVWHKSLIKLAPLRKTLGIRTVFNQLGPLVNPLRPNAQVLGVASEDLLKPMGSALLKMGMNRAIVVHGSGGLDEASLQGENKLVFVDNGKLRFSELNISDFNHENISNEK

SEQ ID NO: 118492 - protein, 343 aa, Unknown
  Bacterial polypetide isolated from the Sargasso Sea
MTITPQEALQRTIEHREIFHDEMLHLMRLIMRGDMSPVMAAAIITGLRVKKETIGEIAAAATVMREFANHVEVQDNSNFVDIVGTGGDGSHTFNISTASMFVTAAAGAKVAKHGNRGVSSKSGSADVLEALGVNIDLQSEQVAASIAETGMGFMFAPNHHPAMKNIAAVRRELGVRTIFNILGPLTNPAGAPNQLMGVFHPDLVGIQVRVMQRLGAQHVLVVYGKDGMDEVSLGAATLVGELRDGKVHEYEIHPEDFGLQMVSNRTLKVENADESRTMLLGALDNQPGVAREIVTLNAGTALYAANVAESIADGIQLAREAIASGKARAKVDELVRFTQQFKR

SEQ ID NO: 118493 - protein, 335 aa, Unknown
  Bacterial polypetide isolated from the Sargasso Sea
MKEVLEKINNQVNLSMGEMQDTMNQIMSGKVNDIDMESFLIGLNIKGISEEEITAAAMIMREKSLQIDIGDGSHIDTCGTGGTGLHTFNCSTASSFVAAAGGAKITKHGNKAISSKSGSADFLEEAGANINHDRSMLDTIFSEIGFVFLFAPLHHHAMKHVMPVRQKIADKTIFNLLGPHTNPCNSKRQLLGVYDKNLLSTFSHVAKNLDMEHVLVVHGDDGLDEISVTSETSISELKDMQIKEYKISPTDFGLDFGTFETITSQSSEESLKMVNEAFAGTKSSVQDMIALNAGAALYIANKVTSINDGVELAFELMNSGKAAEKLNAYVNASNN

SEQ ID NO: 118494 - protein, 339 aa, Unknown
  Bacterial polypetide isolated from the Sargasso Sea
MEKINGDLTFDEMSSVMSEILNGKNNDEEIAEFLRDLSNKGETNEELRAMFTKMNEYSVNINPRCHGTLIDVCETGGDNLQTFNISTTAAFVIAGAGGNVAKHGNRSVSGISGSADIFEYFGFDLNSEPWVVEEMIEKIGIGFMFAPKFHPAMKNVARARKIIGKRTAFNLLGPLCNPAKVRHQMIGVFADNYIERIAKIMQKNFSDTVLTVRSDDGMDELSTTSKNKACLLKNEEITEFIIDPSKYNLEKGNLADIQIATKEEAIDSFVKVLNNTSNKTMKEITILNAAGGLLVGGFSNKFEECVELAKQTVNNGKAFEKLKQFAKENNALDKLEEFN

SEQ ID NO: 118495 - protein, 350 aa, Unknown
  Bacterial polypetide isolated from the Sargasso Sea
MGPFRFMSPASPSWSGLLELLLCGESLSAAQATDLMQAWLSESLTPVQTGAFLAGLRAKGMEAKELAAMAAVLREACPLPCARPDRFLVDTCGTGGDGADTFNISTAVAFTAAACGVEVAKHGNRSASGKVGSADVLEGLGLNLKAPLQSVVDAIPAAGVTFLYAPAWHHALVNLAPLRRSLGVRTVFNLLGPLVNPLKPQAQVLGVAKKDLLDPMAGALQRLGLERAVVVHGAGGLDEASLAGPNELRFIEAGAIRSLQLSPDELGLATADLEALKGGDLDCNQTILQQVLQGRGEPAQRDVVALNTALVLWAAGIDKDLSSAAARAAEALDQGLPWTRLEALRQHLAS

SEQ ID NO: 118496 - protein, 274 aa, Unknown
  Bacterial polypetide isolated from the Sargasso Sea
EKSLKFDIGDGSHIDTCGTGGTGLNTFNCSTASSFVAAAGGAKITKHGNKAISSKSGSADFLAQSGANINHEREKLISIFDKVGFVFLFAPLHHEAMKFVMPVRQKIAEKTIFNLLGPHTNPCSAKRQVLGVYDEKLVKMFANVAKNLDMKHVMIVHGDDGLDEISICSETIVSELKDNKISEYKISPKDYGLNVSSFDQIAANSSYESFLLVNSAFNGESSAVQDMIALNSGAALYIANVVDSISDGIEMAFDCMNNGQAAQKLADYVRVSNE

SEQ ID NO: 118497 - protein, 330 aa, Unknown
  Bacterial polypetide isolated from the Sargasso Sea
MDKYLEKLRKKINLNFDESKNAFKILMNGEASDQQIYDFLTLLSVKGEASDEIAGGVYVLRDKSKRVKVEDCLDTCGTGGDGKDTLNISTASALLLASMGVKVAKHGNKAVSSKCGSADVLEALKISINLEPNQIEEQIQKNNFGFMFAPNYHSAMKYVGPTRKKIGKRTIFNMIGPLSSPALVERQVIGVFDNKLLKVFANALKNLNLKFAWIVNSEDGLDEISPYAKTNVVQLKNNEISEFIIDPNELNVNAEKFENLVGDDAKFNSDKILNIFQGEDNDFSKAVCLNAAAGLMISEKYDDFKIAYNFTRGFIKSGSAHKYIKNIQNV

SEQ ID NO: 118498 - protein, 336 aa, Unknown
  Bacterial polypetide isolated from the Sargasso Sea
MIQDFINQLEKKEDLDFQSMQYAIESIMTGNVDDLSIEAFLLALNAKGIKETEITAAARVMKEKSLTFSLGNGDHIDTCGTGGSGLHTFNCSTASSFVAAAGGAAVTKHGNKAVSSKSGSADLLLAAGADISHDREKLEIIFKRVGFVFLFAPLHHESMKYVMPARQKIGKKTLFNLLGPHTNPCCAKRQILGVYQKDLVRTFASVAKNLSMDHVLIVHGFDGLDEITITGSTYVAELKDNTISEYEISPKDFGLSHGTLPEISAASPNDSLQLIREAFSGDKSAVQDMIALNAGAALYLAKKVDSIASGVELSFELMNNGMAADKLASYVRVSNS

SEQ ID NO: 118499 - protein, 279 aa, Unknown
  Bacterial polypetide isolated from the Sargasso Sea
MQAIREQVSNALIEDLGGELNAANDITANLIDESVNAKATIITREPCVVCGIAWANQAFALIDESVSLTWHVKDGDKVDANTVLVSLEGSARAILTAERTALNFLQTLSATATVTAFYAKFLDGSNTKILDTRKTLPGLRHAQKYAVRCGGGQNHRVGLFDAFLIKENHIFSCGNIEKAVSRAKTMMPGKPVEVEVENLTELEQALGAGADIVMLDNFSNEQIQQAVALNKGQCKLEVSGNITDERLASLAKLGVDYISSGALTKHVQAIDLSLRINLS

SEQ ID NO: 118500 - protein, 125 aa, Unknown
  Bacterial polypetide isolated from the Sargasso Sea
DGVDVLAKVGGFDLVGMAGVMLGAASCGLPVVLDGFLSYSAALAACQIAPQIKPYLIPSHFSAEKGARTALAHLELDPYLNMGMRLGEGSGAALAMPIVEAACAMYNNMGQLAASNIVLPDGKEA

SEQ ID NO: 118501 - protein, 148 aa, Unknown
  Bacterial polypetide isolated from the Sargasso Sea
MCKKNYIEDFFNGLTNIPEFDQLKASNAKELQNELLKPKGSLGKLEEYAIWMAGWQKKINPLIENAHCLIFAGNHGVARKGVSAFPSEVTEQMVENFNKGGAAINQLCELAGLKLNVIPLDLDEPTKDFSENFAMEQRRSNICNANWF

SEQ ID NO: 118502 - protein, 157 aa, Unknown
  Bacterial polypetide isolated from the Sargasso Sea
MCGKGTGVDDSGLEHKQNTIRQALEKHAEIKEPQAVLSTFGGFEIAMMVGAILESAVLKRIILIDGFIASAAFLSASRIVPEIKQYAVFTHKSDEQGHSEILKYLQVEPLISLGMRLGEGTGAAVAFPIIQSAVSFLNQMASFESARVSGRTDVKKA

SEQ ID NO: 118503 - protein, 79 aa, Unknown
  Bacterial polypetide isolated from the Sargasso Sea
MNEELALQLQYKLDRKTKPPGSLGDLEQLALRVGVIQGTLETQLKSPTMLVFAGDHGITNEGVSPYPSEVTAQMVKNFL

SEQ ID NO: 118504 - protein, 197 aa, Unknown
  Bacterial polypetide isolated from the Sargasso Sea
FCRQLGFNLEVIDCGILTPVEDAEGIIDQRLGAGTAAIHLEPAMTLACVDKGFAMAQALIERHHQAGCNLVAFGEMGIGNTSSAAAIMAAIMQLDVADCVGRGTGINSETLERKQMLIELALLLHQSAMTGPRQVLACLGGFEIVQMTGAMLAAAERKMLVVVDGFIATAAALVAVNINANVRDYLEHIATKSRSII

SEQ ID NO: 118505 - protein, 114 aa, Unknown
  Bacterial polypetide isolated from the Sargasso Sea
MYYANLAKNRQNNLTKPIGSLGKLEKYAIWMAGWQKKEKPTMNNFQCLVFAGNHGVAKRNVSAYPSEVTEQMVENFKNGGAAINQLCDLSNIKLSVIPINLEKHTNDFSEEKAM

SEQ ID NO: 118506 - protein, 124 aa, Unknown
  Bacterial polypetide isolated from the Sargasso Sea
MRKYLIPPVSAKIEVDLKRKIDGKTKPPGSLGRLETVALQCGIIQNSLNPELVNPTILVFAGDHGITEEGVSPYPQEVTGQMVLNFLNGGAAINVFCRQNNISLHVVDAGVKTDLPVGTELINA

SEQ ID NO: 118507 - protein, 78 aa, Unknown
  Bacterial polypetide isolated from the Sargasso Sea
MNEELASQLKSKLDGKTKPPGSLGDLEQLALRIGMIQGTLEPQLKSPTMLVFAGDHGITNEGVSPYPSEVTAQMVKNF

SEQ ID NO: 118508 - protein, 253 aa, Unknown
  Bacterial polypetide isolated from the Sargasso Sea
VFCRQHGFDLKVIDAGVASDFEKHPLLVDEKIAYGTANFLKEKAMSENHAKECISRGEKLAEELPDPSCNVIGFGEMGIGNTSSSALMMHRLTGIKLESCVGRGTGLDDQGLSQKFMILQEASEIHSGARGAIEVIAAFGGFEIVMICGAMIASSRMGRILLIDGFIASTALLLAREMDPKVMDHAVFTHVSGEQGHRPLLEHLQVKPLLDLNLRLGEGTGAALAYPLLVSAVAFLNEMASFESAGVSDRSDA

SEQ ID NO: 118509 - protein, 240 aa, Unknown
  Bacterial polypetide isolated from the Sargasso Sea
QKTFKPTINNPHCVIFAGNHGISNKGVSAYPSEVTAQMVENFKQGGAAINQLCKLAKIKLSVIPVDLDKPTMDFSESKAMSEEEVFSFMQLGFDSIPSSCDLLILGEMGISNTTSATSISCALFNEPVDVMTGIGTGINKVQLSNKIKIINKALQLHGKKFRDPVSILSCYGGKEIAAIAGSVISARIKSIPVLLDGFITTAAASTLISFEKNILDHCLVSHLSAEPGHDKILNNLKKEP

SEQ ID NO: 118510 - protein, 214 aa, Unknown
  Bacterial polypetide isolated from the Sargasso Sea
MKDLTKPDNEVCQALEKRLADILRPSGALKRLDEIAIFMGGWQGSLTPRVERPKVLIFAADHGVATAGVSAYPSSVTESMMSAFEAGLSTINAFARIAGAEVTAVDVGIGRPTADIRLEPAMSEQRFFEALESGRQAVKDSDSDLLVLGEMGIGNTTSSAAISCALFGGDASDWVGRGTGIDEDGLRRKREAVEHAVKRIDGASPPEILRELGG

SEQ ID NO: 118511 - protein, 262 aa, Unknown
  Bacterial polypetide isolated from the Sargasso Sea
KYEVSAFPSSVTSEMVKNFVEGGAAVNQLCKTFDADLRVYELGLEHPTSDFTKEPAMTEEECVRAMAYGMMAIEPGFDIICLGEMGIGNTTSAAAISMALFGGTAKDWVGRGTGINSETLERKIELVQKAVELHLAETKDPLSLFAALGGLELAAIVGAIVAARLARVPVILDGFACTVSASVLFAIDPTTVDHCLVAHRSVEPGHSRLLELMHKEPVLDLGLRLGEASGATLAIGILKAAVGCHAGMATFASAGISKSVDL

SEQ ID NO: 118512 - protein, 695 aa, Unknown
  Bacterial polypetide isolated from the Sargasso Sea
MSAGLNPAQNEAVRYLDGPCLVLAGAGSGKTRVITQKIAHLIEAKGFEPRHIAAVTFTNKAAAEMRERVSKLLEGKTLTTPGKEGRKVPVNQLTVCTFHSLGVQILRQEAEHVGLKPQFSIMDSDDCFGMIQEQIGTTDKGLIRKIQSTISLWKNGLIMPDEAMTIAANEDEHQAALVYRNYVATLHAYQAVDFDDLIRLPAELFAKNEQVRDRWQNKLRYLLIDEYQDTNACQYELLKLLAGPRAAFTAVGDDDQAIYGWRGATLENLAQLGKDFPKLHVIKLEQNYRSTVRILTAANNVIANNPKLFEKKLWSEHGMGDSITVTPCNDEEHEAESVVFRLSAHKFERRAQFRDYAILYRGNFQARIFEQVLRRERIPYVLSGGQSFFDKAEIKDLCAYLRLIANADDDPAFIRAVTTPRRGIGNTTLEALGSFAGQAKVSLFEAVYMGGIEARLSARQVEPLRMFCDFIQRLTERADKDPATAVLDDMMEAIHYEAYLYDAFDERQAQSKWQNVLEFLEWLKRKGTKPEAEAVDGEAEGFHNADGLADTGKNLLGLIQTVALMSMLEGKDEDPDAVRLSTVHASKGLEYPHVFLVGVEEGIMPHRGGSEDDGPIDNERIEEERRLMYVAITRAQRSLHLNWCKKRKRARETVVCEPSRFIPEMGLDDAPPPTPEEAPMSPKDRLASLKALLQK

SEQ ID NO: 118513 - protein, 340 aa, Unknown
  Bacterial polypetide isolated from the Sargasso Sea
MCKKNYIEDFFNGLIKIPEFDQLKASKAKELQNELLKPKGSLGKLEEYAIWMAGWQKKINPSIENAHCLIFAGNHGVARKGVSAFPSEVTEQMVENFKKGGAAINQLCELAGLKLNVLPLDLDEPTKDFSENFAMDKEEVISAMQTGFDSVPSNCDLLVLGEMGISNTTSASALSCALFNEKVENMTGTGTGLNHKQLENKMSVIKSALKLHGTKFTSTIKILSCFGGREISAIAGSIIAARIKSIPVLLDGFICTAAASTLTLFDENFLDHCLISHLSTEPGHLKILSYLKKDPILDLNLRLGEGSGAAIASLILKSAIVTHNGMSTFSDAHVTNKNAS

SEQ ID NO: 118514 - protein, 128 aa, Unknown
  Bacterial polypetide isolated from the Sargasso Sea
MNEELALQLQSKVDGKTKPPGSLGDLEQLALKIGMIQGTLEPKLKSPTMLVFVGDHGITNEGVSPYPWEVTAQMVKNFLSGGAAINVFCKQHGFDLKVIDAGVASDFKNTLFWSMRKSLTAQQISLKK

SEQ ID NO: 118515 - protein, 278 aa, Unknown
  Bacterial polypetide isolated from the Sargasso Sea
EKGISAFPQAVTGQMIANFVAGGAAISVMAKQLGAALEVINLGTVSPLPIDDGVIDEHIAPGTGNLARQPAMTDAQLQAALAAGDRAAQRAADRQADVFIGGEMGIGNTTSATALACALLGEDATALTGPGTGLTPEGVAHKAQVIAQALARHGTRPEPLAVLVSLGGFEIVALAGAFIGCAVRGIPVLVDGFIVSTAALAACQLRPQLRPWLLFAHQSREPGHQRLLHALDATPLLDLSLRLGEGSGAAVAVPLLRNACALHNHMATFADANVSNEN

SEQ ID NO: 118516 - protein, 242 aa, Unknown
  Bacterial polypetide isolated from the Sargasso Sea
VVDAGVNYKFDYLDNLINSKIDFGTKNFINQKAMTKSQLEKCFKFGKKIIQDISPKETNIMGFGEMGIGNTSSATMIMSSLLDLPIDKCVGIGTGLDNQQLITKTKILQEAKLFHKKITDVYEILQTFGGFEIVQMCSAMLEAYNKNMIIMVDGFIASCAYLAAYNINPKIKNNALFSHKSSENGHELLLHILKVKPILSLDMRLGEGTGCALAYPIILNSVNFMNNMATFENAQVSTQSND

SEQ ID NO: 118517 - protein, 222 aa, Unknown
  Bacterial polypetide isolated from the Sargasso Sea
MFNIMPINQRFSAVIQKKIDLKTKPLGALGQLESCAKQLTLIFSKQLDSEQALVAFKPVISNPSLVVFAGDHGVASQGVSIAPSCVTSQMVANFAAGGAAINVFCRQLGWQLEVVDAGTLSTSHDKSVHNQRLGDITAPLNNEMAMSLSQVEKGFALAKQRVHSLYEQGCNTIAFGEMGIGNTTSAAALMAALLSLPASQCVGKGTGVSDEVVAKKIKVVEQ

SEQ ID NO: 118518 - protein, 234 aa, Unknown
  Bacterial polypetide isolated from the Sargasso Sea
MRKFLISPVSSTIDVDLKKKIDAKTKPPGSLGRLEKLAVQFGRIQNSLNPELINPTFLVFAGDHGITEEGVSPYPQEVTTQMVINFLNGGAAINVFCHQNNISLHVIDAGVKADFPECNELIKAKIGRGTKNFCKEAAMSLDECERAIEKGAELSRTVPLSTCNVIGFGEMGIGNTSSAAALTHRFTGLPVEDCVGKGTGLDDQGLEHKQNTIRQALEKHAEIKEPQAVLSTLE

SEQ ID NO: 118519 - protein, 110 aa, Unknown
  Bacterial polypetide isolated from the Sargasso Sea
MKKYLIPPVSSKIEVDLKRKIDSKTKPPGSLGRLETVAFQCGKIQNSLNPELIDPTILVFAGDHGITEEGVSPYPQEVTAQMVLNFLNGGAAINVFCRQNISVYMLWMQG

SEQ ID NO: 118520 - protein, 217 aa, Unknown
  Bacterial polypetide isolated from the Sargasso Sea
PPQVEQVKVVVFAGNHGVTAQGVSAFPREVTGQMVANFEAGGAAINQLCKLQNAELAVIALALEAPTADFTEAPAMTETETVAALNTGLAAVDDGLDLICVGEMGIGNTTSAAAICHAVFGGEPADWAGPGTGVNGDALTNKINVVGAAAATHKEAMTDGAEVLRHLGGREIAALVGAVVGARLNRTPVLLDGYVTGAAAAILHALNSKALDHCKVG

SEQ ID NO: 118521 - protein, 270 aa, Unknown
  Bacterial polypetide isolated from the Sargasso Sea
VTYQMVNNFLNGGAAINVFSKTSSIKLQIVDAGVNYNFKNAKNLIDKKIDFGTSNFIDAKAMTKTQFMNCFKSGKDIINEVSKTKTNIIGFGEMGIGNTSSASMIMSYLLKLPLSKCVGSGTGLSTMQLKNKVEILNKAKKFHGTIDDVYEILETFAGFEIVQMCSAILQSYEKNMIILVDGFIGSSAFLAALKINPKIINNSFFTHRSSEFGHKILLEYINVTPILDLKMRLGEGTGCALAYPIIQNAVNFINDMATFENAKVSTESND

SEQ ID NO: 118522 - protein, 186 aa, Unknown
  Bacterial polypetide isolated from the Sargasso Sea
LCLGEMGIGNTTSASALSLALFGGNAKDWVGSGTGISSDSFGKKIKIVQQACELHGNMKGDPLAIFAALGGLELAAIAGAILAARLAKVPVVLDGFACTVAAAILYAIKPCTIDHCLVSHCSVEPGHKKLLGKINKESLLDLGMRLGEGSGATLALGIIRAAIACHLGMATFEGAGVSNSQSNKIV

SEQ ID NO: 118523 - protein, 283 aa, Unknown
  Bacterial polypetide isolated from the Sargasso Sea
HPPTLNSAQTIVFAANHGVAANGVSAYPTEVTAQMVANFKDGGAAINALTSNSLANLSVVPISLEIPTKDLTRDAAMSTSELKTALDIGASAIPDDTDILLLGEMGIGNTTSAAALACALFGGKASDWVGLGTGVNADGLKRKSKAVETALTFHKNALDDPLDALRRVGGRELAAITGATLEARRRRIPVLLDGFVSTAAASVLFAYDENALDHCLVSHLSSEAGHSRLLAKLCKSPLLDLEMRLGEASGAAVALSIVRAALMAHMEMATFSVAGVDGRSEGV

SEQ ID NO: 118524 - protein, 241 aa, Unknown
  Bacterial polypetide isolated from the Sargasso Sea
GVKTDFPECNGLIKAKIGRGTKNFCKEAAMSFDECERAIEKGAEISRTVPLSTCNVIGFGEMGIGNTSSAAALTHRFTGLPVEDCVGKGTGLDDRGLDHKQNTIRKALEKHAQIKEPQAVLSTFGGFEIAMMVGAMLESAVLKRIIMIDGFIATAAFLAAFRIVPEIKQYAIFAHKSDEQGHGKILKYMQVEPLISLGMRLGEGTGAAVAFPILQSAVSFLNQMASFESAGVSSRTDVKKS

SEQ ID NO: 118525 - protein, 277 aa, Unknown
  Bacterial polypetide isolated from the Sargasso Sea
MVARTAARARNEMLTKPPGALGRLEDLAIWYAGWRAHAAPRVLAPQVIVFAGNHGITGQGVSAFPAEVTAQMVANFQQGGAAINQLARDAVARMDVHALELDRPTDDFTQGPAMSAQDCTAAFDTGWNAVDVTTDLLVVGEMGIGNTTSAAAIAAALLGGSGADWVGRGTGVDDDGLARKAEVVDRGLAANPSRDPLAVLAALGGREIAAMAGAIARARSLRIPVVLDGFICSTAALVLHRVDSDAVAHCVAGHLSAEGAHARMLNAMGLEPAAGSG

SEQ ID NO: 118526 - protein, 259 aa, Unknown
  Bacterial polypetide isolated from the Sargasso Sea
MNEELASSLQSKLDGKTKPPGSLGDLEQLALRIGLIQGTLEPQLKSPTMLIFAGDHGITNEGVSPYPSEVTAQMVKNFLSGGAAINVFCRQQGFDLKVIDAGVASDFEKHPLLVDEKIAYGTANFLKEKAMSENQAKECISRGEKLAKKLPDPSCNVIGFGEMGIGNTSSSALIMYRLTGIKLESCVGRGTGLDDQGLSHKFKVLQEASEIHSGARGAIEVISAFGGFEIAMMCGAMIASSRMGRILLIDGFIASTALL

SEQ ID NO: 118527 - protein, 291 aa, Unknown
  Bacterial polypetide isolated from the Sargasso Sea
NIAYKICLIQKSKKPSLVNPQIIIFAGDHGIAAAGVSKYPQEVTHQMVKNFLKGGAAINVFSQNNSIGLQIVDSGVNYSFDKNKYLINKKIDYGTKNFLIDKAMTNSQLQKCLKSGKEIIQKISSTKSNIVGFGEMGIGNSSSASIIMSYLLNIPLEKCVGSGTGLNKNQLKMKLSILKEAQNFHGDIDDPYEVLEAFGGFEIAQMCSAMIESYKKNMIILVDGFISSSAFLVASKINPKIINNTLFSHKSSENGHQYLLKKINEDPILDLRMRLGEGTGCALAYPIIVNA

SEQ ID NO: 118528 - protein, 282 aa, Unknown
  Bacterial polypetide isolated from the Sargasso Sea
PPGSLGDLEQLALRIGMIQGTLEPQLKSPTMQVFAGDHGITKEGVSPYPSEVTAQMVKNFLSGGAAINVFCRQHGFDLKVIDAGVASDFEKDPLLVDEKIAYGTANFLKEKAMSENQTKECISRGEKLAEELPDPSCNVIGFGEMGIGNTSSSALMMHRLTGIKLESCVGRGTGLDDKGLSHKFKVLQEASEIHSGAHGAIEVIAAFGGFEIAMMCGAMIASSRMGRILLIDGFIASTALLLAREMDPKVMDHAVFTHVSGEQGHRSLLEHLQVKPLAGSEP

SEQ ID NO: 118529 - protein, 273 aa, Unknown
  Bacterial polypetide isolated from the Sargasso Sea
MSNTVAISNMNMFRALLSNLPSRDEAAAEAAKEREPQLTKPPGALGRLEEISLWLSAWQGRHPPATDHVAVRVFAGNHGVVARGVSAYPAEVTTQMVKNFEAGGAAINQLCAQAGAELQVIALSLDTPTADFTMKPAMNEEEFLDALVRGMAAVPKDADLLCVGEMGIGNTTSAAALCMGLFGGNSKDWTGPGTGVTEHAFETKMKVVDDAVRHHAAHLVDGINALQCLGGRELAAIAGAIVSARLKRVPVLLDGLMAGAAAAALKSTSVDAI

SEQ ID NO: 118530 - protein, 164 aa, Unknown
  Bacterial polypetide isolated from the Sargasso Sea
MNKELASPLKSKLDGKTKPPGSLGDLEQLALRIGMIQGTLEPQLKCPTMMVFAGDHGITNEGVSPYPSEVTAQMVKNFLSGGAAINVFCRQHGFNLKVIDAGVASDFEKHPLLVDEKISSGTANFLKEKAMSENQAKESISRGEKLAEELPDPSCNLIGFGEMG

SEQ ID NO: 118531 - protein, 191 aa, Unknown
  Bacterial polypetide isolated from the Sargasso Sea
MRAVSENMDLITLGEMGIGNTTIASALCYYFFNHDVSSWVGPGTGSNQDQVIHKGKIIERAVETNRPGIVRPLDAGVSLGGREQAAICGAVVAAKHYSVPVILDGFICTAAVLPIFFERKDILDHCLIGHCSKEPGHQLLLKMLNKKPILRLDMALGEGSGAALATSIVKAAFKCHLEMATFEDAGVSGKQ

SEQ ID NO: 118532 - protein, 286 aa, Unknown
  Bacterial polypetide isolated from the Sargasso Sea
MKKDIIPSTLVDFREILTKLPGPDLNAFAAAGLREPQLTKPPGSLGKLEEIVGWLASWQGRHPPAMEEIAVRVFAGNHGIVEHGVSAYPQDVTQQMVTNFKAGGAAINQLCAATNAELQVIPIDLDRPTRDFSKESAMDEPEFMDAIRRGIDSVPENTDLLCVGEMGIGNTTSASALCFSLFGGNVEDWTGPGTGVTGKNYQTKIQVVSNSVRYHAPLITDGLDTLQRLGGRELAAMAGAIIGARLKYIPVILDGFVAGAAASTLKCMHSDALSHCLAAHVSAEPG

SEQ ID NO: 118533 - protein, 252 aa, Unknown
  Bacterial polypetide isolated from the Sargasso Sea
MSDMSVLRALLSNLPSQDSGAAKAAKEREPQLTKPLGSLGRLEEIALWLAAWQGRHPPATDKIVVRVFAGNHGVVTRGVSAYPAEVTAQMVGNFEAGGAAVNQLCAEAGAELQVIALDLDYPTADFTMQPAMDEAEFLNAFSRGMAAVPENADLLCVGEMGIGNTTSAAALCMGLYGGDAKDWTGSGTGITELAFETKIKVVKEAVHRHAPHSIDGMRALQCLGGRELAAMAGAIIAARLSRVPVLLDGFMA

SEQ ID NO: 118534 - protein, 337 aa, Unknown
  Bacterial polypetide isolated from the Sargasso Sea
GRAGHAAGPPSYRWPVQPVGSLGRLEELAVQLAGIYRTPDIHPGAKEIIVMAADHGVFDEGIAVTPREVTASQALNMTRGLTGVCALAAASGVKVQIVDIGIDSEPLPGMPSLKLARGCANIAKGAAMSRHDAEHLLLASARFAMDKVASGVRVLGVGELGIGNTTPAAAMVSVMTGAAPEQAVGLGANFPSHRLHHKVEVVRSAIAVNRPDASDGIDVLAKVGGFDLVGMTGVILGGAAAGVPVVLDGFLSYACALAACRIAPGAWHYLVPSHHSAEKGSQLALAHLDLKPFIHLELRLGEGSGAAMAMPFIDAACAMVQRMGRMADNHVELPRPA

SEQ ID NO: 118535 - protein, 339 aa, Unknown
  Bacterial polypetide isolated from the Sargasso Sea
MNEELASQLQSKLDGKTKPPGSLGDLEQLALRVGMIQGTLEPQLKSPTMLVFAGDHGITKEGVSPYPSEITAQMVKNFLSGGAAINVFCRQNGFDLKVIDAGVASDFEKHSLLVDEKIAYGTANFIKEKAMSENQAKECISRGEKLAEELPNPSCNVIGFGEMGIGNTSSSALMMHRLTGIKLESCVGRGTGLDDKGLSHKFKVLQEASEIHSGARRAIEVIAAFGGFEIAMMCGAMIASSRMGRILLIDGFIASTALLLAREIDPKVMDHAVFTHVSGEQGHRPLLEHLQVKPLLDLSLRLGEGTGAALAYPLLISAVAFLNEMASFESAGVSDRSDA

SEQ ID NO: 118536 - protein, 351 aa, Unknown
  Bacterial polypetide isolated from the Sargasso Sea
MTTPTHFPPPIAPLDEVLRKRLQHVIDHKTKPPGSLGQLEAIALQIGLIQHTERPVVQRPVMIVFAGDHGIAAEGVSPYPQAVTAQMVANFLAGGAAINAFSGVAQSTLEIVDAGVASPLPLSDRLVSLPVARGTRNFAAEPAMTRDEAMTALAAGAARVRLHASLGTNVIGFGEMGIANTSSAACLMSRLLSVPIDACVGRGTGLDDQGLAHKRAVLGRALVKHSHAIAPLDVLATFGGFEIAMMTGAYLAAASERMTILVDGFIATAALLVAERIAPGVRDYCVFSHASHEAGHRRMLEHFGAKPLLALDLRLGEGTGAALALPLVRAAAAFLTEMASFESAGVDNRDA

SEQ ID NO: 118537 - protein, 154 aa, Unknown
  Bacterial polypetide isolated from the Sargasso Sea
RGTGISDAQFELKLALIQQALQRPYAKDPLSILAEFGGFEIVQLCGAILGAAALQKPVLIDGFIVSVAALLACQMAPNCRDYLIFAHQGAEAGHKAVLKALDASVLLDLGLRLGEGTGAALAVPLLKAAISFYNDMASFADAGVTQVVEAGALE

SEQ ID NO: 118538 - protein, 339 aa, Unknown
  Bacterial polypetide isolated from the Sargasso Sea
MNQELASQLQSKLDGKTKPPGSLGDLEQLALRIGMIQGTLEPRLKSPTMLVFAGDHGITKEGVSPYPSEVTAQMVKNFLSGGAAINVFCRQHGFNLKVIDAGVASDFEKHPLLVDEKIAYGTANFLKEKAMSENQAKECISRGEKLAEELPDLSCNVIGFGEMGIGNTSSSALVMHRLTGIKLESCVGRGTGLDGQGLSHKFKVLQEASEIHSGARGAIEVIAAFGGFEIAMMCGAIIASSRMGRILLIDGFIASTALLLASEMDPKVMDHVVFTHVSGEQGHRPLLEHLQVKPLLDLNLRLGEGTGVALAYPLLVSAVAFLNEMASFESARVSDRSDA

SEQ ID NO: 118539 - protein, 309 aa, Unknown
  Bacterial polypetide isolated from the Sargasso Sea
DHVARLKAETRQQQLTKPAGSLGRLESLAIHLAALQGRERPSLDTLSIAIFAGDHGVVAEGISAYPQAVTGQMLANFVTGGAAISVLARQLDAALEVIDLGTAEPLPPLPGVRHLQVGAGTQNFARDPAMTLAQVMICLEAGRDSIQRARASGCDLFVGGEMGIGNTTAAAALACWLLGCPASQLAGPGTGLDNAGVAHKARVIDAALALHCAQIDGPLQALIHLGGFEIAALTGAYLAAAQQGIAVLVDGFICSVAALLAVRLNPGCRDWLLFAHHGAEPGHVRVLQALAAEPLLELGLRLGEGSGAA

SEQ ID NO: 118540 - protein, 312 aa, Unknown
  Bacterial polypetide isolated from the Sargasso Sea
VQFGRIQNSLNPELINPTILVFAGDHGITEERVSPYPQEVTTQMVINFLNGGAAINVFCHQNNISLHVIDAGVKADFPECNELINAKIGRGTKNFCKEAAMSFDECERAIEKGAELSRTVPLSTCNVIGFGEMGIGNTSSAAALTHRFTGLPVEDCVGKGTGLDDQGLEHKQNTIRQALEKHAEIKEPQAVLSTFGGFEIAMMVGAMLESAVLKRIILIDGFIATAAFLAALRIVPEIKQYAVFAHKSDEQGHGKILKYMQVEPLISLGMRLGEGTGAAVAFPILQSAVSFLNQMASFESAGVSSRTDVKKS

SEQ ID NO: 118541 - protein, 353 aa, Unknown
  Bacterial polypetide isolated from the Sargasso Sea
MTFLSAVPGLTDVEPLDQTLRAELQRIIDTKTKPPGSLGRLETLARQLGLIQRTTHPTVERPAMIVFAGDHGIAQEGVSPYPQAVTAQMVANFLAGGAAINALSRVCGVELEVVNSGIATPLPSTEGLIDIPVAAGTRNFAHEPAMTREQALAAMQSGAARVRHHLALGTNVIGFGEMGIANTSSAACLMSRLCGVPIDECVGRGTGLDNAGLAKKRNVLASALAHHAASSDPLDVLATFGGFEIAMMTGAYLAAAQARMTILVDGFIATSALLVADAFAPTVREYCVFAHASNEAGHRRMLDHFGALPLLSLDMRLGEGTGAVLAVPLLRAAVAFVNEMASFESAGVANRDA

SEQ ID NO: 118542 - protein, 350 aa, Unknown
  Bacterial polypetide isolated from the Sargasso Sea
MSQSSLSFQIEPVSKAQDQVIQQKIDLKTKPPGALGQLESLALQIARIQGPQQLQIVKPTMLVFAGDHGIAAEGVSIAPSEVTHQMVQNFAHGGAAINVFCRQLGFTLEVIDCGILTPVEGLEGIIDQRLGAGTAAIHLEPAMPLTSVDKGFDMARELIERHHQAGCNLVAFGEMGIGNTSSAAAIMAAIMQLDVADCVGRGTGINSDTLARKLTLVELALLSHQSALSGPKQVLACLGGFEIVQMTGAMLAAAERKMLVVVDGFIATAAALVAVTINANVRDYLIFAHCSEEQGHQRMLEYLQAKPLLSLGLRLGEGTGAALALPLIQAAVNFYNQMASFSDAGIEAVV

SEQ ID NO: 118543 - protein, 335 aa, Unknown
  Bacterial polypetide isolated from the Sargasso Sea
MNNFKNLATIYDIIKEMPVKDIEAEAKAIAHQNQLTKPPGALGILEELAVFLASWQRKTKPSLNSVQAIVFAGNHGICSQGVNPFPQEVTIQMVENFKAGGAAINQLCEVNGANLNIVPLSLDTPTADFTKEEAMSELELCEAMAIGAKSVNLESNLILLGEMGIGNSTISSALAASVFGGSVERWVGAGTGSDQKGQAHKTAVIELGIKKHGSIRDLRALQAFGGREQAAICGAILAARNARIPVLLDGFICAAAAAPLFGTSRGSLDHCLIGHLSVEPGHKLLLEAMEKSAILDLNMRLGEGTGAALALSIIRGAIACHNNMATFDSAGVSSK

SEQ ID NO: 118544 - protein, 350 aa, Unknown
  Bacterial polypetide isolated from the Sargasso Sea
MPQSVPLFQIEPVSKAQDQLIQQKIDLKTKPPGALGQLESLALQIARIQGAKQLQIVNPTMLVFAGDHGIAAEGVSIAPSEVTRQMVQNFAHGGAAINVFCRQLGFNLEVIDCGILTPVEDAEGIIDQRLGAGTAAIHLEPAMTLACVDKGFAMAQALIERHHQAGCNLVAFGEMGIGNTSSAAAIMAAIMQLDVADCVGRGTGINSETLERKQMLIELALLLHQSAMTGPRQVLACLGGFEIVQMTGAMLAAAERKMLVVVDGFIATAAALVAVNINANVRDYLIFAHRSEEQGHQRMLEHLKAKPLLSLGLRLGEGTGAALALPLIQAAVNFYNQMASFSDAGIEAVV

SEQ ID NO: 118545 - protein, 152 aa, Unknown
  Bacterial polypetide isolated from the Sargasso Sea
MSEKYVVTWDMLQIHARKLANRLMPSEQWKGIIAVSRGGLVPGALLARELGIRHVDTVCISSYDHDNQRELTVLKRAEGDGEGFIVIDDLVDTGGTAVAIREMYPKAHFVTIFAKPAGRPLVDDYVVDIPQDTWIEQPWDMGVVFVPPISGR

SEQ ID NO: 118546 - protein, 81 aa, Unknown
  Bacterial polypetide isolated from the Sargasso Sea
MASIFSIKYKDKNTSARSGVLTTDHGNIQTPFFMPVGTYGAVKTQSSEEINFLPSKILLSNTYHLYLRPGMEIVSQAGRIA

SEQ ID NO: 118547 - protein, 79 aa, Unknown
  Bacterial polypetide isolated from the Sargasso Sea
MALKNFAFKVLNKDRFARRGVIETHRGEINTPTFMPVGTQATVKACTIDDIKKTGSEIILSNTYHLMIRPGVERIEAAG

SEQ ID NO: 118548 - protein, 123 aa, Unknown
  Bacterial polypetide isolated from the Sargasso Sea
PSDIVAAVRRGVDMFDCVMPTRNGRNGHIFTSKGVINIRNEKYKDDMSPLDNESSHPWGQKFSRSYVRHLFNINEVLGLRISSTLNLVYYHDLMDKIKNEIEKNNFNTWSESILNRMKDMKGM

SEQ ID NO: 118549 - protein, 90 aa, Unknown
  Bacterial polypetide isolated from the Sargasso Sea
MTKFSWQITHQSKKNKARTGILTTPHGKINTPAFIFCATKGALKSSTTSTAKENNTQIILSNTYHLMLQPGSDLIANHGGLHKFLNWKSP

SEQ ID NO: 118550 - protein, 111 aa, Unknown
  Bacterial polypetide isolated from the Sargasso Sea
AVKRGVDMFDCVLPSRSGRTGLAFTWSGPINIKNAKYQYDTKPIDEKCEKFNLNKYSKNYLNHLFNTNEILASMLLTLHNINFYHELMNEIRININNGTFDHFFDEYIGKL

SEQ ID NO: 118551 - protein, 296 aa, Unknown
  Bacterial polypetide isolated from the Sargasso Sea
MVENGSIFYTTSDTETIVKLIAKSKRSTTIDKIIETLFQIQGGYALVMIAQNTLIGVRDPYGIRPLVIGKLKNSYVFTSETCALDIIGAKFVREVENGEIVYIENDELKSLKPFPKRKKRPCVFEYIYFSRPDSLIDGTTAYEYRKKLGSELSKEDDINADLVVPVPDSGNAAALGYSQNKNIKFDLGLIRNHYVGRTFIEPAQKIRSLGVKLKLNANKSSIKNKVIVLVDDSLVRGTTSYKIVNMLYEAGAKEVHLRIASPEIKFPDFYGIDMPSKKELLAANMSVDEICNYVKA

SEQ ID NO: 118552 - protein, 64 aa, Unknown
  Bacterial polypetide isolated from the Sargasso Sea
MEDIKKNFSFSVKHQNKNYRVGLIQTHRGEINTPAFMPVGTQATVKGVFIDDIIKTGSEIILSK

SEQ ID NO: 118553 - protein, 74 aa, Unknown
  Bacterial polypetide isolated from the Sargasso Sea
MPQENFSFNLLKENQEARLGKIKTRRGYIDTPAFMPVGTQASVKSVFIDDLIDTGTQIILSNTYHVMLRPGMKE

SEQ ID NO: 118554 - protein, 118 aa, Unknown
  Bacterial polypetide isolated from the Sargasso Sea
VGTPSDILGAVKRGVDMFDCVLPTRSGRTGLAFTWNGRINIRNAKYQFDNTPIDKNNSILNKYSKNYINHLFNTNEILASMILTLHNINFYQELMTAIRENIKKGNYDAFHDKYIGKL

SEQ ID NO: 118555 - protein, 286 aa, Unknown
  Bacterial polypetide isolated from the Sargasso Sea
IKRKNSNRKKSLLNISEEGALFKSFIDGRNYLLTPEKSIAIQRDIGADLILVFDECTPFHVDKSYTDQSMKRSHNWSTRSMNSFQKRNKYLPMKGSSGIQKLYGIIQGGIYKDLRDESIEFNINSKNFFGLAIGGSLGSTKEEMHEIVDYTASRLGNMHPIHLLGIGDPEDIWKLVKSGVDTFDCVSPTRLARHGSALVKGKKGKINIKNNKFSENLSPIDKNCHCNTCKNYSLAYLHHLLKAEELIVLNYITTHNIYFMNSLMKYIRESIKEDKIFEAEKNWYLD

SEQ ID NO: 118556 - protein, 150 aa, Unknown
  Bacterial polypetide isolated from the Sargasso Sea
AVGETQKQMFKTLEDLENFLPVNKPRYLMGVGTPSDILGAVKRGVDMFDCVMPTRAGRTGLAFTWEGRLNLRNAKYKKDDTPINKDTNVRNLNCYSKSYVNHLINTNEILASMILTINNIVFYQQLMGKIREAIKSNTFNTFYNKYIKLI

SEQ ID NO: 118557 - protein, 110 aa, Unknown
  Bacterial polypetide isolated from the Sargasso Sea
KSGIDTFDCVSPTRLARHGAALVRTKIGKVNLKNSIYKNSIDPIDKSCKCSTCKNYSTAYLHHLLKSQELLALNLITGHNVYFMNSLMKYIRDGIEKDNLDEAEKKWYSN

SEQ ID NO: 118558 - protein, 110 aa, Unknown
  Bacterial polypetide isolated from the Sargasso Sea
NLGIDMFDCVLPTRSGRTALAFTWGGKINLKNSKYQNDLSPLDENCKIRNLRNYSKSYLNHLIKSNEMMASMLISLHNINFYQEFMLEIRNNINRGTFSTFYKKYIDYFN

SEQ ID NO: 118559 - protein, 224 aa, Unknown
  Bacterial polypetide isolated from the Sargasso Sea
KDYTYNSMQRSHRWSQRSINAFNSNLNYKAKEGSSGTQEIYGIIQGGIYKDMREESIEFNQNNINTFGVAIGGSLGSSKAEMQEIVNFTASKLNNIRPVHLLGIGDPIDIWTFVEQGIDTFDCVSPTRLARHGSALVKGKHGKINLKNKKYNENLNPIDKNCLCYTCRNFTLSYLHHLFASQELLALQLLTNHNIFFMNNLMETIRIAIKENNFENKKNEWLNL

SEQ ID NO: 118560 - protein, 51 aa, Unknown
  Bacterial polypetide isolated from the Sargasso Sea
MLNTEFSFELIAQDDKARLGKIYTTKGTIETPAFMPVGTQGTIKSVFTEDI

SEQ ID NO: 118561 - protein, 94 aa, Unknown
  Bacterial polypetide isolated from the Sargasso Sea
MTDFSWNIKKKSKNSNARIGVISTPHGNIKTPAFIFCATKGALKSFSTADAKSNNSQIILSNTYHLMLQPGSELVAKHGGLHKFSGWNGPMLTD

SEQ ID NO: 118562 - protein, 236 aa, Unknown
  Bacterial polypetide isolated from the Sargasso Sea
LVFDECTPFHVDKSYTDLSMKRSHNWSIRSINSFLKSNKYLPMKGSSGSQKLYGIIQGGIYKDLRDESIDFNINLKNFFGLAIGGSLGSTKEEMHEIVDYTASRLGNMHPIHLLGIGDPEDIWKLVKSGVDTFDCVSPTRLARHGTALVKGKKGKINIKNNKFSENLSPIDKNCHCSTCKNYSLAYLHHLLKAEELIVLNYITTHNIYFMNSLMKYIRESIKREKIFEAEKNWYSD

SEQ ID NO: 118563 - protein, 65 aa, Unknown
  Bacterial polypetide isolated from the Sargasso Sea
MTLKKFNFNVLNNENYARVGLIKTKRGNINTPAFMPVGTQASVKSVVIEDIVKTGSEIILSNTTI

SEQ ID NO: 118564 - protein, 53 aa, Unknown
  Bacterial polypetide isolated from the Sargasso Sea
MQNNDFSFELVAQDEQARLGKINTSRGKIDTPAFMPVGTQGTIKGIFTDDMLK

SEQ ID NO: 118565 - protein, 42 aa, Unknown
  Bacterial polypetide isolated from the Sargasso Sea
MSLTKFSFKVLAEEKYARTGVINTHRGKIHTPAFMPVGTQAT

SEQ ID NO: 118566 - protein, 59 aa, Unknown
  Bacterial polypetide isolated from the Sargasso Sea
MTLKNFNFNVNHTENYSRVGVIETSRGNINTPAFMPVGTQATIKGAFIDDIVKTGSEII

SEQ ID NO: 118567 - protein, 114 aa, Unknown
  Bacterial polypetide isolated from the Sargasso Sea
ILGAVKRGIDMFDCVMPTRSGRTGLAFTWNGRINIKNNKYQNDDSALDEKCSNLDLNKYSKNYLNHLFNTNEILGSTLLTLHNINFYQELMTAIRKNINNRTFDDFHDKYIDKL

SEQ ID NO: 118568 - protein, 143 aa, Unknown
  Bacterial polypetide isolated from the Sargasso Sea
MKKFNWKVIKTSKDTRARVGLISTPHGEVETPAFVFCGTKGALKSCSAVDAKNNNTQIILSNTFHLMLQPGSNIISKHGGIHNFMNWQGPTLTDSGGFQIFSLGYGSVADEIKRKNTNQNKSLLNISEEGALFKSFIDGRNHL

SEQ ID NO: 118569 - protein, 61 aa, Unknown
  Bacterial polypetide isolated from the Sargasso Sea
SRAYLHHLIRNDEILGLTLISLHNIAHLIRFTNAISAAIRDNCFTNDFAPWKTSSIAHHTW

SEQ ID NO: 118570 - protein, 319 aa, Unknown
  Bacterial polypetide isolated from the Sargasso Sea
GEGQGDTDNGTVTEDGDSDTDVATVQTVGGKLDVTDVDNGEAVFQVQTNVADGNYGTFSIDADGNWTYVLNNSHIDVQSLAAGETLTRNITVTSADGTATHTVTITIVGANDPADITVGEGQGDTDNGTVTEDGDSDTDVATVQTVGGKLDVTDVDNGEAVFQVQTNVADSNYGTFSIDADGNWTYVLNNSHIDVQSLAAGETLTRNITVTSADGTATHTVTITIVGANDPADITVGEGQGDTDNGTVTEDGDSDTDVATVQTVGGKLDVTDVDNGEAVFQVQTNVADGNYGTFSIDADGNWTYVLNNSHIDGSHSPPA

SEQ ID NO: 118571 - protein, 80 aa, Unknown
  Bacterial polypetide isolated from the Sargasso Sea
KHKSSTEPVDGSCDCYTCENFPRGYLAHLDKCNEILGSQLATIHNLRFYQNHMAGIRQAIEAGELDEFARGFYAAQAEEE

SEQ ID NO: 118572 - protein, 309 aa, Unknown
  Bacterial polypetide isolated from the Sargasso Sea
RDAPELRGGGARRPPPRRGRLRARRPRRRGRAFRRDVPRQADVPARARAGVPVRARERCRRELAFGRGFASSRGRARVRSPRVRAKSARGEREPGRDAQRVDARLGVDRGHHADATGRERRRERRRTRNRPEIVIGFLGFLPVAPFRRRDARAGVRVPVGVAPVSGDPPDGDHPVCVRRDARVAGRGRRARGVSAREGRFPFGDRFAAPLPNRVLPVLRRRARVRRGRARRGELGAAGVGRRATAARQEFERRRRFANNRRRLRASVREIRHSPRVLVLGVSDQTAAIRRVVALGRKRAGHRRATTVRA

SEQ ID NO: 118573 - protein, 229 aa, Unknown
  Bacterial polypetide isolated from the Sargasso Sea
VQRVPRAAPRPRGLDADAARSRGRAHARRVREDRARECGDQRADRQAARRVHRHAEEPERSQGRSGRRVRRDERRASSRGRARRGRLQRGAPIGGRGDPVARAGQGRRRRARSHGGRAPRGPDGAGRQARGRPAKAAGGAAGGGASGARLAHVVARGAGGARRGRAPGAASEPRRAARRARRQAGRGVLASRRRGEGGARGANGARGAREQGARHRLQGGRGAVGPRAP

SEQ ID NO: 118574 - protein, 68 aa, Unknown
  Bacterial polypetide isolated from the Sargasso Sea
MALKKFAFNVLKKDKFARCGLIETHRGNIQTPAFMPVGTQATVKACTIDDIKKTGSEIILSKYLSPNG

SEQ ID NO: 118575 - protein, 56 aa, Unknown
  Bacterial polypetide isolated from the Sargasso Sea
MALKNFAFKVLKKDKFARCGLIETHRGNIQTPAFMPVGTQATVKACTIDDIKKTGS

SEQ ID NO: 118576 - protein, 82 aa, Unknown
  Bacterial polypetide isolated from the Sargasso Sea
LVFLRQYPLDILCECHTCKTFSRAYLHHLFKCKEILGLSLLTWHNLHFYLDLVKKARNSIVKKNFLEFEKSFLTKYYSKNGT

SEQ ID NO: 118577 - protein, 182 aa, Unknown
  Bacterial polypetide isolated from the Sargasso Sea
SIVQGGIYEDLREESIDFNLNKIDSFGIAIGGSLGSSKEEMYKVVNFTAQRLGNNHPIHLLGIGDPRDIWNLVKTGIDTFDCVSPTRLARHGSALIRGTPGKKNIKNNEFSNDMSPIDTSCNCSTCKNYSLAYLHHLFKAGELLGLQLITAHNIYFMNELMKLIRNSIKNDSLDKAEKDWFS

SEQ ID NO: 118578 - protein, 138 aa, Unknown
  Bacterial polypetide isolated from the Sargasso Sea
SETSDYLPKNKPRYLMGVGTPSDILGAVKEGIDMFDCVMPTRSGRTGLAFTWQGKLNLKNSKFSSDNSPLDQKCDIRDLNKYSKSYLNHLIKADEMLASMLISLNNLYFYQQFMLEIRKNIKNRTFARFYKKYIKFFD

SEQ ID NO: 118579 - protein, 112 aa, Unknown
  Bacterial polypetide isolated from the Sargasso Sea
GAVSKGVDMFDCVLPTRSGRTGLAFTWKGKINIRNSEYKNDNSPLDQNVTKFDLNKYSKNYINHLFNTNEMLGSMLLTLNNINFYQELMLEIRKHIKNGTFEDFYNKYIHIL

SEQ ID NO: 118580 - protein, 58 aa, Unknown
  Bacterial polypetide isolated from the Sargasso Sea
MKKDFSFKLISKNKKARLGKIITHRGSIDTPAFMPVGTLGTVKGVFVDDLKKLILKSF

SEQ ID NO: 118581 - protein, 46 aa, Unknown
  Bacterial polypetide isolated from the Sargasso Sea
MEFSLLKTEGSARLGQLSFDRGVVDTPAFMPVGTYGTVKSLTPEEV

SEQ ID NO: 118582 - protein, 92 aa, Unknown
  Bacterial polypetide isolated from the Sargasso Sea
GSALVKGKKGKINIKNNKFSENLSPIDKNCQCSTCKNYSLAYLHHLLKAEELIVLNYITTHNIYFMNSLMKYIRDSIKIDKIFEAEKNWYSG

SEQ ID NO: 118583 - protein, 241 aa, Unknown
  Bacterial polypetide isolated from the Sargasso Sea
MTPELSIQIQETLNSNIAMILDQLIDINASKDMQKQAIINTNIWAKKARDIHNNKNQSLFGIIQGGKYKDLREISTKNMIENGFNGYAIGGLAIGETENERNEIVSFTTDLIPVDKLRYVMGVGDIKSLINLIEFGVDMFDCVWPARIARHGKIINRAKYFNLKNSKYKNIKEPLVQDCNCNTCLNFSTSYMRHLLINEPTSSWQYLTIHNIYQTQNIINEVRESILNSDFDNYKERLLNE

SEQ ID NO: 118584 - protein, 183 aa, Unknown
  Bacterial polypetide isolated from the Sargasso Sea
YGIVQGGIYEDLREESIDFNLNKINTFGIAIGGSLGSSKEEMYDVVNFTAPKLGNKNPIHLLGIGDPTDIWKLVKSGIDTFDCVSPTRLARHGSALVKGKIGKKNIKNNEYSNDLSPIDINCACSTCKKYSIAYLHHLFKSGELLGLQLITAHNIYFMNELMELIRDSINNDCLEEAEKDWFS

SEQ ID NO: 118585 - protein, 63 aa, Unknown
  Bacterial polypetide isolated from the Sargasso Sea
MASKDFAFKIISKDKFARRGLIETHRGNINTPAFMPVGTQATIKACTIDDIKKTGSEIILSNT

SEQ ID NO: 118586 - protein, 109 aa, Unknown
  Bacterial polypetide isolated from the Sargasso Sea
VLPTRNARNGQLFTSEGVINIRNAEFKNSDEPIDKNCENKVSQKYSRAYLNHLQRTNEMLGSMLATYHNIYYYQSLMQGIRDSIKNNLFAKFVKDFYNKRNLDVPEGPL

SEQ ID NO: 118587 - protein, 62 aa, Unknown
  Bacterial polypetide isolated from the Sargasso Sea
MVCNTYSAAYLHHLFNAKEMLGGMLLSLHNIYFYQNLMKEIRASIEEKRFQRFSEEFLSNYN

SEQ ID NO: 118588 - protein, 141 aa, Unknown
  Bacterial polypetide isolated from the Sargasso Sea
MNKWDLLRVFLMSLLLLLLLSFYYVQGFFSFNYAEINEELPKPIISDNSFEEFKSRDIDVSTANKSNLGFELVGIRGNNPESTIIILERDDYRLVEQGQNINSSVIFSHIDGSRAYFFDGQTYTFLDIIGTETSFNKNRIN

SEQ ID NO: 118589 - protein, 136 aa, Unknown
  Bacterial polypetide isolated from the Sargasso Sea
MKKFNWKVTKTSKYTRARLGIITTPHGKVETPAFIFCGTKGALKSCSTGEAKNHNTQIILSNTYHLMLQPGSDIISKHGGIHNFMNWQGPILTDSGGFQIFSLGHGSVADEIKRKNSNRKKSLLNISEEGALFKSF

SEQ ID NO: 118590 - protein, 130 aa, Unknown
  Bacterial polypetide isolated from the Sargasso Sea
MINFNIKKKIGKARVGEMVVNNHTIETPVFMPVGTAATVKSITPQDLKDIGYKIILSNTYHLYLRPGTEVISHHKGLHDFMGWENAILTDSGGYQVYSLSKLRKISQDGVKFNSPVDGSTLFMSPEKSME

SEQ ID NO: 118591 - protein, 164 aa, Unknown
  Bacterial polypetide isolated from the Sargasso Sea
MINKFNFKLLSKDKNARLGKLETAHGDIDTPIFMPVGTAATVKAMHLRDIKASGAQIILANTYHLMLRPGQENIKKMGGVRKFMGWNKPLLTDSGGFQIMSLGKLRKIQNDGVTFKSHLDGTKYFLSPEISTDIQNSLDATITMQLDECIPFPASYEESERAMK

SEQ ID NO: 118592 - protein, 300 aa, Unknown
  Bacterial polypetide isolated from the Sargasso Sea
PVKVNNILDHKMHKEWGSVSDITSNIINKAIANNNRIISVGTTSLRILETIAKINNGKIKPWSGFTDLFITPGFKFEIVNLLITNFHLPKSTLLMLVSAFHGQENIFKKYQHAIEQKYRFFSYGDCCIFSRDNNNDMINKFNFKLLSKDKNARLGKLETAHGDIDTPIFMPVGTAATVKAMHLRDIKASGAQIILANTYHLMLRPGQENIKKMGGVRKFMGWNKPLLTDSGGFQIMSLGKLRKIQNDGVTFKSHLDGTKYFLSPEISTDIQNSLDATITMQLDECIPFPASYEESERAMK

SEQ ID NO: 118593 - protein, 88 aa, Unknown
  Bacterial polypetide isolated from the Sargasso Sea
MTLKKFNFNVNYTENYSRAGVIETSRGNINTPAFMPVGTQGTIKGAFIDDIIKTGSEIILSNTYHLMIRPGVERISSIGGLHQFMNCN

SEQ ID NO: 118594 - protein, 212 aa, Unknown
  Bacterial polypetide isolated from the Sargasso Sea
MAYKLISNDTNARAGILSINNIEVQTPTFMPVATRGAIKSTPHQYLDKTSILLANAYHLLLRPGAELINDLGGLHKFMNWNKLILTDSGGFQAWSLPTKLLDDGIEFKNVYDGSFFKMTPEESINTQNLLGSDIAMIFDYLIDYDRSDDDQMKAIEITSQWAEKAKSVHKNNKQDLFGIVQGGLNLDLRETSAKSMIELDFDGYAIGGLAIG

SEQ ID NO: 118595 - protein, 330 aa, Unknown
  Bacterial polypetide isolated from the Sargasso Sea
MIYISEDYEINKTTYNEIINKKKNGYNIVCVGTTTLRTLEHVYNTSTFKGKTNLFITKGFKFNVADYLITNFHAPKSSLLSIVQTIYGDSWKKLYAFALENNMKFLSFGDAVMFKIKNMAYKLISNDTNARAGILSINNIEVQTPTFMPVATRGAIKSTPHQYLDKTSILLANAYHLLLRPGAELINDLGGLHKFMNWNKLILTDSGGFQAWSLPTKLLDDGIEFKNVYDGSFFKMTPEESINTQNLLGSDIAMIFDYLIDYDRSDDDQMKAIEITSQWAEKAKSVHKNNKQDLFGIVQGGLNLDLRETSAKSMIELDFDGYAIGGLAIG

SEQ ID NO: 118596 - protein, 118 aa, Unknown
  Bacterial polypetide isolated from the Sargasso Sea
MSKFSWTILKTSKKNKARIGKITTPHGDIETPAFIFCATKAALKSFTTKDAKNNNTQIILSNTYHLMLQPGSNLISKHGGLHKFIGWNGPMLTDSGGFQIFSLGYGSVADEIKGRKQI

SEQ ID NO: 118597 - protein, 113 aa, Unknown
  Bacterial polypetide isolated from the Sargasso Sea
MGAVKRGIDMFDCVLPTRSGRTGLAFTWNGRINIRNAKYKNDKNPLDKSVSKFDLNMYSKNYLNHLFNTNEMLGSMLLTLHNINFYQELMTEIRKNIKNGTFNVFHDKYINKL

SEQ ID NO: 118598 - protein, 77 aa, Unknown
  Bacterial polypetide isolated from the Sargasso Sea
MASKDFAFRIISKDKFARSGLIETHRGNINTPAFMPVGTQATIKACTIDDIKKTGSEIILSNTYHLMIRPGVHRIES

SEQ ID NO: 118599 - protein, 122 aa, Unknown
  Bacterial polypetide isolated from the Sargasso Sea
MGVGTPSDILGSVKRGIDMFDCVLPSRSGRTGLAFTWNGPINIKNAKYQNDTKPIDEKCEKFNLNKYSKNYLNHLFNTNEILASMLLTLHNINFYHELMNEIRININNGTFDQFFDEYIAKL

SEQ ID NO: 118600 - protein, 208 aa, Unknown
  Bacterial polypetide isolated from the Sargasso Sea
SNTYHLMIRPGVERIETAGGLHNFMNCDLPILTDCGGFQVMSLSKLNKIDREKGAIFNSHVDGKKFYLSPEESIRIQLGLNSDIVMIMDECPKKTNDYNLIKKSMDLSLYWAERSKVAFGSNPHKALFGIVQGGLFKDLRLKSLQELVKIGFDGYAIGGLAVGETQNEMFNVLDDIKEYLPIEKPHYLMGVGTPIRYFRCRQKRYRYV

SEQ ID NO: 118601 - protein, 111 aa, Unknown
  Bacterial polypetide isolated from the Sargasso Sea
SVGVDMFDCVIPTRHARNGQIYTHSGVVKIKNARYINDLGPLDDECGCYTCSNFTRSYLRHLFNCNEILGLRLATIHNLSFYIKLMDDIRKSIQSETFEKFAKNFIQSYQQ

SEQ ID NO: 118602 - protein, 70 aa, Unknown
  Bacterial polypetide isolated from the Sargasso Sea
MIQFEIVALNNNSRAGILKTPDGLIHTPVFMPVGTSATVKGMTTEEIKELNSGNNFMGILTIYIFVQEIQ

SEQ ID NO: 118603 - protein, 129 aa, Unknown
  Bacterial polypetide isolated from the Sargasso Sea
YDKPRYLMGVGTPSDILGAVKRGIDMFDCVLPTRSGRTGLAFTWNGRVNIRNAKYKNDNTPLNVDTNKFNLNKYSKNYLNHLFNTNEMLGSMLLTLHNINFYQELMNSIRGNIKNGTFHEFHDKYIGKL

SEQ ID NO: 118604 - protein, 164 aa, Unknown
  Bacterial polypetide isolated from the Sargasso Sea
MIFDIKEHCGKARTGLIKTKFSEIETPAFMPVGTLATVKGIDKANLEELNYNIILANTYHLMLRPGIETIDKLGGLNKFMSWDKSILTDSGGYQVMSLGDNVKVDKEGVTFRSHLDGKLERLNAEKAINIQHKLDSTITMIFDECMAHPASYDDVESSLYRSMS

SEQ ID NO: 118605 - protein, 187 aa, Unknown
  Bacterial polypetide isolated from the Sargasso Sea
MLQPGSELVAKHGGLHKFTGWNGPMLTDSGGFQIFSLGHGSVADEIKGRKTNSKNKKTLINLNEEGALFKSYIDGSTHMLSPEKSIQVQRNLGADFILVFDECTPYNVDKTYTSDSMLRSHRWSLRSINAFNSKLNYNPKNGSAGRQEMYGIIQGGIYRDLREESIEFNTKKINTFGVAIGWKFRIK

SEQ ID NO: 118606 - protein, 85 aa, Unknown
  Bacterial polypetide isolated from the Sargasso Sea
KNDDSPIDENSDSKVCKNYSKAYLHHLDKTNEMLGSMLASYHNIYYYHELMKQIRQSIDDDIFVNFAKDFYNNRNLPIPDYLEGL

SEQ ID NO: 118607 - protein, 93 aa, Unknown
  Bacterial polypetide isolated from the Sargasso Sea
MALKKFSFNVVEKNKHSRCAQIKTHRGIINTPAFMPVGTQATIKAAFIDDIIKTGSEIILSNTYHLMLRPGVDRIKEAGGLHSFMNCPLPNIN

SEQ ID NO: 118608 - protein, 93 aa, Unknown
  Bacterial polypetide isolated from the Sargasso Sea
MALKNFNFNVNYTENHSRVGVIETSRGKINTPAFMPVGTQATVKGAFIDDIKETGSEIILSNTYHLMIRPGVDRISTLGGLHEFMNCSLPILT

SEQ ID NO: 118609 - protein, 275 aa, Unknown
  Bacterial polypetide isolated from the Sargasso Sea
HGKVETPAFIFCGTKGALKSCSTSEAKNNNTQIILSNTYHLMLQPGSDIISKHGGIHNFMNWQGPILTDSGGFQIFSLGHGSVADEIKRKNSNRKKSLLNISEEGALFKSFIDGRNYLLTPEKSIAIQRDIGADLILVFDECTPFHVDKSYTDQSMKRSHNWSVRSINSFLKSNKYLPMKGSSGSQKLYGIIQGGIYKDLRDESIEFNINSKNFFGLAIGGSLGSTKEEMHDIVDYTASRLGNMHPIHLLGIGDPEDIWKLVKSGVDTFDCVSPT

SEQ ID NO: 118610 - protein, 147 aa, Unknown
  Bacterial polypetide isolated from the Sargasso Sea
MKNFAWNVEYKSKKNNARTGTIITPHGKISTPAFIFCATKGALKASSTNLARENNTQIILSNTYHLMLQPGGDLIANHGGLHKFLNWNGPMLTDSGGFQIFSLGHGSVSDEIKGRANTKRNKTLLSISEEGCLFKSYLDGSFKLLSP

SEQ ID NO: 118611 - protein, 84 aa, Unknown
  Bacterial polypetide isolated from the Sargasso Sea
MTLKKFNFNVLKKEKFARLGKIITSRGTIDTPVFMPVGTQATVKGTFIKDVIKAGSQIVLSNTYHLMIRPGADRVKKLVVYIIL

SEQ ID NO: 118612 - protein, 161 aa, Unknown
  Bacterial polypetide isolated from the Sargasso Sea
QLGALQLGEEKNAMFDTIEFCDSLLPKDKPRYLMGVGRPTDIVKAIQRGVDMFDCVLPTRNGRNGQIFTSNGTINITNEKYKDDHSYIDKNSNHAFGRMFTKAYIRHLFGIKEILGLRIASTLNLSFYISLIKKIQQVIQLGQFDSWSNSWLNDMKHHKDM

SEQ ID NO: 118613 - protein, 236 aa, Unknown
  Bacterial polypetide isolated from the Sargasso Sea
MEDFFKILNTDGNSRTAIMSINNIKIQTPCFMPVATQASVKSLDSFDLKEIGYNLILSNIYHMAVRPGINYLNQFGGIHKFMNWDGLILTDSGGFQGYSLAHRVKIKNDGIIFQSHLDGKEIYFKPKEVVKYQENIGSNIMMPLDICLPKGSSEKKLIDALETTYEWAKQSISARSSNSSKLFGIIQGGNNLELRELSANKMTGLNFDGFAYGGLSVGENKELMINTQLSANKLYQ

SEQ ID NO: 118614 - protein, 174 aa, Unknown
  Bacterial polypetide isolated from the Sargasso Sea
EDLRKKSLEQLIKINFDGYAIGGLAVGETQKEMFNTLDFLKDLMPTDKPRYLMGVGTPSDILGAVKRGVDMFDCVLPTRSGRTGLAFTWNGRINIRNAKYQKDNSPLDKKCKNFGLNKYSKNYLNHLFNTNEILASMLLTLHNINFYQELMGSIRMHIKNGTFDDFHDRYLDKL

SEQ ID NO: 118615 - protein, 145 aa, Unknown
  Bacterial polypetide isolated from the Sargasso Sea
ERMMVLESLMPQMSENIPRYLMGLGTPIDIIKAVSVGVDMFDCVIPTRHARNGQIYTHSGVVKIKNARYINDLAPLDDECGCYTCSNFTRSYLRHLFNCNEILGLRLATIHNLSFYIKLMDDIRKSIQSETFEKFAKNFIQSYQQ

SEQ ID NO: 118616 - protein, 284 aa, Unknown
  Bacterial polypetide isolated from the Sargasso Sea
MDVSDRTVDDVVAPGKDRLAHVDDDGVTFTSHLDGSRHRFTAEVSMQVQHALGADIIFAFDECTTLMNSRDYQQVAMRRTLEWAKRCIAEHRRITADRPERAYQALFGVIQGAQYEDLRRQAASDIAALPFDGFGIGGAIEKERMADIVRWACEELPEGKPRHLLGIGEPQDFFTAIASGADTFDCVSPARVARNAALYTSRGRFNVTASINRRTFAPIEEGCTCYTCQNYTRAYLHHAFKAKESIAATLATIHNQHFIVNLVNNIRVAIEAGDFHAYREAFLG

SEQ ID NO: 118617 - protein, 97 aa, Unknown
  Bacterial polypetide isolated from the Sargasso Sea
ITSFGELNIRNSEHKTSSEPIDPDCACKVCKNYSRAYLHHLDKTREILGSILSSYHNIFYYQTLMSQIREAIETESFAKFIKDFYNKRQKLVPEHLQ

SEQ ID NO: 118618 - protein, 121 aa, Unknown
  Bacterial polypetide isolated from the Sargasso Sea
MLNNFFSFELIAHDGKARLGKINTSRGIIDTPTFMPVGTQGTVKGIFPDDILKTKTQIILGNTYHLLLRPGIEVLNKFNGLHGFMNWNKPILTDSGGYQIMSLSKLNKIDIKLGSYLQISS

SEQ ID NO: 118619 - protein, 275 aa, Unknown
  Bacterial polypetide isolated from the Sargasso Sea
MTNFSWKIKYQSKKNKARTGTLTTPHGKISTPAFIFCATKGALKSSTTSTAKENNTQIILSNTYHLMLQPGSDLIANHGGLHRFLNWEGPMLTDSGGFQIFSLGYGSVADEIKGSSNIKRNKTLLSISEEGSLFKSYLDGSLKFLSPEKSIEIQRNLGADLILVFDECTPFHVDKSYTESSMRRSHRWATRSLNRFNSEIKFKPHFGSAGEQKLYSIVQGGIYEDLREESIDFNLNMINSFGIAIGGSLGSSKEEMYKVVNFTAPRLGTNIQFIF

SEQ ID NO: 118620 - protein, 127 aa, Unknown
  Bacterial polypetide isolated from the Sargasso Sea
KPRYLMGVGTPADILGAVKRGIDMFDCVLPTRSGRTGLAFTWNGRINIKNKKYQNDNTPLDSKCNNLNLNKYSKNYLNHLFNTNEILASMLLTLHNINFYQELMTSIRAAINNGTFDEFHDKYIDKL

SEQ ID NO: 118621 - protein, 247 aa, Unknown
  Bacterial polypetide isolated from the Sargasso Sea
MSFKIINKDLLSNARTGELKLKRLTVKTPFFMPVCTNATPKAVTFEVLNNIGYEMIVSNAYHLFLRPGSEFIKKNFTNLHRFCGWEKGILTDSGGFQIWSLGSLVKIESDGVIIKSHIDGKLNKLSPELSIQIQEDLGSDIMMIFDDCPKPDVDYSHLLSSINRTKVWAEKSKKIKKTENLIFGIVQGGIYKSLRKISAKHMIDLDFDGIAIGGLGLGEGAQKTYEITNDVCEILLLNKPRYSMGIG

SEQ ID NO: 118622 - protein, 163 aa, Unknown
  Bacterial polypetide isolated from the Sargasso Sea
MSQFSWKIKKKLKNNNARIGIISTPHGDIETPAFIFCATKAALKSFTTRDAKENKTQIILSNTYHLMLQPGSQIIAKHGGLHKFIGWNGPMLTDSGGFQIFSLGHGSVADEIKGRKSNSNIKKTLLSISEEGAIFKSYIDGANLLLSPRKINPNTEGSRGRFY

SEQ ID NO: 118623 - protein, 47 aa, Unknown
  Bacterial polypetide isolated from the Sargasso Sea
MPKEKPRYLMGVGTPSDILGAVKRGIDMFDCVMPTTSGRTGLAFTWN

SEQ ID NO: 118624 - protein, 92 aa, Unknown
  Bacterial polypetide isolated from the Sargasso Sea
MTLKKFNFNVNYTENYSRAGVIETSRGNINTPAFMPVGTQGTIKGAFIDDIIKTGSEIILSNTYHLMIRPGVERISSIGGLHQFMNCNLPIL

SEQ ID NO: 118625 - protein, 87 aa, Unknown
  Bacterial polypetide isolated from the Sargasso Sea
MFKLIAKDGEARRGEVSTEHGTFQTPAFMPVGTYGAVKSISPEILHSINAEIILSNTYHLMERPGVDIIKLNGGLHNFMSWDKPILT

SEQ ID NO: 118626 - protein, 140 aa, Unknown
  Bacterial polypetide isolated from the Sargasso Sea
KVLDYIKSYMPINKPRYLMGVGTPTDILGSVMRGVDMFDCVLPTRAGRTGLAFTWNGRMNIRNAKYKKDNEPLDKSVKIFDLNKYSKNYINHLFNTNEMLGSMILTLNNINFYQELMFEIRKNIKRGTFTKFYRKYANKL

SEQ ID NO: 118627 - protein, 138 aa, Unknown
  Bacterial polypetide isolated from the Sargasso Sea
LDCIKNCLPIDKPRYLMGVGTPSDILGAVKRGVDMFDCVLPTRSGRTGLAFTWNGRIQIRNSENKFDNTPLDRSVTKFDLNKYSKNYLNHLHNTNEILSSMILTLNNINFYQELMYEIRKNIKMGTFDQFHDKYINIL

SEQ ID NO: 118628 - protein, 320 aa, Unknown
  Bacterial polypetide isolated from the Sargasso Sea
  misc_feature (315)..(315): Xaa can be any naturally occurring amino acid
HLCQCKQGVQLNLSLFNYLEKTDVLLANTYHLYLRPGLDVIKEFEGLHNFIGWDNLILSDSGGFQGWSIPNKFNEDGIEFKNIYDGSKFFMDPILSMDIQNTLNSDIAMILDSLVDIDKDYNNQLQSINTTKKWAEIARDYHSNNNQSLFGIVQGGKFLELREKSSIDMVSLNFDGYAIGGLAIGETPEERKNIVDFTVDFLPKDKLRYVMGLGDIEGMLNLIDSGIDMFDCVWPARLARHGKIINKGKFFNLKNSQFKNDTEPLVLECECFVCKKYSKAYLRHLLINESTSAWLYLTLHNIFQTENILSEVRKXYIKLR

SEQ ID NO: 118629 - protein, 156 aa, Unknown
  Bacterial polypetide isolated from the Sargasso Sea
VEFKNPRNGSHVFLSPEKVIQIQMDLGSDVAMAFDHCPPHTANENDIEDSLQRTHSWLKKCVETHQKSNQALFGIVQGGKYPRLREYSAKYTSSFDLPGIAVGGVSVGEAVEEIHGVINYVPKFLPINKPRYLMGIGSLKEISLAVANGFDIFDCV

SEQ ID NO: 118630 - protein, 110 aa, Unknown
  Bacterial polypetide isolated from the Sargasso Sea
SKRGIDMFDCVLPTRSGRTGLAFTWSGRINLKNQKYQNDNTPLDAQCNNLNLNKYSKNYLNHLFNTNEILASMLLTLHNINFYQELMAAIRKSINRGAFDEFHDKYIEKL

SEQ ID NO: 118631 - protein, 108 aa, Unknown
  Bacterial polypetide isolated from the Sargasso Sea
RGIDMFDCVLPTRSGRTGLAFTWQGRVNITNNKYKKDNTPLDPNCSNLNLNKYCKNYLNHLFNTNEILASMLLTLHNINFYQELMSNIRKNINNGTFDEFHDKYVDKL

SEQ ID NO: 118632 - protein, 275 aa, Unknown
  Bacterial polypetide isolated from the Sargasso Sea
FSLARLNKISDEGVAFQSHLDGSKHLFTPEISMKIQRDLGSDIIMAFDECPSGKSSLETVKNAVRRTTDWMSRCHKWLSKNPERYSHEQAIFPIIQGGTHHSLRLQSAEQLIPYSTIGMAIGGLAVGEEKDAMLDTVEYCDSILPKDQARYLMGVGKPSDILAAVNRGVDMFDCVMPTRNGRNGHIFTSKGVINIRNEKFKEDLGPIDTESSHPWGQKFSRSYVRHLFNINEVLGLRIASTLNLVYYHDLMKRIKNEIVKGNFNNWSKETLNKMK

SEQ ID NO: 118633 - protein, 253 aa, Unknown
  Bacterial polypetide isolated from the Sargasso Sea
KTSKDSRARTGIITTPHGEVETPAFIFCGTKGALKSCSTEEAKNNNTQIILSNTFHLMLQPGSNIIAKHGGIHNFMNWQGPILTDSGGFQIFSLGNGSVADEIKRKNSNRNKSLLNISEEGALFKSFIDGRNHLLTPEKSIEIQRDIGADIILVFDECTPFHVDKSYTDQSMQRSHNWSTRSTNSFQKRNRYLPMNGSSGSQKLYGIIQGGIYKDLREESIEFNINSKNFFGLAIGGSLGSTKEEMHEIVDYT

SEQ ID NO: 118634 - protein, 188 aa, Unknown
  Bacterial polypetide isolated from the Sargasso Sea
MFEEKFSFNLLNENIKARLGQIHTHRGNIDTPTFMPVGTQATIKSAFIDDVISSGAQIILSNTYHLMIRPGTERIKRAGGLHQFMNCNLPILTDSGGFQIMSLSKFVKIDKNKGAIFNSHLDGKKFILSPEESIKIQKDLNSDIVMVLDECPKLSRNKSAIHKSLKLSHHWAERSKNEFGNNPKKALL

SEQ ID NO: 118635 - protein, 167 aa, Unknown
  Bacterial polypetide isolated from the Sargasso Sea
LNELINIDFDGYALGGLAVGETQEEMFKVLDDVKEYLPDDKPHYLMGVGTPSDILGAVKRGIDMFDCVLPTRSGRTGLAFTWNGRLNIKNNKFRNDNTPLDSYCDNLSLNKYSKNYLNHLFNTNEILGSMLLTLHNINFYQELMSEIRDHIEKGTFDKFHDKYINKL

SEQ ID NO: 118636 - protein, 150 aa, Unknown
  Bacterial polypetide isolated from the Sargasso Sea
AVGEPQKEMFDVLDCIKDKLPIDKPRYLMGVGTPSDILGAVKRGIDMFDCVLPTRSGRTGLAFTWNGRIQIRNSENKLDNTPLDSNVTKFDLNKYSKNYLNHLHNTNEILASMILTLNNINFYQELMYEIRKNIKMGTFEEFHDKYINIL

SEQ ID NO: 118637 - protein, 136 aa, Unknown
  Bacterial polypetide isolated from the Sargasso Sea
MPQMSENIPRYLMGLGTPIDIIKAVSVGVDMFDCVIPTRHARNGQIYTHSGVVKIKNARYINDLGPLDDECGCYTCSNFTRSYLRHLFNCNEILGLRLATIHNLSFYIKLMDDIRKSIQSETFEKFAKNFIQSYQQ

SEQ ID NO: 118638 - protein, 118 aa, Unknown
  Bacterial polypetide isolated from the Sargasso Sea
MALKNFAFKVISKDKSSRCGIIETHRGNIQTPTFMPVGTQATIKACTIDDIKKTGSEIILSNTYHLMIRPGVERIKRAGGLHTFMNCDLPILTDSGGFQVMSLSKLNKIDREKGALFN

SEQ ID NO: 118639 - protein, 109 aa, Unknown
  Bacterial polypetide isolated from the Sargasso Sea
MSSNIYKLIAKDGLARRGEIKTIHGKFQTPAFMPVGTYGAIKSVSPLTLENLEAEIVLSNTYHLMERPGIEIIKSHGGLHNFMGWSGPILTDSGGYQVFSLSKKRTINE

SEQ ID NO: 118640 - protein, 224 aa, Unknown
  Bacterial polypetide isolated from the Sargasso Sea
PAPYEKIADSMKLSMRWAQRSRDAFGDRPGYALFGIQQGGLEHELRAQSAEILRSIEFDGYAIGGLAVGEGQEAMFRVLDFAPGMFPADKPRYLMGVGKPSDIVGAVKRGIDMMDCVLPSRSGRTGQAFTHRGVVNIKNARHQNDPRPLDASCQCPACKNYSRAYLHHVFKSQEIISSMLITWHNLHYYQELMEKMRKAVLNQSFSDFELEFNENLSLGDLDPI

SEQ ID NO: 118641 - protein, 121 aa, Unknown
  Bacterial polypetide isolated from the Sargasso Sea
MNKEKFSFNLLKEDGLARLGKISTHRGSIDTPAFMTVGTQATIKSAFIDDVILSKAQIILSNTYHLMIRPGVERIKRVGGLHEFMNCKLPILTDSGGFQIMSLSKLVKIDEKKGSKFLILT

SEQ ID NO: 118642 - protein, 130 aa, Unknown
  Bacterial polypetide isolated from the Sargasso Sea
NIPRYLMGLGTPIDIIKAVSVGVDMFDCVIPTRHARNGQIYTHSGVLRIKNARYINDLESLDEKCECYTCNNFSRSYLRHLFNCNEILGARLATIHNLSFYIKLMADIRMSIQSDNFEEFAKNFIQSYQQ

SEQ ID NO: 118643 - protein, 237 aa, Unknown
  Bacterial polypetide isolated from the Sargasso Sea
MNDYSWQITSTSSTKARTGIISTPHGRIKTPAFIFCATKGALKSLSVEDAKNAGTQIILSNTYHLMLQPGGEIISKHGGIHKFINWNGPMLTDSGGFQIFSLGHGSVANEIKGKTNYVKNKSLIKISEEGALFKSYLDGSNILLTPEKSIELQRQIGANLILVFDECTPFNVDKKYTSDSMHRSHRWSDRSLKTFNTRSNFEPTFGSSGQQKLYGIIQGGIYNDLREESIEFNLKND

SEQ ID NO: 118644 - protein, 152 aa, Unknown
  Bacterial polypetide isolated from the Sargasso Sea
MDNKFNFKLLSKDKNARLGKLETAHGDIDTPIFMPVGTAATVKAMHLRDVKASGAQIILANTYHLMLRPGQKNIKKMGGVRKFMGWNKPLLTDSGGFQIMSLGKLRKIENDGVTFKSHLDGTKYFLSPEISTDIQNALDATITMQLDECIPF

SEQ ID NO: 118645 - protein, 145 aa, Unknown; identical to SEQ ID NO: 118615
  Bacterial polypetide isolated from the Sargasso Sea

SEQ ID NO: 118646 - protein, 155 aa, Unknown
  Bacterial polypetide isolated from the Sargasso Sea
VGEEKEAMFDTIEFCNTMLPIDQPRYLMGVGRPTDLIKAVLRGVDMFDCVMPTRNGRNGHIFTSKGVINIRNEKYKKDFSSLDLNSSHIWGKLYSKSYVRHLFNINEILGLRIASTLNLVFYIDLMLEIRKQINSKNFESWSKKTLNKMSLYKGM

SEQ ID NO: 118647 - protein, 49 aa, Unknown
  Bacterial polypetide isolated from the Sargasso Sea
MNNYRLQQLDGFARAGELELNHGKIQTPVFMPVGTNGTVKGLTVEDLDS

SEQ ID NO: 118648 - protein, 107 aa, Unknown
  Bacterial polypetide isolated from the Sargasso Sea
MNSKKVFFELIKTHKEARLGQISTSRGLIDTPAFMPVGTQGTVKSIFVDDIIKTNSQIILGNTYHLFLRPGLEILKNIGGLHQFMNWHKPILTDYGGFQIMSLSKFR

SEQ ID NO: 118649 - protein, 122 aa, Unknown
  Bacterial polypetide isolated from the Sargasso Sea
MALKKFSFNVTKKNGYARLGKIVTHRGIIDTPAFMPVGTQGTIKGAFLNDVFKTGSQIILCNTYHLMIRPGAERVKKYGGLHNFINCKKPILTDSGGYQIMSLSKLNKIDREKGAIFNSHID

SEQ ID NO: 118650 - protein, 142 aa, Unknown
  Bacterial polypetide isolated from the Sargasso Sea
MFDVLDDIKEYLPIEKPHYLMGVGTPSDILGAVKRGIDMFDCVLPTRSGRTGLAFTWNGRVNIKNNKYQKDNTPLDPNCKNLNLNKYSKNYLNHLFNTNEILASMLLTLHNINFYQELMSQIRKNINSGTFDDFHNKYIDKL

SEQ ID NO: 118651 - protein, 129 aa, Unknown
  Bacterial polypetide isolated from the Sargasso Sea
GVGKPEDLVGAVQRGIDMFDCVLPTRSGRTDQAFTRRGTVNMRNARHREDPRPIDPECSCYTCKNYSRGYVNHLIMAREILAATLLTWHNLYYYQEIMVNIRDAIAKNNLDAFVSDFTIEQAAGDIEQI

SEQ ID NO: 118652 - protein, 120 aa, Unknown
  Bacterial polypetide isolated from the Sargasso Sea
LVPHSDILGAVKRGIDMFDCVLPTRSGRTGMAFTWEGRINIKNNKYQNDNSPIDPKCDNLNLNKYSKNYLNHLFNTNEILASMLLTLHNINFYQELMSNIRTNINKGTFDEFHNKYINKL

SEQ ID NO: 118653 - protein, 90 aa, Unknown
  Bacterial polypetide isolated from the Sargasso Sea
RNAKYKNDDSPIDENSDSKVCKNYSKAYLHHLDKTNEMLGSMLASYHNIYYYHELMKQIRQSIDDDIFVNFAKDFYNSRNLPIPDYLEGL

SEQ ID NO: 118654 - protein, 284 aa, Unknown
  Bacterial polypetide isolated from the Sargasso Sea
MNNIDLKTIATDGKARVNEVNINGKNFQTPSFMPVATRGSIKSLPLDYLKKTDVLLANTYHLFLRPGLDVIKEFDGLHNFIGWDKLILTDSGGFQGWSIPNKFKEDGIEFKNIYDGSKFFMDPILSMDIQNTLNSDIAMILDSLVDIDKDYDNQLQSINITKKWAEIARNYHSNEKQSLFGIVQGGKFNELREKSALDMTSLDFDGYAIGGLAIGETPTERKNIVDYTVDMLPEDKLRYVMGLGDIEGMLELIELGIDIFDCVWPARLARHGKIINKGKFFNLK

SEQ ID NO: 118655 - protein, 224 aa, Unknown
  Bacterial polypetide isolated from the Sargasso Sea
LDECPKLTSDKKILSKAIDVSTSWAKRSKTEFGNDKSKALFGIAQGGLYKDLRIESIEKLIEIDFNGYAMGGLAVGEKQSDMFKILNETTDYFPKSKPRYLMGVGTPSDILGAVKEGIDMFDCVMPTRSGRTGLAFTWEGKVNLKNSKYQKDRSPIDENCNMRDLNKYSKGYLNHLIKSNEMMASMLISLHNIYFYQQFMREIRKNIHNGTFQSFYKKYINLYD

SEQ ID NO: 118656 - protein, 140 aa, Unknown
  Bacterial polypetide isolated from the Sargasso Sea
MKNFSWKVEYKSKKNKARTGTLTTPHGKISTPAFIFCATKGALKASTTNLAKENNTQIILSNTYHLMLQPGGNLISNHGGLHKFLNWDGPMLTDSGGFQIFSLGHGSVADEIKGRTNTKRNKTLLSISEERCLFKSYLDG

SEQ ID NO: 118657 - protein, 116 aa, Unknown
  Bacterial polypetide isolated from the Sargasso Sea
VANGFDIFDCVLPTRLGRHGTAFFNDERLNLRNARFKNDFSPIDKTCKCETCTSYSRAYLHHLIRNDEILGLTLISLHNIAHLIRFTNAISTAIRDNCFTNDFAPWKTSSIAHHTW

SEQ ID NO: 118658 - protein, 142 aa, Unknown
  Bacterial polypetide isolated from the Sargasso Sea
MFKVLDDITYLMPSDKPLYLMGVGTPSDILGAVKRGIDMFDCVLPTRSGRTGLAFTWNGRINIRNSKYQQDNEPIDINTKNFSLNKYSKNYLNHLFNTNEMLGSMLLTLHNINFYQELMSAIRENIKNGTFQQFHDKYINKL

SEQ ID NO: 118659 - protein, 131 aa, Unknown
  Bacterial polypetide isolated from the Sargasso Sea
MKKPLFDFQIKSRCKTTLARVCSFKTPNGIVNTPKFMPVGTLGTVKGVTSQQLEKTGAEMILANTFHLHLQPGEKIVQDAGGLHKFMSWNKPILTDSGGFQVFSLAKLNKIDDQGVSFSSPRDGKHIYLTP

SEQ ID NO: 118660 - protein, 148 aa, Unknown
  Bacterial polypetide isolated from the Sargasso Sea
GESQDEMFSVLDDIKEFLPNEKPHYLMGVGTPSDILGAVKRGIDMFDCVLPTRSGRTGLAFTWNGRINIKNKKYQTDNSPLDINCKNLNLNKYSKNYLNHLFNTNEILASMILTLHNINFYQELMESIRKNIMAGSFNEFYEKYIDKL

SEQ ID NO: 118661 - protein, 118 aa, Unknown
  Bacterial polypetide isolated from the Sargasso Sea
DIEDSLQRTHSWLQKCVETHQKSNQALFGIVQGGKYPRLREYSAKYTSSFDLPGIAVGGVSVGEAVEEIHSVINYVPKFLPINKPRYLMGIGSLKEISLAVANGFDIFDCVLPTRLRR

SEQ ID NO: 118662 - protein, 30 aa, Unknown
  Bacterial polypetide isolated from the Sargasso Sea
GAVMRGIDMFDCVLPQDQAEQVLLLPGMEE

SEQ ID NO: 118663 - protein, 88 aa, Unknown
  Bacterial polypetide isolated from the Sargasso Sea
MALKNFAFKVLKKDKFARSGVIETHRGSINTPAFMPVGTQATVKACTIEDIKKTGSQIILSNTYHLMIRPGVERIKSAGGPHKFMNCD

SEQ ID NO: 118664 - protein, 39 aa, Unknown
  Bacterial polypetide isolated from the Sargasso Sea
MKFELIKKVNNARRGRLELSNGTVETPVFMPVGTYGAVK

SEQ ID NO: 118665 - protein, 131 aa, Unknown
  Bacterial polypetide isolated from the Sargasso Sea
LPIEKPHYLMGVGTPSDILGAVKRGIDMFDCVLPTRSGRTGLAFTWKGRINIKNNKYQNDNTPLDPDCENLNLNKYSKNYLNHLFNTNEILASMLLTLHNINFYQELMALIRKNINDGTFDQFHDKYIDKL

SEQ ID NO: 118666 - protein, 180 aa, Unknown
  Bacterial polypetide isolated from the Sargasso Sea
PHLRELSAKIVSGFGLPGIAIGGVSVGEPIHQMHKIVRETCPLLPQDRPRYLMGIGTLREMAIAVANGVDMFDCVIPTRLGRHGSALVNGETWNLRNSRFKDDYRPLDSKCTCEACTGYSRAYIHHLIRNKELLGLTLLSIHNLTHLIRFTGAMRQAITEGCFSEDFAPWQSDSKARHTW

SEQ ID NO: 118667 - protein, 125 aa, Unknown
  Bacterial polypetide isolated from the Sargasso Sea
MSFQITAQDSNSSARCGVLKLNRMNLTTPLFMPVCTNATPKALDFIKLKEIGFEMVVCNAYHLFLRPGSSYIKDKFNSLHEFSSWDNAILTDSGGFQVWSLGSSVKIHDDGVLIKSHIDGSLNDI

SEQ ID NO: 118668 - protein, 84 aa, Unknown
  Bacterial polypetide isolated from the Sargasso Sea
MALKKFNFNVKYTENYSRVGIIETSRGNINTPAFMPVGTQATVKGAFIEDIIKTGSEIILSNTYHLMIRPGVERISSIGGFTNL

SEQ ID NO: 118669 - protein, 142 aa, Unknown
  Bacterial polypetide isolated from the Sargasso Sea
MFNVLDGLKNHLPTEKPRYLMGVGTPSDILGAVKRGIDMFDCVMPTRSGRTGLAFTWNGRINIRNAKYKKDNKPLDSSVEKFDLNKYSKNYLNHLFNTNEMLGSMLLTLNNINFYQELMFEIRRNIKKGTFLKFYKKYANKL

SEQ ID NO: 118670 - protein, 272 aa, Unknown
  Bacterial polypetide isolated from the Sargasso Sea
IMSLSKLNKIDPKVGAIFKSHLDGKKIILSPEKSIQVQKAINSDIIMVLDECPKLTKDKKTLSSAIKTSINWAKRCKIEFGNNKIKALFGIAQGGLYKDLRSESIDKLREINFDGYAMGGLAVGEKQEDMFKILNETTNMLPKDKPRYLMGVGTPSDILGAVKEGIDMFDCVMPTRSGRTGLAFTWNGKLNIKNSKFKNDKLPLDESCDIRELNKYSKGYLHHLIKSDEMLASMLISLHNIYFYQQFMREIRNNIKNGTFHKFYKKYIKFFD

SEQ ID NO: 118671 - protein, 142 aa, Unknown
  Bacterial polypetide isolated from the Sargasso Sea
ERCRMLFDPSHYVLQCLDYLHHLDLYHDLIKVFHVKDAEFNPDGRNGVYGGFQSWTERAGRFRSLGDGQVDFSAIFSKMAQYDFPGWAVLEWECCLKHPEQGAAEGAPFIRDHIIRVTEKAFDDFADSGTDQAANRRLLGMA

SEQ ID NO: 118672 - protein, 120 aa, Unknown
  Bacterial polypetide isolated from the Sargasso Sea
MSNFSWKINFISKKSNARSGQIKTPHGIVNTPAFIFCGTKAALKSCSTTEAKKNNTQIILSNTYHLMLQPGSNIIANHGGLHKFMNWKGPMLTDSGGFQIFSLGHGSVADEIKGSASNSK

SEQ ID NO: 118673 - protein, 88 aa, Unknown
  Bacterial polypetide isolated from the Sargasso Sea
MEDIKKNFSFSVKHQNKNYRVGLIQTHRGEINTPAFMPVGTQATVKGVFIDDIIKTGSEIILSNTYHLMIRPGTERIEAVGGLHKFMN

SEQ ID NO: 118674 - protein, 91 aa, Unknown
  Bacterial polypetide isolated from the Sargasso Sea
MSSNQFSFELITQNDNARLGKIITSRGIIETPAFMPVGTQGTVKGIYPEDILSTNTHIILGNTYHLLLRPGIKVLKEFHGLHNFMNWQKPI

SEQ ID NO: 118675 - protein, 88 aa, Unknown
  Bacterial polypetide isolated from the Sargasso Sea
TELLEFMSDKLPDDKPRFLMGVGTPEDIVEAVRYGIDMFDCVLPPRNARNGQLFTSEGVINIRNAEYKNSPDPIDINCDSKVSQNYSR

SEQ ID NO: 118676 - protein, 133 aa, Unknown
  Bacterial polypetide isolated from the Sargasso Sea
YLPKNKPRYLMGVGTPSDILGAVKEGIDMFDCVLPTRSGRTGLAFTWKGKINLKNSKFQSDKSPLDEKCDIRDLNKYSKSYLNHLIKTNEILASMLISLNNIYFYQQFMREIRKNIKNGTFNNFHKKYINFFD

SEQ ID NO: 118677 - protein, 130 aa, Unknown
  Bacterial polypetide isolated from the Sargasso Sea
CYGCWTPEELVEGVRYGIDMFDCVIPTRNGRNGYIYTEKGILKIRNSEHKNSNKPLDENCDCYTCRNFTRGYIHHLDRCNEMLASTLMTICNLSHFHKLMKNIRDSLEENKFEEFVEYFYDMRSLKKPKL

SEQ ID NO: 118678 - protein, 85 aa, Unknown
  Bacterial polypetide isolated from the Sargasso Sea
MKKKEFSFKLISKFKKARLGLIKSSRGNIDTPAFMPVGTLGTVKGLFVDDLKKTGSQIILGNTYHLMLRPGSTILEKFGGLHNFM

SEQ ID NO: 118679 - protein, 93 aa, Unknown
  Bacterial polypetide isolated from the Sargasso Sea
MKKKEYSFNLISKFKKARLGKIKTPKGSIDTPAFMPVGTLGTVKGLFVDDLKQTGSQIILGNTYHLMLRPGTNILEKFDGLHKFMNWEKPILT

SEQ ID NO: 118680 - protein, 55 aa, Unknown
  Bacterial polypetide isolated from the Sargasso Sea
MHVQENWTPPHGSILTPIFMPVGTLGTVKAATPEELKKLGTQILLGNTYHLHLRP

SEQ ID NO: 118681 - protein, 183 aa, Unknown
  Bacterial polypetide isolated from the Sargasso Sea
FGIVQGGLFEDLEKKSLEQLIKINFDGYAIGGLAVGETQKEMFNTLDFLKDLMPTDKPRYLMGVGTPSDILGAVKRGVDMFDCVLPTRSGRTGLAFTWNGRINIRNAKYQKDNSPLDKKCKNFNLNKYSKNYLNHLFNTNEILASMLLTLHNINFYQELMDSIRMHIKNGTFDDFHDRYVDKL

SEQ ID NO: 118682 - protein, 261 aa, Unknown
  Bacterial polypetide isolated from the Sargasso Sea
LDGSKHMFTPEISMEIQRDLGSDIIMSFDDCPPGDADHETIKNAVNRTTEWMKRCHKWLSDNPERYGHEQVVFPIIQGGTDHKLRRISIEQLSPYSSAGMAIGGLAVGEEKSAMLDTVEYCDEILPKDQPRYLMGVGRPSDIVAAVRRGVDMFDCVMPTRNGRNGHIFTSKGVINIRNEKYKDDMSPLDNESSHPWGQKFSRSYVRHLFNINEVLGLRISSTLNLVYYHDLMDMIKNEIEKNNFNTWSESILNRMKDMKGM

SEQ ID NO: 118683 - protein, 367 aa, Unknown
  Bacterial polypetide isolated from the Sargasso Sea
FFCGTKATVKSVLPSQLKLARTQIILSNTYHLMLQPGPEIISKEGGLQSFTDWNGPMMTDSGGYQIFSLGYGSVSEEIKGKNNNAKSKSLIKITEDGASFRNYINGDKVFLSPERSIELQRDFGADLIFVLDECTPFNISKKYTEKSMYMSHRWAARCKNSFESKFKKYNSTFGSSGKQSLYGIIQGGVYEDLRKIACEETCSKNFDGLAIGGSLGSTKNQMYDIFSICENYIDKSKPIHILGIGGLDDILHGVSSGYDTFDCVSPTRIARHGIMMSKSSSKGINLNNSKFKDDQSSIDEGCELNEINKFSKSYVHHLFKANEILGMTILSIYNIWFMNKFFEEIRSSINDDRFEEYKNKILSNLVE

SEQ ID NO: 118684 - protein, 190 aa, Unknown
  Bacterial polypetide isolated from the Sargasso Sea
GGTSRDLRLKSLENLSALDFKGYAIGGLAVGESKSTMYELVNLCNQYLPPGKPRYLMGVGSPEDLIEGVASGVDMFDCVMPTRVARNGSLYTRSGRINITNQKFKSLDAPIDDECECMLCANYSTAYIHHLFKAKELLALRLASIHNLTFMANLMKEIRQSITENTFETYRNTFWGTYKTANNIKNDARS

SEQ ID NO: 118685 - protein, 365 aa, Unknown
  Bacterial polypetide isolated from the Sargasso Sea
LFCATKAALKSFSTIDAKRNNTQVILSNTYHLMIQPGSELIAKHGGLHKFIGWSGPMLTDSGGFQIFSLGHGSVADEIKGRKSNSKIKKTLLNINEEGAVFKSYIDGSNLLLTPEKSIKIQRNLGADLIVVFDECTPFNVDKDYTSKSMLRSHRWASRSVNSFNSNITFEPKTGSSGKQEIYGIIQGGIYEDLREESIDFNQNNINTFGIAIGGSLGSNKEEMRKVVNFTASRLDNTRPVHLLGIGDPTDIWEFVERGIDTFDCVSPTRLARHGSALIKGKIGKINLKNAQYREQFVPIEQDCECYTCNNFTLSYLYHLFASDELLGLQLLTCHNIFFMNNLMKIIRNSIEENTFEDTKKEWLNN

SEQ ID NO: 118686 - protein, 131 aa, Unknown
  Bacterial polypetide isolated from the Sargasso Sea
MPKDKPRYLMGVGTPSDILGAVKRGVDMFDCVLPTRSGRTGLAFTWNGRVQIRNSKNQNDNSPLDSSVTKFDLNKYSKNYLNHLFNTNEMLASMILTLNNINFYQELMHEIRENIKKGTFKQFHNKYFNLL

SEQ ID NO: 118687 - protein, 146 aa, Unknown
  Bacterial polypetide isolated from the Sargasso Sea
MSFELLTSSGYARRGTLTTKTSKIQTPVFMPVGTYGTVKGLTPDQLHDIGFEIILGNAFHLFQRPGLETIKKFNGLHKFMGWNKSILTDSGGFQIWSLKELRKISEEGVEFKSPLDGSKIFMSPEDSINTQLILNSDIVMAFDECT

SEQ ID NO: 118688 - protein, 61 aa, Unknown
  Bacterial polypetide isolated from the Sargasso Sea
MSFKVLNKSSYARRGELVTKTSKIQTPVFMPVGTYGTVKGLTPEHLKEIGFEIILGKCIPL

SEQ ID NO: 118689 - protein, 182 aa, Unknown
  Bacterial polypetide isolated from the Sargasso Sea
MAKFSWKIKSSSTKSKARIGCITTPHGKIETPAFIFCATKGALKSFTTIEAKKINTQIILSNTYHLMLHPGSKLIANHGGLHNFMNWDGPMLTDSGGFQIFSLGHGSVANEIKGNKTQYLRDKSLLKINEEGALFKSYLNGKNYLLTPEKSIQVQRDLGADLILVFDECTPFYIEKNILNNQ

SEQ ID NO: 118690 - protein, 68 aa, Unknown
  Bacterial polypetide isolated from the Sargasso Sea
TCNCYTCKNYSRAYLHHLSKTNEILGARLNTKHNLYYYQSLMKGLRLAIEEERLDEFTADFYSKRESD

SEQ ID NO: 118691 - protein, 105 aa, Unknown
  Bacterial polypetide isolated from the Sargasso Sea
MDKFKFKVLKKDGYARKGLIETKRGNIKTPAFMPIATQGAVKFTPIEFIEQIGYELTLSNTYHLLLRPGLERLSSVDGISEFMGWNKPVLTDSGGFQVMSLSKLR

SEQ ID NO: 118692 - protein, 294 aa, Unknown
  Bacterial polypetide isolated from the Sargasso Sea
SVSEEIKGKNNNTKRKSLIKITEEGASFRNYINGDKVFLSPERSIELQRDFGADLIFVLDECTPFNVSKKYTEKSMYMSHRWAVRCKNSFDSKFRNCEPTFGSSGKQSLYGIIQGGVYEDLRKIACEETCSKDFDGLAIGGSLGSTKNQMYDIFSLCENYLDKSKPIHILGIGGLDDILHGVSSGYDTFDCVSPTRIARHGIMMSKLSSNGINLNNSKYKDDHSSLDEDCEIQEINKFSKSYLHHLFKSNEMLGMIILSIYNIWFMNKFFEEIRKSINENKFEEYKRSILSNFS

SEQ ID NO: 118693 - protein, 81 aa, Unknown
  Bacterial polypetide isolated from the Sargasso Sea
SPIDENSDSKVCKNYSKAYLHHLDKTNEMLGSMLASYHNIYYYHELMKQIRQSIDDDIFVNFAKDFYNSRNLPIPDYLEGS

SEQ ID NO: 118694 - protein, 93 aa, Unknown
  Bacterial polypetide isolated from the Sargasso Sea
MSQNGFSIKHIEGKSRVGTLETSRGIINTPAFMPVGTAGTVKAMIPENLKTIGADVLLCNTYHLMLRPGEEIVNKLGGLNKFMNWKGQILTDS

SEQ ID NO: 118695 - protein, 148 aa, Unknown
  Bacterial polypetide isolated from the Sargasso Sea
MKYKLLKKDGYARRGFLELQHGNIQTPVFMPVGTNATVKGLTVEDLEETGSQIILSNTYHLMLRPGDEIIKQLGGLHNFCNWQKPILTDSGGFQVWSLGDLAEVSEKGVSFKSPYDGKNIFMSPEDSIQIQENLGSDIVMVFDECTNY

SEQ ID NO: 118696 - protein, 284 aa, Unknown
  Bacterial polypetide isolated from the Sargasso Sea
QIILGNTYHLLLRPRIKIIEKFSGIHNLMNWQKPILTDSGGFQIMSLAKFNKIDKNIGAIFSSHIDGKKIILSPEKSIQIQKSINSDILMVLDECPVLTSDKKKISKAIDVSTHWAKRCKVEFGKNKKKALFGIVQGGLFKDLRHESLDRLLEINFDGYAIGGLAVGETQEQMFKVLENTVHLLPQNKPRYLMGVGTPSDILGAVKNGIDMFDCVLPTRSGRTGLAFTWEGKLNLKNSKFKFDKTPLDKTTKLRNLNLYSKSYLNHLIKTNEILASMIISLHKC

SEQ ID NO: 118697 - protein, 217 aa, Unknown
  Bacterial polypetide isolated from the Sargasso Sea
MESNIYRLIAEDGLARRGEIKTQHGKFQTPAFMPVGTYGAVKALSPRILGDLEAEIILSNTYHLMERPGVDIIKAHGGLHNFMGWNSPILTDSGGYQVFSLSKKRTITDEGVQFFSLLNGDKRYLTPESCMQLQLDYGVDIAMVLDECTPYPIAEDAAKKSMQLSLRWADRCRKAFKTENASLFGIVQGGVFNNLREDSLGELIEINFEGYAIGGLS

SEQ ID NO: 118698 - protein, 335 aa, Unknown
  Bacterial polypetide isolated from the Sargasso Sea
MAYKLISNYENARAGLLSINNIEVQTPTFMPVATRGSIKSTPHQYLDKTSILLANAYHLHLRPGAQLINDLGGLHNFMNWDKLILTDSGGFQAWSLPTKLLNDGIEFKNVYDGSFFKMTPEESINTQNLLGSDIAMIFDYLIDYDRSDDDQKKAIEITSQWAERAKSVHKNNKQDLFGIVQGGLNLDLRETSAKSMIELEFDGYAIGGLAIGETSTERKKIVEHLNSILPIDKPRYVMGLGDTVGLIDLIDSGVDMFDCVWPARLARHGKLITRNTYINIKNQKFKNDDNPIDINCKCFTCLNFSRAYLRHLFTNEIQLSWLYLTVHNIIQTETI

SEQ ID NO: 118699 - protein, 100 aa, Unknown
  Bacterial polypetide isolated from the Sargasso Sea
MTLKNFSFDVIKKDKNARLGRISTHRGDIDTPVFMPVGTQATIKGAFINDIKNTGAQIILCNTYHLMIRPGVERVSSQGGLHKFMNCSLPILTDSGGFQV

SEQ ID NO: 118700 - protein, 280 aa, Unknown
  Bacterial polypetide isolated from the Sargasso Sea
MSFQITAQDSNSSARCGVLKLNRMNLTTPLFMPVCTNATPKALDFIKLKEIGFEMVVCNAYHLFLRPGSSYIKDKFNSLHEFSNWDNAILTDSGGFQVWSLGSSVKIHDDGVLIKSHIDGSLNDITPELSIQTQEELNSDIMMIFDDCPNPDSEYSLLLKSINRTKDWARRCKDAKKTKNLLFGIVQGGIYDDLRELSATHMIEIGFDGYAIGGLGLGEGQSKTYEITRNLDKILPTNKPRYSMGIGKPEDILESVEHGIDIFDCVVPTRNARKWNFILV

SEQ ID NO: 118701 - protein, 276 aa, Unknown
  Bacterial polypetide isolated from the Sargasso Sea
MKFKTKNTANFARASEIQLSRGKINTPAFMPVGTNGTVKGLTVDDLNETGSEIILGNTFHLMLRPGDELIKNIGGLHKFINWDKPILTDSGGFQVWSLGDLAKISEDGVKFSSPYDGKKIFMRPEDSIMIQENLGSDIIMVFDECTDYPSTYEDAKKSMELSMRWAKRCKAAQKSKSALFGIVQGGMFKDLREESLNKLIEIDFDGIALGGLSVGESKQEKTEILEFMCDKLPEDKPRYLMGIGTPEDIVEAVRYGIDMFDCVLPTRNARNGQLFT

SEQ ID NO: 118702 - protein, 246 aa, Unknown
  Bacterial polypetide isolated from the Sargasso Sea
MNSKKDFFELIKTENQARLGKITTSRGIIDTPTFMPVGTQGTVKSIFVDDILKTNTQIILGNTYHLFLRPGLDILKNIGGLHQFMNWHKPILTDSGGFQIMSLSKFRKIDKKEGAIFTSHLDGKKIVLSPEKSIQIQKTINSDILMVLDECPTLTNDKKIIANAIDVSTEWAERSKKEFNSADKKFLFGIVQGGLFSDLRVESLEKLLEIGFDGYAIGGLAVGEKQDEIFNVLDVITKKLPNDKPR

SEQ ID NO: 118703 - protein, 204 aa, Unknown
  Bacterial polypetide isolated from the Sargasso Sea
MKFDLKCIDKFSQARAGSIYTERGLIKTPIFMPVGTSATVKGVHQRELENDIKPDIILANTYHLYLKPNTKIIEASGGIHKFMNWNKPILTDSGGYQVYSLSANRKIKEEGVKFKSHIDGSFHFFSPESAISIQRKIGADIIMAFDECTPYPCNFKYAKLSMKRTHRWLNRCMIQNKKENFNYSYPQIFFPIVQGSIYKELRKE

SEQ ID NO: 118704 - protein, 224 aa, Unknown
  Bacterial polypetide isolated from the Sargasso Sea
MFLKLGGLHKFMNWDGAILTDSGGFQIFSLEGFRKLSDDGVTFRSHLDGSKHHFTPEKIVDIQRQIGSDFMMMLDVCPSGGGSKKIWLDALKTTTNWAKRSLNYFKNTESMYNHNQILIPIVQGGTDFELRKRSANELCELDTEAYAIGGLAVGEPKPEMLDTVEYMNELLPFDKPRYLMGVGTPADLVRNVSRGVDMFDCVIPTRNARNGQLFTFNGKLHIKN

SEQ ID NO: 118705 - protein, 204 aa, Unknown
  Bacterial polypetide isolated from the Sargasso Sea
MKLKNFKFNVHHTENYSRVGLIETHRGNINTPAFMPVGTQATIKGAFIDDVIKTGSEIILSNTYHLMIRPGVERIKNIGGLHKFMNCKLPILTDSGGFQVMSLSNLNKIDYEKGAIFKSHLDGKTFVLSPEESIKIQKGLNSDIVMVMDECPKNSNDYDKIKKSMNLSSYWAQRSKIEFGDNPHKGLFGIVQGGLFNDLRNKVT

SEQ ID NO: 118706 - protein, 269 aa, Unknown
  Bacterial polypetide isolated from the Sargasso Sea
MEDIKNFSFSVKHQSKNYRVGLIQTHRGEINTPAFMPVGTQATVKGVFIDDIIKTGSEIILSNTYHLMIRPGTDRIEAVGGLHKFMNCKLPILTDSGGYQVMSLSKFNKIDKDKGAIFQSHIDGKTFILSPEESIKIQKKLNSDIVMVMDECPKNTNDYNIIKISMDLSTEWARRSKAEFGTNPHKALFGIVQGGLFKDLRNESLNKLIDIEFDGYAIGGLAVGETQKEMFDVLDGIKDNLPIDKPRYLMGVGTPSDILGAVKRGIDMF

SEQ ID NO: 118707 - protein, 305 aa, Unknown
  Bacterial polypetide isolated from the Sargasso Sea
MGEKLVKESGGIHKFMNWPRPILTDSGGYQVFSLAKLNNISDKGVEFKNPRNGSHVFLSPEKVIQIQMDLGSDVAMAFDHCPPHTANENDIEDSLQRTHLWLKKCVETHQKSNQALFGIVQGGKYPRFREYSAKYTSSFDLPGIAVGGVSVGEAVEEIHGVINYVPKFLPINKPRYLMGIGSLKEISLAVANGFDIFDCVLPTRLGRHGTAFFNDERLNLRNARFKNDFSPIDKTCKCETCKSYSRAYLHHLIRNDEILGLTLISLHNIAHLIRFTNAISTAIRDNCFTNDFAPWKTSSIAHHTW

SEQ ID NO: 118708 - protein, 164 aa, Unknown
  Bacterial polypetide isolated from the Sargasso Sea
MALKNFAFKVLKTDKFARCGLIKTHRGDINTPAFMPVGTQATVKACTIDDIKKTGSEIILSNTYHLMIRPGVERIQLAGGLHNFMNCDLPILTDSGGFQVMSLSKLNKIDREKGAIFNSHVDGKKFFLSPEESIRIQLGLNSDIVMIMDECPKKSDDYNLIKKS

SEQ ID NO: 118709 - protein, 218 aa, Unknown
  Bacterial polypetide isolated from the Sargasso Sea
MKFSIKKKYKNARSGYLELKNGNVQTPTFMTIGTYGSVKSLSSEDLLRCGCEILLCNAYHLMLRPGLDVITRGGHLHKFMNWDKPILTDSGGYQVFSLSKNVKVNKDAAVFKSPYNGDEIIMTPEKSIKTQIALGSDIMMIFDECTPYPVDKDKANESMRLSLDWAELSKKANDSQSPLFGIVQGGMYKDLREESMKNLNKLDFDGYALGGLSVGEPQ

SEQ ID NO: 118710 - protein, 209 aa, Unknown
  Bacterial polypetide isolated from the Sargasso Sea
MSLKNFSFKVKNKDKFSRTGTIITSRGNIDTPVFMPVGTQATVKATFIDDLIKAGSQIILSNTYHLMIRPGEERVALQGGLHEFMNCPLPILTDSGGYQVMSLSKLNKIDRERGAIFNSHVDGKQYTLSPEESIRIQKKLNSDIVMVMDECPKKTTDRKIIENSLDLSTEWALRSKNSFGKNPHKGLFGIVQGGLLNDLRKKSLEDLID

SEQ ID NO: 118711 - protein, 297 aa, Unknown
  Bacterial polypetide isolated from the Sargasso Sea
MPVGTLATVKGISSKQLTSTGSEMILSNTFHLHLQPGEKLVKESGGIHKFMNWHKPILTDSGGYQVFSLAKLNNISDKGVEFKNPRDGSHVFLSPEKVIQIQMDLGSDVAMAFDHCPPHTANENDIEDSLQRTHSWLQKCVETHQKSNQALFGIVQGGKYPRLREYSAKFTSAFDLPGIAVGGVSVGEAVEEIHSVINYVPKFLPINKPRYLMGIGSLREISLAVANGFDIFDCVLPTRLGRHGTALFNNERLNLRNARFKNDFSPIDKTCKCETCKSYSQAYLHHLIRNEEILGLT

SEQ ID NO: 118712 - protein, 289 aa, Unknown
  Bacterial polypetide isolated from the Sargasso Sea
MLRPGDKLIKNIGGLHKFINWDKPILTDSGGFQVWSLGDLAKISEDGVKFSSPYDGKKIFMRPEDSIMIQENLGSDIIMVFDECTDYPSTYEEAKKSMELSMRWAKRCKAAHKSKSSLFGIVQGGMFKDLREESLNKLIEIDFDGIALGGLSVGESKQEKTEILEFMCDKLPENKPRYLMGVGTPEDIVEAVRYGIDMFDCVLPTRNARNGQLFTSEGVINIRNAEYKDCDDPIDMNCNNKVSQNYSRAYLNHLHRTNEMLGAMLATYHNISYYQSLMNDIRSAIKDNL

SEQ ID NO: 118713 - protein, 158 aa, Unknown
  Bacterial polypetide isolated from the Sargasso Sea
MQFKVSSLSGYARRGELSFSRGKVQTPAFMPVGTNGTVKALEVENLEETGSEIILGNTYHLMLRLGDELVKQFGGLHKFSNWDKPILTDSGGFQVWSLGDLAKITEEGISFQSPYDGNKCFMRPEDSMRIQANLGSDIVMVLDECTPYPAEYEQAKAS

SEQ ID NO: 118714 - protein, 266 aa, Unknown
  Bacterial polypetide isolated from the Sargasso Sea
GVEFFSPLNGDKKYLTPESCMQLQLDYGVDIAMVLDECTPYPVTEDIAKKSMQLSLRWAKRCRSSFKSESSSLFGIIQGGVFNNLREDSLAELIELNFEGYAIGGLSVGEPKGEMDKVVNHIMPKMPEDKPRYLMGVGTPLDIVKAVQLGVDMFDCVIPTRHARNGYLYTSKGIVKIRNSENKNNLEPLDAHCSCYTCSNFSRSYLHHLDKTKEMLGSMLQTIHNLHYYLSLMRNLRLSIETGTLQTFIKEFEDTWNNIDNPNIVI

SEQ ID NO: 118715 - protein, 138 aa, Unknown
  Bacterial polypetide isolated from the Sargasso Sea
TSVLPFNKPRYLMGVGTPINLLENIALGIDMFDCVMPTRNARNGMIFTKNGTINIKNKKWELDFSVLDPDNYCFVDINYSKSYVRHLFTVNEMLGKQICTIHNLAFYMWLVRESRKHILVGDFVSWKEKMIKNLGQRI

SEQ ID NO: 118716 - protein, 260 aa, Unknown
  Bacterial polypetide isolated from the Sargasso Sea
REKGAIFNSHIDGKKFYLSPEESIRIQLGLNSDIVMIMDECPKKTTDYNTIKKSMDLSLYWAERSKKAYGKNPHKALFGIIQGGLFKDLRQQSLDGLMKINFDGYALGGLAVGESQKEMFEVLDNIKSNLPIKKPRYLMGVGTPSDILGAVKRGIDMFDCVLPTRSGRTGLAFTWNGRINIKNRKYQKDNSPLDLNCDNLNLNKYSKNYLNHLFNTNEILASMLLTLHNINFYQQLMESIRENIHRGTFDQFHDKYINKL

SEQ ID NO: 118717 - protein, 281 aa, Unknown
  Bacterial polypetide isolated from the Sargasso Sea
DLPILTDSGGFQVMSLSKLNKIDKEKGAIFNSHIDGKKYYLSPEESIKIQLGLNSDIVMIMDECPKKSRDYKLIEKSMNLSLYWAERSKKAFGHNPHKALFGIIQGGLFKDLREKSLEELIKIGFDGYAIGGLAVGESQNEMFKVLDNIKDLLPDNKPHYLMGVGTPSDILGAVKRGIDMFDCVLPTRSGRTGLAFTWEGRVNIKNNKYKKDNNPLDLNCSNLNLNKYSKNYLNHLFNTNEILASMLLTLHNINFYQELMSAIRENINNGTFDEFHDKYID

SEQ ID NO: 118718 - protein, 172 aa, Unknown
  Bacterial polypetide isolated from the Sargasso Sea
IQGGTSKKFREISAKQLCALEDYDGFAIGGLSVGEPNQDMYDTVEWTTQFMPEDKPRYLMGVGTPEDLIENIERGVDMFDCVMPTRNARNGGLFTSFGKLHIKNAKFKEDPNPIDPECDCYTCQNFTRAYINHLFRAGEITYYRLASIHNLHYYLSLMKQARAAILEDRWTE

SEQ ID NO: 118719 - protein, 315 aa, Unknown
  Bacterial polypetide isolated from the Sargasso Sea
SSKQLTSTGSEMILQNTFHLHLQPGEKLVKESGGIHKFMNWPKPILTDSGGYQVFSLAKLNNISDKGVEFKNPRDGSHVFLSPEKVIQIQMDLGSDVAMAFDHCPPHTANENDIEDSLERTHSWLQKSVEVHHKSNQALFGIVQGGKYPRLREYSAKFTSSFDLPGIAVGGVSVGEAVEEIHSVINYVPKFLPINKPRYLMGIGSLKEISLAVANGFDIFDCVLPTRLGRHGTAFFNDERLNLRNARFKNDFSPIDKTCKCETCKSYSRAYLHHLIRNDEILGLSLISLHNIAHLIRFTNAISLAVKDNCFTIDF

SEQ ID NO: 118720 - protein, 229 aa, Unknown
  Bacterial polypetide isolated from the Sargasso Sea
RARNGILTTPHGKINTPAFIFCATKGALKSSTTTAAKDNNTQIILSNTYHLMLQPGSDLIASHGGLHKFLNWNGPMLTDSGGFQIFSLGHGSVADEIKGSSNIKRKKTLLNISEEGSLFKSYVDGSIKFLSPEKSIETQRNLGADLVLVFDECTPFHVDKSYTERSMRRSHRWATRSLNRFNSDIKFKPSFGSAGEQKLYSIVQGGIYEDLREESIDFNLNEIDTFGIA

SEQ ID NO: 118721 - protein, 256 aa, Unknown
  Bacterial polypetide isolated from the Sargasso Sea
QATVKGVFIDDIIKTGSEIILSNTYHLMIRPGTERIEAVGGLHKFMNCKLPILTDSGGYQVMSLSKFNKIDRDKGAIFQSHIDGKTFILSPEQSIKIQKKLDSDIVMVMDECPKNTNDYNVIKTSMDLSTEWALRSKEEFGINPQKALFGIVQGGLFKDLRNESLDKLIDIEFDGYAIGGLAVGETQKEMFDVLDYIKDNLPIDKPRYLMGVGTPSDILGAVKRGIDMFDCVLPTRSGRTGLAFTWNGRIQIRNSE

SEQ ID NO: 118722 - protein, 208 aa, Unknown
  Bacterial polypetide isolated from the Sargasso Sea
MIQFEIEALNNNSRAGVLLTPDGSIHTPVFMPVGTLATVKGMTTVEIKELGAEIILGNTYHLHLRPGDSVIRKMGGLQKFMNWDRPILTDSGGFQIFSLARLLNLNEEGVIIRSHIDGSKIKLTPEISIAIQQNLGSTIMMCLDECLKMPSSRQEVERSIGLTAKWARRSKEASLNESDVFKEQALFGIIQGGHELDLREQSMHQIVR

SEQ ID NO: 118723 - protein, 295 aa, Unknown
  Bacterial polypetide isolated from the Sargasso Sea
GIEILKKFKGLHKFMNWNKPILTDSGGFQIMSLSKLTTIDKEYGAIFKSHIDGKKIILSPEKSIQVQKFINSDILMVLDECPKLTWNKKTLSSAIEVSTNWAKRSKVEFGRNKKKGLFGIVQGGLYKDLRQESIEKLIEINFDGYAMGGLAVGETQDEMFKILNETTKFLPKEKPRYLMGAGTPSDILGAINEGIDMFDCVLPTRSGRTGLAFTWKGKINLKNSKYRSDLSPLDPSCNVRNLKKYSKSYLNHLIKTNELMASMLISLHNINFYQQFMSEIRKSIKSGTFSRFYKK

SEQ ID NO: 118724 - protein, 270 aa, Unknown
  Bacterial polypetide isolated from the Sargasso Sea
ISEEGVKFQSHIDGSYHFFNPEKVIDIQRKIGADIIMAFDECTPYPCDYKYAKNSMQMTHRWLDRCIIKEKNTPYLYDFNQTLFPIVQGSTYKDLRIESAEYICSKNMKGNAIGGLSVGEPHEEMYSMTELVCSILPEEKPRYLMGVGTPINLLENISLGVDMFDCVIPTRNARNGMLFTSDGVINIKNRKWESDFSPIDEESNTFVDINYSKSYLRHLFSVNEILGKQIATIHNLGFYRRLVKDARKRIIKGDFQEWKGKMIKKMNNRL

SEQ ID NO: 118725 - protein, 321 aa, Unknown
  Bacterial polypetide isolated from the Sargasso Sea
VGTLATVKGISSKQLTSTGSEMILSNTFHLHLQPGEKLVKESGGIHKFMNWPKPILTDSGGYQVFSLAKLNNISDKGVEFKNPRDGSHVFLSPEKVMQIQMDLGSDVAMAFDHCPPHTANENDIEDSLQRTHSWLQKCVETHQKSNQALFGIVQGGKYPRLREYSAKFTSSFDLPGIAVGGVSVGEAVEEIHSVINYVPKFLPINKPRYLMGIGSLREISLAVANGFDLFDCVLPTRLGRHGTAFFNDERLNLRNARFKNDFSPIDKTCKCETCNSYSRAYLHHLIRNDEILGLTLISLHNIAHIIRFTNAISTAIKDNCF

SEQ ID NO: 118726 - protein, 247 aa, Unknown
  Bacterial polypetide isolated from the Sargasso Sea
MYKLIAKDGEARRGEVSTEHGIFQTPAFMPVGTYGAVKSISPEILHSINAEIILSNTYHLMERPGVDIIKLNGGLHNFMSWDKPILTDSGGYQVFSLAKKRKISEEGVEFNSALNGNKLFLNPEKCMELQQSYGVDIAMVLDECTPYPAEISVAEKSMQLSLRWAERSRNSFKSNKSSLFGIIQGGVYGDLREQSLEGLKRMDFEGYAIGGLSVGEPKDDLRKITNLIAPKMPVDKPRLFNGSRHAP

SEQ ID NO: 118727 - protein, 176 aa, Unknown
  Bacterial polypetide isolated from the Sargasso Sea
VFEKLSELNFEGYAIGGLAVGEGQELMFETLDNTTKFMLENKPRYLMGVGKPDDLIGAIKRGVDMFDCVLPTRSGRTGQAFTSKGQVNIKNSRHSLDTRPLDINCSCDTCRNYSRAYLHHLFKAQEILGLMLLSLHNIHFYLNLMKNIRESIKNSDFDKFEKTFLENYYSGDIDII

SEQ ID NO: 118728 - protein, 262 aa, Unknown
  Bacterial polypetide isolated from the Sargasso Sea
LHQFMSWNKLFLTDSGGYQVFSLAKNRKITEEGVEFNSSLNGNKLTLTPEICMDLQTGYGIDIAMVLDECTPYPATNIEAEESMNLSIRWAQRSRDAFKSNKASLFGIIQGGVFEELREKSLEELLKIEFEGYALGGLSVGEPKEDLYRIVKHIAPKMPENKPRYLMGVGTPLDIVKSVESGIDMFDCVIPTRHARNGYLYTSKGVIKIRNSQHRESLKPLDESCDCYTCKNFSRSYLHHLDKTKEMLGSTLQTIHNLTFYI

SEQ ID NO: 118729 - protein, 212 aa, Unknown
  Bacterial polypetide isolated from the Sargasso Sea
KKINKSMDLSMYWAERSKKAFGKNPHKAIFGIVQGGLFKDLRIKSLEGLIDIDFDGYAVGGLAVGESQNEMFKVLDDITYLMPNDKPRYLMGVGTPSDILGAVKRGIDMFDCVLPTRSGRTGLAFTWNGRINIRNSKYQHDNEPIDVKTNNFDLNKYSKNYLNHLFNTNEMLGSMLLTLHNINFYQELMMAIRKNIKNGTFQQFHDKYVNKL

SEQ ID NO: 118730 - protein, 159 aa, Unknown
  Bacterial polypetide isolated from the Sargasso Sea
GGVSVGEEVEEIHSVINYVPKFLPINKPRYLMGIGSLREISLAVANGFDIFDCVLPTRLGRHGTAFFNDERLNLRNARFKNDFSPIDKTCNCETCKSYSRAYLHHLIRNDEILGLTLISLHNIAHLIRFTNAISNAIKDNCFTIDFAPWKTSSIAHHTW

SEQ ID NO: 118731 - protein, 159 aa, Unknown
  Bacterial polypetide isolated from the Sargasso Sea
FDGYAVGGLAVGETQNEMFNVLDDIKQYLPIEKPHYLMGVGTPSDILGAVKRGIDMFDCVLPTRSGRTGLAFTWNGRVNIKNNKYQNDNTPLDPGCENLNLNKYSKNYLNHLFNTNEILASMLLTLHNINFYQEFMSQIRKNINSGTFDDFHNKYIDKL

SEQ ID NO: 118732 - protein, 196 aa, Unknown
  Bacterial polypetide isolated from the Sargasso Sea
KIEFDNSKNKFLFGIVQGGLFDDLRIESLEKLLEINFDGYALGGLAVGEKQNEMFEVLDNITNKMPKNKPRYLMGVGTPSDLLGAVNSGIDMFDCVLPTRSGRTGLAFTWDGKVNIRNSKYKKDLKPLDENTNLRSLNKYSKSYLNHLINTNEILASMLISLHNINFYQEFMKKIRTSIKDGTFDDFYKENIFKFN

SEQ ID NO: 118733 - protein, 198 aa, Unknown
  Bacterial polypetide isolated from the Sargasso Sea
MEDIKKNFSFSVKHQKNNYRVGLIETHRGVINTPAFMPVGTQATVKGVFIDDIIKTGSEIILSNTYHLMIRPGTERIEAVGGLHKFMNCKLPILTDSGGYQVMSLSKFNKIDKDKGAIFQSHIDGKTFILSPEESIKIQKKLNSDIVMVMDECPKNTKDYNKIKNSMELSTEWAKRSKNEFGNDPHKALFGIVQGGFI

SEQ ID NO: 118734 - protein, 206 aa, Unknown
  Bacterial polypetide isolated from the Sargasso Sea
MKLSLHWAERSKKAFGKNSKKALFGIIQGGLFHDLRLRSLLELEKIGFDGYALGGLAVGESQEEMFDVLDNIQKHMPINKPHYLMGVGTPSDILGAVKRGIDMFDCVMPTRSGRTGLAFTWNGRINIKNKKFQNDNEPLDLNCSNFKLNQYSKNYLNHLFNTNEILGSMLLTLNNINFYQELMKAIRENIKNGTFDQFHDKYIGKL

SEQ ID NO: 118735 - protein, 282 aa, Unknown
  Bacterial polypetide isolated from the Sargasso Sea
MKNFEFKVLKKNKFARLGLIKTRRGNIETPAFMPVGTQATVKACTIDDIKKTGSQIILSNTYHLMIRPGVKRIEDAGGLHKFMNCDLPILTDSGGFQVMSLSKLNKIDKEKGAIFNSHIDGKKFYLSPEESIKIQLGLNSDIVMVMDECPKKTNDYQIIDKSMNLSLYWAERSKKAFGSNQHKALFGIIQGGLFKDLREKSLKGLLEIGFDGYALGGLAVGESQDEMFTVLDDIKELLPENKPHYLMGVGTPNDILGAVKRGVDMFDCVLPTRSGRTGLAFT

SEQ ID NO: 118736 - protein, 237 aa, Unknown
  Bacterial polypetide isolated from the Sargasso Sea
MNSKKFFFELIKTHKSARLGKINTSKGEIDTPVFMPVGTQGTIKSIFTDDVLKTGTQIILGNTYHLFLRPGIKILESFGGLHNFMNWKKPILTDSGGFQIMSLSKFTQIDRNKGAFFSSHIDGKKFLLSPEKSIQIQKSINSDILMVLDECPKLTTDKKIISNSIDTSTSWALRSKKEFNNEKEKALFGIIQGGLFLDLREESLKKLLDIGFDGYAIGGLAVGESQDEMFNTVEAIT

SEQ ID NO: 118737 - protein, 102 aa, Unknown
  Bacterial polypetide isolated from the Sargasso Sea
MNFLITTQDKKTSARTGVIKTEHGDIQTPVFMPVGTIGAVKTFSPHELEGLGADIILGNTYHLYLRPGTEIINHAGGLHKFSNWTRPILTDSGGFQVFSLAI

SEQ ID NO: 118738 - protein, 267 aa, Unknown
  Bacterial polypetide isolated from the Sargasso Sea
GLHDFMNWNKPILTDSGGFQIMSLSKLNKIDKDIGATFRSHIDGKKIILSPEKSIKIQKSINSDILMVLDECPKLTSNRDTLKKAIDVSTEWAKRSKIEFGYNKNKALFGIIQGGLYNDLRVESLQRLIDIDFDGYAIGGLAVGETQDEMFETVKDITKKMPENKPRYLMGVGTPSDILGAIKEGVDMFDCVMPTRSGRTGLAFTWNGKINLKNSKFKNDKSPLDKNCTLRNLNNYSKSYLNHLIKTNELLASMLISLHNVNFYQQF

SEQ ID NO: 118739 - protein, 243 aa, Unknown
  Bacterial polypetide isolated from the Sargasso Sea
MALKDFAFNVLNKDKYARHGLIETHRGNIRTPAFMPVGTQATVKACTINDIIKTGSEIILGNTYHLMIRPGVDRIKKAGGLHKFMNCDLPILTDSGGFQVMSLSKLNKIDREKGAIFNSHVDGKKFYLSPEESIKIQLGLNSDIVMIMDECPKKTDNYEFIQKSMELSLYWAKRSKTAFGKNPHKALFGIIQGGLFKDLRLKSLHELEKINFDGYAIGGLAVGETQKEMFSVLDNIKDYLPKD

SEQ ID NO: 118740 - protein, 73 aa, Unknown
  Bacterial polypetide isolated from the Sargasso Sea
MQKEEFSFELLAQENKARLGKISTPRGKIDTPAFMPVGTLGTVKGVFVDDLLKTGTQILLGNTYHLLLRPGID

SEQ ID NO: 118741 - protein, 172 aa, Unknown
  Bacterial polypetide isolated from the Sargasso Sea
MLKTDGKARRGRLVFERGIVETPAFMPVGTYGTVKGMTPEELEATGAQICLGNTFHLMLRPGTEIIKKHGDLHDFMHWHKPILTDSGGFQVFSLGELRKIKEEGVTFRSPLNGEKIMLTPERSMQVQRDLGSDIVMIFDECTPYPATEQQAKKSMEMSLRWAKRSKDEHGDN

SEQ ID NO: 118742 - protein, 224 aa, Unknown
  Bacterial polypetide isolated from the Sargasso Sea
GVDEAAAADSMHLSMRWVDRCREAFERRPGYGLFGIVQGSVFPNLRIESAAALTDIGFDGYAVGGLAVGEGQDKMFSVLDVTVPALPASHPRYLMGVGTPADIIGAVQRGIDMFDCVLPTRSGRTGQAFTRRGLLNIRNARHAEDPRPLDPDSDYPHVGGVSRAYLHHLFKAKEMLGPILLTLHNLHYYQELMDGIRGAIEAGQLDEFAAAFHEEQARGDFDPI

SEQ ID NO: 118743 - protein, 99 aa, Unknown
  Bacterial polypetide isolated from the Sargasso Sea
MINFEIEALNNYSRAGILRTPDGSIQTPVFMPVGTLATVKGMTTEEVKDLGAEIILGNTYHLHLRPGDLVIRKMGGLQKFMNWDRPILTDSGGFQIFSL

SEQ ID NO: 118744 - protein, 292 aa, Unknown
  Bacterial polypetide isolated from the Sargasso Sea
MSLKRFAFKVKKNDKYARSGLIETHRGNIETPAFMPVGTQATVKACTIDDVKKTGSQIILGNTYHLMIRPGVERIQRLGGLHKFMNCDLPILTDSGGFQVMSLSKLNKIDREKGAIFNSHVDGKKFYLSPEESIRIQLGLNSDILMIMDECPKKTEDYNLIKKSMELSIYWAKRSKKAFGSNPHKALFGIVQGGLFNDLRIKSLNALLKIDFDGYAIGGLAVGESQFEMFKVLDDIKDKLPKNKPHYLMGVGTPSDILGAVKRGIDMFDCVLPTRSGRTGLAFTWNGRVNIK

SEQ ID NO: 118745 - protein, 287 aa, Unknown
  Bacterial polypetide isolated from the Sargasso Sea
AGGPYGSVKGVLPEQIRALGAEIILGNTFHLYLRPGLEVIGDHGGLHGFCRWNGPILTDSGGFQVFSLAHRRKITEQGVTFASPTDGARVFLGPEESMKIQKVLDSDVVMIFDECTPYPATEDVARRSMELSLRWARRSRDAHDALGNDAALFGIVQGGVHTDLRSRSAEGLQQIGFDGYAIGGLAVGEPEHERNAMLEHMHPILPADRPRYLMGVGRPEDLVEGVARGVDMFDCVMPTRNARNGHYFTSTGTVRIRNARYERDMDTIEPGCGCHACSSGYTRAYLR

SEQ ID NO: 118746 - protein, 113 aa, Unknown
  Bacterial polypetide isolated from the Sargasso Sea
MKFKTKNTSNFARASEIQLSRGKINTPAFMPVGTNGTVKGLTVEDLNETDSEIILGNTFHLMLRPGDELIKNIGGLHKFINWDRPILTDSGGFQVWSLGDLAKISEDGVKFIL

SEQ ID NO: 118747 - protein, 271 aa, Unknown
  Bacterial polypetide isolated from the Sargasso Sea
MIRPGVERIQRAGGLHKFMNCDLPILTDSGGFQVMSLSKLNKIDREKGAIFNSHVDGKKFYLSPEESIRIQLGLNSDILMIMDECPKKTDNYDLIKESMDLSLYWAERSKKSFGNNPHKAIFGIIQGGLFKDLRINSLKGLLKIDFDGYAIGGLAVGESQKEMFSVLDGLKDKLPYDKPHYLMGVGTPSDILGAVKRGIDMFDCVLPTRSGRTGLAFTWNGRINIKNKIYQNDETPLDKNCKNFNLNRYSKNYLNHLFNTNEILGSYAFNS

SEQ ID NO: 118748 - protein, 248 aa, Unknown
  Bacterial polypetide isolated from the Sargasso Sea
MNLKNFSFKLKNKDKFSRTGTIFTSRGIIDTPVFMPVGTQATVKATFIDDLIKAGSQIILSNTYHLMIRPGEERVALQGGLHEFMNCPLPILTDSGGYQVMSLSKLNKIDREKGAVFNSHVDGKEYVLSPEESIRIQKKLNSDIVMVMDECPKKTTDRKTIENSLDLSTEWALRSKNSFGKNPHKGLFGIVQGGLFDDLRKKSLKDLLDIGFDGYALGGLAVGDTQEEMFRVLDGIKEFLPEDKPRYL

SEQ ID NO: 118749 - protein, 206 aa, Unknown
  Bacterial polypetide isolated from the Sargasso Sea
MALKRFSFNVTNKNGYARLGKISTRRGVIDTPAFMPVGTQGTIKGAFLNDVFKTGSQIILCNTYHLMIRPGADRVKKYGGLHNFINCKKPILTDSGGYQIMSLSKLNKIDREKGAIFNSHIDGSKFILSPEESIKIQKKLNSDIVMVLDECPKKTLNYKLISKSVDLSTYWALRSKKAFGKNPHKALFGIIQGGLFKDLRLKSLKD

SEQ ID NO: 118750 - protein, 153 aa, Unknown
  Bacterial polypetide isolated from the Sargasso Sea
DFYRIVKHIAPKMPENKPRYLMGVGTPMDIVKSVESGIDMFDCVIPTRHARNGYLYTSKGVIKIRNSQHRESLKPLDESCDCYTCKNFSRSYLHHLDKTKEMLGSTLQTIHNLTFYINLMRNLRVSIETGTLQSFIREFELTWNNSDNPNINI

SEQ ID NO: 118751 - protein, 234 aa, Unknown
  Bacterial polypetide isolated from the Sargasso Sea
INSDILMFLDDCPKLTNDKNLLKKSLDTSLYWAKRCKIEFGNNKKKALFGIIQGGLYKDLRIESLEKLKEIDFQGYAMGGLAVGETQSQMFNILSATVKYMPRNKPRYLMGVGTPADLLGAIKYGIDMFDCVLPTRSGRTGLAYTWEGKLNLRNSKFKYDKSPIDKNCHIRNLNCYSKSYLHHLIKSNEMLASMLISLHNIYFYQQFMIKIRKEIKNGNFNIFYKKYMSIFQKN

SEQ ID NO: 118752 - protein, 146 aa, Unknown
  Bacterial polypetide isolated from the Sargasso Sea
MKFKIINTSENAREAEIDTARGVIQTPAFMPVGTNGTVKGLTVDDLKETHSQIILGNTFHLMLRPGDKLIKELGGLHKFINWDKPILTDSGGFQVWSLGELNKVSEEGVKFSSPYDGKKIFMTPEDSIMIQENLGSDIVMAFDECT

SEQ ID NO: 118753 - protein, 248 aa, Unknown
  Bacterial polypetide isolated from the Sargasso Sea
MFNVIKKVSFNVSKKCEFARTGLIETHRGNIQTPAFMPVGTQGTVKATFIDDIIKTGSEIILSNTYHLMLRPGVDRIINAGGLHKFMNCKLPILTDSGGFQVMSLSKLNKIDREKGAIFKSHIDGKEFILSPEESIRIQKGLDSDIVMVMDECPKNNSDKNIINESMDLSMYWAKRSKIAFGNNPQKGLFGIVQGGLFEDLRKESLDRLVKINFDGYAIGGLAVGESQKEMFSVLDSLKSQNQRANLG

SEQ ID NO: 118754 - protein, 282 aa, Unknown
  Bacterial polypetide isolated from the Sargasso Sea
GGFQIMSYQKLTKLSESGVKFKSHIDGTKYFLTPEKSTEIQEILDATISMQLDECVSYPIEKQKAYKSMELSLNWAKRSRDAFSIRDGYGQFGIVQGSVFSEFREISALGLKNIDFDGFAIGGLAVGESQNIMFETIKNTTKHLPFNKPRYLMGVGKPDDIIGAIKRGIDMFDCVLPTRSGRNGQAFTSFGAINIKNSRFIQDEKPIDLNCSCHTCKTFSRAYLNHLFKCKEILGASLLTQHNLHFYLNLVKKARNSIIENNFEQFEKNFLNMYYSGKEIYD

SEQ ID NO: 118755 - protein, 241 aa, Unknown
  Bacterial polypetide isolated from the Sargasso Sea
MSLKKFSFNVINKEGFARVGQIQTHRGNIDTPVFMPVGTQATIKGAFIKDIVQTGAQIILANTYHLMIRPGVDRVKSQGGLHQFMNCPLPILTDSGGFQVMSLSKLNKIDREKGAIFNSHIDGKKFILSPEESIKIQLGLNSDILMVMDECPKKTNDYNLIKKSMELSMYWAERSKKQFGKNPHKALFGIVQGGLFNDLREKSLNLLKDIDFDGYAIGGLAVGESQTEMFNVLDGLKNILP

SEQ ID NO: 118756 - protein, 204 aa, Unknown
  Bacterial polypetide isolated from the Sargasso Sea
HNFMNCKLPILTDSGGYQVMSLSKFNKIDRDKGAIFQSHIDGKTFVLSPEESIKIQKKLNSDIVMVMDECPKNTNDYNVIKTSMDLSTEWARRSKEEFGINPQKALFGIVQGGLFKDLRNESLNRLIDIQFDGYAIGGLAVGESQQEMFDVLDGIKDNLPIDKPRYLMGVGTPSDILGAVMRGIDMFDCVLPTRSGRTGLSFYF

SEQ ID NO: 118757 - protein, 308 aa, Unknown
  Bacterial polypetide isolated from the Sargasso Sea
MKFSLLAKDSNSSGRYGEISTDHSTFKTPVFMPIGTSAAVKTIDPKFLKNQDIGIILSNTYHLYIRPGHEIISSAGGLHKFMNWDNSILTDSGGFQVFSLAKLNKISDDGVKFQSHIDGSTHFFSPELSMDIQRALGTDIIMAFDECPPANVEKSVVSSAVDRTYAWMKKCKAHLKKSKPLYSWSQNLFPIVQGGIYPDLRKKSLEQLSSYADCGIAIGGLAVGEDKTAMFDIIEFMDDYLPKDQPRYLMGVGRPTDLIKAIQRGIDMFDCVMPTRNARNGQLFTSDGIINIGNGEYKKSFERIDKKC

SEQ ID NO: 118758 - protein, 278 aa, Unknown
  Bacterial polypetide isolated from the Sargasso Sea
MLRPGTKILDRFSGLHNYMNWKKPILTDSGGFQIMSLSKLNKIDISLGAIFNSHIDGKKFILSPEKSIQIQKSINSDILMVLDECPKLTKDKKIISNAIDVSTVWARRSKVEFGSDKSKALFGIIQGGLFKDLRIESLEKLKEIGFDGYAMGGLAVGEKQDDMFFILSQIVELMPKNKPRYLMGVGTPSDILGAVKRGIDMFDCVLPTRSGRTGLAYTWKGKINLKNSKFKNDQTPLDERYNIFGLNKYSKSYLNHLTKSNEILASMLITLNNINFYQ

SEQ ID NO: 118759 - protein, 304 aa, Unknown
  Bacterial polypetide isolated from the Sargasso Sea
ILKRGLIKTPAFMPVGTAATVKAMLPENVKALGADIILCNTYHLMLRPGENLINNLGGLHKFMNWERPILTDSGGFQVMSLSGLSRKSEEGVEFRSHIDGKKYFLSPEYSIKIQKTLGSDIIMCFDDCASFQSKKNDVADSMKRSIKWALRSKEEFELTNSGILFGIQQGGIYKDLRDESIKRLLDIDFQGYAVGGLAVGEPQTEMFKVLDSTADKFPNNKPRYLMGVGKPDDIVGAVLRGIDMFDCVLPTRSGRTGQALSRRGPINIKNSKHKKNSSPLDPDCKCYTCLNYSRSYLHHVSNQE

SEQ ID NO: 118760 - protein, 177 aa, Unknown
  Bacterial polypetide isolated from the Sargasso Sea
MGEREDVVARGDGSEPSTSTSPLEFKVLATDGRARATTLKLPHYECRTPMFMPVGTQGSVKGLTSKQLEEIECQVILGNTYHLGNRPGADVLAKAGGLHGFMNWRRAMLTDSGGFQMVSLLSLADITEEGVTFQSPTDGKQMLLTPEKSIHIQNDIGADIIMALDDVVSSVTADRAR

SEQ ID NO: 118761 - protein, 258 aa, Unknown
  Bacterial polypetide isolated from the Sargasso Sea
SSHFISPEASMDIQRHLGSDIVMAFDECPSANVKESIVSKAVERTNKWTRICYDHLKKTGPIYSWSQTLFPIVQGGTFQNLRKQSAESLIQFSSCGMAIGGLAVGEDKSAMFDTIALMDEVLPKDQPRYLMGVGRPTDLVKAMRHGVDMFDCVLPTRNARNGQLFTSNGIINITNTEHKDSFDPLDENCNCYTCTNYSRAYLRHLFNIKEVLGLRLATIHNLTYYNDLMIKAKEQINSGGFDKWSKSYLSSMLHHENM

SEQ ID NO: 118762 - protein, 198 aa, Unknown
  Bacterial polypetide isolated from the Sargasso Sea
MALKTFNFNVNYTENHSRVGVIKTSRGNINTPAFMPVGTQATVKGAFIDDIIETGSEIILSNTYHLMIRPGVNRISTLGGLHEFMNCSLPILTDSGGFQVMSLSKLNKIDREKGAIFQSHIDGKKYVLSPEESIRIQKSLNSDIVMVMDECPKKTNDYEKIKKSMELSMEWAQRSKDAFGSNPHKALFGIVQGGLFDD

SEQ ID NO: 118763 - protein, 196 aa, Unknown
  Bacterial polypetide isolated from the Sargasso Sea
MSLKNFSFNVNCTEDYSRVGIIETSRGNINTPAFMPVGTQATIKGAFINDIVKTGSEIILSNTYHLMIRPGVDRISAVGGLHEFMNCDLPILTDSGGFQVMSLSKLNKIDREKGAIFQSHVDGKKFILSPEESIRIQKSLNSDIVMVMDECPKKTTDYTKIKKSMNLSMEWAQRSKNAFGLNTKKGLFGIIQGGLF

SEQ ID NO: 118764 - protein, 211 aa, Unknown
  Bacterial polypetide isolated from the Sargasso Sea
SLRWATLSKTANYNNIPIFGIVQGGMFMDLREQSLQELKSNNFDGYAIGGLSVGESSEQRNEIVNHIAPQLPETKPRYLMGVGKPLDIAYAVKDGIDMFDCVIPTRNARNGHLFTNKGIIRIRNNQYINDTSPIELSCQCFTCKNYTKSYIRHLDRCNDILAARLMTIHNVYFYQEFMSKLRKAITEKNLENYIEELENIYSTSERQNGDN

SEQ ID NO: 118765 - protein, 115 aa, Unknown
  Bacterial polypetide isolated from the Sargasso Sea
MSLKKFYFNVSKKYEFARTGLIETHRGNIQTPAFMPVGTQGTVKATFIDDLIKTGSEIILSNTYHLMLRPGVDRIISAGGLHKFMNCKLPILTDSGGFQVMSLSKLNKIDREKGA

SEQ ID NO: 118766 - protein, 184 aa, Unknown
  Bacterial polypetide isolated from the Sargasso Sea
GMYDDLRLQSLEGLVEIGFDGYAIGGLSVGETKEEMLSVMHNLLPAMPKSAPRYLMGVGTPGDLVRGVSMGVDMFDCVMPTRNARNGYVFCRDGILKIRNARHRLSDLPLDESCGCYTCQNYSRAYLHHLDRCKEMLGAMLLTEHNLHFYHRLMSELREAIEHGTFGALAKELLKSWKEDYGFI

SEQ ID NO: 118767 - protein, 248 aa, Unknown
  Bacterial polypetide isolated from the Sargasso Sea
MKFEINNSSEFARNAELKLTKGTIQTPAFMPVGTNGTVKALTVEDLHETNSEIILGNTFHLMLRPGDKLIKELGGLHKFINWDKPILTDSGGFQVWSLGDLVKISEEGVKFSSPYDGKKIFMTPEDSIEIQENLGSDIIMVFDECTDYPSTHEQAKKSMELSMRWAKRCKNAHKTQSALFGIVQGGMYKDLREESLNRLMDIGFDGIALGGLSVGESQQEKNEILEFMSDRLPEDKPKISYGSWNTQR

SEQ ID NO: 118768 - protein, 241 aa, Unknown
  Bacterial polypetide isolated from the Sargasso Sea
MKFKTNNFTEIARESEIKTSRGIIHTPTFMPVGTNGTVKGLTVDDLNETNSEIILGNTFHLMLRPGDELIRDQGGLHKFMNWEKPILTDSGGFQVWSLGDLAKISEEGVKFSSPYDGKKIFMKPEDSIMIQENLGSDIIMAFDECTNYPSSHEEAKTSMELSMRWAKRCKAAHKSQSALFGIVQGGMYKDLREDSLNRLIDIDFDGIALGGLSVGESKQEKTEILEFMSDKLPKDKPSYLM

SEQ ID NO: 118769 - protein, 268 aa, Unknown
  Bacterial polypetide isolated from the Sargasso Sea
MNSKKSFFELIQICGQARLGKIKTSHGDIDTPTFMPVGTQGTVKSIFVDDLISTGTQIILGNTYHLFLRPGLNILEKFGGLQNFMNWNKPILTDSGGFQVMSLSKFNKIDLKEGALFSSHIDGKKFILSPEKSIQIQKTINSDILMVLDVCPKLTNDKKSLLKSINISSLWAKRCKDEFKDEKNKFLFGIIQGGLFEDLRIESLKNLEEIGFDGYAMGGLAVGENQNQMFSILHKTVKAMPANKPRYFMGVGTPSDILGSRVLWIRHV

SEQ ID NO: 118770 - protein, 307 aa, Unknown
  Bacterial polypetide isolated from the Sargasso Sea
LIGAVKGVKPHELSELGADIILSNTYHLMERPGKEVIKKQGGLRKFMNWDGPILTDSGGFQVMSLSKIAKLDKNGVTFNSHIDGSVIRLTPEESINIQNAFDSTITMVFDECTSYPVEFDVARKSMNLSMEWAVKSKQKFINRDGYGLFGIVQGSTYKDLRFESSNKLIDIGFDGYAIGGLAVGEGHNIMIKTIKDSINFLPKDKPRYLMGVGYPKDIIEAVRLGVDMFDCVIPTRSGRTGKIFTKQGEINIKNARHKFDPRPIENGCLCHTCSNNISRSYLHHLFKTNEMLGTIYCTLHNLFHYIE

SEQ ID NO: 118771 - protein, 290 aa, Unknown
  Bacterial polypetide isolated from the Sargasso Sea
MHQYMNCSLPILTDSGGFQVMSLSKLNKIDRDIGAIFKSHIDGKKFILSPEESIKIQLGLNSDIVMVMDECPKKSNDYELIKKSMDLSMFWAERSKKEFGSNPHKALFGIVQGGLFNDLREKSLNSLINIGFDGYAIGGLAVGESQIEMFNVLDALKEILPTNKPRYLMGVGTPLDILGAVSKGIDMFDCVLPTRSGRTGLAFTWKGKINIRNSEYKTDNTPLDKNISKFDLNKYSKNYLNHLFNTNEMLGSMLLTLNNINFYQELMFEIRKHIKNGTFEDFYNKYINIL

SEQ ID NO: 118772 - protein, 104 aa, Unknown
  Bacterial polypetide isolated from the Sargasso Sea
MALKNFAFKVLNKDKFARRGVIKTHRGEINTPAFMPVGTQATVKACTIDDIKKTGSEIILSNTYHLMIRPGVERIELAGGLHEFMNCDLPILTDSGGFQVMSLS

SEQ ID NO: 118773 - protein, 202 aa, Unknown
  Bacterial polypetide isolated from the Sargasso Sea
MEDIKKNFSFSAKHQNKNYRIGLIQTHRGEIDTPAFMPVGTQATVKGVFIDDIIKTGSQIILSNTYHLMIRPGTERVEAVGGLHKFMNCKLPILTDSGGYQVMSLSKFNKIDREKGAIFQSHIDGKKFILSPEESIKIQKKLNSDIVMVMDECPKNTKDYNKIKNSMELSTEWAKRSKNEFGNNSHKALFGMVQGGLFNDLR

SEQ ID NO: 118774 - protein, 219 aa, Unknown
  Bacterial polypetide isolated from the Sargasso Sea
PKNTNDFNKIKSSMDLSIDWAIRSKQEFGKNPHKALFGIVQGGLFKDLRNESLNKLIAIEFDGYAIGGLAVGETQKEMFDVLDGIKDSLPIDKPRYLMGVGTPSDILGAVKRGIDMFDCVLPTRSGRTGLAFTWNGRIQIRNSEYKLDNTPLDSSVTKFDLNKYSKNYLNHLQNTNEMLASMILTLNNINFYQELMYEIRKNIKMGTFDQFHDKYIKIL

SEQ ID NO: 118775 - protein, 169 aa, Unknown
  Bacterial polypetide isolated from the Sargasso Sea
MALKKFAFKIINKDKFARQGVIKTHRGNINTPVFMPVGTQATVKACTIDDIKKTGSEIILSNTYHLMIRPGVERIQLAGGLHKFMNCDLPILTDSGGFQVMSLSKLNKIDREKGAIFNSHIDGKKFFLSPEESIRIQLGLNSDIVMIMDECPKKSDDYNHIEKSMNLSL

SEQ ID NO: 118776 - protein, 245 aa, Unknown
  Bacterial polypetide isolated from the Sargasso Sea
MTLKKFSFNVKEIDNKARLGLIKTHRGNINTPAFMPVGTQATVKGTFIEDIIKTGSEIILSNTYHLMIRPGADRIESLGGLHKFMNCKLPILTDSGGFQVMSLSKLNKIDREKGAIFNSHIDGRKFILSPEESIRIQKSLNSDIVMVMDECPKKSKDFKKINKSMDLSSYWAERSKKAFGNNPHKAIFGIIQGGLFKDLRIKSLEQLIDIDFDGYALGGLAVGESQSEMFKVLDDITYLMPNDKP

SEQ ID NO: 118777 - protein, 71 aa, Unknown
  Bacterial polypetide isolated from the Sargasso Sea
MSDFKILKTDGNARRGKLITSHGEINTPAFMPVGTAATVKGVFTKDLIETGSEILLGNTYHLMLKPGSELI

SEQ ID NO: 118778 - protein, 220 aa, Unknown
  Bacterial polypetide isolated from the Sargasso Sea
MSLKIFNFNVNFTENCSRVGVIETSRGKINTPAFMPVGTQATVKGAFINDIVKTGSEIILSNTYHLMIRPGIDRISAVGGLHEFMNCDLPILTDSGGFQVMSLSKLNKIDREKGAIFQSHVDGKKYILSPEESIRIQKSLNSDIVMVMDECPKKTTDYAKIKKSMDLSMEWAQRSKNSFGLNPKKALFGIIQGGLFDDLRNISLERLTDIGFDGYAIGGL

SEQ ID NO: 118779 - protein, 178 aa, Unknown
  Bacterial polypetide isolated from the Sargasso Sea
QGGMFKDLREQSACYLNNVGFDGYAVGGLAVGEPQEKMFEVLDYSTDFFPEDRPRYLMGVGKPSDIIGAVLRGVDMFDCVIPTRSGRNGQAFVQNRTINLKNAKHQLDKNPIDENCSCYCCSNYSRGYLSHLVRSNEILGSMLLTWHNLHFYVNLMKKIRELIKKREFTAFADKFLNL

SEQ ID NO: 118780 - protein, 200 aa, Unknown
  Bacterial polypetide isolated from the Sargasso Sea
MKFKLIKSDKSARIGELQFRKGLIQTPVFMPVGTYGSVKTMTPDELIDIGAEIILANTYHLMIRPGKDILSSHGGLHKMMAWPKPILTDSGGYQIWSLSKKRKINDEYVEFDSPVNGDMIRLTPEIAMQMQKVIGSDIQMVLDECTHYPATKEEAELSMKRSEKWALRSHESFLQQKGDDDSACFGIIQGGMYPDLRLQN

SEQ ID NO: 118781 - protein, 111 aa, Unknown
  Bacterial polypetide isolated from the Sargasso Sea
MKFEINNSSKFARNAELKLAKGTIQTPAFMPVGTNGTVKALTVEDLHETNSEIILGNTFHLMLRPGDKLIKELGGLHKFINWDKPILTDSGGFQVWSLGDLVKISEEGVKF

SEQ ID NO: 118782 - protein, 188 aa, Unknown
  Bacterial polypetide isolated from the Sargasso Sea
MKKFEFKVLKKNKFARLGLIKTHRGKIETPVFMPVGTQATVKACTIDDIKKTGSQIILSNTYHLMIRPGVKRIEDAGGLHKFMNCDLPILTDSGGFQVMSLSKLNKIDREKGAIFNSHIDGKKFYLSPEESIKIQLGLNSDIVMVLDECPKKTDNYQIIDNSMNLSLYWAERSKKAFGHNPHKALFGI

SEQ ID NO: 118783 - protein, 216 aa, Unknown
  Bacterial polypetide isolated from the Sargasso Sea
ALSMRWAKRSRAAFRPRIGYGQFGIVQGSVFADLRAESVAMLTDIGFEGYAVGGLAVGEGQQNMFETLESTTPLMQTDKPRYLMGVGKPADLVGSVARGIDMFDCVLPTRSGRTGQGFTRRGPVNLKNARHAEDPRPLDAECGCPACSNYSRAYLHHLFKAEEVLSLMLLTWHNIQYYQDLMAEMRAAISAGKFAAFETGFHAQQARGDIDPVGTE

SEQ ID NO: 118784 - protein, 255 aa, Unknown
  Bacterial polypetide isolated from the Sargasso Sea
MSLKNFNFNVINKDGFARVGQIQTNRGNIDTPVFMPVGTQATIKGTFIDDVIKTKAQIILSNTYHLMIRPGVDRIKSHGGIHEFMNCPLPILTDSGGFQVMSLSKLNKIDREKGAIFNSHIDGKKFILSPEESIKIQLGLNSDIVMVMDECPKKSTDYKFIKDSMNLSMYWAERSKKKFGKKPQKGLFGIVQGGLFIDLRLKSINILTDIGFDGYAIGGLAVGENQMEMFEVLEALKDVMPQDKPRYLMGVGTPF

SEQ ID NO: 118785 - protein, 279 aa, Unknown
  Bacterial polypetide isolated from the Sargasso Sea
QVYSLKGMRKINSEGVTFQSHLDGSKHYFSPEKVIDIQRIIGSDIMMMLDVCPPGDANQKKWIDALQHTTNWAKRAKKYFDQTESLYGYEQIISPIVQGGTDLKLRKQSALELMELNCDMHAIGGLAVGEPKEEMLKVVNYLDSILPKEKPRYLMGVGTPADLVESVLNGVDMFDCVIPTRNARNSQLFSFDGKINIRNAKYADDFLPIDKNNFSPISSKYSKAYLHHLFKTNEILGLRIATEHNLKFYIHLMKLIRDNIQSDSFEEWAKSFLRKYNNE

SEQ ID NO: 118786 - protein, 168 aa, Unknown
  Bacterial polypetide isolated from the Sargasso Sea
QDFDGIALGGLSVGESKEEKTKILKHLAPLLPEDKPHYVMGVGTPEELVEGVRYGIDMFDCVIPTRNARNGFVYTSTGIVKIRNSEHKKSTKPIDENCDCYTCRNFSRAYLHHLDKANEILASTLMSICSLHTFNKLMQDIRSSLEENKFEEFVDSFYDMRDLKKPNL

SEQ ID NO: 118787 - protein, 110 aa, Unknown
  Bacterial polypetide isolated from the Sargasso Sea
MALNFSFNVLSTDKDSRLGQIKTHRGSIDTPAFMPVGTQATIKGTFIDDIIKTGSQIILANTYHLMLRPGTKRVASQGGLHEFMNCKLPILTDSGGFQVMSLSKLNKVDK

SEQ ID NO: 118788 - protein, 293 aa, Unknown
  Bacterial polypetide isolated from the Sargasso Sea
FLNWNRPILTDSGGFQVWSLGDLVKITEEGVRFSSPYDGKKIFMSPEDSMKIQENLGSDIVMAFDECTDYPSTYQQAKQSMELSMRWAKRCKKAHKSDSALFGIVQGGMYKDLREESLKKLIQIGFDGIALGGLSVGEPKEEKTAILEFMSDKFPEDKPRYLMGVGTPEDIVEAVRYGIDMFDCVLPTRNARNGQLFTSEGVINIRNAEFKNSDDPIDKNCDSKVSQNYSRAYLNHLHRTNEMLGSMLATYHNIYYYQSLMRDIRDSINNNIFAKFIKDFYNSRNLDMPDGPI

SEQ ID NO: 118789 - protein, 246 aa, Unknown
  Bacterial polypetide isolated from the Sargasso Sea
MALKKFNFNVNYTENYSRVGVIETGRGNINTPAFMPVGTQGTIKGAFIDDIIKTGSEIILSNTYHLMIRPGVERISSIGGLHQFMNCNLPILTDSGGFQVMSLSKLNKIDREKGAIFQSHIDGRKFILSPEESIRIQKALNSDIVMVMDECPKKTSDYNKIKKSTELSMEWAQRSKDSFGSNPNKGLFGIVQGGLFDDLRNDSLEVLTNIGFDGYAIGGLAVGDTQEEMFKVLDGLKEKMPIDKPR

SEQ ID NO: 118790 - protein, 217 aa, Unknown
  Bacterial polypetide isolated from the Sargasso Sea
NTKDYNIIKTSMHLSMEWARRSKEEFGKNSHKALFGIVQGGLFKDLRNESLNKLIDIGFDGYAIGGLAVGETQNEMFEVLDGIKDNLPIDKPRYLMGVGTPSDILGAVKRGIDMFDCVLPTRSGRTGLAFTWNGRIQIRNSENKLDNTPLDSSVTKFDLNKYSKNYLNHLHNTNEMLASMILTLNNINFYQELMYEIRKNIKMGSFEEFHDKYINIL

SEQ ID NO: 118791 - protein, 208 aa, Unknown
  Bacterial polypetide isolated from the Sargasso Sea
MKFKTNNFAEIARESEIKTSRGIIHTPAFMPVGTNGTVKGLTVDDLKETNSEIILGNTFHLMLRPGDELIRDQGGLHKFMNWEKPILTDSGGFQVWSLGDLAKISEEGVKFSSPYDGKKIFMKPEDSIMIQENLGSDIIMVFDECTNYPSSHEEAKTSMELSMRWAKRCKAAHKSQSALFGIVQGGMYKDLREDSLNRLIDIDFDGIA

SEQ ID NO: 118792 - protein, 278 aa, Unknown
  Bacterial polypetide isolated from the Sargasso Sea
MSLSKFNKIDRVKGAIFQSHIDGKTFILSPEESIRVQKKLDSDIVMVMDECPKNTKDYKKIKISMDLSSEWAKRSKEEFGKNPHKALFGIVQGGLFKDLRNESLDKLIDIEFDGYAIGGLAVGETQKEMFEVLDGIKDRLPIDKPRYLMGVGTPSDILGAVKRGIDMFDCVLPTRSGRTGLAFTWNGRIQIRNSENKFDNTPLDSNVTKFDLNKYSKNYLNHLHNTNEMLSSMILTLNNINFYQELMYEIRKNIKMGTFDQFHDKYINIFVNFYHCQI

SEQ ID NO: 118793 - protein, 277 aa, Unknown
  Bacterial polypetide isolated from the Sargasso Sea
DSGGFQIMSLAKLTKIDRDKGATFRSHIDGKKYILSPEESIKIQKSINSDIMMVLDECPKLSNDKKKIEQSLILSIEWAQRSKNEFGKNDKKALFGIIQGGMFDDLRIKSLKELIKINFDGYALGGLAVGESQKQMFSMIDVLKNELPVNKPRYLMGVGTPSDILGAVKRGIDMFDCVLPTRSGRTGLAFTWKGRINIRNSKYKNDKSPLDNDNQIKQINNYSKAYLNHLFSTNEILASMLLTLHNLSFYQELMKSIRVSIENGTFDHFYDKFINKI

SEQ ID NO: 118794 - protein, 212 aa, Unknown
  Bacterial polypetide isolated from the Sargasso Sea
MTLKKFSFNVNNTENYSRVGVIETSRGNINTPAFMPVGTQATIKGAFIEDIIKTGSEIILSNTYHLMIRPGIDRISIVGGLHEFMNCSLPILTDSGGFQVMSLSKLNKVDREKGAIFQSHIDGKKYILSPEESIRIQKSLNSDIVMVMDECPKKTTDFNKIKKSMELSMEWAQRSKNEFGSNPHKAIFGIVQGGLFDDLRNESLEKITNIGF

SEQ ID NO: 118795 - protein, 76 aa, Unknown
  Bacterial polypetide isolated from the Sargasso Sea
AECDCYTCRNYSRAYLHHLDRCNEILGARLNTIHNLRYYQRLMAGLRKAIEEGKLESFVTDFYQRQGRPVPPVNVD

SEQ ID NO: 118796 - protein, 160 aa, Unknown
  Bacterial polypetide isolated from the Sargasso Sea
NFDGYAIGGLAVGETQEEMFKVLENLKKYLPKHKPRYLMGVGTPSDILGAVKRGIDMFDCVLPTRSGRTGLAFTWNGRVQIRNSSNKHDNSPLDLNITKFDLNKYSKNYLNHLFNTNEMLASMILTLNNINFYQELMTEIRKNIKKGTFEQFHDKYINIL

SEQ ID NO: 118797 - protein, 290 aa, Unknown
  Bacterial polypetide isolated from the Sargasso Sea
LHKFMNWPFPILTDSGGFQVMSLSKLTKIDREKGAIFNSHIDGKEFILSPEESIKIQKGLNSDILMVLDECPKKTVDKNKIKESLSLSTYWAERSKKAFGLSPHKALFGIIQGGLFNDLRKESLEQLVKIDFDGYAVGGLAVGETQTEMFNVLDGITKFMPTNKPRYLMGVGTPADILGAVKRGIDMFDCVMPSRSGRTGLAFTWQGRINLRNSKYQKDNMPLDANCDKFNLNKYSKNYLNHLFNTNEILASMLLTLHNINFYQELMHSIRDNIKKGTFLKFHDKYIDIL

SEQ ID NO: 118798 - protein, 229 aa, Unknown
  Bacterial polypetide isolated from the Sargasso Sea
SDIVMVLDECPKLSNDKNKICESLKLSHNWAERSKNEFGNNPKKALFGIIQGGIYKDLRLESLDGLSKLDFDGYALGGLAVGESQKQMFKVLDGIVPSMPKNKPRYLMGVGTPSDILGAVKRGIDMFDCVIPTRSGRTGLAFTWEGKLNLRNSKYKKDDTPINREADVRNLNIYSKSYINHLINSNEILASMILTLNNIFFYQQLMKKIREAIKTNSFDEFHDKYINII

SEQ ID NO: 118799 - protein, 292 aa, Unknown
  Bacterial polypetide isolated from the Sargasso Sea
VKGVDIARVAETGATMLLANTYHLHLRPGEELVSRSGGVGHFMGWSGPTLTDSGGYQVFSLAQQVKVTDHGAMFRSHLDGSQVDLTPEKAVAIQESLGADVAMQLDHVIGLPAERNDVAEAMERSLAWAERCLAARQKSDQAMFGIVQGGLDPELRANSAKHLRSLPFEGFAVGGLSVGEGPEAMASTLQATVPHLPADKPRYLMGVGKPEDIINAVAVGIDMFDCVLPTRCGRNALLYTFDGPLRLRNAQYLTDKRPIESDCPCVACGYTRAYMRHLFLAGEMLGPILASI

SEQ ID NO: 118800 - protein, 314 aa, Unknown
  Bacterial polypetide isolated from the Sargasso Sea
GSEIILSNTYHLMIRPGVERIINAGGLHKFMNCKLPILTDSGGFQIMSLSKLNKIDREKGAIFQSHVDGKTFVLSPEESIKIQKGLNSDIVMVMDECPKKSNDYEKIKKSMNLSAYWARRSKDSFGKEPLKGLFGIVQGGLFKDLRIESLNNLLTIDFDGYAIGGLAVGESQSEMFKVLDDIKDHLPKDKPRYLMGVGTPSDILGAVKRGIDMFDCVLPTRSGRTGLAFTWNGRVQLRNSKHKNDNSPLDLNISKFDLNKYSKSYLNHLLNTNEMLASMIITLNNINFYQELMSEIRKNIEKGTFDHFHDKYIK

SEQ ID NO: 118801 - protein, 206 aa, Unknown
  Bacterial polypetide isolated from the Sargasso Sea
MALKKFSFNVLKKNKYARLGVIKTHRGNIDTPAFMPVGTQATVKGTFIDDIIKTGSQIILSNTYHLMIRPGPDRIKKSGGLHKFMNCELPILTDSGGYQIMSLSKLNKIDREKGAIFNSHIDGAKFVLSPEECIKIQKKLNSDIVMVLDECPKKTLNYNLISKSVDLSTYWAKRSKKAFGKNPHKALFGIVQGGLFNDLRLKSLND

SEQ ID NO: 118802 - protein, 294 aa, Unknown
  Bacterial polypetide isolated from the Sargasso Sea
KAGGLHQFMNCNLPILTDSGGFQVMSLSKLNEIDREKGAIFKSHIDGKKFCLSPEESIRIQLGLDSDIVMIMDECPKKTDNYEKIKKSMELSLYWGKRSKKAFGENPHKALFGIVQGGLFKDLRLKSLNELIKIEFDGYALGGLAVGESQEEMFKVLDDVKSTLPFEKPHYLMGVGTPSDILGAVKRGIDMFDCVLPTRSGRTGLAFTWNGRLNIKNNKYQSDNSPLDPDCDNFNLNKYSKNYLNHLFNTNEILASMLLTLHNINFYQELMSAIRDNINKGTYDKFHDKYIDKL

SEQ ID NO: 118803 - protein, 268 aa, Unknown
  Bacterial polypetide isolated from the Sargasso Sea
ADIILCNTYHLMLRPGESIIQQVGGLHKFMNWPRPILTDSGGFQVMSLAALSKRSDDGVEFKSHIDGKKHFLSPEYSIKIQQTLGSDIIMCFDECTSFEATEREVHESMTRSMEWAFRSKNAFQNSLGSTLFGIQQGGVFHDAREESAKRLIQIDFEGYAVGGLAVGEPQDIMFDVLDNSIPHFPDNKPRYLMGVGKPGDILGAVLRGVDMFDCVLPSRSGRTGQALTRMGAINIRNARHAKDPRPLDPKCGCPTCKNYSRAYLHTCV

SEQ ID NO: 118804 - protein, 219 aa, Unknown
  Bacterial polypetide isolated from the Sargasso Sea
NENDIEDSLQRTHLWLQRCVETHQKSNQALFGIVQGGKYPRLREYSAKYTSSFDLPGIAVGGVSVGEAVEEIHNVINYVPKFLPINKPRYLMGIGSLKEISLAVANGFDIFDCVLPTRLGRHGTAFFNDERLNLRNARFKNDFSPIDKTCKCETCKSYSRAYLHHLIRNDEILGLTLISLHNIAHLIRFTNAISIAIRDNCFTNDFAPWKTSSIAHHTW

SEQ ID NO: 118805 - protein, 292 aa, Unknown
  Bacterial polypetide isolated from the Sargasso Sea
ETHRGKIETPVFMPVGTQATVKACTIDDIKKTGSQIILSNTYHLMIRPGVKRIEDAGGLHKFMNCDLPILTDSGGFQVMSLSKLNKIDKEKGAIFNSHIDGKKFYLSPEESIKIQLGLNSDIVMVMDECPKKTNDYQTIDKSMNLSLYWAERSKKAFGHNPHKALFGIVQGGLFKDLRQKSLKGLLEIGFDGYALGGLAVGETQDEMFTVLDDIKEHLPDDKPHYLMGVGTPNDILGAVKRGVDMFDCVLPTRSGRTGLAFTWQGRVNIKNNKYQNDNTPLDPECKNLNLNK

SEQ ID NO: 118806 - protein, 230 aa, Unknown
  Bacterial polypetide isolated from the Sargasso Sea
FDECTDYPSTYDDAQKSMELSMRWAKRCKEAHKSKSALFGIVQGGMYTDLRKESLDRLIDIDFDGIALGGLSVGESKQEKTEILEFMSDKLPDDKPRYLMGVGTPEDIVEAVRYGIDMFDCVLPTRNARNGQLFTSEGVINIRNAEYKNSDDPIDINCDSKVSQNYSRAYLNHLQRTNEMLGSMLATYHNIYYYQSLMKEIRESIKNNLFAKFVKDFYNRRNLDMPEGPL

SEQ ID NO: 118807 - protein, 163 aa, Unknown
  Bacterial polypetide isolated from the Sargasso Sea
AIGGLAVGEGQEKMFETIEYTEPFMDTDKPRYLMGVGKPEDIIGAVKRGIDMFDCVLPTRSGRNGQAFTSRGEINIKNARHTKDPRALDEACDCNTCKNYSRAYLHHLFKANEILGLMLLSDHNINFYQNMMMGIRKSIKNGNFENFSETFLLKRAGGDILES

SEQ ID NO: 118808 - protein, 238 aa, Unknown
  Bacterial polypetide isolated from the Sargasso Sea
SIRIQLGLNSDILMIMDECPKKTNDYDLIKKSMNLSLFWAERSKKAFGKNPHKALFGIVQGGLFKDLRIKSLNELIKIDFDGYALGGLAVGETQAEMFSVLDDIKMYLPEDKPHYLMGVGTPSDLLGAVKRGIDMFDCVLPTRSGRTGLAFTWEGRINIKNNKYQNDNTPLDSNCDNLSLNKYSKNYLNHLFNTNEILASMLLTLHNINFYQELMSSIRDHIESGTFDKFHDKYIDKL

SEQ ID NO: 118809 - protein, 268 aa, Unknown
  Bacterial polypetide isolated from the Sargasso Sea
SVGGLHEYMNCKIPILTDSGGFQVMSLSKFNKIDKEKGAIFQSHIDGKKFVLSPEESIKIQKKLNSDIVMVMDECPKKSNDYQSIKNSMELSSYWAKRSKDEFGQNDTKALFGIVQGGLFDDLREKSLKNLIDIGFDGYALGGLAVGETQNEMFKVLDNIKDKLPKNKPRYLMGVGTPSDIIGAVKRGVDMFDCVMPTRSGRTGLAFTWNGRIQIRNSQYQNDNTPLDPNVSKFDLNKYTKNYLNHLYNTNEMLASMLLTLNNITFIK

SEQ ID NO: 118810 - protein, 89 aa, Unknown
  Bacterial polypetide isolated from the Sargasso Sea
MFELIQSDGAARRGRLNLGHGVVETPVFMPCGTYGTVKGMTPLDLSEIGTQILLGNTFHLMLRPSDQSIRKLGGLHRFMNWSKPILTDS

SEQ ID NO: 118811 - protein, 235 aa, Unknown
  Bacterial polypetide isolated from the Sargasso Sea
MALKKFNFNVNYTENHSRVGLIETSRGNINTPAFMPVGTQATIKCAFINDILKTGSEIILSNTYHLMIRPGTDRIEAVGGLHEFMNCSLPILTDSGGFQVMSLSKLNKIDREKGAIFQSHIDGKKFILSPEESIRIQKSLNSDIVMVMDECPKKSTDYQKIKKSMELSIEWAERSKIAFGSNPHKALFGIVQGGLFDDLRNKSLKALIDIDFDGYAIDGLAVGDTQDEMFKVLDN

SEQ ID NO: 118812 - protein, 271 aa, Unknown
  Bacterial polypetide isolated from the Sargasso Sea
MSLKNFSFKIKNKDKFSRTGTIITSRGNIDTPVFMPVGTQATVKATFVDDLIKAGSQIILSNTYHLMIRPGEERVALQGGLHEFMNCPLPILTDSGGYQVMSLSKLNKIDREKGAIFNSHVDGKEYILSPEESIRIQKKLNSDIVMVMDECPKKTTDRKIIEDSLNLSTEWALRSKNSFGKNPHKGLFGIVQGGLFDDLRKKSLNDLIKIGFDGYALGGLAVGDTQSEMFKVLDGIKNHLPEDKPRYLMGVGTPSDILGAVKRGIDMFDCV

SEQ ID NO: 118813 - protein, 215 aa, Unknown
  Bacterial polypetide isolated from the Sargasso Sea
SMHLSMRWADRCRSAFSERSGYGLFGIVQGSVFPNLRLESAAALTDIGFDGYALGGLAVGEGQTEMFSVLDVTVPALPQDRPRYLMGVGTPDDIVGAVQRGIDMFDCVLPTRSGRTGQAFTRRGTVNIRNARHTEDPRPLDPGSSYPGVGDVSRGYLHHLFKAKEMLGPVLLTMHNLHYYQEVMAGIRAAIEAGLLDQFAADFRAQQAEGDIEPL

SEQ ID NO: 118814 - protein, 223 aa, Unknown
  Bacterial polypetide isolated from the Sargasso Sea
MDECSKKTEDYNLIKKSMNLSLYWAERSKKAFGNNPHKALFGIIQGGLFKDLRLKSIEGLTNIGFDGYAVGGLAVGETQNEMFTVLDDIKEYLPEEKPHYLMGVGTPSDILGAVKRGIDMFDCVLPTRSGRTGLAFTWNGRLNIKNNKYQYDNTPLDPNCENLNLNKYSKNYLNHLFNTNEILASMLLTLHNINFYQELMSEIRKNIMNNTFDEFHDKYIDKL

SEQ ID NO: 118815 - protein, 301 aa, Unknown
  Bacterial polypetide isolated from the Sargasso Sea
LKSLTPQQIEDTGAEIILGNTYHLMLRPGVEIIESHGGLHQFNGWSKLILTDSGGFQVFSLSAFRKVTEEGVTFKSPINGSQYQITPEHAIALQEGFGSDIMMAFDECVGYPSTPQDVASAMERSLRWAKRCVDARKKPSSHLFGIIQGGFDHKLRMESLERTVDLPCDGFALGGLSVGEPKDKMYAMIEAFAPKMPNDHPRYLMGVGTPSDIMFAVKHGIDMFDCVLPSRNARNGHLFTSQGIVKIRNQKYKNDTTPLDPECPCYTCKHFSKSYLHHLDKCKEMTGATLNTIHNLTFYQT

SEQ ID NO: 118816 - protein, 206 aa, Unknown
  Bacterial polypetide isolated from the Sargasso Sea
MQTHEFSFELVTQDEQARLGKILTPRGKIDTPAFMPVGTQGSIKAVFTDDILKTETQIILGNTYHLLLRPGIDVIKKFNGLHNFMNWEKPILTDSGGYQIMSLSKFNKIDKDIGAIFKSHLDGKKIILSPEKSIQVQKAINSDIIMVLDECPKLTEDKKILSNSIDISTHWAKRCKTEFGYDKSKGLFGIVQGGLYKDLREESINK

SEQ ID NO: 118817 - protein, 119 aa, Unknown
  Bacterial polypetide isolated from the Sargasso Sea
VRYGIDMFDCVLPTRNARNGQLFTSEGVINIRNAEYKNSDEPIDKNCDSKVSQNYSRAYLNHLQRTNEMLGSMLATYHNIYYYQSLMKDIRNAINDNLFAKFLKDFYNRRNLDMPDGPI

SEQ ID NO: 118818 - protein, 105 aa, Unknown
  Bacterial polypetide isolated from the Sargasso Sea
MTLKDFAFSVSNKDRYARCGIIQTNHGNINTPAFMPVGTQATVKACTIEDIKKTGSEIILSNTYHLMIRPGVERIKRLGGLQKFMNCDLPILTDSGGFQVMSLSK

SEQ ID NO: 118819 - protein, 188 aa, Unknown
  Bacterial polypetide isolated from the Sargasso Sea
MVKEDFSFELLAQDGKARLGKIKSSKGYIDTPVFMPVGTQGTIKGVFTSDILNTNTQIILGNTYHLLLRPGIEILKKFGGLHNFMNWNKPILTDSGGYQIMSLSKFNRIDINLGAIFKSHIDGKKIILSPEKSIKVQKAINSDIIMVLDECPKLTRDKKILSKAINVSTEWARRSKIEFGSDKSKALF

SEQ ID NO: 118820 - protein, 234 aa, Unknown
  Bacterial polypetide isolated from the Sargasso Sea
MAFDECPPYPCDYSYAKNSMNLTHRWLNRCINQFKDTPAKYGYEQIFFPIVQGSTFKDLRKESADFISSKNCFGNAIGGLSVGEPHDEMYEMTSIVCERLPEDKPRYLMGVGTPVNLLENIALGIDMFDCVMPTRNGRNGMLFTSEGIINIKNKKWEFDYSLIDDNGTTWVDRTYSKSYLRHLFSVNEMLGRQIASIHNLGFYCFLMSEARKKIIDGDFLNWKDKMVKKLNNRL

SEQ ID NO: 118821 - protein, 304 aa, Unknown
  Bacterial polypetide isolated from the Sargasso Sea
MLRPGTETIKRFGGLHKFMNCKLPILTDSGGFQIMSLSKLVKIDKKKGAIFNSHLDGKKIILSPEESIRIQKDLNSDIVMVLDECPKLTKDKNKLSESLKLSNHWAERSKIEFGLNPKKALFGIVQGGIYKDLRLESLEGLEKIGFDGYALGGLAVGESQSQMFNVLENITFKMPKNKPRYLMGVGTPSDILGAVKRGIDMFDCVMPTRSGRTGLAFTWEGRLNLRNSKYKKDDSPINKYIQLRNSNLYSKSYINHLINSNEILASMLLTLNNIIFYQDLMNKIREAIKNNTFDQFYNKYINII

SEQ ID NO: 118822 - protein, 290 aa, Unknown
  Bacterial polypetide isolated from the Sargasso Sea
GPILTDSGGFQIMSLAKLRKLTDGGVTFKSHIDGTEHFLSPEKSIGIQETLNATISMVLDECTAYPCSKEEAEKSMKLSMGWSAQSKDAFNPRPGFGLFGIVQGGIHFDLRRESATFLEEQKFDGYAIGGLAVGEGSEILHEVAGFTAGLLPCDKPRYLMGVGRPEDLVQAVSVGCDMFDCVLPTRSGRTGQAFTHRGTVNIRNSRHRSDARPLDELCDCPTCLSYTRGYLHHLVRSGEILGSMLMTWHNIHYYQGLMASIRRHILGGEFSRFEASFRELYLEGDIEPLT

SEQ ID NO: 118823 - protein, 194 aa, Unknown
  Bacterial polypetide isolated from the Sargasso Sea
MTLKKFTFNVESNDHLARTGIISTHRGDIRTPAFMPVGTQATVKATFMDDIKETGSDVILGNTYHLMIRPGVDRVVSAGGLHKFMNWPYPILTDSGGFQVMSLSKLTKIDREKGAIFNSHIDGKEFILSPEESIKIQKGLNSDILMVLDECPKKTVDKNKIKESLSLSTYWAQRSKKAFGLNPHKAIIWNNPRR

SEQ ID NO: 118824 - protein, 233 aa, Unknown
  Bacterial polypetide isolated from the Sargasso Sea
MKKKEFSFSLITKFKNARLGKIKTPRGNIDTPAFMPVGTLGTVKGLFVEDVKKTGAQIILGNTYHLMLRPGPNVLENFGGLHNFMNWDKPILTDSGGFQIMSLSKLNKIDKDIGATFRSHIDGKKIILSPEKSIKIQKSINSDILMVLDECPKLTRDRDKLKRAIDISTNWAKRSKVEFGNNKKKALFGIIQGGLHKDLRKESLQRLIEINFNGYAIGGLAVGESQAEMFERL

SEQ ID NO: 118825 - protein, 223 aa, Unknown
  Bacterial polypetide isolated from the Sargasso Sea
MKNNKFSFELITQNGKARLGIISTPKGKIDTPTFMPVGTQGTVKGIFTDDIIKTGTQIILGNTYHLLLRPGIEILDKFNGLHRFMNWDKPILTDSGGYQIMSLSKLNKIDKNIGAVFNSHIDGKKIILSPEKSIQVQKAINSDIIMVLDECPKLTDDKKILSKAIDVSSHWAKRSKIEFGQDNSKALFGIAQGGLHKDLREESISKLIEIGFDGYAMGWSCSR

SEQ ID NO: 118826 - protein, 128 aa, Unknown
  Bacterial polypetide isolated from the Sargasso Sea
MKLNTFNFKVLKTCRNARTGILSTAHGLIDTPTFMAVGTAGTVKALTPEAVAKTGTQVILGNTYHLMLRPGADRVEKFGGLHKFMNWDNSILTDSGGFQIMSLEGLRKLEENGVTFRSHIDGSSHHLT

SEQ ID NO: 118827 - protein, 205 aa, Unknown
  Bacterial polypetide isolated from the Sargasso Sea
MFKLLKTDTHSRARLGALMTAHGMVETPVFMPVGTRATVKTLDNADLQNIGVRTILGNTYHLNLRPGMDVVRAAGGLHSFMNWDGPILTDSGGFQIFSLSKIAKIREDGVEFKSHIDGKKLFLGPEESMEIQRHLASDIAMVFDDCPPYGASKKDVSFAIDRTHRWAVKCFNQPRADGQLVFGIIQSGCYEDLKEQSAAELRVSN

SEQ ID NO: 118828 - protein, 236 aa, Unknown
  Bacterial polypetide isolated from the Sargasso Sea
MKFKEINSSEFARVSEIHTARGVIHTPAFMPVGTNGTVKGLTTNDLTETNSEIILGNTFHLMLRPGDKLIKNLGGLHKFINWEKPILTDSGGFQVWSLGDLAKISEEGVKFSSPYDGKKIFMTPEDSIMIQENLGSDIIMVFDECTDYPSSHDQARKSMELSMRWAKRCKIAHKSDSALFGIAQGGMYKDLREDSLNKLIDIDFDGIALGGLSVGESKQEKTEILEFMSDKLPKDK

SEQ ID NO: 118829 - protein, 290 aa, Unknown
  Bacterial polypetide isolated from the Sargasso Sea
MTLKKFTFNVENNDHLARTGIISTHRGDIRTPAFMPVGTQATVKATFMDDIKETGSDVILGNTYHLMIRPGVDRVVSAGGLHKFMNWPYPILTDSGGFQVMSLSKLTKIDREKGAIFNSHIDGKEFILSPEESIKIQKGLNSDILMVLDECPKKTVDKNIIKESLSLSTYWAQRSKKAFGLNPHKALFGIIQGGLFNDLRKESLEQLVKIDFDGYAVGGLAVGETQTEMFNVLDGITKFMPTDKPRYLMGVGTPADILGAVKRGIDMFDCVMPSRSGRTGLAFTWQGRIN

SEQ ID NO: 118830 - protein, 198 aa, Unknown
  Bacterial polypetide isolated from the Sargasso Sea
MDKFKLVATSGTARAAEFNTQHGRVSTPVFMPVGTQATVKALSPEEIKNTGASIILGNAYHLSLQPGVKLIHDFGGLHSFMNWDKPILTDSGGFQAFSLSETNKITDDGITFKSPSDGSSHFINPEQATLNQIQIGADIIMCFDHCIEYGASLIEVEAAMDRTHRWASLCQQTFQNYGNEDRQSLFGIIPGGTSRDLR

SEQ ID NO: 118831 - protein, 196 aa, Unknown
  Bacterial polypetide isolated from the Sargasso Sea
KRRGFFLFGIVQGGMFSELRKKCAEELVKIGFDGYAIGGLSVGESHNKMISVIDSTLSFLPSDKPRYLMGVGRPVDIFEAIERGVDMFDCVLPTRFGRNGRAFTSNGEINLKNSRFAKDKKPLDESSICEISSKFSKGYLHHLTKNNEILSSMILSLHNIAFYKKMMTEIRASIKEKKFLQLKEKYLNNHGKFKKN

SEQ ID NO: 118832 - protein, 241 aa, Unknown
  Bacterial polypetide isolated from the Sargasso Sea
YIGADIIMAFDECTPYPCDYRYAQRSMHMTHRWLNRCISHLEKVPTKYGYNQTFFPIVQGSTFKDLRQQSAEYIANAGAQGNAIGGLSVGEPAEEMYAMTEVVTAILPKDKPRYLMGVGTPINILENIALGIDMFDCVMPTRNARNGMLFTANGTINIKNKKWEDDFSPIDEMGHTWVDTEYTKAYLRHLFAANEYLGKQIATIHNLGFYMWLVREARKHILAGDFRTWKDMMVKQMDQRL

SEQ ID NO: 118833 - protein, 155 aa, Unknown
  Bacterial polypetide isolated from the Sargasso Sea
MKITNFSFELISQNDKARLGRILTSRGTIDTPAFMPVGTQGTIKGVNTEDILETGTQIILGNTYHLLLRPGVEILKKFDGLHKFMNWNKPILTDSGGYQIMSLSKFNKIDKDIGAIFKSHIDGKKIILSPEKSIQVQKNINSDIIMVLDECPEIN

SEQ ID NO: 118834 - protein, 96 aa, Unknown
  Bacterial polypetide isolated from the Sargasso Sea
MKKFELIHQDGNARRGKLFTQHGEINTPAFMPVGTAGTVKGVFTRDLKETGSEIILGNTYHLMLRPGDKSIAEAGGLHKFMNWNMPILTDSGGISS

SEQ ID NO: 118835 - protein, 171 aa, Unknown
  Bacterial polypetide isolated from the Sargasso Sea
ANFISEKNCKGNAIGGLSVGEPEEEMYEMTEVVCSILPQDKPRYLMGVGNPINILENISLGVDMFDCVMPTRNARNGMLFTSEGTINIKNKKWENDFSAIDKNNYTFVDNQYSKAYLRHLFSINEMLGKQIASIHNLGFYNWLLDEARKNILEGSFSIWKSKMISKLNNRL

SEQ ID NO: 118836 - protein, 265 aa, Unknown
  Bacterial polypetide isolated from the Sargasso Sea
MSLKNFSFNVVKKNGFARLGLIETHRGNIDTPVFMPVGTQATIKGAFIEDIIKTGAQIILSNTYHLMIRPGVERVKSHGGLHNFMNCPLPILTDSGGFQVMSLSKLNKIDKEIGAIFNSHIDGKKFILSPEESIKIQLGLNSDIVMVMDECPKKTNDYDLIQKSMKLSMYWAERSKKQFGSNPHKALFGIVQGGLFSDLRERSLNLLKEIGFDGYAIGGLAVGESQIEMFKILDGLKNLMPEDKPRYLMGVGTPIRYSWSQFTEV

SEQ ID NO: 118837 - protein, 283 aa, Unknown
  Bacterial polypetide isolated from the Sargasso Sea
MALKNFAFKVLKKDKFARSGVIETYRGSINTPAFMPVGTQATVKACTIDDIKKTGSQIILSNTYHLMIRPGVERIKSAGGLHKFMNCDLPILTDSGGFQVMSLSKLNKIDREKGAIFNSHVDGKKFYLSPEESIRVQLGLNSDIVMIMDECPKKTIDYDLIKKSMDLSLYWAERSKKAFGINRHKGLFGIVQGGLFKDLRIKSLNELMNIGFDGYALGGLAVGETQQEMFSVLDDVKEYLPDDKPHYLMGVGTPSDILGAVKRGIDMFDCVLPTRSGRTGLAF

SEQ ID NO: 118838 - protein, 197 aa, Unknown
  Bacterial polypetide isolated from the Sargasso Sea
RSKNSFGKNPHKGLFGIVQGGLFDDLRKKSLNDLIKIGFDGYALGGLAVGDTQSEMFKVLDGIKNHLPEDKPRYLMGVGTPSDILGAVKRGIDMFDCVLPSRSGRTGLAFTWNGPINIKNAKYQNDTKPIDEKCEKFNLNKYSKNYLNHLFNTNEILASMLLTLHNINFYHELMNEIRININNGTFDQFFDEYIAKL

SEQ ID NO: 118839 - protein, 118 aa, Unknown
  Bacterial polypetide isolated from the Sargasso Sea
MALKKFAFNVLKKDKFARCGLIETHRGNIQTPAFMPVGTQATVKACTIDDIKKTGSEIILSNTYHLMIRPGVERIESAGGLHNFMNCDLPILTDSGGFQVMSLSKLNKIDREKGAIFN

SEQ ID NO: 118840 - protein, 279 aa, Unknown
  Bacterial polypetide isolated from the Sargasso Sea
MYKLIAKDGEARRGEVSTEHGTFQTPAFMPVGTYGAVKSISPEILHSINAEIILSNTYHLMERPGVDIIKLNGGLHNFMSWDKPILTDSGGYQVFSLAKKRKISEEGVEFNSALNGNKLFLNPEKCMELQQSYGVDIAMVLDECTPYPAEISVAEKSMQLSLRWAERSRNSFNSNKSSLFGIVQGGVYGDLREQSLEGLKGMDFEGYAIGGLSVGEPKDDLRKITNLIAPKMPVDKPRYLMGVGTPLDIVKAVESGVDMFDCVIPTRHARNGYLYTSEG

SEQ ID NO: 118841 - protein, 155 aa, Unknown
  Bacterial polypetide isolated from the Sargasso Sea
MSLKKFSFNVISNDGFARIGKIQTPRGNIDTPVFMPVGTQATIKGAYIKDIIKCGAQIILSNTYHLMIRPGVERVSSLGGLHEFMNCSLPILTDSGGFQVMSLSKLNKIDREVGAIFNSHIDGKKFILSPEESIKIQLGLNSDILMVMDECPKKT

SEQ ID NO: 118842 - protein, 272 aa, Unknown
  Bacterial polypetide isolated from the Sargasso Sea
NTYHLMIRPGIKVLEKFNGLHNFMNWSKPILTDSGGFQIMSLSKFNKIDKDIGAIFSSHIDGKKFILSPEKSIQIQKKINSDILMVLDECPKLTKDKKKISDSIDISTHWAKRCKVEFGKNKKKALFGIIQGGLYKDLRIESLEKLKEINFDGYALGGLAVGESQFEMFKILDEIVPLMPRDKPRYLMGVGTPSDILHAVKNGVDMFDCVIPTRSGRTGLAFTWDGKLNLKNSKFKYDKSPLDQSCKIRNLNLYSKSYLNHLIKTNELLASM

SEQ ID NO: 118843 - protein, 298 aa, Unknown
  Bacterial polypetide isolated from the Sargasso Sea
MLPENVREIGAEVILANTYHLMLRPGAECIDALGGLHKFMNWHLPILTDSGGFQVMSLSKLSKVTENGVKFRSHIDGSEYLLTPERSIQIQRLLGSNIVMCFDECTKFPVTEDVAEASMLMSMRWAERSKIEFEKNQGEALFGIVQGGTYKNLRQQSVDMLTKIGFDGYALGGLAVGEGHDAMLDVLDYVPTTLPRNFARYLMGVGKPPDIVEAVTRGVDMFDCVLPSRSGRTGQAITRRGPINIRNFRHKNDNRPLDSECNCLTCRSYSRAYLNHVNRAQEIISSILLTWHNLHYYQ

SEQ ID NO: 118844 - protein, 228 aa, Unknown
  Bacterial polypetide isolated from the Sargasso Sea
MALKKFTFNVKEKDNQARLGLIQTHRGNINTPVFMPVGTQATVKGVFIDDVIKTGAEIILSNTYHLMLRPGIKRIESLGGLHKFMNCKLPILTDSGGFQVMSLSKLNKIDREKGAIFQSHIDGKKYILSPEESIKVQKSLNSDIVMVMDECPKKSSDYKKIKKSMELSIYWAERSKKSFGINSHKAIFGIVQGGLFKDLRIKSLEQLLNIDFNGYALGGLAVGESQKE

SEQ ID NO: 118845 - protein, 160 aa, Unknown
  Bacterial polypetide isolated from the Sargasso Sea
DGYAVGGLSVGESKEEMYNVTHHITPRMPPEKPRYLMGVGDPSDLLEGIEAGIDMFDCVMPTRNARNGMLFTSHGKIIIKQSKFKEDPEPLDTECECPTCKNYSRAYLQHLFKSGEILGVRLNTYHNLFFFISLLKKAREAIIERRFIEFKKDFLKKFNS

SEQ ID NO: 118846 - protein, 296 aa, Unknown
  Bacterial polypetide isolated from the Sargasso Sea
YHLMIRPGEERVALQGGLHEFMNCPLPILTDSGGYQVMSLSNLNKIDREKGAIFNSHVDGKLYTLSPEESIRIQKKLNSDIVMVMDECPKKTTDRKVIEDSLNLSTEWALRSKNSFGKNPNKGLFGIVQGGLFDDLRKKSLNDLIKIGFDGYALGGLAVGDTQSEMFKVLDGIKNHLPEDKPRYLMGVGTPSDILGAIKRGIDMFDCVLPSRSGRTGLAFTWNGPINIKNAKYQNDTKPIDEKCEKFNLNKYSKNYLNHLFNTNEILASMLLTLHNINFYHELMNEIRININNWNF

SEQ ID NO: 118847 - protein, 197 aa, Unknown
  Bacterial polypetide isolated from the Sargasso Sea
MTLKKFSFNVKEKDNQARLGIIKTQRGNIHTPAFMPVGTQATVKGTFIDDIIKTGSEIILSNTYHLMIRPGVERIESAGGLHQFMNCNLPILTDSGGFQVMSLSKLNKIDKEKGAIFQSHIDGKKFILSPEESIRIQKSLNSDIVMSMDECPKKSSNYKKIKSSMELSMYWANRSKNAFGTNPQKAIFGYIQGGLFK

SEQ ID NO: 118848 - protein, 101 aa, Unknown
  Bacterial polypetide isolated from the Sargasso Sea
MALKDFAFNVLKKDKFARCGLIQTHRGSINTPAFMPVGTQATVKACTIDDIKKTGSEIILSNTYHLMIRPGLDRIESSGGLHQFMNCDLPILTDSGGFQVM

SEQ ID NO: 118849 - protein, 237 aa, Unknown
  Bacterial polypetide isolated from the Sargasso Sea
MALKKFAFNVLKKDKFARCGLIETHRGNIQTPAFMPVGTQATIKACTIDDIKKTGSEIILSNTYHLMIRPGVERIKTAGGLHNFMNCDLPILTDSGGFQVMSLSKLNKIDREKGAIFNSHVDGKKFYLSPEESIRIQLGLNSDIVMIMDECPIKTYDYELINKSMDLSLYWAERSKKAFGKNPQKALFGIVQGGLFKDLRLKSLKELMKIGFDGYAIGGLAVGETQNEMFCILDNIK

SEQ ID NO: 118850 - protein, 153 aa, Unknown
  Bacterial polypetide isolated from the Sargasso Sea
GGLAVGETQHEMFNVLEDIKEYLPNEKPRYLMGVGTPSDILGAVKRGIDMFDCVLPTRSGRTGLAFTWNGRINIKNKKYQKDNTPLDPNCENLNLNKYSKNYLNHLFNTNEILASMLLSLHNINFYQELMLEIRKNINLGTFDEFHNKYIDKL

SEQ ID NO: 118851 - protein, 215 aa, Unknown
  Bacterial polypetide isolated from the Sargasso Sea
MGSNIYKLITKDGLARRGEVKTAHGKFQTPAFMPVGTYGAVKSLSPETLEALKAEIILSNTYHLMERPGVEIIKSHGGLHQFMGWQGPILTDSGGYQVFSLSKKRTISEEGVEFFSSLNGDKKYLTPESCMQLQLDYGVDIAMVLDECTPYPVSEEIAKESMNLSLRWAKRCRSAFASDQASLFGIIQGGIFDHLREESLLGLMKINLKDTLLGG

SEQ ID NO: 118852 - protein, 204 aa, Unknown
  Bacterial polypetide isolated from the Sargasso Sea
KDAHKSQSALFGILQGGMYEDLREESLKHTLACEFDGIAIGGLSVGEPKEEKTKILRHLSSMLPNEKPRYLMGVGKPEDIVEAVFFGVEMFDCVLPTRNARNGQLITSKGMINIRNAKYKNDDSPIDENSNSKVCKSYSKAYLHHLDKTNEMLGSMLASYHNIYYYHELMKQIRQSIDDDIFVNFAKDFYNNRNLPIPDYLEGL

SEQ ID NO: 118853 - protein, 242 aa, Unknown
  Bacterial polypetide isolated from the Sargasso Sea
MALKKFAFNILKKDKYARCGIIKTHRGNIHTPAFMPVGTQATVKACTIDDIKKTGSEIILSNTYHLMIRPGVKRIESAGGLHNFMNCDLPILTDSGGFQVMSLSKLNKIDREKGAIFNSHVDGKKFYLSPEESIKIQLGLNSDIVMIMDECPKKNDNYNVIKKSMELSLYWAERSKIAFGNNPHKALFGIIQGGLFKDLRLKSLQELIKINFDGYAVGGLAVGESQVEMFVVLDDIKDYLPN

SEQ ID NO: 118854 - protein, 322 aa, Unknown
  Bacterial polypetide isolated from the Sargasso Sea
FSFELITQDDRARLGKINTSRGLIDTPAFMPVGTQGTVKGVFTDDIIKTKSQIILGNTYHLLLRPGIETLKKFNGLHNFMNWQKPILTDSGGYQIMSLSKLNKTDIKIGAIFKSHLDGKKIILSPEKSIQVQKAIDSDILMVLDECPKLTKDKKILSKSIAVSTKWAKRSKIEFGNNKLKALFGIAQGGLYKDLRIESIHKLIEIGFDGYAMGGLAVGEKQDDMLKILSETVDHLPKDKPRYLMGVGTPSDILGAVNQGIDMFDCVMPTRSGRTGLAFTWEGKLNLKNSKFKNDQTSLCTNCDIRDINRYSKSYLHHLIKSK

SEQ ID NO: 118855 - protein, 270 aa, Unknown
  Bacterial polypetide isolated from the Sargasso Sea
MSLSKLVQIDKKKGAIFKSHIDGKKITLGPEDSIRIQKDLNSDIVMVLDECPKLTNEKKKIEDSIKLSNIWAKRSKDEFGENPNKALFGIVQGGVYKDLRLQSLDDLEKIGFDGYALGGLAVGETQVQMFNVLDNVVPFISKNKPRYLMGVGTPSDILGAVKRGVDMFDCVMPTRSGRTGLAFTWEGRLNLRNSKYQNDYTPINCNTKIRNLNKYSKSYINHLINTNEILASMILTLNNIIFYQELMKEIRQSIKNDTFDAFYKKYANVI

SEQ ID NO: 118856 - protein, 290 aa, Unknown
  Bacterial polypetide isolated from the Sargasso Sea
LKTSRGYVKTPVFMPVGTAATVKAMLPETLEAIGAQILLCNTYHLMIRPGEKVINHLGGLNTFMNWSGPILTDSGGFQVMSLAKLRQLNENGVTFRSHVDGKKFLLTPEISIMIQETLKSTIIMAFDECTPFPVEKKIAEKSMKLSSRWAERSKSSFKGSHGSMLFGIQQGGMFKDLREESACYLNDIGFDGYAIGGLAVGEPQQKMFEVLDYSTDFFPRDKPRYLMGVGKPSDIVGAVWRGIDMFDCVIPTRSGRNGQAFVENGTINLKNAKYKLDKNPIDDTCGCYCC

SEQ ID NO: 118857 - protein, 206 aa, Unknown
  Bacterial polypetide isolated from the Sargasso Sea
MFQHIWAKRSKIEFDNAENKSLFGIVQGGLFNDLRIESLEKLLEINFDGYALGGLAVGEKQNEMFEVLDNITNKMPKNKPRYLMGVGTPSDLLGAVKSGIDMFDCVLPTRSGRTGLAFTWDGKVNIRNSKYKKDLKPLDDNTNLRSLNKYSKSYLNHLINTNEILASMLISLHNINFYQEFMKKIRTSIKDGSFDDFYKENISKFN

SEQ ID NO: 118858 - protein, 198 aa, Unknown
  Bacterial polypetide isolated from the Sargasso Sea
PGYGIFGIVQGSVFPELRRESAARLVDTGFDGYAVGGLAIGEPQDVMFDVLENTIPDLPKLRPHYLMGVGKPADIVGAVKRGVDMFDCVIPTRSGRTGQAYVRGGSLNLRNARHADDDRPLDAGCDCRVCQNYSRAYLSHLVKSGEMLAGMLLTIHNLHYYQSLMSNIRTAITEQSLNNFIKLFEEQQEAGPVVSETN

SEQ ID NO: 118859 - protein, 225 aa, Unknown
  Bacterial polypetide isolated from the Sargasso Sea
TEREARRSMELSLRWAERSQKKFHDLGLGAQRDSALFGIIQGGVFKSLREESLASLIEIDFDGYALGGLAVGETEDERLSVLETINALMPSDQPRYLMGVGTPEDLIKAVSYGIDMFDCVMPTRHARNGRLFTSKGSINIRNQRFKNDTSPIDESCNCDTCQHYSRAYIRHLQQCNEILGSRLATVHNIYHYQSLMADMRDAISNQCFADFSLERLQGYAAEIDS

SEQ ID NO: 118860 - protein, 257 aa, Unknown
  Bacterial polypetide isolated from the Sargasso Sea
LSNTYHLMIRPGVERIQLAGGLHNFMNCDLPILTDSGGFQVMSLSKLNKIDREKGAIFNSHVDGKKFYLSPEESIRIQLGLNSDIVMIMDECPKKTNNYNIIKKSMDLSLYWAERSKEAFGNNPHKALFGIIQGGLFNDLRQKSLHELIKIGFDGYAIGGLAVGETQNEMFNVLDDIKEYLPIEKPHYLMGVGTPSDILGAVKRGIDMFDCVLPTRSGRTGLAFTWDGRINIKNNKYQKDNSPLDPSCENLNLNNIF

SEQ ID NO: 118861 - protein, 190 aa, Unknown
  Bacterial polypetide isolated from the Sargasso Sea
FQGSMYPELRRESVAYLKNIGFDGYAIGGLAIGEPQEEMFDVLDYTVPDLPQGRPHYLMGVGKPADIVGAVLRGIDMFDCVIPTRSGRTGQAFVRGGSLNLRNAKHVEDSRPLDVKCGCPVCANYSRAYLHHLIKAGEMLAGMLLTFHNLHYYQDLMAQIRGSIESGTMSDFVTTFDREQKIGAVISETE

SEQ ID NO: 118862 - protein, 216 aa, Unknown
  Bacterial polypetide isolated from the Sargasso Sea
MDSKKKFFELIKKNNEARLGIIQTTHGFIDTPAFMPVGTQGTVKSIFVDDILQTGTQIILGNTYHLFLRPGLEILNKFGGLQKFMNWDKPILTDSGGYQVMSLSKFNTIDKNKGAIFSSHIDGKKFVLSPEKSIQIQKSINSDILMVLDVCPKLTKNKKNILEAIKISNLWAQRSKDEFNDEKNKFLFGIVQGGLFADLREESLENLKTLNFDGYA

SEQ ID NO: 118863 - protein, 278 aa, Unknown
  Bacterial polypetide isolated from the Sargasso Sea
TDSGGYQNMSLSKFRKIDKELGAVFNSHIDGKKIILSPEKSIKIQKSLNSDILMVLDECPSLTNDKKKLSSAIETSTNWAKRCKIEFGHNNEKALFGIVQGGLFKDLRIESLEKLKEIDFDGYAMGGLAVGEEQANMFKILSETVDYMPEMKPRYLMGVGTPADILGAVYYGIDMFDCVLPTRSGRTGLAYTWNGKINLRNSEFKNDKSPIDEQTSIRNMNKYSKSYINHLIKSDEMLASMIISLHNINFYQQFMLEIRKSIKNGTFDEFYRKYINMF

SEQ ID NO: 118864 - protein, 130 aa, Unknown
  Bacterial polypetide isolated from the Sargasso Sea
MSLKKFSFNVINKDGFARLGRIQTHRGFIDTPVFMPVGTQATVKGTYIKDIVETGSQIILSNTYHLMIRPGVDRVKSLGGLHEFMNCPLPILTDSGGFQVMSLSKLNKIDREKGAIFNSHIDGKKFILSP

SEQ ID NO: 118865 - protein, 198 aa, Unknown
  Bacterial polypetide isolated from the Sargasso Sea
ERSKKQFGSNPHKALFGIVQGGLFDDLRMRSLELLTNIGFDGYAIGGLAVGESQVEMFKVLDGLKHIMPFDKPRYLMGVGTPTDILGSVSRGVDMFDCVLPTRSGRTGLAFTWNGKINIRNSEYKTDNSPLDENISKFDLNKYSKNYLNHLFNTNEMLGSMILTLNNVNFYQELMFEIRKHIKNGTFEDFYNKYIHIL

SEQ ID NO: 118866 - protein, 133 aa, Unknown
  Bacterial polypetide isolated from the Sargasso Sea
MLKFEIEARNNNSRAAKLHTLEGTIHTPVFMPVGTLATVKGMTTGEIKDLGAEIILGNTYHLHLRPGDSVIRKMGGLQKFMNWDGPILTDSGGFQIFSLAKLIKLNEEGVIIRSHIDGSKIKITPEISISIQK

SEQ ID NO: 118867 - protein, 229 aa, Unknown
  Bacterial polypetide isolated from the Sargasso Sea
SDIVMVMDECPKKSNDYKKIKKSMNLSMYWAERSKEAFGKNPHKAIFGIIQGGLFKDLRIKSLEKLVEIDFNGYAVGGLAVGESQNEMFKTLDYVTNLMPKNKPRYLMGVGTPSDILGAVKRGIDMFDCVLPTRSGRTGLAFTWNGRINIRNSKYQHDNNPLDKDTINFGLNKYSRNYLNHLFNTNEMLGSMLLTLHNINFYQELMRSIRKNIENGTFNEFHDKYINRL

SEQ ID NO: 118868 - protein, 137 aa, Unknown
  Bacterial polypetide isolated from the Sargasso Sea
MALKKFSFNVKEIDNKARLGLIKTHRGNINTPAFMPVGTQATIKGTFIDDIIKTGSEIILSNTYHLMIRPGVNRIESSGGLHSFMNCKLPILTDSGGFQVMSLSKLNKIDIEKGAIFNSHIDGKKFILSPEESIRIQ

SEQ ID NO: 118869 - protein, 236 aa, Unknown
  Bacterial polypetide isolated from the Sargasso Sea
MNFNIHKTDKNTSARTGEVTTDHGTFETPIFMPVATSAAIKGVHNKDLIENVSPKVILSNTYHLYLRPGQKIINKAGGIHKFMSWNNNILTDSGGYQVYSLSANRKINPDGVKFKSHIDGSYHFFTPENVMDIQRNIGADIIMAFDECPPYPCEKNYARKSMDLTHEWLKRCINRFNETKPIYNYNQYLLPIVQGSVYSDLRKQSAEIIAGHDLPANAIGGLSVGEPHELMYEMCE

SEQ ID NO: 118870 - protein, 213 aa, Unknown
  Bacterial polypetide isolated from the Sargasso Sea
HSEASKSMKLSMDWALRCRNVFESKNLLFGIVQGSVYEDLRRDSVKALTDIGFDGYAVGGLAVGETQSQMFDVLGFTCPSLPSNQPRYLMGVGKPDDIIGAVSRGIDMFDCVLPTRSGRNGQAFTSTGTINIRNSKYKNSNNSLDEKSDNPICREYSAGYIHHLFNAKEMLGGMLLSLHNIYFYQKLMREIRDSIESDTFLQFTKNFLSNYKS

SEQ ID NO: 118871 - protein, 212 aa, Unknown
  Bacterial polypetide isolated from the Sargasso Sea
KKIKESLDLSMYWAKRSKIAFGTNKLKALFGIVQGGLFNDLRLDSIEKLVDINFDGYALGGLAVGETQNEMFTVLDSVKDYMPENKPRYLMGVGTPSDILGAVRRGVDMFDCVLPTRSGRTGLAFTWKGRVNIRNAKYKYDNSPLDKDCKKFGLNKYSKNYLNHLFNTNEILGSMLLTLHNLNFYQELMQAIRNNIKKGTFERFHRKYFNKL

SEQ ID NO: 118872 - protein, 152 aa, Unknown
  Bacterial polypetide isolated from the Sargasso Sea
MAKFKFSVENKYQKARAGSIETFHGKIKTPVFMPVGTLGSVKAIFQRDLEKLGVEIILANTYHLMLRPGDLLVKELGGLHKFINWNKPILTDSGGYQVWSLSKLRKINEHGINFVSHIDGKKIELTPESAIQIQERLNSDISMVLDECTEYP

SEQ ID NO: 118873 - protein, 160 aa, Unknown
  Bacterial polypetide isolated from the Sargasso Sea
NFDGYAVGGLAVGETQKEMFTVLDYIKDELPPEKPHYLMGVGTPSDILGAVKRGIDMFDCVLPTRSGRTGLAFTWQGRINIKNNKYQNDDTPLDKNCKNLNLNKYSKNYLNHLFNTNEILGSMLLTLHNINFYQELMSAIRKNIKNNTFDDFHDKYIDKL

SEQ ID NO: 118874 - protein, 126 aa, Unknown
  Bacterial polypetide isolated from the Sargasso Sea
MALKDFAFKVLNKDKFARSGVIETHRGSINTPAFMPVGTQATVKACTIDDIKKTGSQIILSNTYHLMIRPGVDRIKSAGGLHEFMNCDLPILTDSGGFQVMSLSNLNKIDREKGAVFNSHGDGKNF

SEQ ID NO: 118875 - protein, 225 aa, Unknown
  Bacterial polypetide isolated from the Sargasso Sea
MVLDECPKLSIDKKKIRESLKLSHHWAERSKKEFGENPKKALFGIIQGGIYKDLRLESLEGLIKFNFDGYALGGLAVGESQKQMFKVLDDVAGFLPKNKPRYLMGVGTPSDILGAVKRGIDMFDCVIPTRSGRTGLAFTWEGKLNLKNSKYQNDYSPINKNFNLRNLNSYSKSYINHLIKTNEILASMILTLNNIFFYQELMQKIREAIKTNTFDKFYDKYIDII

SEQ ID NO: 118876 - protein, 257 aa, Unknown
  Bacterial polypetide isolated from the Sargasso Sea
MKFSVLSEDNQSQARTGLIETDHSKIETPVFMPVGTHGVVKTLSPNDLSDMNVQIILSNTYHLYLRPGTDIIHENEGLHKFLNWDKSILTDSGGYQVFSLSNMNEITKDGVNFRSHLDGSEHFFTPQKSMEVQRQLGSDIIMAFDYCPSADCSQRELKRASTLTENWTKQAFEYLHDKKSIYGHSQTLFPIIQGGINPDERLKCLSQMLPYATCGIAIGGLSVGEKKEPMLDIVELLGKNMPKDQPRYLMGSWVTYR

SEQ ID NO: 118877 - protein, 274 aa, Unknown
  Bacterial polypetide isolated from the Sargasso Sea
HALETPTFMPVGTRGAVRTLNSLDLEELGADVVLGNTYHLMLRPGVEIIKAQGGLHGYTGWDRLILTDSGGYQVFSLEPEVDDQGVTFKSTYDGSLHRLTPKDAVDIQCGLGADIQMALDVCPPLPAEKSVIETAVTRTSLWAESARKYFLTRRENENFTNAQFGIVQGGLDLSLRQTSAEQIVEIGFDGYAIGGLSVGESRSEMIEPMDASIRTLPFDRPRYFMGLGDPAGLVEAVNLGVDMFDCVWPTRLARHGTALTREGRVNLGAARYAK

SEQ ID NO: 118878 - protein, 293 aa, Unknown
  Bacterial polypetide isolated from the Sargasso Sea
MNFYIHKTDKNTSARTGEVTTDHGTFETPIFMPVATSAAIKGVHNKDLIENVSPKVILSNTYHLYLRPGQKIINKAGGIHKFMSWNNNILTDSGGYQVYSLSANRKINPDGVKFKSHIDGSYHFFTPENVMDIQRNIGADIIMAFDECPPYPCEKNYARKSMDLTHEWLKRCINRFNATKPIYNHNQYLLPIVQGSVYSDLRKQSAEIIAGHDLPANAIGGLSVGEPHELMYEMCEDVCKILPIAKPRYLMGVGTPINIIENIALGVDMFDCVMPTRNARNGMLFTRNGNNKY

SEQ ID NO: 118879 - protein, 113 aa, Unknown
  Bacterial polypetide isolated from the Sargasso Sea
MSLKNFNFNVHHTQNYARVGIIETHRGNINTPAFMPVGTQATVKGVFLEDIKKTGSEIILSNTYHLMIRPGVERIESVGGLHEFMNCDLPILTDSGGFQVMSLSKLNKIDRDK

SEQ ID NO: 118880 - protein, 296 aa, Unknown
  Bacterial polypetide isolated from the Sargasso Sea
HLCLVGTSATVKGIMPKQILSTNSEIILCNTYHLMLKPGRNIIEKFGGINNFMNWKKPILSDSGGFQVMSLSPLAKVSDQGVNFKSHIDGKNIFLSPEECINLQVIFDVDIAMVLDECTPYPVDYQTAQNSMLRSMNWAKRCKQAWPSRPGKGLFGIVQGGIYKDLRIESLNRLKDIDFDGYAIGGLAVGEGQREMLRVLKYTSDLLPFEKPRYLMGVGKPDDIVKAVLEGIDMFDCVLPTRSGRTGQAFTRAGPINIRNACFSDDTSPLDESIPFSVSNNFSKAYVHHLFKSKEI

SEQ ID NO: 118881 - protein, 193 aa, Unknown
  Bacterial polypetide isolated from the Sargasso Sea
TFRYCKGSMFLDQRDHFLSALIEMGFDGYAVGGLSVGEPKNEMFKVMRHIAPKLPDDQPRYVMGVGKPEDLVEGVRRGIDMFDCVMPTRNARNSHLFIDTGILKLRNAANRTDEGPIDKHCDCYTCENYSRAYLHHLDKCGEILGATLNTIHNLRHYQQLMEGLRAAIENGKLDVFVADFYSKRGMEPSELRS

SEQ ID NO: 118882 - protein, 282 aa, Unknown
  Bacterial polypetide isolated from the Sargasso Sea
TPRFMPVGTLATVKGISIEQLGRTGAQMVLSNTYHLHLQPGEEIVAAAGGLHRFMGWDGPMLTDSGGFQVFSLGDLNKIDDRGVVFRNPRDGRTIDMTPEHATQIQMALGADVAMAFDQCPPYPATENDVIDACRRTHAWLARCVEAHTREDQALFGIVQGGCFPHLRRESARAVADFDLPGIAVGGVSVGEPVEEMHRIVRDVTPLLPTHKPRYLMGIGTLREMAIAVANGIDLFDCVLPTRLGRHGTALVNGERWNLRNARFRHDHTPLDPSCSCVACTG

SEQ ID NO: 118883 - protein, 203 aa, Unknown
  Bacterial polypetide isolated from the Sargasso Sea
EAHKSESALFGIVQGGMYEDLREESLTLTLACEFDGIAIGGLSVGEPKEEKTKVLKHLSNILPDDKPRYLMGVGKPEDIVEAVFYGVEMFDCVLPTRNARNGQLITSTGVINIRNAKYKNDDSPIDENSDSKVCKNYSKAYLHHLDKTNEMLGSMLASYHNIYYYHELMRQIRQSIDDNIFVNFAKDFYNSRNLPIPDYLEGL

SEQ ID NO: 118884 - protein, 208 aa, Unknown
  Bacterial polypetide isolated from the Sargasso Sea
MALKNFAFKVLNKDNFARCGIIETSRGLIHTPAFMPVGTQATVKACRIEDIKKTGTEIILSNTYHLMIRPGVERINNVGGLHEFMNCDLPILTDSGGFQVMSLSKLNKIDREKGAIFNSHVDGKKFYLSPEESIRIQLGLNSDIVMIMDECPKNTSDHNIIKKSMELSLYWAERSKKAFGNNPHKALFGIVQGGLFKDLRLKSLKELM

SEQ ID NO: 118885 - protein, 267 aa, Unknown
  Bacterial polypetide isolated from the Sargasso Sea
MTFFKLEKTDGKARAGVLKTQHSEIQTPVFMPVGTRGTVKSLSSEDLDELGPQVILGNTYHLYLRPGHELIENVGEGLHGFMSFDKSILTDSGGFQVFSLSDLNKITEDGVWFRSHLDGSKHFIGPEKSMEIQKALGSDIVMAFDDCPALPNSKDKIKEAIDRTLRWAKRCKEYELKPHQFLFGIVQGGLDLELRKFCLEELNKLDFPGMAIGGLSVGEKNEEMVQLLKDFTPLMPAHKPRYLMGVGTPVDILNAVATGIDMFDCVL

SEQ ID NO: 118886 - protein, 240 aa, Unknown
  Bacterial polypetide isolated from the Sargasso Sea
MALKKFSFSVIKQDGFARVGKITTHRGEIDTPVFMPVGTQATIKGAFIKDILNTGAQIILSNTYHLMIRPGVNRISSLGGLHQFMNCPLPILTDSGGFQVMSLSKLNKIDREIGAIFNSHIDGKKFILSPEESIKIQLGLNSDILMVMDECPKKTNNYDLIKKSMDLSMYWAERSKKKFGNNPHKALFGIVQGGLFNDLREKSLNSLKEIGFDGYAIGGLAVGESQKEMFDVLDGLKNIM

SEQ ID NO: 118887 - protein, 282 aa, Unknown
  Bacterial polypetide isolated from the Sargasso Sea
MGNTYHLHLRPGDSVIRKMGGLQKFMNWDKPILTDSGGFQIFSLAKLLKLNEDGVMIRSHIDGSKIKLTPEISIAIQQNLGSTIMMCLDECLKLPASRQEVERSTDLTAKWARRCKEARLNESNVFKEQALFGIIQGGNELDLREKSMNQIVEIGFDGYAVGGLSVGESKEKMYNVAHHITPKMPDKKPRYLMGVGDPADLLEGIEAGIDMFDCVMPTRNARNGMLFTSHGKISIKQSRFSQDPEPLDSECECPTCKNYSRAYLQHLFKSGEILGVRLNTYH

SEQ ID NO: 118888 - protein, 127 aa, Unknown
  Bacterial polypetide isolated from the Sargasso Sea
MLKTEFSFELITQDDNARLGRIETPRGEIDTPAFMPVGTQGTVKGVFLDDIEKTGTHIILGNTYHLLLRPGIELIKKFNGLHNFINWNKPILTDSGGYQIMSLSKFNKIDKKLGAIFKSHLDGKKII

SEQ ID NO: 118889 - protein, 133 aa, Unknown
  Bacterial polypetide isolated from the Sargasso Sea
MTGFGYELLETDSAARRGRLTTAHGTVETPVFMPVGTAATVKGMTSEAVTRTGAQTVLANTYHLMLRPGAETVARLGGLHAFMDWPGPILTDSGGFQVMSLTDLRKLDDTGVEFRSHIDGARFLLTPERSVEI

SEQ ID NO: 118890 - protein, 224 aa, Unknown
  Bacterial polypetide isolated from the Sargasso Sea
VLDVCPKLTNNRKTLNNTIDISTKWAKRCKIEFGNNKKKALFGIIQGGLYKDLRIESLKKLVNIGFDGYAIGGLAVGETQKEMFKTVKNITNYMPKNKPRYLMGVGTPSDILGAVKEGVDMFDCVMPTRSGRTGLAFTWEGRVNLKNSKYKNDKSPLDSKCNFRELNSYSKSYLNHLIKNNELLASMLISLHNINFYQQFMYEIRKSIKSRTFNKFYNRYINLF

SEQ ID NO: 118891 - protein, 228 aa, Unknown
  Bacterial polypetide isolated from the Sargasso Sea
MALKKFSFNVLKKNKYARLGVIKTHRGNIDTPAFMPVGTQATVKGSFIDDIIKTGSQIILSNTYHLMIRPGPDRIKKSGGLHKFMNCKLPILTDSGGYQIMSLSKLNKIDREKGAIFNSHIDGAKFVLSPEECIKIQKKLNSDIVMVLDECPKKSLNYNLISKSVDLSTYWAKRSKKAFGKNPHKALFGIVQGGLFNDLRLKSLNDLTQIGFDGYAVGGLAVGDTQIE

SEQ ID NO: 118892 - protein, 192 aa, Unknown
  Bacterial polypetide isolated from the Sargasso Sea
FAYNPHKALFGIVQGGLFKDLRLKSLQELIKIGFDGYALGGLAVGETQKEMFSVLDDIKDHLPVEKPHYLMGVGTPSDILGAVKRGIDMFDCVLPTRSGRTGLAFTWQGRINIKNNKYQNDNSPLDPDCENLNLNKYSKNYLNHLFNTNEILASMLLTLHNINFYQELMTLIRKNINGGTFDQFHNKYIDKL

SEQ ID NO: 118893 - protein, 308 aa, Unknown
  Bacterial polypetide isolated from the Sargasso Sea
YHLFLRPGTDIIKKFGGLHNYINWNKPILTDSGGFQIMSLSKLAKIDREKGAFFSSHIDGQKFLLSPEKSIQIQKDINSDILMVLDECPKLTNDKKIISNAIETSTNWAIRSKKEFADSPNKALFGIVQGGLFHDLRVESLEKLIEINFDGYALGGLAVGEKQEDMVNVIKRITKRMPKTKPRYLMGVGTPSDILAAVKYGIDMFDCVLPTRSGRNGLAFTWEGKVNLRNSKYKNDSSPLDEKCKLRSLNLYSKSYLNHLVNTNEILASMIISLHNVNFYQEFMKTIRNEIKNGHFDSFYKENFDKYI

SEQ ID NO: 118894 - protein, 273 aa, Unknown
  Bacterial polypetide isolated from the Sargasso Sea
MKFTLKNNSSKYSARTGVLETGHGSINTPVFMPVGTIGAVKTMDPNELKKIDFKIILGNTYHLYLRPGTEIVKKAGGLHKFISWDRPILTDSGGFQVFSLSRLNKISNNGVKFQSHLDGSRHMFTPESSMEIQRKLGSDIIMAFDDCPPGDSDHSTIKKSVERTTNWMVRCSDWLEKNPEYYDHEQVVFPIVQGATDSQLRKISAEQLIEHSSCGMAIGGLAVGEEKNAMMDTIEYCDTLLPKNQPRYLMGVGKQTDLIKSVQRGVDMFDCVM

SEQ ID NO: 118895 - protein, 239 aa, Unknown
  Bacterial polypetide isolated from the Sargasso Sea
ESIRIQKSLNSDIVMVMDECPKKTTDYAKIKKSMNLSMEWAQRSKNAFGLNTKKGLFGIIQGGLFDDLRNISLERLTDIGFDGYAIGGLAVGDTQDEMFKVLDGLKDNMPKNKPRYLMGVGTPSDILGAVKRGIDMFDCVLPTRSGRTGLAFTWNGKVQIRNSKYQNDNTPLDKTVTKFNLNKYSKNYLNHLFNTNEMLASMILTLNNINFYQELMYEIRKNIKNGTFNEFHNKYINLL

SEQ ID NO: 118896 - protein, 233 aa, Unknown
  Bacterial polypetide isolated from the Sargasso Sea
EEGVKFKSPLDGSEIFLAPEDSIQTQLTLNADIIMAFDECTAYPSTLKEAKESMDLTHRWASRCKEYFNKNKKEHLLFGIVQGGMHLELREESLNFISKQDFDGIALGGLSVGEPKEEKTKILKHLAPLLPEDKPHYVMGVGTPEELVEGVRYGIDMFDCVIPTRNARNGFIYTSTGIVKIRNSEHKKSTKPIDENCDCYTCKNFSRAYLHHLDKANEILASTLMSICSLHTF

SEQ ID NO: 118897 - protein, 305 aa, Unknown
  Bacterial polypetide isolated from the Sargasso Sea
MGAEIILGNTYHLHLRPGDSVIRKMGGLQKFMNWGKPILTDSGGFQIFSLAKLLNLNEEGVIIRSHIDGSKIKLTPEISIAIQQNLGSTIMMCLDECLKLPSSRQEVERSASLTAKWARRCKEARINESHVFKEQALFGIIQGGHELDLREQSMNQIVEIGFDGYAVGGLSVGEAKEEMYNVAHHITPKMPAEKPRYLMGVGDPPDLLEGIEAGIDMFDCVMPTRNARNGMLFTSHGKISIKQSRFKQDPESLDAECECPTCKNYSRAYLQHLYKSGEILGVRLNTYHNLFFFITLVKQARKAII

SEQ ID NO: 118898 - protein, 184 aa, Unknown
  Bacterial polypetide isolated from the Sargasso Sea
FIWIVQGGIFNDLRAKSIKELTNIGFDGYAVGGLAVGESQKEMFEVLDNLKVYMPKDKPRYLMGVGTPSDILGAVKRGIDMFDCVLPTRSGRTGLAFTWNGRIQIRNSKYQNDNDPLDINVNKFNLNKYSKNYLNHLFNTNEMLASMLLTLNNINFYQELMKAIRENIKNGTFSEFHDKYVNLL

SEQ ID NO: 118899 - protein, 209 aa, Unknown
  Bacterial polypetide isolated from the Sargasso Sea
MQSRYLLYWAKRCKIEFGKDKSKALFGITQGGLYKDLRKESIKRLIDIDFDGYAVGGLAVGETQLQMFSILNETISFFPKDKPRYLMGAGTPSDILGAVNSGIDMFDCVLPTRSGRTGLAFTWEGKLNIKNSKYQNDKSPLDPNCQIRGLNQYSKSYLNHLVKSNELMASMIISLHNVYFYQQFMREIRENIKSGTFASFYKKYIDYFN

SEQ ID NO: 118900 - protein, 121 aa, Unknown
  Bacterial polypetide isolated from the Sargasso Sea
MVESVRRGIDMFDCVMPTRNARNGHLFVTEGVVKIRNAKHRNDTSPLDENCDCYTCKNYSRSYLHHLDKCNEILGARLNTIHNLRYYQRVMQGLRDAIDAGTLDEFVQEFYEQKGLPVPAL

SEQ ID NO: 118901 - protein, 60 aa, Unknown
  Bacterial polypetide isolated from the Sargasso Sea
MFELIQSDGAARRGRLNLGHGVVETPVFMPCGTYGTVKGMTPLDLSGIGTQILLGNTFHL

SEQ ID NO: 118902 - protein, 104 aa, Unknown
  Bacterial polypetide isolated from the Sargasso Sea
MTLKKFNFNVLKKEKFARLGKIITSRGTIDTPVFMPVGTQATVKGTFIKDVIEAGSQIVLSNTYHLMIRPGADRVKKAGGLHNFMNCKIPILTDSGGYQIMSLS

SEQ ID NO: 118903 - protein, 292 aa, Unknown
  Bacterial polypetide isolated from the Sargasso Sea
GGLHQFMNCKLPILTDSGGFQVMSLSKLNKIDREKGAIFQSHIDGKKFILGPEESIKIQKDLNSDIVMVMDECPKKTNDYDLIKKSMELSTYWAERSKKEFGSNKEKGLFGIVQGGLFDDLRNKSLENLIEIGFDGYAVGGLAVGESQKEMFDTLDFLKDSLPKDKPRYLMGVGTPSDILGAVKRGIDMFDCVMPTRSGRTGLAFTWNGRIQIRNSKYQNDDSPLDPNTSNFSLNKYSKNYLNHLFNTNEMLASMLLTINNLNFYQELMKAIRNNIKNGTFDHFFNKYFGKL

SEQ ID NO: 118904 - protein, 278 aa, Unknown
  Bacterial polypetide isolated from the Sargasso Sea
DSGGFQIMSLSKLNKIDKQIGAIFQSHIDGKKIILSPEKSIKIQKSINSDILMVLDECPSLTDNRDILINAINTSTHWAKRCKIEFGNNKKKGLFGIIQGGLYNDLRQESLEKLEEIGFDGYAIGGLAVGETQKEMFETVKNTTNKMPENKPRYLMGVGTPSDILGAVGEGIDMFDCVMPTRSGRTGLAFTWQGKINLKNSKYKNDYSPLDSETNIRDLKSYSKSYLNHLIKTNELLASMIISLHNINFYQQFMSEIRRSIKSRTFSKFYHKYIKLFN

SEQ ID NO: 118905 - protein, 293 aa, Unknown
  Bacterial polypetide isolated from the Sargasso Sea
PTFMPVGTQATIKGAFIDDIIKTGSEIILCNTYHLMLRPGADRVEFAGGLHDFMNCKLPILTDSGGFQVMSLSKFNKIDREKGAIFQSHIDGKKFILSPEESIKLQKKLNSDIVMVMDECPKNSNDYDKIKNSMELSMEWARRSKDEFGLNAHKGLFGIVQGGLFDDLRIDSLNKLTEINFDGYALGGLAVGESQFEMFKVLDNIQKFLPKDKPRYLMGVGTPSDILGAVKRGIDMFDCVLPTRSGRTGLAFTWNGRVQIRNSPYKYDNSPLDENVSKFSLNKYSKNYLNHLY

SEQ ID NO: 118906 - protein, 208 aa, Unknown
  Bacterial polypetide isolated from the Sargasso Sea
MDKFKFKVLKKDGYARKGLIETKRGNIKTPAFMPIATQGAVKFTPIELIEQIGYELTLSNTYHLLLRPGLERLSSVDGISEFMGWNKPVLTDSGGFQVMSLSKLRKISEEGVKFQSHIDGASHFLTPENVIDYQNTIKSDIQMVLDECIQYPESYENVKKSMELSLRWAERSRKHYNKNKSKIYGAQFGIIQGGVFEDLRETSISETS

SEQ ID NO: 118907 - protein, 262 aa, Unknown
  Bacterial polypetide isolated from the Sargasso Sea
IDRERGAIFNSHIDGKQFILSPEESIRIQKKLNSDIVMVMDECPKKTTDKKTIEKSLDLSTEWALRSKNAFGKNPHKGLFGIVQGGLFDDLRKKSLEDLINIGFDGYALGGLAVGDTQSEMFKVLDGIKGYLPEGKPRYLMGVGTPSDILGAVKRGIDMFDCVLPSRSGRTGLAFTWNGPINIKNAKYQNDTKPIDEKCEKFNLNKYSKNYLNHLFNTNEILASMLLTLHNINFYHELMDKIRININNGTFDQFFDEYIAKL

SEQ ID NO: 118908 - protein, 215 aa, Unknown
  Bacterial polypetide isolated from the Sargasso Sea
MNLTHRWLKRCISEFENTDKNRSREQFLFPIVQGSIYGDLRTESAEFITSMDLPGNAIGGLSVGEPHNLMYEMCEIVCDILPKNKPRYLMGVGTPTNILENICLGVDMFDCVMPTRNARNGMLFTSEGKINIKNEKWKKDFSQIDPNGSTFVDSKYSKAYLRHLFSINENLGKQIATIHNLGFYSWIIKKTKEKILDGNFESWKKSMVKKLDNKL

SEQ ID NO: 118909 - protein, 294 aa, Unknown
  Bacterial polypetide isolated from the Sargasso Sea
INQTNSQIILCNTYHLFLRPGTERIERVGGLHNFMNFKKPILTDSGGFQVMSLSKNTKITEEGATFNSHIDGKKIFISPEISIEIQKKLNSDIVMVFDECPEYTKDKKIIKESMDLSTRWAKRSKTAFGSNPNKMLFGIVQGGIFSDLRKESLNYLEEIGFDGYALGGLAVGEPQIEMFDTVEQISSFMDKNKPRYLMGTGTPGDLLGAVKRGMDMFDCVLPTRTGRNGLAFTWNGKFNLRNAKYQSDDNPLDVNVDCPASKLYSKNYLNHLINCNEILASTLITWHNVAFLPR

SEQ ID NO: 118910 - protein, 275 aa, Unknown
  Bacterial polypetide isolated from the Sargasso Sea
GGFQVMSLSKLNKIDREKGAIFSSHIDGKKYILSPEESIKIQKGLNSDIIMVMDECPKNSSDYKKIEKSMELSMYWAKRSKKAFGTNLNKSLFGIVQGGKFKDLRTKSINQLLKIGFDGYAIGGLAVGESQNEMFEVLDNLVDDMPIDKPRYLMGVGTPSDILGAVKRGIDMFDCVLPTRSGRTGLAFTWNGRINIRNSKYKYDNKPIDQNTKVFDLYKYSKNYINHLFNTNEMLGSMILTLHNVNFYQELMFEIRKNIERGTYSKFHDKYINVL

SEQ ID NO: 118911 - protein, 276 aa, Unknown
  Bacterial polypetide isolated from the Sargasso Sea
MGSNIYKLIAKDGLARRGEVTTEHGKFQTPAFMPVGTYGAVKSISPNILENLEAEIILSNTYHLMERPGVETIKLHGGLHKFIGWEGPILTDSGGYQVFSLSKKRKILEEGVEFFSPLNGDKKYLTPESCMQLQLDYGVDIAMVLDECTPYPVIEDIAKKSMQLSLRWAKRCRSSFKSDSASLFGIIQGGVFNNLREESLAELIEINFEGYAIGGLSVGEPKEEMDKVVDHIAPKMPEDKPRYLMGVGTPLDIVKAVQLGVDMFDCVIPTRHARNG

SEQ ID NO: 118912 - protein, 153 aa, Unknown
  Bacterial polypetide isolated from the Sargasso Sea
EDKTAMLDVIEFMDDYLPKDQPRYLMGVGRPTDLIKAIQRGIDMFDCVIPTRNARNGQLFTSDGIVNIGNGEYKKSFEQIDKKCNCYTCTNFSKAYLRHLFNIGEVLGLRLATIHNLHYYNNLMLTVRDKIQSNIFHDWSKSYLKEMEYHDGM

SEQ ID NO: 118913 - protein, 204 aa, Unknown
  Bacterial polypetide isolated from the Sargasso Sea
LSLYWAERSKKNFWFNPHKALFGIIQGGLFKDLRIKSLNELTKIGFDGYAVGGLAVGESQREMFTVLDYLKDELPKEKPHYLMGVGTPSDILGAVKRGIDMFDCVLPTRSGRTGLAFTWNGRINIKNNKYQYDDTPLDKNTKNLELNKYSKNYLNHLFNTNEILGSMLLTLHNINFYQELMSSIRESINNGTFDEFHDKYINKL

SEQ ID NO: 118914 - protein, 111 aa, Unknown
  Bacterial polypetide isolated from the Sargasso Sea
MLTFTIDSTDQRARTGQIMLHGKTPIRTPAFMPVGTCGSVKSLSTEEVRNTGADILLGNTYHLACRPGEAIIEAHGGLGAFMHWPYPILTDSGGFQVFRKSALTKQSEEGV

SEQ ID NO: 118915 - protein, 263 aa, Unknown
  Bacterial polypetide isolated from the Sargasso Sea
KRMGGLHEFMNCELPILTDSGGFQVMSLSKLNKIDREKGAIFNSHVDGKKFYLSPEESIKIQLNLNSDIVMIMDECPKKTDNYDLIKDSMNLSLYWAKRSKEAFGKNSHKALFGIVQGGLFKDLRKTSLNELINIDFDGYAIGGLAVGETQKEMFTVLDYIKDELPQEKPHYLMGVGTPSDILGAVKRGMDMFDCVLPTRSGRTGLAFTWQGRVNIKNNKYQNDDTPLDENCKNLNLNKYSKNYLNHLFNTNEILGSMLLTLS

SEQ ID NO: 118916 - protein, 194 aa, Unknown
  Bacterial polypetide isolated from the Sargasso Sea
MKYKVNNTSENAREAEIHTERGVIQTPAFMPVGTNGTVKGLTIDDLNETHSQIILGNTFHLMLRPGDKLIKELGGLHKFINWEKPILTDSGGFQVWSLGELNKISEEGVKFSSPYDGKKIFMTPEDSIMIQENLGSDIVMAFDECTDYPSTYDEAKQSMELSMRWAKRCKDAHKSKSALFGIVQGGMYTDLREE

SEQ ID NO: 118917 - protein, 204 aa, Unknown
  Bacterial polypetide isolated from the Sargasso Sea
MKKDHHSFEFMTLKKFSFNVIKSNGHARLGKIRTHRGNIDTPVFMPVGTQATIKGAFMKDIVETGSQVILCNTYHLMIRPGVNRLKKSKGLHKFMNCNLPILTDSGGYQIMSLSKLNKIDPIKGAIFNSHIDGTKYYLSPEESIKIQKKLNSDIVMVLDECPKKTLDYDVISKSVDLSTEWAKRSKKAFGNIKHKALFGIVQGG

SEQ ID NO: 118918 - protein, 185 aa, Unknown
  Bacterial polypetide isolated from the Sargasso Sea
LGIVQGSVFEDLRKESVKTLEAINFDGYAVGGLAVGESQAQMFEVLEFTSPHLPDDKPHYLMGVGKPDDILGSVARGIDMFDCVLPTRSGRNGQAFTRHGPINIRNAKYKNLDDPIDKNSDNPVCKNYSAGYIHHLFNAKEMLGGMLLSLHNIYFYQSLMADIRKSIEEDRFMSFSKEFLESYKS

SEQ ID NO: 118919 - protein, 177 aa, Unknown
  Bacterial polypetide isolated from the Sargasso Sea
FEDLRKESVKALEAIHFDGYAVGGLAVGEGQAQMFEVLEYTSPHLPDDKPHYLMGVGKPDDILGSVARGIDMFDCVLPTRSGRNGQAFTRHGPINIRNAKYKNLDDPIDKNSDNPVCKNYSAGYIHHLFNANEMLGGMLLSLHNIYFYQSLMADIRKSIEEDRFMSFSKEFLESYKS

SEQ ID NO: 118920 - protein, 280 aa, Unknown
  Bacterial polypetide isolated from the Sargasso Sea
VGTAATVKALTVDQINQTNSQIILCNTYHLYLRPGAERIERVGGLHNFMNFKKPILTDSGGFQVMSLSKNTKITEDGATFNSHIDGKKIFISPEISIEIQKKLNSDIVMVFDECPEYTKDKKRIKESMDLSTRWAKRSKTAFGSNPNKMLFGIVQGGIFDDLRKESLNYLKEICFDGYALGGLAVGEPQIEMFHTVEQISSFMDKNKPRYLMGTGTPGDLLGAVKRGIDMFDCVLPTRTGRNGLAFTWNGKINLRNAKYQSDDTPLDPDVNCPASNLYSK

SEQ ID NO: 118921 - protein, 308 aa, Unknown
  Bacterial polypetide isolated from the Sargasso Sea
PVFMPVGTVGAVKTFSPEELKGINSQIILGNTYHLYLRPGTPTINKAGGLHSFLSWDRPILTDSGGFQVFSLAKLNKISDNGVEFQSHLDGSKHMFTPEISMEIQRDLGSDIIMSFDDCPPGDADHETIKNAVNRTTEWMKRCHKWLSDNPERYGHEQVVFPIIQGGTDHKLRRISIEQLSPYSSAGMAIGGLAVGEEKSAMLDTVEYCDEILPKDQPRYLMGVGRPSDIVAAVRRGVDMFDCVMPTRNGRNGHMFTSKGVINIRNEKYKDDMSPLDNESSHPWGQKFSRSYVRHLFNINEVLGLRIS

SEQ ID NO: 118922 - protein, 272 aa, Unknown
  Bacterial polypetide isolated from the Sargasso Sea
INTPAFMPVGTAGTVKGVFTRDLKETGSEIILGNTYHLMLRPGDKNIAEVGGLHNFMNWNMPILTDSGGYQVYSLSKLRKISDEGVTFKSHLDGEEIFLSPERSMEIQKNLNSDIVMAFDECTPYPSTHSEASKSMKLSMDWALRCKKSFEGRNLLFGIVQGSIYEDLRGDSVKALTDIGFDGYAVGGLAVGETQNQMFDVLNFTCPMLPAAQPRYLMGVGKPDDIIGAVSRGIDMFDCVLPTRSGRNGQAFTSTGPINIRNSKYKNSAYVF

SEQ ID NO: 118923 - protein, 307 aa, Unknown
  Bacterial polypetide isolated from the Sargasso Sea
YHLMIRPGEERVALQGGLHEFMNCPLPILTDSGGYQVMSLSNLNKIDREKGAIFNSHVDGKLYTLSPEESIRIQKKLNSDIVMVMDECPKKTTDRKIIEDSLNLSTEWALRSKNSFGKNPHKGLFGIVQGGLFDDLRKKSLNDLIKIGFDGYALGGLAVGDTQSEMFKVLDGIKNHLPEDKPRYLMGVGTPSDILGAVKRGIDMFDCVLPSRSGRTGLAFTWNGPINIKNAKYQNDTKPIDEKCEKFNLNKYSKNYLNHLFNTNEILASMLLTLHNINFYHELMNEIRININNGTFDQFFDEYIAKL

SEQ ID NO: 118924 - protein, 249 aa, Unknown
  Bacterial polypetide isolated from the Sargasso Sea
MKYKLLKKDGYARRGFLELQHGNIQTPVFMPVGTNATVKGLTVEDLEETGSQIILSNTYHLMLRPGDEIIKQLGGLHNFCNWQKPILTDSGGFQVWSLGDLAEVSEKGVSFKSPYDGKNIFMSPEDSIQIQENLGSDIVMVFDECTNYPSPKKEAQKSMELSARWAARSKDAHKSQSALFGIVQGGMYEDLREESLNLTLACEFDGIAIGGLSVGEPKEEKTKVLKHLASILPDDKPRYLMGVGKPEDI

SEQ ID NO: 118925 - protein, 175 aa, Unknown
  Bacterial polypetide isolated from the Sargasso Sea
MKFSIKKKYKNARSGYLELKNGNVQTPTFMTIGTYGSVKSLSSEDLLRCGCEILLCNAYHLMLRPGLDVITKGGHLHKFMNWDKPILTDSGGYQVFSLSKNVKVNKDAAVFKSPYNGDEIIMTPEKSIKTQIALGSDIMMIFDECTPYPVDKDKANESMRLSLDWAELSKKANDS

SEQ ID NO: 118926 - protein, 193 aa, Unknown
  Bacterial polypetide isolated from the Sargasso Sea
HLLFGIVQGGMHEELRKQSLAFMNNLQLDGIALGGLSVGEPKEEKTKILKYLAPLLPANKAHYVMGVGTPEELVEGVRYGIDMFDCVMPTRNARNGFLYTSTGILKIRNAEHKNSTKPIDENCDSYTNKNFSRAYLHHLDKCNEILASTLMSIHNLAYFNQLMTNIRKSLEENKFEEFLDSFYDMRSLKKPKL

SEQ ID NO: 118927 - protein, 227 aa, Unknown
  Bacterial polypetide isolated from the Sargasso Sea
MEETKKNFSFSAKHQNKYYRVGLIQTHRGEINTPAFMPVGTQATVKGVFIDDIIKTGSEIILSNTYHLMIRPGTERIEAVGGLHKFMNCKLPILTDSGGYQVMSLSKFNKIDKDKGAIFQSHIDGKTFILSPEESIKIQKKLNSDIVMVMDECPKNTNDYNKIKNSMKLSLDWAIRSKNEFGNNPHKALFGIVQGGLFKDLRNDSLNKLIDIEFDGYAIGGLAVGET

SEQ ID NO: 118928 - protein, 207 aa, Unknown
  Bacterial polypetide isolated from the Sargasso Sea
YGSILCIWAERSKKAFGNNPHKALFGIIQGGLFNDLRLKSLDELTKIGFDGYAVGGLAVGETQNEMFAVLDGIKEYLPDEKPHYLMGVGTPTDILGAVKRGIDMFDCVLPTRSGRTGLAFTWDGRVNIKNNKYQYDNSPLDPNCENLNLNKYSKNYLNHLFNTNEILASMLLTLHNINFYQELMSAIRKNIMNNTFDEFHDKYIDKL

SEQ ID NO: 118929 - protein, 302 aa, Unknown
  Bacterial polypetide isolated from the Sargasso Sea
TLGTVKGITSEQLKRTGAEMILANTFHLHLQPGEKIVQDAGGLHKFMCWNKPILTDSGGFQVFSLAKLNKIDDEGVSFQSPRDGKHIFLTPEKATEIQMALGSDVAMAFDQCPPYPSSESDVEEACKRTHHWLERCLNAHTKDDQAVFGIVQGGCFPHLRELSAKIVSGFDLPGIAIGGVSVGEPINQMHKIVRETCPLLPDDRPRYLMGIGTLREMSIAVANGVDLFDCVIPTRLGRHGSALVNGETWNLRNSRFKDDYRPLDSSCNCEACTGYTRAYIHHLIRNKELLGLTLLSLHNLTH

SEQ ID NO: 118930 - protein, 171 aa, Unknown
  Bacterial polypetide isolated from the Sargasso Sea
MTKFSWQIDSLSKKSFARTGKIKTPNGDIDTPAFIFCGTKAALKSISTTEAKSNNTQIILSNTYHLMLQPGSKIIAKHGGLHNFMNWDGPILTDSGGFQIFSLGYGSVADEIKGKGFNSKRKKTLLNINEEGTLFKSYINGNNVYLTPEKSIEIQRDLGADLILVFDECTP

SEQ ID NO: 118931 - protein, 266 aa, Unknown
  Bacterial polypetide isolated from the Sargasso Sea
ISDKGVEFKNPRDGSHVFLSPEKVIQIQMDLGSDVAMAFDHCPPHTANENDIEDSLQRTHSWLKKCVETHQKSNQALFGIVQGGKYPRLREYSAKYTSSFDLPGIAVGGVSVGEAVEEIHGVINYVPKFLPINKPRYLMGIGSLKEISLAVANGFDIFDCVLPTRLGRHGTAFFNDERLNLRNARFKNDFSPIDKTCECETCKSYSRAYLHHLIRNDEILGLTLISLHNIAHLIRFTNAISTAIRDNCFTNDFRSLGKPSSYCSPI

SEQ ID NO: 118932 - protein, 273 aa, Unknown
  Bacterial polypetide isolated from the Sargasso Sea
QVYSLSNLRKLSEEGVEFSSHIDGTKVFVSPEKSIEIQTDLNSDIVMAFDECTPYPAEYDEAKKSMGLSMRWASRCKKYFKDHNTNKLFGIVQGSTYEDLRHQSASLLSDIGFDGYAVGGLAVGETQTQMFDVLDYTVSKLPIEKPHYLMGVGKPDDIIGSVARGIDMFDCVLPTRNGRNGQAFTKSGPINIRNAKYKSLDEPIDPESNNPICRDYSAGYIHHLFNAKEMLGGMLLSLHNIYFYQEMMSNIRTSIENNKFEKFRDNFLSKYLD

SEQ ID NO: 118933 - protein, 135 aa, Unknown
  Bacterial polypetide isolated from the Sargasso Sea
MALKKFSFNVEEKDKQARLGLIKTHRGNISTPAFMPVGTQATIKGTFIDDIIKTGSEIILSNTYHLMIRPGVDRIESSGGLHHFMNCKLPILTDSGGFQVMSLSKLNKIDKEKGAIFNSHIDGKKFILSPEESIR

SEQ ID NO: 118934 - protein, 191 aa, Unknown
  Bacterial polypetide isolated from the Sargasso Sea
MENPHKGLFGIVQGGLFDDLRKKSLNDLIKIGFDGYALGGLAVGDTQSEMFKVLDGIKNHLPEDKPRYLMGVGTPSDILGAVKRGVDMFDCVLPSRSGRTGLAFTWNGPINIKNAKYQNDTKPIDEKCEKFNLNKYSKNYLNHLFNTNEILASMLLTLHNINFYHELMNEIRININNGTFDQFFDEYIAKL

SEQ ID NO: 118935 - protein, 154 aa, Unknown
  Bacterial polypetide isolated from the Sargasso Sea
MPQNTPEFDFTLKATDGRARRGTLTTAWGRVETPVFMPVGTAATVKGMLPESVASTGASIILANTYHLMLRPGAERVARLGGVRKMMGWNGPLLTDSGGFQVMSLGPLRKIDEDGVTFQSHLDGSHHRLTPERSTEIQRLLDATITMGVDECTP

SEQ ID NO: 118936 - protein, 215 aa, Unknown
  Bacterial polypetide isolated from the Sargasso Sea
MPTNNFSFEIISQNEKARIGKIKTPRGNIDTPCFMPVGTLGTIKGVFLDDIINTGTQIILGNTYHLMIRPGIDVIEKFKGIHNFINWQQPILTDSGGFQIMSLSKMRKIDRNIGAIFSSHVDGKKIILSPEKCIQIQKSINSDIMMVLDECPVLTSDKKKLSSAIETSTTWARRCKVEFGNDKSKALFGIIQGGLFKDLRIESLEKLTNLDFDGY

SEQ ID NO: 118937 - protein, 298 aa, Unknown
  Bacterial polypetide isolated from the Sargasso Sea
LTPEHLKDIGFEIILGNAFHLYLRPGLDVIKEFGGLHDFMAWNRSILTDSGGFQVWSLQELRKITEEGVKFKSPLDGSEIFLAPEDSIQTQLTLNADIIMAFDECTAYPSTLKEAKESMDLTHRWASRCKEYFNKNKKEHLLFGIVQGGMHLELREESLNFISKQDFDGIALGGLSVGEPKEEKTKILKHLAPLLPEDKPHYVMGVGTPEELVEGVRYGIDMFDCVIPTRNARNGFIYTSTDIVKIRNSEHKKSTKPIDENCDCYTCKNFSRAYLHHLDKANEILASTLMSICSLHTF

SEQ ID NO: 118938 - protein, 215 aa, Unknown
  Bacterial polypetide isolated from the Sargasso Sea
MIFNLLNQDGFARRAELKFKNGSVQTPAFMPVGTNGTVKALEYENLLSTNSEIILGNTFHLMLRPGDELIKEFGGLHKFIGWEKPILTDSGGFQVWSLGKLAKISEEGVNFKSPYDGKEVFISPERSIDIQENLGSNIVMVFDDCTGYPAEHSIAKSSMELSMRWAKRCKAHHKGNSSLFGIIQGGMHNDLRLQSLESLMNMNFSGLAVGGLSVG

SEQ ID NO: 118939 - protein, 297 aa, Unknown
  Bacterial polypetide isolated from the Sargasso Sea
RIKRVGGLHNFMNCKLPILTDSGGFQIMSLSKLVKINEKEGAIFNSHIDGKKFVLSPEESIRIQKDINSDIIMVLDECPKLSKDKKKIHKSLILSHNWAKRSKNEFGDNPDKALFGIIQGGTYSDLRLESLEGLKRIEFDGYALGGLAVGETQKQMLNVLDDIVPFMPKNKPRYLMGVGTPTDILEAVKRGIDMFDCVMPTRSGRTGLAFTWKGRLNLRNSKYKKDDSSINKDTNVRNINLYSKSYLNHLINTNEILASMIITINNVVFYQQLMQEIRKAIKSNTFDVFYNKYINVI

SEQ ID NO: 118940 - protein, 266 aa, Unknown
  Bacterial polypetide isolated from the Sargasso Sea
NTYHLFLRPGLDILKNIGGLHEFMNWHKPILTDSGGFQIMSLSKFRKIDKEKGAIFSSHLDGKKIILSPEKSIQIQKIINSDILMVLDECPKLTKDKKIIANAINISTEWAKRSKIEFNQANGKSLFGIVQGGLFDDLRIESLEKLLEINFDGYALGGLAVGEKQDAMFKVLDTITKKMPNNKPRYLMGVGTPSDILGAVKSGIDMFDCVMPTRSGRTGLAFTWEGKINLRNAKYKKDKTPLDKFTKIRDLNKYSKSYLNHLTNTN

SEQ ID NO: 118941 - protein, 131 aa, Unknown
  Bacterial polypetide isolated from the Sargasso Sea
RYLMGVGEPRDLLEGVEAGVDMFDCVLPTRNARNGSLFTSRGKVSIKQARYWEDPEPLDPDCHCETCQHYSRAYLRHLYLSGEILGMRLNTLHNLHFFLNLMRNAREAILENRFSKFKNDFLEQYLQEGSM

SEQ ID NO: 118942 - protein, 244 aa, Unknown
  Bacterial polypetide isolated from the Sargasso Sea
MLKENFSFKVLKEDGSSRLCKINTHRGVIDTPAFMPVGTLGTIKSAFIDDVILAGSQIILSNTYHLMIRPGVTRIKRVGGLHQFMNCNIPILTDSGGFQIMSLSKLVKISKKDGAIFKSHIDGKKIALSPEQSIKIQKDLNSDIVMVLDECPKLTNDKKIISNSLDISQNWAERSKIEFGINPKKALFGIVQGGIYKDLRIKSLEGLEKIGFDGYALGGLAVGETQKQMFKVLKDIMPYSQKIN

SEQ ID NO: 118943 - protein, 175 aa, Unknown
  Bacterial polypetide isolated from the Sargasso Sea
MKFKSKNTSDFARVSEIEFSRGVINTPAFMPVGTNGTVKGLTSQDLNETSTEIILGNTFHLMLRPGDELVRDMGGLHKFINWDKPILTDSGGFQVWSLGDLAEISEEGVKFSSPYDGKKIFMRPEDSIKIQENLGSDITMVFDECTNYPSSYEKARKSMELSMRWAKRCKGSPYI

SEQ ID NO: 118944 - protein, 365 aa, Unknown
  Bacterial polypetide isolated from the Sargasso Sea
MKFDIKKKLGKARLGTLSLKHGVVQTPAFMTVGTYGSVKSLTNQDLHACNTEIILCNAYHLMIRPERNLIEKAGGLHKFMNWSKPILTDSGGYQVFSLSSQTKVSKKGVEFKSPLNGNKLFMSPEKSIETQLYLGSDIMMIFDECTPYPSSKIETEKSMELSLYWAEMSHKANNSKMPLFGIIQGGMYPDLREISLNELIKYDFEGYALGGLSVGEPNHLRKEIIEGIGYKLPEEKPRYLMGVGKPLDIIHAVKNGVDMFDCVIPTRNARNGQLFTNKGVLNIRNTKYEDDLRPIDESCKCFACQNYTRAYIRHLDKCNDILAARLMSIHNVYFYQELMGQIRLSIENDNFEDLEKKFETNYLNV

SEQ ID NO: 118945 - protein, 370 aa, Unknown
  Bacterial polypetide isolated from the Sargasso Sea
MSLKKFYFNVSKKYEFARTGLIETHRGNIQTPAFMPVGTQGTVKATFIDDVIKTGSEIILSNTYHLMLRPGVDRIISAGGLHKFMNCKLPILTDSGGFQVMSLSKLNKIDREKGAIFKSHIDGKEFILSPEESIRIQKGLDSDIVMVMDECPKKNDDKNIINESMDLSMYWAKRSKIAFGNNPQKGLFGIVQGGLFDDLRKESLDRLVKIDFDGYAIGGLAVGESQKEMFSVLDSLKKYLPEDKPRYLMGVGTPSDIIGAVKRGIDMFDCVLPTRSGRTGLAFTWNGRMNIRNSKYQHDNTPIDKNVSIFGLNKFSKNYINHLFKTNEILGSMLLTLHNINFYQELMKEIRININNGTFDKFHDKYIGKI

SEQ ID NO: 118946 - protein, 174 aa, Unknown
  Bacterial polypetide isolated from the Sargasso Sea
SAKYTTSFDLPGIAVGGVSVGEAVEEIHSVINYVPKFLPIDKPRYLMGIGSLREISLAVANGFDIFDCVLPTRLGRHGTAFFNDERLNLRNARFKNDFSPIDKTCKCETCKSYSRAYLHHLIRNDEILGLTLISLHNIAHLIRFTNAISAAIKDNCFTNDFAPWKTSSIAHHTW

SEQ ID NO: 118947 - protein, 321 aa, Unknown
  Bacterial polypetide isolated from the Sargasso Sea
MVDIKKNFSFSVKHQSKNYRVGLIETHRGDINTPAFMPVGTQATVKGVFIDDIIKTGSEIILSNTYHLMIRPGTERIEAVGGLHKFMNCKLPILTDSGGYQVMSLSKFNKIDRDKGAIFQSHIDGKTFILSPEESIKIQKKLNSDIVMVMDECPKNTNDYNKIEKSMNLSTEWAIRSKEEFGSNPHKALFGIVQGGLFKDLRNESLDRLIDIEFDGYAIGGLAVGETQKEMFDVLDGIKDNLPIDKPRYLMGVGTPSDILGAVKRGIDMFDCVLPTRSGRTGLAFTWNGRIQIRNSENKLDNTPLDSSVTKFDLNKYSKNY

SEQ ID NO: 118948 - protein, 115 aa, Unknown
  Bacterial polypetide isolated from the Sargasso Sea
MKFELDTTDGRARRGRLIFERGTVETPAFMPVGTYGTVKGMTPEEVRATGADILLGNTFHLWLRPGEEIMRKHGDLHDFMNWQRPILTDSGGFQVFSLGDIRKITEEGVHFRSPI

SEQ ID NO: 118949 - protein, 184 aa, Unknown
  Bacterial polypetide isolated from the Sargasso Sea
MFGIVQGGLFDDLREKSLNELLKINFDGYAVGGLAVGETQKEMFKVLNNLKKIMPEEKPRYLMGVGTPSDILGAVKRGIDMFDCVLPTRSGRTGLAFTWDGKINIRNSKYQKNNTPLDSNCTNFDLNKYSKNYLNHLFNTNEILASMILTLHNINFYQELMKSIRHHIKNGTFDHFHDKYIGRL

SEQ ID NO: 118950 - protein, 250 aa, Unknown
  Bacterial polypetide isolated from the Sargasso Sea
IDGKTFILSPEESIKIQKKLNSDIVMVMDECPKNTNDYNKIKISMELSAEWAKRSKVEFGKNPHKALFGIVQGGLFNDLRNESLNKLIEIGFDGYAIGGLAVGETQREMFDVLDGIKDNLPIDKPRYLMGVGTPSDILGAVKRGIDMFDCVLPTRSGRTGLAFTWNGRVQIRNSENKLDNTPLDSNVSKFDLNKYSKNYLNHLHNTNEMLSSMILTLNNINFYQELMYEIRKNIKMGTFDQFHDKYINIL

SEQ ID NO: 118951 - protein, 229 aa, Unknown
  Bacterial polypetide isolated from the Sargasso Sea
MLHRCPHTQARTGRFHTPHGVVDTPRFMPVGTAATVKGISTEQLRSTDAQMVLSNTFHLHLQPGESIVAAAGGLHRFMGWSGPMLTDSGGFQVFSLASLNAIKERGVTFQSPRDGSIVELTPERSMAIQEQLGADVAMAFDQCPPYPASHEDVSEACGRTHRWLERCVSAHQRPDQALFGIVQGGVFKDLRQESARVIASFDLPGCAIGGVSVGEPAAAMHEVVRWCTP

SEQ ID NO: 118952 - protein, 240 aa, Unknown
  Bacterial polypetide isolated from the Sargasso Sea
IQMALGADVAMAFDQCPPYPATENDVVDACRRTHSWLERCVNAHTREDQALFGIVQGGCFPHLRRESARAVSAFELPGIAVGGVSVGEPVEEMHRIVRDVTPLLPVDRPRYLMGIGTLREMALAVAHGIDLFDCVLPTRLGRHGTALVGGERWNLRNARFRHDHTPLDPSCRCIACTGHTRAYLHHLIRSDELLGLTLLSIHNITQLIRFTNAMTAAIQDGCFSEDFAPWKPDSPALHTW

SEQ ID NO: 118953 - protein, 281 aa, Unknown
  Bacterial polypetide isolated from the Sargasso Sea
MKFSIGFNDSSCSARSGVIHTEHGEIETPIFMPVGTLGAVKTMSPEELKSIGAQIILGNTYHLYLRPGTEIVSGAGGLHAFSNWEKPLLTDSGGFQVFSLAKLNKVTDEGVEFQSHLDGSKHLLTPEFSMKIQRELGADIIMAFDECPASDADKQTIVDAVNRTTAWIKRCKVWLNNNSEMYGHIQTLFPIVQGGIDRSLRKKSIEELVSYSECGMAIGGLAVGEEKNAMLDTIEYCDEELPKNQPRYLMGVGKPSDLLHGIRRGVDMFDCVIPSRNGRNG

SEQ ID NO: 118954 - protein, 171 aa, Unknown
  Bacterial polypetide isolated from the Sargasso Sea
MKKFEFKVLKKNKFARRGLIETHRGKIETPVFMPVGTQATVKACTIDDIKKTGSQIILSNTYHLMIRPGVKRIEDAGGLHKFMNCDLPILTDSGGFQVMSLSKLNKIDKEKGAIFNSHIDGKKFYLSPEESIKIQLGLNSDIVMVMDECPKKTNDYQTIDKSMNLSLYWAE

SEQ ID NO: 118955 - protein, 236 aa, Unknown
  Bacterial polypetide isolated from the Sargasso Sea
MALKRFAFNVLNKDKFARCGLIETHRGNINTPAFMPVGTQATVKACTIDDIKKTGSEIILSNTYHLMIRPGVDRVQNAGGLHKFMNCDLPILTDSGGFQVMSLSKLNKIDREKGAIFNSHVDGKKFYLSPEESIRIQLGLNSDIVMIMDECPKKTNDYELIKKSMDLSLYWAERSKKAFGNNPHKALFGIVQGGLFKDLRLKSLKELINIGFDGYAMGGLAVGETQREMFKVLDDI

SEQ ID NO: 118956 - protein, 375 aa, Unknown
  Bacterial polypetide isolated from the Sargasso Sea
MSKFEYKLIKNDANARLGKIITAHGEIDTPVFMPVGTAATVKALRVDDIKKSNSQIILANTYHLMLRPGENIINQLGGVRKFMNWDGPLLTDSGGFQVMSLGNLRTINEEGVTFKSQLDGSKFFLTPEKSIQIQHLLGSTITMCFDECIQLPASFENTKNSMELSMRWADRSLSAYKEREGYAIFGIIQGGTYKELRELSATHLRNLNFPGYAIGGLAVGEGQEKMFETIEYTEPFMDTNKPRYLMGVGKPEDIIGAVKRGIDMFDCVLPTRSGRNGQAFTSRGEINIKNARHTKDPRPLDEACDCNTCKNYSRAYLHHLFKANEILGLMLLSDHNINFYQNMMMGIRKSIKNGNFENFSENFLLKRAGGDILES

SEQ ID NO: 118957 - protein, 348 aa, Unknown
  Bacterial polypetide isolated from the Sargasso Sea
ETHRGVINTPAFMLVGTQATVKGVFIDDIIKTGSEIILSNTYHLMIRPGTERIEMHGGLHKFMNCKLPILTDSGGYQVMSLSKLNKVDRIKGAIFQSHIDGKTFILSPEESIKIQKKLNSDIVMVMDECPKNSKDYNKIKNSMYLSMEWANRSKIEFGNNPHKALFGIVQGGLFKDLRIESLNKLIEIEFDGYAVGGLAVGETQKEMFKVLDSIKDYLPIEKPRYLMGVGTPSDILGAVKRGIDMFDCVLPSRSGRTGLAFTWNGRVQIRNSENKYDNTPLDKNVSKFDLNKYSKNYLNHLHNTNEMLASMILTLNNINFYQELMYEIRKNIKMGTFDQFHDKYIKIL

SEQ ID NO: 118958 - protein, 294 aa, Unknown
  Bacterial polypetide isolated from the Sargasso Sea
SCCGCIKFMNCKLPILTDSGGYQVMSLSKFNKIDRDKGAIFQSHIDGKTFILSPEESIKIQKKLNSDIVMVMDECPKNTNDYNKIEKSMNLSTEWAIRSKNEFGNNPHKALFGIVQGGLFNDLRIESLRKLINIKFDGYAIGGLAVGETQKEMFDVLDGIKDYLPVDKPRYLMGVGTPSDILGAVKRGIDMFDCVLPTRSGRTGLAFTWNGRIQIRNSENKLDNTPLDSSVTKFDLNKYSKNYLNHLHNTNEMLASMILTLNNLNFYQELMYEIRKNIKMGTFDEFHDKYINIL

SEQ ID NO: 118959 - protein, 281 aa, Unknown
  Bacterial polypetide isolated from the Sargasso Sea
MKFNFLVKKEDSKARTGEISTPHGKIQTPVFMPVGTYGAVKAVSPQILEEISSQIILSNTYHLMQRPGINIIEGHGGLHEFMKWNGPILTDSGGYQVFSLAKNRKITEQGVEFNSPLNGDTLFLTPESCMDIQYRFGVDIAMVLDECTPFPATKEEASASMELSMKWAKRCRDSFSSDKSALFGIIQGGMYEDLREESLETLKEIDFEGFALGGLSVGEPKEDMLRIVSSIANQMPKDKPRYLMGVGTPLDIVLAVQQGVDMFDCVMPTRHARNGYLFTST

SEQ ID NO: 118960 - protein, 177 aa, Unknown
  Bacterial polypetide isolated from the Sargasso Sea
GLFDDLRKESLDRLIKINFDGYAIGGLAVGESQKEMFSVLDSLKNHLPENKPRYLMGVGTPSDILGAVKRGIDMFDCVLPTRSGRTGLAFTWEGRVSIKNSKYQKDNQPLDSKCNNFNLNKYSKNYLNHLFNTNEILASMLLTLHNINFYQELMESIREHIKNGTFNDFHDKYIGKL

SEQ ID NO: 118961 - protein, 371 aa, Unknown
  Bacterial polypetide isolated from the Sargasso Sea
MQSKDFSFELIAQDGKARLGKISTSRGPIDTPAFMPVGTQGTIKGVFTDDIIKTGTQIILGNTYHLLLRPGIDILKKFNGLHGFMNWNKPILTDSGGYQIMSLSKLNKIDKDIGAIFKSHIDGKKIILSPEKSIQVQKSINSDIIMVLDECPKLTNDKKILSRAINTSTNWAERCKIEFGHNKSKALFGITQGGLFKDLREESIKKLIKIGFDGYAMGGLAVGEKQYEMFKILNETIDFFPKKKPRYLMGVGTPSDILGAVNNGIDMFDCVLPTRSGRTGLAFTWEGKLNLKNAKYQGDLLPLDSSCKLKELNKYSKSYLSHLIRSNEMMASMLISLHNIYFYQEFMKEIRRNIKSGTFATFYKKYIDYFN

SEQ ID NO: 118962 - protein, 264 aa, Unknown
  Bacterial polypetide isolated from the Sargasso Sea
MENDKFSFNLLKSSNEFRRGVIKTPRGEINTPVFMPVGTQATVKGVFIDDIIKTGSQIILSNTYHLMLRPGVERISSVGGLHEFMNCKLPILTDSGGYQVMSLSKLNKIDRKLGAIFKSHIDGKEYILSPEESIKIQKGLNSDILMVMDECPKKTKDYGKIKLSMDLSTEWAMRSKDEFGNNPKKALFGIIQGGLFNDLRKTSLEELQKIDFDGYAVGGLAVGETQTEMFKVLNNIVPMMPKDKPRYLMGVGTPSDILGAVKRG

SEQ ID NO: 118963 - protein, 348 aa, Unknown
  Bacterial polypetide isolated from the Sargasso Sea
MALKNFAFKILKTDNFARNGLIETHRGKINTPAFMPVGTQATVKACTIDDIKKTGSEIILSNTYHLMIRPGVERIQHAGGLHQFMNCDLPILTDSGGFQVMSLSKLNKIDREKGAIFNSHVDGKKFFLSPEESIRIQLGLNSDIVMIMDECPKKSNDYNLIKKSMDLSLYWALRSKKAFGINPHKALFGIVQGGLFKDLRIKSLNELVNIGFDGYAIGGLAVGESQDEMFRVLDDIKDVLPKDKPHYLMGVGTPSDILGAVKRGVDMFDCVLPTRSGRTGLAFTWQGRINIKNNKYQFDNSPLDINCKNLNLNKYSKNYLNHLFNTNEILASMLLSLHNINFYQELMS

SEQ ID NO: 118964 - protein, 370 aa, Unknown
  Bacterial polypetide isolated from the Sargasso Sea
MALKNFSFKIFKNHKSARLGKIQTHRGAIDTPAFMPVGTQATVKGTFLSDILKTNSQIILSNTYHLMIRPGVSRIKGVGGLHKYMNCKLPILTDSGGFQVMSLSKLNKVDKEKGAIFQSHVDGKKFILSPEESIKIQKGLNSDIVMVMDECLKKNNDYYKTKDSVDVSTYWAKRSKVAFGKNPRKALFGIVQGGLFNDLREKSLLDLIKINFDGYAIGGLAVGETQSEMFKVLDFITDKMPKHKPRYLMGVGTPSDILGAVARGIDMFDCVLPTRSGRTGLAFTWNGRINIRNSKYKNDKNPLNKNDKIFDLNKYSKNYLNHLFNTNEMLGPMLLTLHNINFYQQLMFEIRKNIKKGTFSNFYNKYFNKL

SEQ ID NO: 118965 - protein, 369 aa, Unknown
  Bacterial polypetide isolated from the Sargasso Sea
MAFSLKNKDSNSKARVGSLVTKSGIVETPVFMPVCTKAVPKTLTTDNLKEMGFDMVVTNAYHLFLKPGHKVIMEYGGLHSFMNWNNSILSDSGGFQVYSLSPTAKISDEGVKFKSFIDGSVNFISPELSIEIQQHLGSDIMMIFDDCPKPDSEYSRILESINRTKDWALRSKKSKKSESMLFGIVQGGIYEDLRKTSLEHMLEIEFDGYAIGGLGLGEGQSRTYEITEQICSMIPEDKPRYSMGIGKPEDIIKSVELGVDVFDCVVPTRNARNGTLYTKNGKINIKNSEFHMSDKLIDEDDANHPCLNYSLGYLRHLYTSKEMTALSLMTMNNLYFYKQLIESIKNSIKNGKFIEFKRAFLERYGNETD

SEQ ID NO: 118966 - protein, 321 aa, Unknown
  Bacterial polypetide isolated from the Sargasso Sea
DIKKTGSQIILSNTYHLMIRPGVERIEHAGGLHEFMNCDLPILTDSGGFQVMSLSKLNKIDKEKGAIFNSHIDGKKFYLSPEESIRIQLGLNSDIVMVMDECPKKTNDYQTIDKSMNLSLYWAERSKKAFGSNPHKALFGIVQGGLFKDLRIKSLKGLLKIGFDGYALGGLAVGETQAEMFTVLEDIKEYLPDDKPHYLMGVGTPNDILGAVKRGIDMFDCVLPTRSGRTGLAFTWQGRVNIKNNKYQNDNTPLDPECKNLNLNRYSKNYLNHLFNTNEILGSMLLTLHNINFYQELMKAIRENIQNDTFDAFHDKYIDKL

SEQ ID NO: 118967 - protein, 208 aa, Unknown
  Bacterial polypetide isolated from the Sargasso Sea
MRLSLDWAELSKKANDSQSPLFGIVQGGMYKDLREESMENLNKLDFDGYALGGLSVGEPSKIRNQIVSHMAPKMPSDRPRYLMGIGKPLDIIYAVQSGIDMFDCVIPTRNGRNGQIFTFKGPINIRNSIYENDFDPIDKDCKCFTCQNYSRAYIKHLDKCNDGLAGRLISIHNVYFYQELMRKIRNSIISDTLDELIKEIEFYYSEVE

SEQ ID NO: 118968 - protein, 370 aa, Unknown
  Bacterial polypetide isolated from the Sargasso Sea
MALKKFNFNVNHTENHSRVGVIETHRGNINTPAFMPVGTQATVKGAFIKDVVQTGSEIILGNTYHLMLRPGVDRISSVGGLHEFMNCNLPILTDSGGFQVMSLSKFNKIDREKGAIFQSHIDGNKFILSPEESIRVQKGLNSDIVMVMDECPKKTDDFEKIKKSMDLSMYWAKRSKNAFGDNPHKGLFGIVQGGLFNDLRLKSLEQLIDIDFDGYAMGGLAVGETQKEMFDVLDGVKDYLPKDKPRYLMGVGTPSDIIGAVKRGIDMFDCVLPTRSGRTGLAFTWNGRVQIRNAKYQNDNSPLDLNVSKFDLNKYSKNYLNHLFNTNEMLASMLLTLNNINFYQELMSEIRKNIKNGTFEEFHDKYINIL

SEQ ID NO: 118969 - protein, 207 aa, Unknown
  Bacterial polypetide isolated from the Sargasso Sea
AERSREAFGYREGRSLFGIQQGSVFSEQREESAEALKSIGFDGYAVGGLAVGEGQEKMFEVLKYAPDFLPSEKPRYLMGVGKPDDIVGAVKNGIDMMDCVLPSRSGRTGQIFTHRGVLNIKNSRHQDDPRPIDENCSCPACKNYSRAYLHHVFKSQEIISSMLLTWHNLQYYQDLMAGIRSSIRSNSFDDFIDEFYSVRAEGDIEQI

SEQ ID NO: 118970 - protein, 370 aa, Unknown
  Bacterial polypetide isolated from the Sargasso Sea
MALKKFAFKVLNKDKFARRGVIDTHRGEINTPAFMPVGTQATVKACTIDDIKKTGSEIILSNTYHLMIRPGVGRIKSAGGLHEFMNCDLPILTDSGGFQVMSLSKLNKIDREKGAIFNSHVDGKKFYLSPEESIRIQLGLNSDIVMIMDECPKKTEDYNFIKKSMDLSLYWAERSKKAFGKNPHKALFGIIQGGLFKDLRLKSLEGLTNIGFDGYAVGGLAVGETQNEMFTTLDGIKEHLPDEKPHYLMGVGTPTDILGSVKRGIDMFDCVLPTRSGRTGLAFTWDGRVNIKNNKYQNDNTPLDPNCENLNLNKYSKNYLNHLFNTNEILASMLLTLHNINFYQELMSEIRKNIMNNTFDEFHDKYIDKL

SEQ ID NO: 118971 - protein, 297 aa, Unknown
  Bacterial polypetide isolated from the Sargasso Sea
RVALQGGLHEFMNCPLPILTDSGGYQVMSLSKLNKIDKEKGAIFNSHIDGKQFILSPEESIRIQKKLNSDIVMVMDECPKKTIDKKTIEKSLDLSTEWALRSKNAFGKNPHKGIFGIVQGGLFDDLRKKSLEDLINIGFDGYALGGLAVGDTQNEMFKVLDGIKNHLPEDKPRYLMGVGTPSDILGAVKRGIDMFDCVLPSRSGRTGLAFTWNGPINIKNAKYQNDTKPIDEKCEKFNLNKYSKNYLNHLFNTNEILASMLLTLHNINFYHELMDKIRININNGTFDQFFDEYIAKL

SEQ ID NO: 118972 - protein, 376 aa, Unknown
  Bacterial polypetide isolated from the Sargasso Sea
MNFKIHKTDKNTSARTGKVTTDHGTFETPIFMPVATSAAIKGVHNKDLIENVSPKVILSNTYHLYLRPGQKIINKAGGIHKFMSWNNNILTDSGGYQVYSLSANRKINPDGVKFKSHIDGSYHFFTPENVMDIQRNIGADIIMAFDECPPYPCEKNYARKSMDLTHEWLKRCINRFNATKPIYNHNQYLLPIVQGSVYSDLRKQSAEIIAGHDLPANAIGGLSVGEPHELMYEMCEDVCKILPIAKPRYLMGVGTPINIIENIALGVDMFDCVMPTRNARNGMLFTRNGTINIKNKKWEDDNSEIDPCGTTFVDKLYTKSYLRHLFTINEYLGKEIATIHNLGFYSWLIEECKIAINEGRFLDWKNKMVKQLDNKL

SEQ ID NO: 118973 - protein, 373 aa, Unknown
  Bacterial polypetide isolated from the Sargasso Sea
MFGFEISAHCANTAARCGCFHTPHGLVHTPRFMPVGTLATVKGISTDQLARTGAQMVLSNTYHLHLQPGEEIVAAAGGLHRFMGWDGPMLTDSGGFQVFSLGDLNKIDDRGVVFRNPRDGRIIDMTPEHATQIQMALGADVAMAFDQCPPYPATENDVIDACRRTHAWLARCVEAHSRDNQALFGIVQGGCFPHLRRESARAVADFDLPGIAVGGVSVGEPVEEMHRIVRDVTPLLPTHKPRYLMGIGTLREMAVAVANGIDLFDCVLPTRLGRHGTALVGGERWNLRNARFRHDHTPLDPSCPCPTCSGGHTRAYLNHLIRSEELLGLTLLSLHNITHLLRFTNVMSKAIRDGCFSEDFAPWEPDSPAHHTW

SEQ ID NO: 118974 - protein, 148 aa, Unknown
  Bacterial polypetide isolated from the Sargasso Sea
MNFTVRNIDGFARLGEISFPRGIIKTPAFMPVGTYGSVKGLNPSQIRSTGADIILGNTYHLSLRPGTEVVKLHGGLHQFIGWERPILTDSGGFQVFSLGDMRKITEEGVSFRSPIDGSNRFLSPESAIRIQHALGADIIMAFDECTPY

SEQ ID NO: 118975 - protein, 222 aa, Unknown
  Bacterial polypetide isolated from the Sargasso Sea
MALKNFAFKVLKKDKFARSGVIETHRGSINTPAFMPVGTQATVKACTIDDIKKTGSQILLSNTYHLMIRPGVERIKSAGGLHKFMNCDLPILTDSGGFQVMSLSRLNKIDREKGAIFNSHVDGKKFYLSPEESIRVQLGLNSDIVMIMDECPKKTNDYDLIEKSMDLSLYWAERSKKAFGINRHKGLFGIVQGGLFKDLRIKSLNELMNIGFDGYALGGLAV

SEQ ID NO: 118976 - protein, 163 aa, Unknown
  Bacterial polypetide isolated from the Sargasso Sea
MNIGFDGYALGGLAVGETQQEMFSVLDDVKEHLPQDKPHYLMGVGTPSDILGAVKRGIDMFDCVLPTRSGRTGLAFTWEGRINIKNNKYQNDNTPLDSNCDNLNLNKYSKNYLNHLFNTNEILASMLLTLHNINFYQELMSSIRDNIEAGTFDKFHDKYIDKL

SEQ ID NO: 118977 - protein, 226 aa, Unknown
  Bacterial polypetide isolated from the Sargasso Sea
MEFSVLSEDKHSQARTGLIQTDHSKIETPVFMPVGTHGVVKTLSPNDLSDINVQIMLSNTYHLYLRPGTEIIHENKGLHKFLNWDKSILTDSGGYQVFSLSNMNEITKDGVNFRSHLDGSEHFFTPQKSMEVQRQLGSDIIMAFDYCPPADCSQRELKRASTLTEKWTKQAFEYLHDKKSIYGHSQTLFPIIQGGINPDERLKCLNQMLPYASCGIAIGGLSVGEK

SEQ ID NO: 118978 - protein, 370 aa, Unknown
  Bacterial polypetide isolated from the Sargasso Sea
MSLKDFNFNVHHTQNYARVGVIETHRGNINTPAFMPVGTQATVKGVFLEDIKKTGSEIILSNTYHLMIRPGVERIESVGGLHEFMNCDLPILTDSGGFQVMSLSKLNKIDRDKGAIFQSHIDGKTFILSPEESIRIQKGLNSDIVMVMDECPKNTKDYDKIKKSMELSSEWAKRSKDAFGINDHKGLFGIVQGGLFNDLRIKSLNNLIDIGFNGYALGGLAVGETQDEMFDVLDGIKDHMPKDKPRYLMGVGTPSDILGAVKRGVDMFDCVMPTRSGRTGLAFTWEGQIQIRNSKYKNDNTPLDRSVTKFNLNKYSKNYLNHLFNTNEMLASMILTLNNINFYQDLMRNIRDNIKHGTFDEFHDKYINKL

SEQ ID NO: 118979 - protein, 370 aa, Unknown
  Bacterial polypetide isolated from the Sargasso Sea
MALKKFNFNVNYTENHSRVGLIETSRGNINTPAFMPVGTQATIKGAFINDILKTGSEIILSNTYHLMIRPGTDRIEAVGGLHEFMNCSLPILTDSGGFQVMSLSKLNKIDREKGAIFQSHIDGKKFTLSPEESIRIQKSLNSDIVMVMDECPKKSTDYQKIKKSMELSIEWAERSKNAFGLNPHKALFGIVQGGLFNDLRNKSLKALIDIDFDGYAIGGLAVGDTQDEMFNVLDNLKENMPVDKPRYLMGVGTPSDILGAVKRGVDMFDCVLPTRSGRTGLAFTWNGRVQIRNSMNQNDNSPLDPSVTKFDLNKYSKNYLNHLFNTNEMLASMILTLNNINFYQELMHEIRENIKKGTFEQFHNKYFNLL

SEQ ID NO: 118980 - protein, 395 aa, Unknown
  Bacterial polypetide isolated from the Sargasso Sea
MTEGSSHDTHAPVQDRPANGLEFELLTTDGHARRGRVKLNHGVVETPIFMPVGTYGTVKAIQPRELHEIKAQIILGNTFHLWLRPGLDTIDAHGGLHGFMGWNKPILTDSGGFQVFSLGDLRKITEDGVTFASPINGDKLFLSPEVSMQIQKVLNSDVVMQFDECTPYATNGVPTTHKEAADSMRMSLRWAKRSLDEFDRLGNPNALFGIVQGGMFEDLRDESLAGLAELGFHGLAIGGLSVGEPKEDMMRVLQHVGPKLPANKPHYLMGVGTPEDLVEGVANGIDMFDCVMPTRNARNGWLFTRFGDVKIRNATHKNSLKPLDASCTCYTCQNFSRGYLHHLHRVGEILGAQLNTIHNLHYYLQLMSEIREAIETHTFDAFRQRFAEDRARGVD

SEQ ID NO: 118981 - protein, 365 aa, Unknown
  Bacterial polypetide isolated from the Sargasso Sea
MVKSDKSARLGELRFDKGVIHTPVFMPVGTYGSVKTMTPDELTDIGAEIILANTYHLMIRPGKEILSSHDGLHRMMGWKKPILTDSGGYQIWSLSKKRKINDEFVEFDSPVNGDLIRLTPEIAMEIQKVIGSDIQMVLDECTHYPATKEEASLSMKRSEKWALRSHESFLNQKGDDDSACFGIIQGGMYTDLRLQNLEFLSSIDFDGLAIGGLSVGEPIDERMMVLESLMPQMSENIPRYLMGLGTPIDIIKAVSVGVDMFDCVIPTRHARNGQIYTHSGVVKIKNARYINDLGPLDDECGCYTCSNFTRSYLRHLFNCNEILGLRLATIHNLSFYIKLMDDIRKSIQSETFEKFAKNFIQSYQQ

SEQ ID NO: 118982 - protein, 326 aa, Unknown
  Bacterial polypetide isolated from the Sargasso Sea
MRYKLLKKDGYARRGLLELQHGNIQTPVFMPVGTNATVKGLTVEDLEETGSQIILSNTYHLMLRPGDEIIKELGGLHNFCNWQKPILTDSGGFQVWSLGDLAKVSEKGVSFKSPYDGKNIFMSPEDSIQIQENLGSDIVMVFDECTNYPSPKKEAQKSMELSARWAARSKDAHKSQSALFGIVQGGMYEDLREESLNLTLACEFDGIAIGGLSVGEPKEEKTKVLKHLSNILPDDKPRYLMGVGKPEDIVEAVFFGVEMFDCVLPTRNARNGQLITSTGVINIRNAKYKNDDSPIDENSDSKVCKNYSKAYLHHLDKTNEMLGSML

SEQ ID NO: 118983 - protein, 265 aa, Unknown
  Bacterial polypetide isolated from the Sargasso Sea
MNKIDRVKGAIFNSHVDGKKFYLSPEESIKIQLGLNSDIVMIMDECPKKTNDYEVIQKSMDLSLHWAERSKLAFGNNPHKALFGIIQGGLFKDLRLKSLQELVKISFDGYAIGGLAVGETQNEMFSVLDDIKEFLPANKPHYLMGVGTPSDIIGAVKRGIDMFDCVLPTRSGRTGLAFTWQGRINIKNNKFQNDNTPLDPKCDNLNLNKYSKNYLNHLFNTNEILASMLLTLHNINFYQQLMRSIRKNINEGTFDEFHDKYIDKL

SEQ ID NO: 118984 - protein, 369 aa, Unknown
  Bacterial polypetide isolated from the Sargasso Sea
MKFKLIKSDKSARLGELQFRKGLIQTPVFMPVGTYGSVKTMTPDELIDIGAEIILANTYHLMIRPGKDILSSHGGLHQMMAWPKPILTDSGGYQIWSLSKKRKINDEYVEFDSPVNGDMIRLTPEIAMQMQKVIGSDIQMVLDECTHYPATREEAELSMKRSEKWALRSHESFLQQKGDDDSACFGIIQGGMYPDLRLQNLEVLSSIDFDGLAIGGLSVGEPIDERMMVLESLMPEMSENIPRYLMGLGTPVDIIKAVSVGVDMFDCVIPTRHARNGQIYTHSGVVKIKNAKYINDLEPLDEKCECYTCNNFSRSYLRHLFNCNEILGARLATIHNLSFYIKLMADIRKSIQSDSFEEFAKNFIQSYQQ

SEQ ID NO: 118985 - protein, 372 aa, Unknown
  Bacterial polypetide isolated from the Sargasso Sea
MNPVKFKLIKSDKSARIGELQFRKGLIQTPVFMPVGTYGSVKTMTPDELIDIGAEIILANTYHLMIRPGKDILSSHGGLHQMMAWPKPILTDSGGYQIWSLSKKRKINDEYVEFDSPVNGDMIRLTPEIAMQMQKVIGSDIQMVLDECTHYPATKDEAELSMKRSEKWALRSHESFLQQKGDDDSACFGIIQGGMYPDLRLQNLEVLSSIDFDGLAIGGLSVGEPIDERMMVLESLMPEMSENIPRYLMGLGTPIDIIKAVSVGVDMFDCVIPTRHARNGQIYTHSGVVKIKNAKYINDLEPLDEKCECYTCNNFSRSYLRHLFNCNEILGARLATIHNLSFYIKLMADIRKSIQSDSFEEFAKNFIQSYQQ

SEQ ID NO: 118986 - protein, 371 aa, Unknown
  Bacterial polypetide isolated from the Sargasso Sea
MKLKTKNTSNFARVSEIQLSRGKINTPAFMPVGTNATVKGLTVEDLNETGSEIILGNTFHLMLRPGDNLIKNLGGLHKFINWEKPILTDSGGFQVWSLGDLAEISEDGVKFSSPYDGKKIFMRPEDSIMIQENLGSDIIMVFDECTDYPTNFEQAKKSMELSMRWAKRCKAAHKSKSALFGIVQGGMYKDLREESLNQLMDIDFDGIALGGLSVGESKQEKTEILEFMSDKLPKDKPRYLMGVGTPEDIVEAVRYGIDMFDCVLPTRNARNGQLFTSEGVINIRNAEYKDSDEPIDKNCDSKVSQNYSRAYLNHLHRTNEMLGSMLATYHNIYYYQSLMRDIRYAIKNNLFAKFFKDFYNKRNLDMAKGPI

SEQ ID NO: 118987 - protein, 351 aa, Unknown
  Bacterial polypetide isolated from the Sargasso Sea
KIKTSRGDIDTPAFMPVGTLGTVKGVFVDDLLKTGSQIILGNTYHLMLRPGTKILDKFNGLQKYMNWKKPILTDSGGFQIMSLSKFNKIDEKIGAIFNSHIDGKKIILSPEKSIEIQKSINSDILMVLDECPKLTNDKKVISKAIDTSTNWAKRCKVEFGNNKKKALFGIVQGGLFKDLREESLDKLIDINFDGYALGGLAVGETQSQMFDTVAQISPKMPFNKPRYLMGVGTPSDILGAVNEGIDMFDCVMPTRSGRTGLAFTWDGKINLKNSIYKNDKSPLDKKCNLKGLNNYSKSYLNHLIKTNELLASMIISLHNIYFYQQFMLEVRKSIKSRTFFKFYKKYIKFFN

SEQ ID NO: 118988 - protein, 368 aa, Unknown
  Bacterial polypetide isolated from the Sargasso Sea
MSDGFGFHVEVAHSSGSRAGVLTTPHGQVQTPLFMPVATLASVKGVDIARVVETGATMLLANTYHLHLRPGEEVVSQAGGVGHFMGWSGPTLTDSGGYQVFSLAQQVKVTDHGAAFRSHLDGSQVNLTPEKAVAIQESLGADVAMQLDHVIGLPAARNDVAEAMERSLAWGERCLAARQKSDQAMFGIVQGGLDPELRAISAKHLRSLPFEGFAVGGLSVGEGPEAMASTLQVTVPYLPQDKPRYLMGVGKPEDIINAVAVGIDMFDCVLPTRCGRNALLYTFDGPLRLRNAQYLTDERPIESDCPCMACGHSRAYMRHLFLAGEMLGSILASIHNLTFYQRLMRRLREAIVAGQFQAVRADILARMN

SEQ ID NO: 118989 - protein, 371 aa, Unknown
  Bacterial polypetide isolated from the Sargasso Sea
MNSKKVFFELIKTHKEARLGQIRTSRGLIDTPAFMPVGTQGTVKSIFVDDIVKTNSQIILGNTYHLFLRPGLEILKNIGGLHQFMNWHKPILTDSGGFQIMSLSKFRKIDKEKGAIFQSHIDGKKIELSPEKSIQIQKIINSDILMVLDECPKLTNDKKIISNAIDVSTYWAKRSKIEFDNAENKSLFGIVQGGLFDDLRIESLEKLLEINFDGYALGGLAVGEKQNEMFEVLDNITNKMPKNKPRYLMGVGTPSDLLGAVKSGIDMFDCVLPTRSGRTGLAFTWHGKVNIRNSKYKKDLKPLDENTNLRSLNKYSKSYLNHLINTNEILASMLISLHNINFYQEFMKKIRTSIKDGSFDDFYKENISKFN

SEQ ID NO: 118990 - protein, 370 aa, Unknown
  Bacterial polypetide isolated from the Sargasso Sea
MDKFKFKVLKKDGYARKGLIETKRGNIKTPAFMPIATQGAVKFTPIEFIEQIGYELTLSNTYHLLLRPGLERLSSVDGISEFMGWNKPVLTDSGGFQVMSLSKLRKISEEGVKFQSHIDGASHFLTPENVIDYQNTIKSDIQMVLDECIQYPESYENVKKSMELSLRWAERSRKHYNKNKSKIYGAQFGIIQGGVFEDLRETSISETVNFDFEGYAIGGLAVGEGHEKMIEVVDYTAPQLPEDKVRYLMGVGKPNDIIEAVYRGVDIFDCVIPTREGRHGIAYVGSSSINIKNSKFESDLTPLDESSDYFVSKKYSKSYLNHLLKIKDPLGPMLISLHNLNYYFNLMTDLGVSIEEGRLDSFREDFYKDN

SEQ ID NO: 118991 - protein, 242 aa, Unknown
  Bacterial polypetide isolated from the Sargasso Sea
MTLKKFSFNVNRTQNFARVGVIVTNRGNINTPAFMPVGTQATVKGVFIDDIIKTGSEIILSNTYHLMIRPGVERIQSVGGLHKFMNCNLPILTDSGGFQVMSLSKLNKIDEEKGAIFQSHIDGKTFVLSPEESIRIQKGLNSDIVMVMDECLKKTNDYNVIKKSMELSSGWAKRSKDAFGKESNKALFGIVQGGLFNDLRNESLNNLLDISFDGYALGGLAVGESQTEMFKVLDGIKDKLPE

SEQ ID NO: 118992 - protein, 371 aa, Unknown
  Bacterial polypetide isolated from the Sargasso Sea
MQFKVSSTSGYARRGELSFSRGKVQTPAFMPVGTNGTVKALEVENLKETGSEIILGNTYHLMLRPGDEQVKEFGGLHKFSNWDKPILTDSGGFQVWSLGDLAKITEEGISFKSPYDGNKCFMSPEDSMRIQANLGSDIVMVLDECTPYPAEHEQAKASMELSLRWAKRSREAHQSDSALFGIVQGGMHEDLREQSLKGLIDIGFDGIALGGLSVGEPKEEKTRILKYLAPHLPSSKPHYLMGVGKPEDIVEAVFFGIDMFDCVLPTRNARNGQLITSYGVLNIRNAPSKTSDDPIDPECNCKVCKNYSQGYLNHLDKTNEMLGSILNSFHNIYYYQNLMQQIRKAIETDTFAKLIKDFYNKRHLDMPEHLI

SEQ ID NO: 118993 - protein, 371 aa, Unknown
  Bacterial polypetide isolated from the Sargasso Sea
MNSKKFFFELIKSKNNYRLGKIHTKRGIINTPAFMPVGTLGTIKSIFTDDILKTGTEIILGNTYHLFLRPGIEILNKFGGLHKYMNWQKPILTDSGGFQIMSLSKFTKIDKKKGAFFSSHIDGKKFLLSPEKSIEIQKKINSDILMVLDECPKLTVDKKIISSAIDTSTHWAKRSKIAFGKSSTKALFGIVQGGIFKDLRHESLEKLIDINFDGYAMGGLAVGETQDQMLKTLEDTTYLMPKNKPRYLMGVGTPSDIVGAVKNGIDMFDCVMPTRSGRTGLAFTWEGKINLRNSKFKNDKSPLDRKCKINNLNKYSKSYLNHLINTNEILASMLISLHNVNFYQEFMKKIRESIKTGTFEAFYKKNINKYN

SEQ ID NO: 118994 - protein, 243 aa, Unknown
  Bacterial polypetide isolated from the Sargasso Sea
MKFQINSSSEFARNAELKLIKGTIQTPAFMPVGTNGTVKALTVEDLHETNSEIILGNTFHLMLRPGDKLIKDLGGLHKFINWDKPILTDSGGFQVWSLGDLVNISEEGVKFSSPYDGKKIFMTPEDSIKIQENLGSDIIMVFDECTDYPSTHEEAKKSMELSMRWAKRCKTAHKTESALFGIVQGGIYKDLREESLNRLIDIGFDGIALGGLSVGESQQEKNEILEFMSDKLPEDNQDILWEL

SEQ ID NO: 118995 - protein, 246 aa, Unknown
  Bacterial polypetide isolated from the Sargasso Sea
MDSKKVFFELIKTHNQARLGQIKTSRGLIDTPAFMPVGTQGTVKSIFVDDILMTNSQIILGNTYHLFLRPGLDILNNFGGLHQFMNWHKPILTDSGGFQIMSLSKFRKIDKDKGAIFSSHLDGKKIELSPEKSIQIQKTINSDILMVLDECPKLTNDKKLIAGAIDVSTNWAKRSKIEFNNAKNKSLFGIIQGGLFNDLRIESLEKLLEIDFDGYALGGLAVGEKQHEMFKVLDSITNKMPKNKPR

SEQ ID NO: 118996 - protein, 250 aa, Unknown
  Bacterial polypetide isolated from the Sargasso Sea
MKFKIDSQAEFARKGELQFPKGKVQTPAFMPVGTNGTVKGLTVDDLKSTGSEIILGNTYHLMLRPGDEIIKDLGGLHKFSNWDRPILTDSGGFQVWSLGDLAKISEEGVKFSSPYDGKKIFMRPEDSIQIQENLGSDIIMVFDECTDYPSTFDQAKKSMELSMRWAKRCKDYHSSNSALFGIVQGGVYEELREQSLSKIIEIDFDGIALGGLSVGETKEEKNKILSFLADKLPTNKPRYLMGVGKPEDIV

SEQ ID NO: 118997 - protein, 254 aa, Unknown
  Bacterial polypetide isolated from the Sargasso Sea
MKFTLKTNSSKYNARTGVLETHHGSINTPVFMPVGTIGAVKTMDPYELKSIDFKIILGNTYHLYLRPGTDIINKAGGLHKFISWDRPILTDSGGFQVFSLSRLNKISNDGVEFQSHLDGSRHMFTPESSMEIQRKLGSDIIMAFDDCPPGDSNHSTIKKSVERTTNWMVRCSDWLEKNPRYHDHEQVVLPIIQGATDLDLRKISAEQLIQHSSCGMAIGGLAVGEEKNAMMDTIEFCDTILPKNQPRYLMGVGK

SEQ ID NO: 118998 - protein, 252 aa, Unknown
  Bacterial polypetide isolated from the Sargasso Sea
MSPEDSIQIQENLGSDIVMVFDECTNYPSPKKEAQKSMQLSARWAARSKDAHKSQSALFGIVQGGMYEDLREESLNLTLACEFDGIAIGGLSVGEPKEEKTKVLKHLSNILPDDKPRYLMGVGKPEDIVEAVFFGVEMFDCVLPTRNARNGQLITSTGVINIRNAKYKNDDSPIDENSDSKVCKNYSKAYLHHLDKTNEMLGSMLASYHNIYYYHELMKQIRQSIDDDIFVNFAKDFYNSRNLPIPDYLEGL

SEQ ID NO: 118999 - protein, 395 aa, Unknown
  Bacterial polypetide isolated from the Sargasso Sea
MTNFSWKVKKTNKNNKARTGKISTPHGDIETPAFIFCATKAALKSFTTLEAKKNNTQIILSNTYHLMLQPGSELIAQHGGLHKFTGWNGPMLTDSGGFQIFSLGHGSVADEIKGRKTNSKNKKTLINLNEEGALFKSYIDGSTHMLSPEKSIEVQRNLGADFILVFDECTPYNVDKTYTSDSMLRSHRWSLRSINAFNSKLNYNPKNGSAGRQEMYGIIQGGIYKDLREESIEFNTKKINTFGIAIGGSLGSNKDEMKDIVHFTSSKLDNSRPVHLLGIGDPRDIWDFVADGIDTFDCVSPTRIARHGSALVKGKQGKINLKNVKYKNNLNPIDNECNCYTCKNFTLAYLYHLFSAQELLGLQLLTNHNIYFMNNLMKEVRNSIYDNDFDNAKKK

SEQ ID NO: 119000 - protein, 231 aa, Unknown
  Bacterial polypetide isolated from the Sargasso Sea
MKFEINNSSEFARNAELKLAKGTIQTPAFMPVGTNGTVKALTVEDLHETNSEIILGNTFHLMLRPGDKLIKDLGGLHKFINWDKPILTDSGGFQVWSLGDLVKISEEGVKFSSPYDGKKIFMTPEDSIEIQENLGSDIIMAFDECTDYPSTHEQAKKSMELSMRWAKRCKNAHKTESALFGIVQGGMYKDLREESLNRLIDIGFDGIALGGLSVGESQQEKNEILEFMSDK

SEQ ID NO: 119001 - protein, 237 aa, Unknown
  Bacterial polypetide isolated from the Sargasso Sea
LSKLNKIDRERGAIFNSHVDGKQYTLSPEESIRIQKKLNSDIVMVMDECPKKTTDRKIIENSLDLSTEWALRSKNFFGKNPHKGLFGIVQGGLFDDLRKKSLEDLIKIGFDGYALGGLAVGDTQEEMFRVLDGIKEHLPEDKPRYLMGVGTPSDILGAVKRGIDMFDCVLPSRSGRTGLAFTWNGPINIKNAKYQNDTKPLDEKCEKFNLNKYSKNYLNHLFNTNEILASMLLTSII

SEQ ID NO: 119002 - protein, 210 aa, Unknown
  Bacterial polypetide isolated from the Sargasso Sea
MTLKKFTFNVIEKNKQARLGLIKTSHGNIDTPAFMPVGTQGTIKGIFINDIIKTESHIILGNTYHLMLRPGIKRIESLGGLHQFMNCKLPILTDSGGFQVMSLSKLNKIDREKGAIFQSHIDGKKYILSPEESIKVQKSLNSDIVMVMDECPKKSGDYKKIKKSMELSMYWADRSKKAFGLNPHKAIFGIIQGGLFKDLRVESLKHLLNI

SEQ ID NO: 119003 - protein, 377 aa, Unknown
  Bacterial polypetide isolated from the Sargasso Sea
MSNKSKFFNILKTDGKARLGKITTSRGEVDTPAFMPVGTAGTVKGVLPENVKLSGSQIILGNTYHLMLRPGSELISSFGGLHKFMNWELPILTDSGGFQVMSLSKLRKISEEGVEFSSHIDGSKHFVSPERSIEIQLNLGSDIIMAFDECVDSETPLEKVKSSMDRSMRWAKRSIAAFGNQNLKFIFGIQQGGFDEKLRLESSKILTDLNFDGYAVGGLAVGEGQEEMFKVLDFATEFLPQEKPRYLMGVGKPDDIIGAVERGVDMFDCVLPTRSGRTGQAHTRMGEINLRNARHIKDDRPLDNLCSCYTCVNYSRAYLNHLEKANEILGSVLLSIHNISYYQELMKGIRRAISNNDLKAFVENFYERRKIGDLPKL

SEQ ID NO: 119004 - protein, 370 aa, Unknown
  Bacterial polypetide isolated from the Sargasso Sea
MANFKFQILNKEGNARNGVIETKRGKINTPAFMPIATQGAIKFTPIEFIEQIGYDLILSNTYHLLLRPGLERLSDIDGVSEFMTWNKPVLTDSGGFQVMSLAKLRKITEEGVNFQSHIDGSKHFLTPENVIDYQNVIKSDIQMVLDECIQFPESYENVKKSMELSLRWAERSRKYYIENKNKIYGAQFGIIQGGVFEDLREISISETTKFDFEGYAIGGLAVGEGHEKMVEVVNYTAPLLPENKVRYLMGVGRPKDIIEAVYRGVDIFDCVIPTREGRHGLAYVGSSSINLKNSQFENDLTPLDKRSDYFVSNKYSKSYLNHLLKIKDPLGSMLISLHNLNYYYKLMEDLRKSIEEGSLSSFREDFYSKS

SEQ ID NO: 119005 - protein, 378 aa, Unknown
  Bacterial polypetide isolated from the Sargasso Sea
MKFELKTTDGRARRGQLVFERGTVQTPAFMPVGTYGTVKGMTPEEVRETGAQILLGNTFHLWLRPGQEVMRAHGDLHDFMNWQGPILTDSGGFQVFSLGHIRKITEAGVHFRHPINGEKIFLDPEKSMEIQYDLGSDIVMIFDECTPYPATYEEARKSMEMSLRWGKRSRDKFDALGNKNALFGIIQGSVYEDLRDVSLDGLLEIGFDGYAVGGLAVGEPKEDMHRILEHVCPKIPADKPRYLMGVGKPEDLVEGVRRGIDMFDCVMPTRNARNGHLFTTDGVVKIRNAKYREDTSTLDADCDCYTCKNYTRSYLYHLDKCNEILGARLNTIHNLRYYQRVMQGLRDAIEQGKLDDFVTEFYRRQGKPVPPLAENDVK

SEQ ID NO: 119006 - protein, 376 aa, Unknown
  Bacterial polypetide isolated from the Sargasso Sea
MTISFNIKNTDGDSRSGFIKTAHGIVNTPVFMPVGTYGAVKGIQPSDLTEIGSEIILSNTYHLMERPGKDIIRELGGLRSFMNWDGPILTDSGGFQVMSLQNMAKIDDDGVTFKSHLDGSLLRLTPKDSINMQNALDSTITMAFDECTPYPVSHDTALKSMNLSMKWAKLCRDNFIDRNGYGLFGIVQGSTFNDLREKSSESLINIGFDGYAIGGLAVGEGHDLMISTLKSSINYLPKEKPRYLMGVGYPKDIIEAVRLGVDMFDCVIPTRSGRTGKIFTKTGTLNIKNARHKNDPRPIEEGCSCKVCSNKVSRAYLHHLFNTNEMLGSIYLTIHNISHYIQLMSNLRSAINDNNFKETSNYLLNQYKKGDIEIYN

SEQ ID NO: 119007 - protein, 172 aa, Unknown
  Bacterial polypetide isolated from the Sargasso Sea
MTDGHTHDTSGTCNTCASHGERPENGLKFELLGTDGQARRGRVTLNHGVVETPIFMPVGTYGTVKAVQPRELEEMHAQIILGNTFHLWLRPGLETIEAHGGLHGFMGWKKPILTDSGGFQVFSLGDLRKITEDGVTFASPINGDKLFLSPEVSMQIQKVLNSDIVMQFDECT

SEQ ID NO: 119008 - protein, 278 aa, Unknown
  Bacterial polypetide isolated from the Sargasso Sea
MTLRFSLSSIDGAARCGKLETAHGVINTPAFMPVGTAATVKAMLPESVKATGAEIILGNTYHLMLRPGAKRIEEFGGLHDFMSWPGPILTDSGGYQVMSLATLRKIDEDGVRFRSHIDGSYHKLTPESSTEIQRSLGADITMAFDECTPYPVAETIAEESMLMSMRWAERSKKAFKQKKGYGLFGIVQGSTFEKLRLNSVEALTEIGFDGYAIGGLAVGEGHQEMIRILDITASVLPENKPRYLMGVGKPIDLVAGVMRGVDMFDCVLPTRSGRTGQA

SEQ ID NO: 119009 - protein, 374 aa, Unknown
  Bacterial polypetide isolated from the Sargasso Sea
MKFELDTTDGRARRGRLIFERGTVETPAFMPVGTYGTVKGMTPEEVRATGADILLGNTFHLWLRPGEEIMRKHGDLHDFMNWQRPILTDSGGFQVFSLGDIRKITEEGVHFRSPINGEKIFLDPEKSMQIQHALGSDVVMIFDECTPYPATEDEARKSMQMSLRWAKRSRDEFDRLENPNSLFGIIQGSVYEDLRDESLKGLVDIGFDGYAVGGLAVGEPKEDMHRILEHVCPQIPADKPRYLMGVGKPEDLVEGVRRGIDMFDCVMPTRNARNGHLFTSEGVIKIRNARHRDDTSPLDPKCDCYTCKNYSRAYLYHLDRCNEILGARLNTIHNLRYYQMLMEGLRGAIETGTLDAFVKDFYTSQGREVPELVD

SEQ ID NO: 119010 - protein, 373 aa, Unknown
  Bacterial polypetide isolated from the Sargasso Sea
MTKFFFEKIETDGLARVGLLHTHHGSIRTPAFMPVGTLGTVKAMYPEQVENTGADIILGNTYHLMIRPGAERISKLGGLHSFMNWKLPILTDSGGFQVMSLAKLRSLDEKGVTFQSHIDGSKFSLTPERAIEIQHLLGSDITMVLDECPEHGKRKSDIAESMRLSLQWAKRSRENFIERQGYGLFGIVQGNVFEDLREESALKTMEIGFDGYAVGGLAVGEGHIQMLSTLDFTVPFLPDLKPRYLMGVGRPLDIVESVIRGIDMFDCVLPTRSGRTGKAFTSRGEINIFNARHADDERPLSSECLCPTCKYYSRAYLHHLFKSKEILGPMLLTYHNLKYYQDLMETLRNSISKQSLKEVVSNLVSEWEKGDID

SEQ ID NO: 119011 - protein, 353 aa, Unknown
  Bacterial polypetide isolated from the Sargasso Sea
MINFNIKKKTGLARVGEIVVNNHTIETPVFMPVGTAATVKSITPQDLKDIGYKIILSNTYHLYLRPGTEVISYHKGLHNFMGWENAILTDSGGYQVYSLSKLRKISQDGVKFNSPVDGSTLFMSPEKSMEIQASLNSDIVMCFDDCTPYPCEYNDAKESMELSLRWAERCKNYSLPKNNHLFGIIQGSTYDDLRDKSLEHLINLDFDGYAIGGLSVGESANVRNKVLDNIVNKMPEKKPRYLMGVGKPEDIVEAVLRGVDMFDCVIPTRNARTGFLYTHNGIIKIRNNKYKFDTKPIDENCSCYTCRNFSRSYLRHLDNAKELLGLRLNTIHNLHYYYELMQNIREAIKSDKL

SEQ ID NO: 119012 - protein, 242 aa, Unknown
  Bacterial polypetide isolated from the Sargasso Sea
MALKKFAFNVLKKDKFARSGLIETHRGNIHTPAFMPVGTQATVKACTIDDIKKTGSEIILSNTYHLMIRPGVERIESAGGLHNFMNCDLPILTDSGGFQVMSLSKLNKIDREKGAIFNSHVDGKKFYLSPEESIRIQLGLNSDIVMIMDECPKKTNDYNIIKKSMDLSLYWAERSKKAFGNNPHKALFGIVQGGLFKDLRLKSLKELMKIGFDGYAIGGLAVGETQNEMFSTLDDIKEFLPN

SEQ ID NO: 119013 - protein, 372 aa, Unknown
  Bacterial polypetide isolated from the Sargasso Sea
MEDIKKNFSFSVKHQNKNYRVGLIQTHRGEINTPSFMPVGTQATVKGIFIDDIIKTGSEIILSNTYHLMIRPGTERIEAVGGLHKFMNCKLPILTDSGGYQVMSLSKFNKIDRVKGAIFQSHIDGKTFVLSPEESIRVQKKLNSDIVMVMDECPKNTNDYNKIKTSMDLSMEWAKRSKEEFGKNPHKALFGIVQGGLFKDLRNKSLKKLIDIEFDGYAIGGLAVGETQKEMFDVLDGIKDNLPIDKPRYLMGVGTPSDILGAVKRGIDMFDCVLPTRSGRTGLAFTWNGRVQIRNSENKTDNTPLDSNVTRFDLNKYSKNYLNHLHNTNEILSSMILSLNNINFYQELMYEIRKNIKMGTFDQFHDKYINIL

SEQ ID NO: 119014 - protein, 370 aa, Unknown
  Bacterial polypetide isolated from the Sargasso Sea
MALKKFTFNVQYKDNQSRVGIIQTHRGNIDTPVFMPVGTQATVKGVFIDDVIKTGAQIILSNTYHLMLRPGVDRIKSIGGLHEFMNCNLPILTDSGGFQVMSLSKLNKIDSEKGAIFQSHIDGKKFILSPEESIRIQLGLNSDIVMVMDECPKKSSDYKKIKKSMELSMYWADRSKKAFGINNHKGIFGIIQGGLFEDLRAESVNQLLKIDFNGYAIGGLAVGETQSEMFKVLDGITCLMPQEKPRYLMGVGTPSDILGAVKRGVDMFDCVMPTRSGRTGLAFTWNGRINIRNAKYQNDNSPLDENTDKFNLNKYTKNYLNHLFNTNEMLGSMLLTLHNINFYQELMSSIRKNIKNGTFQQFHDQYINKI

SEQ ID NO: 119015 - protein, 96 aa, Unknown
  Bacterial polypetide isolated from the Sargasso Sea
MKFKTNNFAEIARESEIKTSRGIIHTPAFMPVGTNGTVKGLTVDDLKETNSEIILGNTFHLMLRPGDELIRDQGGLHKFMNWEKPILTDSGGFQVW

SEQ ID NO: 119016 - protein, 307 aa, Unknown
  Bacterial polypetide isolated from the Sargasso Sea
GLDVIKEFGGLHDFMAWNRSILTDSGGFQVWSLQELRKITEEGVKFKSPLDGSEIFLAPEDSIQTQLTLNADIIMAFDECTAYPSTLKEAKESMDLTHRWASRCKEYFNKNKKEHLLFGIVQGGMHLELREESLNFISKQDFDGIALGGLSVGEPKEEKTKILKHLAPLLPEDKPHYVMGVGTPEELVEGVRYGIDMFDCVIPTRNARNGFIYTSTGIVKIRNSEHKKSTKPIDENCDCYTCKNFSRAYLHHLDKANEILASTLMSICSLHTFNKLMQDMRSSLEENKFEEFVDSFYDMRDLKKPKL

SEQ ID NO: 119017 - protein, 310 aa, Unknown
  Bacterial polypetide isolated from the Sargasso Sea
MRFKIINEDNLARTGRISLKRGEIQTPAFMPVGTYGAVKSVTPEELSESSTDIILSNTFHLMLRPGVETIKKHGGLHKFMNWSGPILTDSGGFQVFSLEKKRKITKDGVHFQSPIDGANVFLSPELSIDVQHHLDSDIVMIFDECTKYPASKKEAKDSMELSIDWARRSKNTFLKLKRNQGEERADLFGIIQGGMYDDLRLESLETLHDIGFDGYAIGGLAVGESELERVSILENLIPHMKKDKPRYLMGVGFPADIAKSVQMGIDMFDCVIPTRHARNGHLFTSLGIINIRNSIYKDDTDKLDPICECY

SEQ ID NO: 119018 - protein, 369 aa, Unknown
  Bacterial polypetide isolated from the Sargasso Sea
MKFRIKTQTNSFRTGVIETDHGFIETPVFMPVGTVGAVKTISSDELEAIGSEIILGNTYHLYLRPGMDVISGAGGLHNFNSWQRPILTDSGGFQVFSLSNLNKITDDGVEFQSHLDGSRHLFTPESCMEIQRIIGADIIMAFDECPPGNSDKLVVKKAVERTTNWTRRCAKWINNNAEIYDHSQTLFPIIQGSIDKNLRRQSAEELVPLSKCGIAIGGLAVGEEKTAMFETIEFCDELLPKDQPRYLMGVGRPSDLIKGVLRGVDMFDCVMPTRNGRNGHIFTQNGVINIRNQKYKNDFSPLDSNSSHKWGQIYSKSYVRHLFNINEILGLRIASKLNLVFVLDLMNQIREKIKLNTFESWAREKLNLF

SEQ ID NO: 119019 - protein, 363 aa, Unknown
  Bacterial polypetide isolated from the Sargasso Sea
MKKFNWKVIKTSKDTRARLGIITTPHGKVETPAFIFCGTKGALKSCSTGEAKNHNTQIILSNTYHLMLQPGSDIISQHGGIHNFMNWQGPILTDSGGFQIFSLGHGSVADEIKRKNSNRKKSLLNISEEGALFKSFIDGRNHLLTPEKSIAIQRDIGADLILVFDECTPFHVDKSYTDLSMKRSHNWSIRSINSFLKSNKYLPMKGSSGSQKLYGIIQGGIYKDLRDESIEFNINSKFFFGLAIGGSLGSTKEEMHEIVDYTASRLGNMHPIHLLGIGDPEDIWKLVKSGVDTFDCVSPTRLARHGSALVKGKKGKINIKNNKFSENLSPIDKNCHCSTCKNYSLAYLHHLLKAEELIVFNYI

SEQ ID NO: 119020 - protein, 367 aa, Unknown
  Bacterial polypetide isolated from the Sargasso Sea
MSDFKILKTDGNARRGKLITSHGEINTPAFMPVGTAATVKGVFTKDLIETGSEILLGNTYHLMLRPGSELIKEFGGLHKFMNWDKPILTDSGGYQVFSLSKLRKISEEGVKFSSHIDGKEVMLTPESSMEIQTNLNSDIVMAFDECTAFPCTHDQAKNSMELSMRWAKRCKDYFIERNNNKLFGIVQGSVFEDLRKESVKALEAINFDGYAVGGLAVGESQAQMFEVLEFTSPHLPDDKPHYLMGVGKPDDILGSVARGIDMFDCVLPTRSGRNGQAFTRHGPINIRNAKYKNLDDPIDKNSDNPVCKNYSAGYIHHLFNAKEMLGGMLLSLHNIYFYQSLMADIRKSIEEDHFMSFSKEFLESYKS

SEQ ID NO: 119021 - protein, 348 aa, Unknown
  Bacterial polypetide isolated from the Sargasso Sea
MALKKFTFNVLKKDKFARLGKINTHRGSIDTPAFMPVGTQATIKGSFINDIIKTNSQIILSNTYHLMIRPGVKRIKKNGGLHKYMNCKLPILTDSGGYQIMSLSKLNKIDYEKGAIFNSHIDGSKFILSPEKSVKIQKDLNSDIVMVLDECPKKSLDYNLISKSVDLSTYWAKRSKKAFGINRHKALFGIVQGGLFKDLRLKSLKDLIKIGFDGYAVGGLAVGDTQTEMFKVLDILKNNLPQNKPRYLMGVGTPSDIMGSVKRGIDMFDCVLPTRSGRTGLAFTWNGRINIRNAKYKNDNKPLDSSITKFDLNKYSKNYINHLFNTNEMLGPMLLTLNNINFYQELHV

SEQ ID NO: 119022 - protein, 183 aa, Unknown
  Bacterial polypetide isolated from the Sargasso Sea
MALKKFKFNVIKNDNFSRLGIIKTHRGNINTPVFMPVGTQATVKAVFLDDLINTGSEIILSNTYHLMLRPGLERIKSIGGLHNFMNCPLPILTDSGGFQVMSLSKLNKVDKEKGVTFKSHIDGKEFILSPEESIRIQKGLNSDIVMVMDECPKKSNDYKSIKKSMELSTYWAARSKKAFGSIP

SEQ ID NO: 119023 - protein, 368 aa, Unknown
  Bacterial polypetide isolated from the Sargasso Sea
MKFTITATHGNARAAELTVNKKKIDTPAFMTIGTYGSVKSLDADDLKKCNVEIILSNAFHLMLRPGTSIITKSGGLHKYMNWDGLILTDSGGYQVFSLGKEVKVNKDGAEFRSPFDGNKVVMTPEISMDVQTKINTDIMMAFDECIKYPSDIYTTEKSMELSLNWAERSIKSNYLNKTLFGIVQGGMYQNLRDKSREELIAMNFDGYALGGLSVGEPPQLMHEIIEVNAPKLPVNKPRYVMGIGKPLDIAYAVRSGVDMFDCVIPTRNARNGHLFTSEGIKRIRNAKYKDDMSPIDKKCGCYTCQNYSISYIKHLDRCNEILAARLMTIHNVYFYQNLMRQLRTAIVNSSLDELINQLENDYEEVKND

SEQ ID NO: 119024 - protein, 304 aa, Unknown
  Bacterial polypetide isolated from the Sargasso Sea
MIRPGVDRISSAGGLHEFMNCSLPILTDSGGFQVMSLSKLNKIDREKGAIFQSHIDGKKYVLSPEESIKIQKSLNSDIVMVMDECPKKSNDHDKIKKSMELSLDWAQRSKNAFGLNPHKAIFGIVQGGIFDDLRNISLKKLTDIGFDGYAIGGLAVGDTQEEMFKVLDNLKNQLPINKPRYLMGVGTPSDILGAVKRGVDMFDCVLPTRSGRTGLAFTWNGRIQIRNSKNQSDNSPLDSNISKFNLNKYSKNYLHHLYNTNEMLASMILTLNNINFYQELMFEIRKNIKKGTFEQFYNKYFNLL

SEQ ID NO: 119025 - protein, 238 aa, Unknown
  Bacterial polypetide isolated from the Sargasso Sea
NSDIVMAFDECTNYPSSLDEAEESMNLTHRWTKRSVDYFNKNKNGHLLFGIVQGGMHNELRLKSLEFMNSMKLDGIALGGLSVGETKEEKTKVLKFLAPHLQIDKPHYVMGVGTPEEIVEGVRYGIDMFDCVMPTRNARNGFLYTSKGILKIRNSEHKNSTKPIDENCDSYTNRNFSRAYLHHLDKCNEILASTLMSIHNLSYFHKLMSDIRKSLEENKFEEFLDSFYDMRSLKKPKL

SEQ ID NO: 119026 - protein, 186 aa, Unknown
  Bacterial polypetide isolated from the Sargasso Sea
MSFKVLNKSSYARRGELVTKTSKIQTPVFMPVGTYGTVKGLTPEHLKDIGFEIILGNAFHLYLRPGLDVIKEFGGLHDFMAWNRSILTDSGGFQVWSLQELRKITEEGVKFKSPLDGSEIFLAPEDSIQTQLTLNADIIMAFDECTAYPSTLKEAKESMDLTHRWASRCKEYFNKIKKSIYYLASF

SEQ ID NO: 119027 - protein, 369 aa, Unknown
  Bacterial polypetide isolated from the Sargasso Sea
MIEYQVFHQDGNARAGKLDSPHGSILTPIFMPVGTLGTVKAATPEELKKLGTQILLGNTYHLHLRPGDELIRKLGGLHQFMNWDGPILTDSGGFQVFSLAKLLKCEEEGVIFRSHIDGREIKITPESSIGIQQNLGSTIMMCFDECLELPAKRERIQSSLELTTRWAKRCKDSQTSDQALFGIIQGGGEEDLREESLQQLLEIGFDGYAIGGLSVGERNEDMYRVTRHIAPLMPSDRPRYLMGVGEPRDLLEGVEAGVDMFDCVLPTRNARNGSLFTSRGKVSIKQARYREDPEPLDPDCICETCQHYSKAYLRHLYLSGEILGMRLNTLHNLHFFLNLMRNAREAILENRFSEFKKDFLEKYQQEGSM

SEQ ID NO: 119028 - protein, 357 aa, Unknown
  Bacterial polypetide isolated from the Sargasso Sea
DGYARLGKINTHRGPIDTPAFMPVGTQGTVKGTFIRDIEKTGSQIILSNTYHLMIRPGVKRVKKFGGLHKYINCRLPILTDSGGYQIMSLSRLNKIDKKKGAIFNSHIDGSKFILSPEESINIQKKLNSDIVMVLDECPKKNLNYKFIQKSVELSTHWAARSKKAFGINKHKALFGIVQGGLFKDLRLKSLNDLKKIGFDGYAIGGLAVGDTQDEMFNVLDYLKNHMPKDKPRYLMGVGTPSDILGAVKRGIDMFDCVLPTRSGRTGLAFTWNGRVHIRNAKYKNDKKPLDSSVKKFDLNKYSKDYLNHLFNTNEMLGSMILTLNNINFYQELMFEIRKNIKKGTFSKFYNKYSRKL

SEQ ID NO: 119029 - protein, 317 aa, Unknown
  Bacterial polypetide isolated from the Sargasso Sea
MKFSVLSEDKNSLARTGLIETDHSTIETPVFMPVGTHGVVKTLSPDDLNAMSVQIMLSNTYHLYLRPGTEIIHENEGLHKFLNWDKSILTDSGGYQVFSLSNMNEITSDGVNFRSHLDGSEHFFTPQKSMEVQRQLGSDIIMAFDYCPPADCSKKELRRASTLTEKWTEQAFKYLNDKTSIYGHNQTLFPIIQGGINPEERLKCLNQMLPYASCGIAIGGLSVGEKKEPMLDIVELLGKNMPVDQPRYLMGVGKPTDLVKAILRGVDMFDCVLPARNARNGQIFTHDGVINIMNSAYSNDTSPIDKHSSIEYAKTFS

SEQ ID NO: 119030 - protein, 270 aa, Unknown
  Bacterial polypetide isolated from the Sargasso Sea
MSLKKFTFDVIQEENSSRLGKIETHRGSINTPAFMPVGTQATIKSAFIEDIIKTGSEIILCNTYHLMIRPGAERIELAGGLHDFMNCKLPILTDSGGFQVMSLSKFNKIDREKGAIFQSHIDGKKFILSPEESIRIQKKLNSDIVMVMDECPKNSNDYKKIKESMKLSMYWAKRSKDEFGLNPHKALFGIVQGGLFDDLRIESLNELINIDFDGYALGGLAVGESQNEMFNVLDNIKKFLPKNKPRYLMGVGTPSDILGAVKRGIDMFDC

SEQ ID NO: 119031 - protein, 373 aa, Unknown
  Bacterial polypetide isolated from the Sargasso Sea
MLKTDGKARRGRLVFERGIVETPAFMPVGTYGTVKGMTPEELDATGAQICLGNTFHLMLRPGTEIIKKHGDLHDFMNWHKPILTDSGGFQVFSLGELRKIKEEGVTFRSPLNGEKIMLTPERSMEVQRDLGSDIVMIFDECTPYPATEQQAKKSMEMSLRWAKRSKDAHGDNPSALFGIIQGGMYPNLRDVSLQGLEEIGFDGYAIGGLSVGEPKEDMIKILNHTTGQMPQHKPRYLMGVGKPEDIVEAVRRGIDMFDCVMPTRNARNGHLFVSTGVIKIRNAKHKDDPSALDAECDCYTCKNYSRSYLHHLDRCNEILGARLNTMHNLHHYQKLMQGLRAAIAEQKLEEFVAEFYQKRGMEVPPLEASLTEQ

SEQ ID NO: 119032 - protein, 367 aa, Unknown
  Bacterial polypetide isolated from the Sargasso Sea
MSDFKILKTDGNARRGKLITSHGEINTPAFMPVGTAATVKGVFTKDLIETGSEILLGNTYHLMLRPGSELIKEFGGLHKFMNWDKPILTDSGGYQVFSLSKLRKISEEGVKFSSHIDGKEVMLTPESSMEIQTNLNSDIVMAFDECTAFPCTHDQAKNSMELSMRWAKRCKDYFIERNNNKLFGIVQGSVFEKLRKESVQALEDLNFDGYAVGGLAVGESQDQMFEVLEFTTPHLPDDKPHYLMGVGKPDDILGSVARGIDMFDCVLPTRSGRNGQAFTCHGPINIRNAKYKHLDDPIDKNSDNPVCKNYSAGYIHHLFNAKEMLGGMLLSLHNIYFYQKLMADIRKSIEEDSFISFSKKFLEIYKS

SEQ ID NO: 119033 - protein, 399 aa, Unknown
  Bacterial polypetide isolated from the Sargasso Sea
MKDFNWSIKNKSNNSNARTGVISTPHGEINTPAFIFCATKAALKSFTTKDAKENNSQIILSNTYHLMLQPGSELIAQHGGLHKFTGWNGPMLTDSGGFQIFSLGHGSVADEIKGRKINSKNKKTLINLNEEGALFKSYIDGSTHLLSPEKSIEVQRNLGADFILVFDECTPYNVDKTYTSDSMLRSHRWSLRSINTFNSKLNYKPKNGSAGRQEIYGIIQGGIYKDLREESIEFNKGKINTFGIAIGGSLGSNKDEMKDIVHFTSSKLDNSRPVHLLGIGDPRDIWDFVADGIDTFDCVSPTRIARHGSALVKGQQGKINLKNVKYKNNLNPIDNDCNCYTCKNFTLAYLYHLFSAQELLGLQLLTNHNIYFMNNLMKEIRRSIDNNDFDNAKKKWLNS

SEQ ID NO: 119034 - protein, 372 aa, Unknown
  Bacterial polypetide isolated from the Sargasso Sea
MSFKVLNKSNYARRGELVTKTSKIQTPVFMPVGTYGTVKGLTPEHLKEIGFEIILGNAFHLNLRPGLEVIKEFGGLHDFMAWDRSILTDSGGFQVWSLQELRKITEEGVRFKSPLDGSEIFLTPEDSIQTQLTLNADIIMTFDECTTYPSTLSQAKESMDLTHRWASRCKEYFNKRKKGHLLFGIVQGGMHHELREESLNFMSDQDFDGIALGGLSVGESKEEKTKILKHLAPLMPEDKPHYVMGVGTPEELVEGVRYGIDMFDCVIPTRNARNGFIYTSTGILKIRNSEHKKSTKPIDENCECYTCKNFSRAYLHHLDKANEILASTLMSICSLYTFNKLMQDMRSALEKNKFEEFVDSFYDMRDLKKPKL

SEQ ID NO: 119035 - protein, 270 aa, Unknown
  Bacterial polypetide isolated from the Sargasso Sea
MSLSKLNKIDRKKGAIFQSHIDGREYILSPEESIRVQKGLNSDILMVMDECPKKTNDYEKIKLSMNLSTEWALRSKNEFGTNPKKALFGIIQGGLFDDLRKYSLNELEKIGFSGYAVGGLAVGESQEEMFKVLDSIVPHMPKDKPRYLMGVGTPSDILGAVKRGIDMFDCVMPTRSGRTGLAFTWNGRINIRNSMYKSDNSPLDEKCSNLDLNKYSKNYLNHLFNTNEMLGSMLLTLHNINFYQELMGQIRHHIKNGSFSNFHDQYFNKI

SEQ ID NO: 119036 - protein, 248 aa, Unknown
  Bacterial polypetide isolated from the Sargasso Sea
LSPEKVIQIQMDLGSDVAMAFDHCPPHTANENDIEDSLKRTHSWLQKCVETHQKSNQALFGIVQGGKYPRLREYSAKYTSSFDLPGIAVGGVSVGEAVEEIHSVINYVPKFLPINKPRYLMGIGSLREISLAVANGFDIFDCVLPTRLGRHGTAFFNDERFNLRNARFKNDFSPIDKTCKCETCKSYSRAYLHHLVRNDEILGLTLISLHNIAHLIRFTNAISTAIRDNCFTNDFAPWKTSSIAHHTW

SEQ ID NO: 119037 - protein, 397 aa, Unknown
  Bacterial polypetide isolated from the Sargasso Sea
MTKFSWQITHQSKKHKARTGILTTPHGKINTPAFIFCATKGALKSSTTSTAKENNTQIILSNTYHLMLQPGSDLIANHGGLHKFLNWNKPMLTDSGGFQIFSLGHGSVADEIKGSSNIKRNKTLLSISEEGSLFKSYLDGSFKFLSPEKSIEIQRNLGADLILVFDECTPFHVDKSYTESSMRRSHRWATRSLNRFNSHIKFKPNFGSAGEQKLYSIVQGGIYEDLREESIDFNLNKIDTFGIAIGGSLGSSKEEMYKVVNFTAPRLGNNHPIHLLGIGDPKDIWHLVKNGIDTFDCVSPTRLARHGSALIKGKVGKKNIKNNEFSNDLSPIDNKCSCSTCKNYSLAYIHHLFKAGELLGLQLITAHNIYFMNELMELIRNSINNDSLDENEEEWFS

SEQ ID NO: 119038 - protein, 151 aa, Unknown
  Bacterial polypetide isolated from the Sargasso Sea
RLTILEHLAPQLPKTLPHYLMGVGKPEDIVEAVYYGIDMFDCVLPTRNARNGQLITSFGELNIRNAEHKNSSEPIDSDCACKVCKNYSRAYLHHLDKTKEILGSILSSYHNIFYYQTLMSQIREAIETESFAKFIKDFYNKRQKSVPEHLK

SEQ ID NO: 119039 - protein, 190 aa, Unknown
  Bacterial polypetide isolated from the Sargasso Sea
MFGIVQGGMYPELRLRSLEGLTDIGFDGYAVGGLSVGEPKGEMMAVLDGLAEHLPAEKPRYLMGVGTPADLLEGARRGIDMFDCVMPTRNARNGHLFTSTGVLKLRNAKYKTSTEPVDANCDCYTCENFSRGYLAHLDKCNEILGSQLATIHNLRFYQKHMAAIRQAIESGELDEFARKFYAAQAEEGLG

SEQ ID NO: 119040 - protein, 367 aa, Unknown
  Bacterial polypetide isolated from the Sargasso Sea
MTDFHITHEDGNARRGKLNTKNGVINTPAFMPVGTAATVKAIFTKDLYETNSEIILGNTYHLMLRPGSAQIREFGGLHKFMNWNKPILTDSGGYQVYSLSNLRKLSEEGVEFSSHIDGTKIFVSPEKSIEIQTDLNSDIVMAFDECTPYPAEYDEAKKSMELSMRWAGRCKEYFKDHNTNKLFGIVQGSTYEGLRHQSVSLLSDIGFDGYAVGGLAVGETQTQMFDVLDYTVSQLPIEKPHYLMGVGKPDDIIGSVARGIDMFDCVLPTRNGRNGQAFTKSGPINIRNAKYKSLDESIDPESNNPICRDYSAGYIHHLFNAKEMLGGMLLSLHNIYFYQEMMSNIRTSIENNEFEIFRADFLSKYLD

SEQ ID NO: 119041 - protein, 334 aa, Unknown
  Bacterial polypetide isolated from the Sargasso Sea
MALKKFAFNVLKKDKFARCGLIETHRGNIQTPAFMPVGTQATVKACTIDDIKKTGSEIILSNTYHLMIRPGVERIESAGGLHNFMNCDLPILTDSGGFQVMSLSKLNKIDREKGAIFNSHVDGKKFYLSPEESIRIQLGLNSDIVMIMDECPKKTNDYDVIQKSMDLSLNWAERSKVAFGNNPHKALFGIVQGGLFKDLRLKSLEELVKIGFDGYAIGGLAVGETQNEMFNVLDDIKEYLPIEKPHYLMGVGTPSDILGAVKRGIDMFDCVLPTRSGRTGLAFTWNGRVNIKNNKYQNDNTPLDPSCENLNLNKYSKNYLNHLFNTNEILASML

SEQ ID NO: 119042 - protein, 376 aa, Unknown
  Bacterial polypetide isolated from the Sargasso Sea
MRSNIYKLITKDGLARRGEVKTAHGKFQTPTFMPVGTYGAVKSLSPETLEVLQAEIILSNTYHLMERPGVEIIKSHGGLHRFMGWQGPILTDSGGYQVFSLSKKRTISEEGVKFFSPLNGDKNYLTPESCMQLQLDYGVDIAMVLDDCTPFPVSKETAKESMNLSLRWAKRCRSAFTSDKSSLFGIIQGGIFDDLREESLEGLMNIDFEGYAIGGLSVGEPKMEMQKVINNIVPKMPEDKPRYLMGVGTPLDIVRAVQLGVDMFDCVIPTRHARNGYLYTSKGIVKIRNSENKDNLAPIDDNCSCYTCTNFSRSYLHHLDKTKEMLGSTLNTIHNLHYYLNLMRNLRLSIEQGTLQTFIKEIEDTWNINDNPNIDN

SEQ ID NO: 119043 - protein, 317 aa, Unknown
  Bacterial polypetide isolated from the Sargasso Sea
NTYHLYLRPGTKIIRKIGGLHKFMKWDRPILTDSGGYQVYSLSNNRKIKEEGVNFQSHIDGSYHLFTPEKAIQIQSEIGADIIMAFDECIPYPLEYQKTKKSTDMTHRWLDRCIEENKKQKFKYNYQQYLFPIVQGGVYKDLRKLSAEYVAEKNLSGNAIGGLSVGEPIEDMYAMTELTCDILPKDKPRYLMGVGTPINILECIAKGVDMFDCVIPTRNGRNGTLYTSRGIINIKNKKWEDDFSPIDEFNYSFVNVDYSKAYLRHLFTVNEILGKQIATLHNLSFFMWLMEESRKHILEGDFNSWKNKMIKQMDQKN

SEQ ID NO: 119044 - protein, 139 aa, Unknown
  Bacterial polypetide isolated from the Sargasso Sea
MLQFELLKTDPSSHARRGQLTLNHGVVQTPIFMPVGTYGTVKGVMPRSLHDMGAQIILGNTFHLWMRPGLDVMQSFGGLHGFEKWDKPILTDSGGFQVWSLGAMRKITEEGVTFASPVNGDKLFMSPEVSMQIQTTLNS

SEQ ID NO: 119045 - protein, 370 aa, Unknown
  Bacterial polypetide isolated from the Sargasso Sea
MALKNFAFKVLKKDKYARSGVIETHRGNIDTPAFMPVGTQATVKACTIDDIKKTGSQIILSNTYHLMIRPGVDRIQSAGGLHEFMNCDLPILTDSGGFQVMSLSKLNKIDREKGAIFNSHVDGKKFYLSPEESIRIQLGLNSDIVMIMDECPKKTNDYNLIKKSMDLSLYWAERSKKSFGKNPHKALFGIVQGGLFKDLRLKSLKKLININFDGYALGGLAVGETQVEMFKVLDDVKEFLPDEKPHYLMGVGTPSDILGAVKRGIDMFDCVLPTRSGRTGLAFTWDGRINIKNNKYQNDNTPLNSNCTNLSLNKYSKNYLNHLFNTNEILASMLLSLHNINFYQELMSSIRDNIEAGTFDKFHDKYIDKL

SEQ ID NO: 119046 - protein, 132 aa, Unknown
  Bacterial polypetide isolated from the Sargasso Sea
MKFNISKTQGFARRGVMHFERGEIQTPAFMPVGTNGTVKALEIENILETGSEIILGNTFHLMLRPGDELIKDAGGLHKFINWSKPILTDSGGFQVWSLGEMAKISEEGVHFQSPYDGRKIELTPERSIEIQN

SEQ ID NO: 119047 - protein, 280 aa, Unknown
  Bacterial polypetide isolated from the Sargasso Sea
FSLAKLNDISDDGVHFQSHLDGSKHFLTPELSMKIQRNLGSDIIMAFDECPDGKADRILIDKAVRRSTLWFNRCNKYLNDNPPLYDWEQTLFPIIQGGIFPDLRKKSANELVSSSNCGIAIGGLAVGEEKKAMNDIVSLMDEILPNEQPRYLMGVGRPTDLVQSIKSGIDMFDCVLPTRNARNGQLFTSVGIINIGNNKHKESFEPIDPDCSCYTCKNFSRAYLRHLFNIKEMVAFRLATIHNLTYYMTLMKTIRKNIELGSFSKWADAFLSEMIKHKGM

SEQ ID NO: 119048 - protein, 370 aa, Unknown
  Bacterial polypetide isolated from the Sargasso Sea
MALKNFAFKVLKKDKFARSGVIETHRGNINTPAFMPVGTQATVKACTIDDIKKTGSQIILSNTYHLMIRPGVERIKSAGGIHKFMNCDLPILTDSGGFQVMSLSKLNKIDREKGAIFNSHVDGKKFYLSPEESIRVQLGLNSDIVMIMDECPKKTNDYDLIKKSMDLSLYWAERSKKAFGINRHKALFGIVQGGLFKDLRIKSLKELMNIGFDGYALGGLAVGETQQEMFSVLNDVKEYLPDNKPHYLMGVGTPSDILGAVKRGIDMFDCVLPTRSGRTGLAFTWEGRINIKNNKYQNDNTPLDSNCDNLTLNKYSKNYLNHLFNTNEILASMLLTLHNINFYQELMSSIRDNIESGTFDKFHDKYIDKL

SEQ ID NO: 119049 - protein, 347 aa, Unknown
  Bacterial polypetide isolated from the Sargasso Sea
MKPGFAFQLDATNGDARAGMLATPHGTVPTPLFMPVGTMAAVKGVEVDRVRETGAKMVLGNTYHLHLRPGEAIVSEGGGLAKFMGWGGPTLTDSGGFQVFSLAQQVHVTDEGAFFRSHVDGAAVALTPEASMEIQQRLGADIVMQLDHVVPLPNDRDIVADAMRRSLQWAQRCQDAHDRPDQVLFAIVQGGLDLGLRRESAEQLGEMGFHGYAVGGLSVGEGAEAMDMTLRGTLPHLPINRPRYLMGVGQPRDIIEAVAAGIDMFDCVLPTRCGRTGLAYTFEGLVRIKNAQYAREKKPLEEGCPCVACRHSVSYLRHLFLANEMLGPILTSIHNLTFYQRLVGRLR

SEQ ID NO: 119050 - protein, 165 aa, Unknown
  Bacterial polypetide isolated from the Sargasso Sea
AIGGLSVGEPKEEMEKVVDFITPKMPEDKPRYLMGVGTPLDIVKAVRSGVDMFDCVIPTRHARNGYLYTSKGIVKIRNSEHKNSLEPLDEACSCYTCSNFTRSYLHHLDKTKEMLGSTLQTIHNLHFYLSLMRNLRLSIETGTLQTFISEIEDTWNNFDKPNIVK

SEQ ID NO: 119051 - protein, 320 aa, Unknown
  Bacterial polypetide isolated from the Sargasso Sea
MVGIHNFMNWQGPILTDSGGFQIFSLGHGSVADEIKRKNSNSKKSLLNISEEGALFKSFIDGRNHLLTPEKSIAIQRDIGADLILVFDECTPFHVDKFYTDQSMRRSHNWSIRSINSFLKSNKYLPMKGSSGSQKLYGIIQGGIYKDLRDESIEFNINSKIFFGLAIGGSLGSTKEEMYEIVDYTASRLGNMHPIHLLGIGDPEDIWKLVKSGVDTFDCVSPTRLARHGSALVKNKKGKINIKNNKFSENLNPIDKNCHCSTCQNYSLSYLHHLLKAEELIVLNYITTHNIYFMNSLMKYIRESIKEDKILEAEKNWYSD

SEQ ID NO: 119052 - protein, 354 aa, Unknown
  Bacterial polypetide isolated from the Sargasso Sea
MALKDFAFSVLNKDKYARHGLIETHRGNIKTPAFMPVGTQATVKACTINDIIKTGSEIILGNTYHLMIRPGVDRIQKAGGLHKFMNCDLPILTDSGGFQVMSLSKLNKIDREKGAIFNSHVDGKKFYLSPEESIKIQLGLNSDIVMVMDECPKKTDDYKLIKKSMELSLYWAKRSKTAFGKNPHKALFGIIQGGLFKDLRLKSLHELEKINFDGYAIGGLAVGETQKEMFTVLDNIKDYLPNNKPHYLMGVGTPSDILGAVKRGIDMFDCVMPTRSGRTGLAFTWDGRINIKNNKYKDDNTPLDDNCRNLNLNKYSKNYLNHLFNTNEILGSMILTLHNLNFYQELMTAIRKNI

SEQ ID NO: 119053 - protein, 321 aa, Unknown
  Bacterial polypetide isolated from the Sargasso Sea
MGNTYHLYLRPGHEIIHSAKGLHSFMNWDKSILTDSGGYQIFSLAKLNNISDEGVEFQSHIDGSSHFLSPELSMDIQRHLGSDIIMAFDECPAANVDKSIISKSVDRTFKWTEKCYKYLKENDPIYSWNQTLFPIIQGGTFKSERRKSAELLIPFADCGVAIGGLAVGEDKSSMFDTIALLDELLPKDQPRYLMGVGRPTDLIKAIQLGVDMFDCVLPTRNARNGQLFTSDGIINIENSKYKNSFDPLDVNCNCYTCLNFSRSYLRHLFNIKEVLGLRLATIHNLTYYNNLMATVRKKIKSEEFNNWSQSYLNSMADHENM

SEQ ID NO: 119054 - protein, 222 aa, Unknown
  Bacterial polypetide isolated from the Sargasso Sea
MKFKVNNTSENAREAEIHTERGVIKTPAFMPVGTNGTVKGLTIDDLNETHSQIILGNTFHLMLRPGDKLIKELGGLHKFINWEKPILTDSGGFQVWSLGELNKISEEGVKFSSPYDGKKIFMTPEDSIMIQENLGSDIVMAFDECTDYPSTYNEAKKSMELSMRWAKRCKEAHKSKSALFGIVQGGMYKDLREESLNKLIDIDFDGIALGGLSVGESKQEKN

SEQ ID NO: 119055 - protein, 206 aa, Unknown
  Bacterial polypetide isolated from the Sargasso Sea
MNLSLYWAERSKKAFGQNPHKALFGIVQGGLFKDLRIKSLNELIKIGFDGYAMGGLAVGESQSEMFKVLDDIKEHLPNDRPHYLMGVGTPSDLIGAVKRGIDMFDCVLPTRSGRTGLAFTWDGRINIKNNKYQNDNTPLDSNCNNLNLNKYSKNYLNHLFNTNEMLASMLLTLHNINFYQELMQAIRKNISEGTFDQFHDKYIEKL

SEQ ID NO: 119056 - protein, 270 aa, Unknown
  Bacterial polypetide isolated from the Sargasso Sea
SLAESRKITEEGVHFRSPIDGKQIFLGPEEAIKMQHVLGAEIIMVFDDCTPYPCSEEKARESMELSLRWAERSKRAHEGNTNALFGIIQGGMYPKLREDSLSGLCEINFDGYAVGGLSVGEPAELMMEILDNLISKMPENKPRYLMGVGTPENLVEAVCRGVDMFDCVMPTRNARNGHLFTEFGDIRINNACYRFDELPLDENCACYTCKNYSRAYLHHLSKTNEILGARLNTKHNLHYYQYLMSQLRLAIEEEHLVEFVSDFYLKRGGG

SEQ ID NO: 119057 - protein, 374 aa, Unknown
  Bacterial polypetide isolated from the Sargasso Sea
MKFELDTTDGRARRGRLIFERGTVETPAFMPVGTYGTVKGMTPEEVRATGADILLGNTFHLWLRPGEEIMRKHGDLHDFMNWQRPILTDSGGFQVFSLGDIRKITEEGVHFRSPINGEKIFLDPEKSMQIQHALGSDVVMIFDECTPYPATEDEARKSMQMSLRWAKRSRDEFDRLENPNSLFGIIQGSVYEDLRDESLKGLVEIGFDGYAVGGLAVGEPKEDMHRILEHVCPQIPADKPRYLMGVGKPEDLVEGVRRGIDMFDCVMPTRNARNGHLFTSEGVIKIRNARHRDDTSPLDPKCDCYTCKNYSRAYLYHLDRCNEILGARLNTIHNLRYYQMLMEGLRGAIETGTLDAFVKDFYTSQGREVPELVD

SEQ ID NO: 119058 - protein, 169 aa, Unknown
  Bacterial polypetide isolated from the Sargasso Sea
MSLKKLIDIEFDGYAIGGLAVGETQKEMFDVLDGIKDNLPIDKPRYLMGVGTPSDILGAVKRGIDMFDCVLPTRSGRTGLAFTWNGRVQIRNSENKTDNTPLDSNVTRFDLNKYSKNYLNHLHNTNEILSSMILSLNNINFYQELMYEIRKNIKMGTFDQFHDKYINIL

SEQ ID NO: 119059 - protein, 305 aa, Unknown
  Bacterial polypetide isolated from the Sargasso Sea
LMIRPGVNRISKIGGLHKFMNCKLPILTDSGGFQVMSLSKLNKVDREKGAIFRSHIDGKKFVLSPEESIKIQKKLNSDIIMVMDECPKKTTNYELIEKSMNLSTYWAKRSKKAFGKNTHKALFGIVQGGLFKDLRIKSLNELLKIEFDGYAIGGLAVGETQKEMFDVLDGLKEFMPHDKPRYLMGVGTPSDILGAVKRGIDMFDCVLPTRSGRTGLAFTWNGRVNIRNAKYKKDNNPLDLKCTNKNLLKYSRNYINHLFNTNEILGSMILTLHNVNFYQELMKEIRKNIKKGTFDKFYNYYSKKL

SEQ ID NO: 119060 - protein, 330 aa, Unknown
  Bacterial polypetide isolated from the Sargasso Sea
TVKGVFTDDILKTNSQIILGNTYHLLLRPGVDILKKFGGLHNFMNWQKPILTDSGGYQIMSLSKLNKIDMKIGAIFKSHIDGKKIILSPEKSIKVQKSINSDIVMVLDECPKLTSDKKTISRAIKVSTNWAKRSKIEFGGNKTKALFGIVQGGLFKDLRIQSIEDLKDIGFDGYAMGGLAVGEKQSDMFNILNETTDFLPKDKPRYLMGVGTPADILGAVKYGIDMFDCVMPTRSGRTGLAFTWEGKLNIKNSKFRSDYTPLNEDCDIKQLNKYSKSYLNHLIKSDEMLASMLISLNNIYFYQQFMREIRTNIKNGTFREFYKKYIRFFD

SEQ ID NO: 119061 - protein, 397 aa, Unknown
  Bacterial polypetide isolated from the Sargasso Sea
MKKFNWKVIKKSKDTRARVGLITTPHGEVETPAFIFCGTKGALKSCSTVEAKNNNTQIILSNTYHLMLQPGSNIVAKHGGIHNFMNWQGPVLTDSGGFQIFSLGYGSVADEIKRKNANRNKSLLNISEEGALFKSFIDGRNHLLTPEKSIAIQRDIGADIILVFDECTPFHVDKSYTDQSMKRSHNWSIRSINSFQKRNKYLPMKGSSGSQKLYGIIQGGIYKDLREESIEFNINSKIFFGLAIGGSLGSTKDEMHEIVDYTASRLGKIHPIHLLGIGDPADIWKLVKSGVDTFDCVSPTRLARHGSALVKSKKGKINIKNNKFRENLSPIDKNCHCSTCKNYSLAYLHHLLKAEELIVLNYITTHNIYFMNSLMKYIRKSIKEDNIFEAEKNWYLD

SEQ ID NO: 119062 - protein, 367 aa, Unknown
  Bacterial polypetide isolated from the Sargasso Sea
RAGSFTTPHGSVSTPAFMPVGTAGTVKSLIMEEVKELGAQVVLANTYHLYLRPGQDLVRQLGGLHDFMRWDGPILTDSGGYQVFSLKGMRKVHDDGVDFQSHVDGSRHVFTPESVMDIQRALGADIVMAFDECPPGGCDRQTAEQANRRTLEWLGRCRARFDELEKVGEFPEQSLFPVLQGNVFDDLRKEHADQFMSLNDWDGFGIGGLSVGESKPDMWRTLELLDDVLPKERPRYLMGVGYPDDLLEAIKRGCDLFDCVAPTRNARHGTAWTSLEGQINLKAARFRSDTRPIDTECDCYTCARYDRAYLRHLVVSGEWLPLRLISIHNLRFLVRLGEEARRRVIDGSFDHWHRDWLERYKKEGKAS

SEQ ID NO: 119063 - protein, 371 aa, Unknown
  Bacterial polypetide isolated from the Sargasso Sea
MNSKKNFFELIKTDNQARLGKIKTLKGTIDTPAFMPVGTQGTVKGIFVDDILKTNTQIILGNTYHLFLRPGLDILKNVGGLHNFMNWHKPILTDSGGFQIMSLSKFRKIDKNVGAIFSSHLDGKKIILSPEKSIQIQKVINSDILMVLDECPKLTNDKKVIANAIDISTNWAKRCKVEFNNAKNKFLFGIVQGGLFNDLRNESLEKLLEINFDGFALGGLAVGEKQDEMFKVLNGITKKMPNDKPRYLMGVGTPSDILGAVKSGIDMFDCVIPTRSGRTALAFTWGGKINLRNAKYKNDKSPLDENTKLRDLNKYSKSYLNHLTNTNEILASMLVSLHNINFYQEFMREIRTKIKEGTFSAFYKKYIGMYK

SEQ ID NO: 119064 - protein, 366 aa, Unknown
  Bacterial polypetide isolated from the Sargasso Sea
MKFSIKKKYKNARSGYLELKNGNVQTPTFMTIGTYGSVKSLSSEDLLRCGCEILLCNAYHLMLRPGLDVIVRGGHLHKFMNWDKPILTDSGGYQVFSLGKNVKVNKDAAIFKSPYNGDEIIMTPEKSIKTQIALGSDIMMIFDECTPYPVDKDKANESMRLSLDWAELSKKANDSQSPLFGIVQGGMYKDLREESMKNLNKLDLDGYALGGLSVGEPSKIRNEIVSHMAPKMPSDRPRYLMGIGKPLDIIYAVQSGIDMFDCVIPTRNGRNGQIFTFKGPINIRNSIYENDFDPIDKDCKCFTCQNYSRAYIKHLDKCNDGLAGRLISIHNVYFYQELMRKIRNSIISYTLDELIKEIEFYYSEVE

SEQ ID NO: 119065 - protein, 278 aa, Unknown
  Bacterial polypetide isolated from the Sargasso Sea
MALKKFNFNVNFTENYSRVGVIETSRGNINTPAFMPVGTQATIKGAFIEDIIKTGTEIILSNTYHLMIRPGVKRISDAGGLHKFMNCKLPILTDSGGFQVMSLSKLNKIDREKGAIFQSHIDGKKFILSPEESIRIQKGLNSDIVMVMDECPKKSLDYSQIKKSMDISMEWAERSKKAFGINPQKAIFGIVQGGLFNDLRNKSLETLTNIGFDGYAIGGLAVGDTQEEMFNILDKLKKNLPNDKPRYLMGVGTPSDILGAVKRGIDMFDCVLPTRSGR

SEQ ID NO: 119066 - protein, 349 aa, Unknown
  Bacterial polypetide isolated from the Sargasso Sea
MSFKVLNKSSYARRGELVTKTSKIQTPVFMPVGTYGTVKGLTPEHLKDIGFEIILGNAFHLYLRPGLEVIKEFGGLHDFMAWDRSILTDSGGFQVWSLQELRKITEEGVKFKSPLDGSEIFLTPEDSIQTQLTLNADIIMAFDECTAYPSTLKEAKESMDLTHRWASRCKEYFNKNKKEHLLFGIVQGGMHLELREESLNFMSKQDFDGIALGGLSVGEPKEEKTKILKHLAPLLPEDKPHYVMGVGTPEELVEGVRYGIDMFDCVIPTRNARNGFIYTSTGIVKIRNSEHKKSTKPIDENCDCYTCKNFSRAYLHHLDKANEILASTLMSICSLHTFNKLMQDMRSSL

SEQ ID NO: 119067 - protein, 371 aa, Unknown
  Bacterial polypetide isolated from the Sargasso Sea
MKFKTKNTANFARASEIQLSRGSINTPAFMPVGTNGTVKGLTVEDLNETGSEVILGNTFHLMLRPGDKLIKNFGGLHKFINWDKPILTDSGGFQVWSLGDLAKISEDGVKFSSPYDGKKIFMRPEDSIFIQENLGSDIIMVFDECTDYPSTYEEAKKSMELSMRWAKRCKEAHKSKSALFGIVQGGMFKDLREESLNKLIEIDFDGIALGGLSVGESKQEKTEILEFMCDKLPENKPRYLMGVGTPEDIVEAVRYGIDMFDCVLPTRNARNGQLFTSEGVINIRNAEYKDCDEPIDVNCNNKVSQNYSRAYLNHLHRTNEMLGAMLATYHNISYYQSLMNDIRSAIKDNLFAKFIKDFYNKRNLDMPDGPI

SEQ ID NO: 119068 - protein, 361 aa, Unknown
  Bacterial polypetide isolated from the Sargasso Sea
MSNLNFKILAKENKSRTGEITINNKTIKTPGFMPVATRGAIKSTPHTFLDNTDVLLANTYHLYLRPGVDVINELGGIHKFMSWDKVILTDSGGFQAWSLPTKIDNEGVVFKNIYDGSSFKMTPEISIKSQNKIGSDIAMIFDCLIDIKDSKEKQINSINLTRDWGSITKSFHKNKDQALFGIVQGGLHKDLRELSTKYMVDQEYDGYALGGLAIGETNIERKNIVKFTSELLPDDKPKYVMGLGDMHGLVDLIEEGIDLFDCVWPARLARHGKLIVGNTYINIKNKQYENDPEPISNVCTCFTCQNYSKAFLRHLIHNENTTAWLYLTIHNLIQTEIILDEARKSILESTFSTFRKQFEYE

SEQ ID NO: 119069 - protein, 362 aa, Unknown
  Bacterial polypetide isolated from the Sargasso Sea
MALKKFAFNVLKKDKFARCGLIETHRGNIHTPAFMPVGTQATVKACTIDDIKKTGSEIILSNTYHLMIRPGVERIKSAGGLHEFMNCDLPILTDSGGFQVMSLSKLNKIDREKGAIFNSHVDGKKFYLSPEESIRIQLGLNSDILMIMDECPKKTNDYNVIKKSMDLSLYWAERSKVAFGNNPHKALFGIVQGGLFKDLRLKSLQELIRIGFDGYALGGLAVGETQNEMFNVLDDIKENLPIEKPHYLMGVGTPSDILGAVKRGIDMFDCVLPTRSGRTGLAFTWQGRINIKNNKYQNDNTPLDPNCKNLNLNKYSKNYLNHLFNTNEILALMLLTLNNINFYPELMTSIRKILMKALLIIS

SEQ ID NO: 119070 - protein, 93 aa, Unknown
  Bacterial polypetide isolated from the Sargasso Sea
MTKKFSYSLTAVDGKARCGIISTPRGKIRTPAFMPVGTAATVKAMLPESVRSTGADILLGNTYHLMLRPTAERISELGGLHKFMNWELPILTD

SEQ ID NO: 119071 - protein, 371 aa, Unknown
  Bacterial polypetide isolated from the Sargasso Sea
MKYKVNNTSENAREAEIHTERGVIQTPAFMPVGTNGTVKGLTIDDLNETHSQIILGNTFHLMLRPGDKLIKELGGLHKFINWEKPILTDSGGFQVWSLGELNKISEEGVKFSSPYDGKKIFMTPEDSIMIQENLGSDIVMAFDECTDYPSTYDEAKQSMELSMRWAKRCKDAHKSKSALFGIVQGGMYTDLREESLRRLIDIDFDGIALGGLSVGESKQEKTKILEFMSNKLPEDKPRYLMGVGTPEDIVEAVRYGIDMFDCVLPTRNARNGQLFTSEGVINIRNAEYKNSDDPIDKNCDSKVSLNYSRAYLNHLQRTNEMLGSMLASYHNIYYYQSLMREIRDSIKDNLFAKFVKDFYNKRNLDMPEGPL

SEQ ID NO: 119072 - protein, 362 aa, Unknown
  Bacterial polypetide isolated from the Sargasso Sea
MSLKDFNFNVHHTQNYARVGIIETHRGNINTPAFMPVGTQATVKGVFLDDIKKTGSEIILSNTYHLMIRPGVERIESAGGLHEFMNCDLPILTDSGGFQVMSLSKLNKIDRDKGAIFQSHIDGKTFILSPEESIRIQKGLNSDIVMVMDECPKNTKDYDKIKKSMELSSEWAKRSKDAFGINDHKGLFGIVQGGLFNDLRIKSLNNLIDIGFNGYALGGLAVGETQDEMFDVLDGIKDHMPKDKPRYLMGVGTPSDILGAVKRGVDMFDCVMPTRSGRTGLAFTWKGQIQIRNSKYKNDNTPLDKNVTKFNLNKYSKNYLNHLFNTNEMLASMILTLNNINFYQDLMKNIRDNIKQGTFDEF

SEQ ID NO: 119073 - protein, 93 aa, Unknown
  Bacterial polypetide isolated from the Sargasso Sea
MKFSLKKTDPNSNARTGTLYTGHGEIETPVFMPVGTVGAVKTFAPEELKDINSQIILGNTYHLYLRPGTPIIERAGGLHSFISWDKPILTDSG

SEQ ID NO: 119074 - protein, 143 aa, Unknown
  Bacterial polypetide isolated from the Sargasso Sea
MKFSIKKTDTYSKARTGTLTTGHGKIKTPVFMPVGTVGAVKTFSPEELKGINSQIILGNTYHLYLRPGTPTINKAGGLHSFLSWDRPILTDSGGFQVFSLAKLNKISNNGVEFQSHLDGSKHMFTPEISMEIQRDLGSRYYYV

SEQ ID NO: 119075 - protein, 228 aa, Unknown
  Bacterial polypetide isolated from the Sargasso Sea
MKFKVKNSSEFARVSEIHTSRGVIHTPAFMPVGTNGTVKGLTTNDLNETNSEIILGNTFHLMLRPGDKLIKNLGGLHKFINWNKPILTDSGGFQVWSLGDLAKISEEGVKFSSPYDGKKIFMTPEDSIMIQENLGSDIIMVFDECTDYPSDYEQAKQSMELSMRWAKRCKIAHKSKSALFGIVQGGMYKDLREVSLNKLIDLDFNGIALGGLSVGESKQEKTEILKFM

SEQ ID NO: 119076 - protein, 377 aa, Unknown
  Bacterial polypetide isolated from the Sargasso Sea
MKFSITNSDSNTAARTGAIETDHGIIHTPVFMPVGTVGAVKTFSPHELEGLGAEIILGNTYHLYLRPGTEIIHKAGGLHNFSNWSRPMLTDSGGFQVFSLARLNKISDSGVQFQSHLDGSHHNFTPEVSMKIQRALGADIIMAFDHCPSAEANQKEIENAVSRTTQWFKQCKNYLDDNLSLYDHSQSLFPIIQGGVDHDLRQRSIEELAGYSDCGIAIGGLAVGEEKGAMFDTIEFCNGLLPKAEPRYLMGVGKPTDIVKSIRLGVDMFDCVMPTRNGRNGQIFTSRGTINISNERYKNDHSLVDDKSEHAFGRMFSKAYLRHLFNVKEILGLRIASTLNLSYYISLIKTIRETIDSGEFDRWSSSWLSEMENQRGM

SEQ ID NO: 119077 - protein, 170 aa, Unknown
  Bacterial polypetide isolated from the Sargasso Sea
MNFSLISSDINNSARLGKISTDHSTFETPVFMPIGTSGAIKTIDPDFLHDLEISIILGNTYHLYLRPGHEIIHSAKGLHSFMNWNKSILTDSGGYQIFSLAKLNSISDEGVEFQSHIDGSSHFLSPELSMDIQRHLGSDIIMAFDECPAANVDKSIISKSVDRTFKWTEK

SEQ ID NO: 119078 - protein, 370 aa, Unknown
  Bacterial polypetide isolated from the Sargasso Sea
MQFELLKTEGRARRGRLVFERGVVETPAFMPVGTYGTVKGMTPEELKDSGAHICLGNTFHLMLRPGTGIIRQHGDLHDFMNWDKPILTDSGGFQVFSLGDLRKITEEGVTFRSPINGEKILLTPEKSMEVQRDLGSDIVMIFDECTPYPATEQEARVSMEMSLRWAKRSKEAHGDNPAALFGIIQGGMYEGLRDVSLAGLEAIGFDGYAIGGLSVGEPKEDMIRIIDHTAPKIPEDKPRYLMGVGKPEDLVESVRRGIDMFDCVMPTRNARNGHLFVTEGVVKIRNAKHRNDTSPLDENCDCYTCKNYSRSYLHHLDKCNEILGARLNTIHNLRYYQRVMQGLRDAIDAGTLDEFVQEFYEQKGLPVPAL

SEQ ID NO: 119079 - protein, 251 aa, Unknown
  Bacterial polypetide isolated from the Sargasso Sea
NPEKCMELQQSYGVDIAMVLDECTPYPAEISVAEKSMQLSLRWAERSRNAFNSNKSSLFGIIQGGIYGDLREQSLEGLKKMDFEGYAIGGLSVGEPKEDLRQITNLIAPKMPADKPRYLMGVGTPLDIIKAVESGVDMFDCVIPTRHARNGYLYTSEGVVKIRNAANKHSVEPIDKECDCYTCRNFSRSYLHHLDKTNEMLGSTLQTIHNLTFYINLMRNLRVSIEKGKLQSFIKRFEETWNNSDNPNINI

SEQ ID NO: 119080 - protein, 186 aa, Unknown
  Bacterial polypetide isolated from the Sargasso Sea
MKFSITSSDEISSARSGIIETQNSVIKTPVFMPIATQGSVKTIDPEVLYHLNSQIILGNTYHLYLRPGYEIIHKSGGLHSFMNWGNSILTDSGGFQVFSLAKLNDISDDGVHFQSHLDGSKHFLTPELSMEIQRNLGSDIIMAFDECPDGKADRILIDKAVARSTLWFNRCKKYLNDNAPLYDWEQ

SEQ ID NO: 119081 - protein, 219 aa, Unknown
  Bacterial polypetide isolated from the Sargasso Sea
MALKNFAFKVLDKDKFARRGVIETHRGVINTPAFMPVGTQATVKACTIEDIKKTGSQIILSNTYHLMIRPGVERIQTAGGLHNFMNCDLPILTDSGGFQVMSLSKLNKVDREKGAIFSSHVDGKKFFLSPEESIRIQLGLNSDIVMIMDECPRKSDDYNLIKRSMDLSLYWAKRSKKAFGLNPHKGIFGIVQGGLFNDLRKQSLNELIKIDFDGYAMGG

SEQ ID NO: 119082 - protein, 377 aa, Unknown
  Bacterial polypetide isolated from the Sargasso Sea
MKFSIISFNNTSSARNGLITTDHSEIETPVFMPIGTNGVIKTILPKELYDINTNIVLSNTYHLFLRPGHKLIAQGGGLHQFMNWDKSILTDSGGFQVYSLAKLNNISDEGVKFQSHIDGSSQFISPEISMEIQQSLGSDIIMAFDVCPAGGEDKKVIDNAVEQTNKWIRRCKSYLENNKSIYNWNQCLFPIVQGGVYPDLRIKSVNQLISYSTCGMAIGGLAVGEEKNAMFDIISMMDEILPKDQPRYLMGVGRPTDLVRSISLGIDMFDCVLPTRNGRNGQLFTSEGVINIENSRFTDDFNSVDEECNCTLCNNYTRSYLRHLFNINEMLGLRLASMHNITFYMRLMETIRNEISKNSFDKWSKQFLNKHLNDQRM

SEQ ID NO: 119083 - protein, 347 aa, Unknown
  Bacterial polypetide isolated from the Sargasso Sea
RGNIKTPAFMPIATQGAVKFTPIEFIEQIGYELTLSNTYHLLLRPGLERLSSVDGISEFMGWNKPVLTDSGGFQVMSLSKLRKISEEGVKFQSHIDGASHFLTPENVIDYQNIIKSDIQMVLDECIQYPESYENVKKSMELSLRWAERSRKHYNKNKSKIYGAQFGIIQGGVFKDLRETSISETVNFDFEGYAIGGLAVGEGHEKMIEVVDYTAPQLPEDKVRYLMGVGKPNDIIEAVYRGVDIFDCVIPTREGRHGIAYIGSSSINLKNSKFESDLTPLDEGSDYFVSKKYSKSYLNHLLKIKDPLGPMLISLHNLNYYFNLMANLGASIEEGRLDIFREDFYKDN

SEQ ID NO: 119084 - protein, 322 aa, Unknown
  Bacterial polypetide isolated from the Sargasso Sea
MKFSVLSEDNHSLARTGLIETEHSKIETPVFMPVGTHGVVKTLSPDDLNNLNVNIMLSNTYHLYLRPGTDIIHKNNGLHKFLNWNKSILTDSGGYQVFSLSNMNEIANDGVKFRSHLDGSEHLFTPEKSMEVQRQLGSDIIMAFDYCPPADCSSKELKRASFLTEKWTRIAYEYLSDKKGIYGHEQTLFPIIQGGINPDERIKCLEQMLPFAECGIAIGGLSVGEKKEPMLDIVELLGGKMPKDQPRYLMGVGKPTDLVKSILRGVDMFDCVLPARNARNGQIFTHEGVINIMNSNYKNDTSPIDKYSSIEFAQIFSKSYLR

SEQ ID NO: 119085 - protein, 193 aa, Unknown
  Bacterial polypetide isolated from the Sargasso Sea
FGIIQGGIYKDLREESLDILKKIEFEGYAIGGLSVGEPKDDLQGITSHIAPLMPENKPRYLMGVGTPLDIVKAVESGIDMFDCVIPTRHARNGYLYTSEGIVKIRNSIHKNSLEKLDPNCDCYTCSNFSRSYLHHLDKTKEMLGSTLLTIHNLYFYLNLMRNLRVAIETGTLQSFVKEFEITWNNTSNPNIDI

SEQ ID NO: 119086 - protein, 281 aa, Unknown
  Bacterial polypetide isolated from the Sargasso Sea
DSGGYQVFSLAKLNNISDKGVEFKNPRDGSHVFLSPEKVIQIQMDLGSDVAMAFDHCPPHTANENDIEDSLQRTHSWLQKCVETHQKSNQALFGIVQGGKYPRLREYSAKYTSSFDLPGIAVGGVSVGEAVEEIHSVINYVPKFLPINKPRYLMGIGSLKEISLAVANGFDIFDCVLPTRLGRHGTAFFNDERLNLRNARFKNDFSPIDKTCKCETCKSYSRAYLHHLIRNDEILGLTLISLHNIAHLIRFTNAISTAIRDNCFTNDFAPWKTSSIAHHTW

SEQ ID NO: 119087 - protein, 238 aa, Unknown
  Bacterial polypetide isolated from the Sargasso Sea
GEINTPAFMPVGTQATVKGVFIDDIIKTGSEIILSNTYHLMIRPGPERIEAVGGLHKFMNCKLPILTDSGGYQVMSLSKFNKIDRDKGAIFQSHIDGKTFILSPEESIKIQKKLNSDIVMVMDECPKNTNDYNVIKTSMDLSTEWAKRSKEEFGTNPQKALFGIVQGGLFKDLRNESLNKLIDIEFDGYAIGGLAVGETQKEMFNVLDGIKDNLPIDKPRYLMGVGTPSDILGAVKGV

SEQ ID NO: 119088 - protein, 310 aa, Unknown
  Bacterial polypetide isolated from the Sargasso Sea
RPGDEIIKQLGGLHNFCNWQKPILTDSGGFQVWSLGDLAKVSEKGVSFKSPYDGKNIFMSPEDSIQIQENLGSDIVMVFDECTNYPSNKKEAQKSMELSARWAARSKEAHKSESALFGIVQGGMYEDLREESLNLTLACEFDGIAIGGLSVGEPKEEKTKVLKHLSNILPEDKPRYLMGVGKPEDIVEAVFYGVEMFDCVLPTRNARNGQLITSTGVINIRNAKYKNDDSPIDENLDSKVCKNYSKAYLHHLDKTNEMLGSMLASYHNIYYYHELMKQIRQSIDDDIFVNFAKDFYNSRNLPIPDYLEGL

SEQ ID NO: 119089 - protein, 341 aa, Unknown
  Bacterial polypetide isolated from the Sargasso Sea
GTVKATTPEELKKLGTQILLGNTYHLHLRPGDELIQKLGGLHQFMNWEGPILTDSGGFQVFSLAKLLKREEEGVIFRSHIDGREIKITPESSIIIQQNLGSTIMMCFDECLELPAKRERIQSSLELTTRWAKRCKESRTSDQALFGIIQGGGEEDLREESLQQLLEIGFDGYAIGGLSVGESNEDMYRVTRHIAPQMPLECPRYLMGVGEPRDLLEGVEAGVDMFDCVLPTRNARNGSLFTSRGKVSIKQARYREDPEPLDSDCHCETCQHYSRAYLRHLYLSGEILGMRLNTLHNLHFFLNLMRKAREAILENRFSQFKKDFLEQYQHKESIELKKAESG

SEQ ID NO: 119090 - protein, 343 aa, Unknown
  Bacterial polypetide isolated from the Sargasso Sea
KINTPAFMPVGTQATVKATFINDIIKTGSEIILGNTYHLMLRPGTERIQAAGGLHQFMNCKLPILTDSGGFQVMSLSKLNKIDKEKGAIFKSHIDGKEFILSPEESIKVQKDLNSDIVMVMDECPKKSVEYEKIKDSMNLSMYWADRSKKAFGTNPHKAIFGIIQGGLFKDLRIKSLEQLEKINFDGYAIGGLAVGESQKEMFKVLDDISNFMPKDKPRYLMGVGTPSDIIGAVKRGVDMFDCVLPTRSGRTGLAFTWNGRINIRNSKYQNDNSPLDPKCAKFDLNKYSKNYLNHLFNTNEILGSMLLTLHNINFYQELMETIRKNIEKGTFQQFHDSYINKL

SEQ ID NO: 119091 - protein, 155 aa, Unknown
  Bacterial polypetide isolated from the Sargasso Sea
SVGEPKEDMMRVLNHIGPKLPADKPHYLMGVGTPEDLVAGVAAGVDMFDCVMPTRNARNGWLFTRFGDIKIRNAAHKNSLRPLDEQCGCYTCRNFTRGYLHHLHRVGEILGAQLNTIHNLHYYLELMQEMRDAIDAKLFGPFRQRFHENRARGID

SEQ ID NO: 119092 - protein, 72 aa, Unknown
  Bacterial polypetide isolated from the Sargasso Sea
MSDVFHLGLKKADLQGATLAIVPGDPERVKRIAELLDNPVHLASHREFTTWRGEMDGKAVIICSTGIGGPST

SEQ ID NO: 119093 - protein, 252 aa, Unknown
  Bacterial polypetide isolated from the Sargasso Sea
MADVFHLGLTKAMLDGATLAIVPGDPERVKRIAELMDNATFLASHREYTSYLAYADGKPVVICSTGIGGPSTSIAVEELAQLGVNTFLRVGTTGAIQPHVNVGDVIVTQASVRLDGASLHFAPMEFPAVANFECTTAMVAACRDAGVEPHIGVTASSDTFYPGQERYDTVTGRVTRRFAGSMKEWQDMGVLNYEMESATLFTMCATQGWRAACVAGVIVNRTQQEIPNEATMKQTEVSAVSIVVAAAKKLLA

SEQ ID NO: 119094 - protein, 252 aa, Unknown
  Bacterial polypetide isolated from the Sargasso Sea
MADVFHLGLTKAMLDGATLAIVPGDPERVKRIAELMDNPTFLASHREYTSYLAYADGKPVVICSTGIGGPSTSIAVEELAQLGVNTFLRVGTTGAIQPHVNVGDVIVTQASVRLDGASLHFAPMEFPAVANFECTTAMVAACRDAGVEPHIGVTASSDTFYPGQERYDTVTGRVTRRFAGSMKEWQEMGVLNYEMESATLFTMCATQGWRAACVAGVIVNRTQQEIPDEATMKKTEVSAVSIVVAAAKKLLA

SEQ ID NO: 119095 - protein, 251 aa, Unknown
  Bacterial polypetide isolated from the Sargasso Sea
MSDVFHLGLKKADLQGATLAIVPGDPERVKRIAELLDNPVHLASHREFTTWRGEMDGKAVIICSTGIGGPSTSIAVEELAQLGIRTFLRIGTTGAIQPHLNVGDVIVTTGSVRLDGASLHFAPMEFPAVADFDCTTALVNTAKELGSKLHIGVTASSDTFYPGQERYDTVSGRVVSRFQGSMKEWQAMGVLNYEMESATLLTMCTSQGLRAGMVAGVIVNRTQQEIPNAETMAKTESDAIKIVLGAARKLI

SEQ ID NO: 119096 - protein, 93 aa, Unknown
  Bacterial polypetide isolated from the Sargasso Sea
LPYNTLSQDYELEYGKATIEIHSDALNRNDKVLIVDDLIATGGTALASIELVKKLGANVNGCTFIIDLPELKGREKIEEIGIEVQTLCSFEGY

SEQ ID NO: 119097 - protein, 160 aa, Unknown
  Bacterial polypetide isolated from the Sargasso Sea
KGILFRDITTLIKNEKAFSECIDQIVERSKKFQFNKLAAIESRGFVFASAVSYILKKPFILLRKKNKLPSDVHSIDFELEYGTATMEVHKDAIDQDDSVLLIDDLIATGGTAEAAAKLIEMSKGKVAGYVFVINLFDLGGCDNLLKKGYKVENLIEFPGH

SEQ ID NO: 119098 - protein, 159 aa, Unknown
  Bacterial polypetide isolated from the Sargasso Sea
MDLKEYIRSIPDYPKKGILFRDITTLIKDSKAFNYSIDKIVEISEKLKFDKIAAIESRGFVFASAVSYKLKKPFIMLRKKNKLPAGKISVDFQLEYGTATLEVHKDSISSGERVLIIDDLIATGGTAEAGAKLVEMSKGEVAGFIFIINLFDLGGNKKT

SEQ ID NO: 119099 - protein, 147 aa, Unknown
  Bacterial polypetide isolated from the Sargasso Sea
MDLKNFIRSIPDYPKKGILFRDITTLIKDENAFAETINQIVERSKKYNFTKIAAIESRGFVFASAVSYILKKPFIMLRKKNKLPADVHSVDFELEYGTATIEVHKDSIGNEDSVLIIDDLIATGGTAEAAAKLVEISNGKVAAFIFV

SEQ ID NO: 119100 - protein, 175 aa, Unknown
  Bacterial polypetide isolated from the Sargasso Sea
MNLKDFIRSIPDYPKKGILFRDITTLIKDENAFAETINQIIEKSKKYKFDKIAAIESRGFVFASAVSYILKKPFIMLRKKDKLPADVHSVDFELEYGTATIEVHKDSINQNDKVLIIDDLIATGGTAEASAKLIELSKGKVAAFIFVINLFDLGGSDNLKKNGYKTENLIDFPGH

SEQ ID NO: 119101 - protein, 115 aa, Unknown
  Bacterial polypetide isolated from the Sargasso Sea
ESRGFIIACALALKYNKGMILVRKAGKLPGKVVKTSYTLEYGKATLEVQKDVIQEGQRVLICDDLLATGGTAKAAAKLIEKINGTIVGFAFIIELLELNGRDKIKDYRSESLVEY

SEQ ID NO: 119102 - protein, 137 aa, Unknown
  Bacterial polypetide isolated from the Sargasso Sea
MNLKDFIRSIADYPKKGILFRDITTLIKDENAFTECINQIIERSKKYNFTKIAAIESRGFVFASAVSYILKKPFIMLRKKNKLPADVHSIDFELEYGTATIEVHKDSINEKDSILIIDDLIATGGTAEAAAKLVEIS

SEQ ID NO: 119103 - protein, 89 aa, Unknown
  Bacterial polypetide isolated from the Sargasso Sea
YPGKVITKEYSLEYGTSKMSIRQNINLKNKNIILVDDLLATGGTLRCGEELVNNKEGNVLFSLTVIELVKLNGYKNLNSKVYSLVKYDD

SEQ ID NO: 119104 - protein, 49 aa, Unknown
  Bacterial polypetide isolated from the Sargasso Sea
MDLKKYIRSIPDYPKKGILFRDITTLIKNPEAFNFSVDKIIEISKKIKF

SEQ ID NO: 119105 - protein, 100 aa, Unknown
  Bacterial polypetide isolated from the Sargasso Sea
DCRFVLARKAGKLPSKTITEEYELEYGVDAIEMHREDINKGDRIIIVDDLLATGGTAKATGNIIKKLDGEIVSYAFLIILNFLNGNQLLKPDPVFSIIEY

SEQ ID NO: 119106 - protein, 172 aa, Unknown
  Bacterial polypetide isolated from the Sargasso Sea
KNFIRSIPDYPKKGILFRDITTLIKDENAFAETINQILDRSKKFNFTKIAAIESRGFVFASAVSYLLKKPFIMLRKKNKLPAEVHSIDFKLEYGTATIEVHKDSIGSKDSVLIIDDLIATGGTAEAAAKLVEISKGKVAAFIFVINLFDLGGSDSLIKNNYKVENLINFPGH

SEQ ID NO: 119107 - protein, 175 aa, Unknown
  Bacterial polypetide isolated from the Sargasso Sea
MDLKEHIRSIQDYPKKGILFRDITTLIKNEKAFCECVDQIVERSKKFKFDKLAAIESRGFVFASAVSYILKKPFILLRKKNKLPGDVHSIDFELEYGTATMEVHKDAINQNDSVLLIDDLIATGGTAEAAAKLIEISKGSVAGYVFVINLFDLGGCDNLKKKGYKIENLIEFPGH

SEQ ID NO: 119108 - protein, 175 aa, Unknown
  Bacterial polypetide isolated from the Sargasso Sea
MDLKNFIRSIPDYPKKGILFRDITTLIKDENAFAATINQIVQRSKKYNFTKIAAIESRGFVFASAVSYILKKPFIMLRKKNKLPADVHSVDFELEYGTATIEVHKDSIGNEDSVLIIDDLIATGGTAEAAAKLVEISNGKVAAFIFVINLFDLGGSDNLIKKNYKVENLIEFPGH

SEQ ID NO: 119109 - protein, 130 aa, Unknown
  Bacterial polypetide isolated from the Sargasso Sea
MDLKDYIRSIPDYPKKGILFRDITTLIKDEKAFKECINQIVDRCKKFKIDKIAAIESRGFVFASAVSYLLDKPFILLRKKNKLPADTHSVDFQLEYGTATIEVHKDSINKDDSVLIIDDLIATGGTAEAA

SEQ ID NO: 119110 - protein, 175 aa, Unknown
  Bacterial polypetide isolated from the Sargasso Sea
MNLKDFIRSIPDYPKKGILFRDITTLIKDENAFAETINQIVERSKKFNFTKIAAIESRGFVFASAVSYILKKPFIMLRKKNKLPADVHSVDFELEYGTATIEVHKDSINENDSVLIIDDLIATGGTAEAAAELVEISKGKVAAFIFVINLFDLNGSDNLIKKGYQIENLINFPGH

SEQ ID NO: 119111 - protein, 166 aa, Unknown
  Bacterial polypetide isolated from the Sargasso Sea
MINYKKYIKEYKDFPIDGINYLDMNPIYQDGQIRTRLVRDCVDSARKVDFDYIGIVESRGFIIGSIIAHELGKGVVLLRSKKNRLPGKTHTVGHTLEYGESMVQVQEGEGKVLVFDDVLATGGTAKGSIEVLNKAGYTPVGALFLVELDFLNPKLDIPHQSIIHYE

SEQ ID NO: 119112 - protein, 97 aa, Unknown
  Bacterial polypetide isolated from the Sargasso Sea
MILLRKAGKLPGKVAKTSYTLEYGKATLEVQKDVIKEGQRVVICDDLLATGGTAKAAAKLIEKIKGEITGFAFIIELLELNGRDKIKDYRSESLVEY

SEQ ID NO: 119113 - protein, 163 aa, Unknown
  Bacterial polypetide isolated from the Sargasso Sea
YPKKGILFRDITTLIKNANAFAETINQIIERSKKYNFTKIAAIESRGFVFASAVSYILKKPFIMLRKKNKLPADVHSVDFELEYGTATIEVHKDSLNENDSVLIIDDLIATGGTAEAAAKLVELSSSKVSAFVFVINLFDLGGSDKLIKKNYKVENLVDFPGH

SEQ ID NO: 119114 - protein, 156 aa, Unknown
  Bacterial polypetide isolated from the Sargasso Sea
FRDITTLIKDENAFEETINQIVKRSKKYNFTKIAAIESRGFVFASAVSYILKKPFIMLRKKNKLPADVHTIDFELEYGTATIEVHKDSLNENDSVLIIDDLIATGGTAEAAAKLVEISKGKVAAFIFVINLFDLGGSENLIKNSYKVENLIDFPGH

SEQ ID NO: 119115 - protein, 39 aa, Unknown
  Bacterial polypetide isolated from the Sargasso Sea
MDLKKYIRSIQDYPKKGILFRDITTLIKNAEAFKYTNDK

SEQ ID NO: 119116 - protein, 175 aa, Unknown
  Bacterial polypetide isolated from the Sargasso Sea
MNLKDHIRSIKDYPKKGILFRDITTLIKNEEAFIKCIDEIVDRSKKFKFDKIAAIESRGFVFASAVSYLLKKPFILLRKKNKLPAETHSVEFELEYGKATMEIHKDSIKENESVLLIDDLIATGGTAEAATKLIELSKGKVAGFIFVINLFDLGGCDNLVKKGHKIENLIDFPGH

SEQ ID NO: 119117 - protein, 175 aa, Unknown
  Bacterial polypetide isolated from the Sargasso Sea
MDLKEYIRSIPDYPKKGILFRDITTLIKDEKAFSKTIDLIVKKSEKFEIDKIAAIESRGFVFASAVSYILKKPFIMLRKKNKLPADTHSVNFELEYGTATIEIHKDSIKKNDNILIIDDLIATGGTAEAAAKLVEISNGNVSAFIFVINLFDLGGCNKLIEKGYKVENLMDFPGH

SEQ ID NO: 119118 - protein, 175 aa, Unknown
  Bacterial polypetide isolated from the Sargasso Sea
MNLKDYIRSIPDYPKKGILFRDITTLIKNEKAFKETIDQIIERSKKFNFTKIAAIESRGFVFASAVSYILKKPFVMLRKKNKLPADVYSVDFELEYGTATIEVHKDSIDENENVLIIDDLIATGGTAEAAAQLIEISKGKVEAFIFVINLFDLGGTDKLLKKEYKVESLIEFPGH

SEQ ID NO: 119119 - protein, 175 aa, Unknown
  Bacterial polypetide isolated from the Sargasso Sea
MDLKKHIRSIQDYPKKGILFRDITTLIKNEKAFCECIDQLVEKSKKFEFNKLAAIESRGFVFASAVSYLLKKPFILLRKKNKLPAETHTIDFELEYGTATMEVHKDAINKNDNVLLIDDLIATGGTAEAAAKLIEMSEGNVAGYVFVINLFDLDGCNKLIKKGYKVENLIEFPGH

SEQ ID NO: 119120 - protein, 164 aa, Unknown
  Bacterial polypetide isolated from the Sargasso Sea
MNLKDFIRSIPDYPKKGILFRDITTLIKDENAFAKTIDQIVERSKKYNFSKIAAIESRGFVFASAVSYILKKPFIMLRKKNKLPADVHSVDFELEYGTATIEVHKDSLNENDSVLIIDDLIATGGTAEAAAKLVEISNGKVAAFIFVINLFDLGGSDNLLKSNY

SEQ ID NO: 119121 - protein, 98 aa, Unknown
  Bacterial polypetide isolated from the Sargasso Sea
MDLKKYIRSIPDYPKKGILFRDITTLIKNPEAFNFAIDKIVDISKKVKFDKIAAIESRGFVFASAVSYKLKKPLIMMRKKNKLPAERYSVDFELEYEK

SEQ ID NO: 119122 - protein, 175 aa, Unknown
  Bacterial polypetide isolated from the Sargasso Sea
MDLKDYIRSIKDYPKKGILFRDITTLIKNETAFEETINQIVERSKKFKVDKIAAIESRGFVFASAVSYILKKPFIMLRKKNKLPADVHSVDFELEYGTATIEVHKDSISENDSVLIIDDLIATGGTAEAAAKLIEISDGNVAAFIFVINLFDLGGCDNLIKKGYKVENLMEFPGH

SEQ ID NO: 119123 - protein, 172 aa, Unknown
  Bacterial polypetide isolated from the Sargasso Sea
MENIKKYIAEITDFPKVGITYRDLNPIYKEPNAWKELMLPLHKLISSAKPDYIAGIESRGFISASALAFKLEIGFIPIRKPNKLPGDVLGIDYKLEYGEDRLEIQRNSIKPNSKVILIDDLLATGGTAAAAGKLINKAGGDLIGYAFLVELTELNGRNNLYSNLFIESLIKY

SEQ ID NO: 119124 - protein, 103 aa, Unknown
  Bacterial polypetide isolated from the Sargasso Sea
MKEYVRTIADYPVKGIQFRDITTLLQDAGHFRQVVDEMTSPWKNKKIDAVLSIESRGFIMAGAIAYFLNAAFIPLRKPHKLPFETYKVSYDLEYGSTEMHIHT

SEQ ID NO: 119125 - protein, 105 aa, Unknown
  Bacterial polypetide isolated from the Sargasso Sea
MNKKLKNNLEKKVRVILNFPKKGIQFQDITSITDSKQLFTEVVNEISKYCKKNKFTKVAGIEARGFIFGSAVAYKLGLPFIPIRKKGKLPGKIVKQKYKLEYGMD

SEQ ID NO: 119126 - protein, 146 aa, Unknown
  Bacterial polypetide isolated from the Sargasso Sea
MNLKDYIRSIPDYPKKGILFRDITTLIKDENAFCETINQIVERSKKFNFTKIAAIESRGFVFASAVSYVLKKPFIMLRKKNKLPAEVHSVDFELEYGKATIEVHKDSINNNDTVLIIDDLIATGGTAEAAAKLIEFSKGNVAGFIF

SEQ ID NO: 119127 - protein, 175 aa, Unknown
  Bacterial polypetide isolated from the Sargasso Sea
MDLKEYIRSIPDYPKRGILFRDITTLIKNEKAFEETVNQIIERSKKYKVDKIAAIESRGFVFASAVSYLLKKPFIMLRKKNKLPADVHSVDFELEYGTATIEVHKDSINEKDNVLIIDDLIATGGTAEAAAKLVEISNGKVAAFIFVINLFDLGGCEKLIQNNYKVENLIEFPGH

SEQ ID NO: 119128 - protein, 175 aa, Unknown
  Bacterial polypetide isolated from the Sargasso Sea
MDLKDYIRSIPDYPKKGILFRDITTLIKDENAFSCCVDLIVEKSKNFNFDKIAAIESRGFVFASAVSYLVKKPFIMLRKKNKLPAETHSVDFELEYGTATIEVHKDSIEKNDNILIIDDLIATGGTAEAAAKLVKISNGNIAGFIFVINLFDLGGNKNLTKQNYKVENLIEFPGH

SEQ ID NO: 119129 - protein, 175 aa, Unknown
  Bacterial polypetide isolated from the Sargasso Sea
MNLKDYIRSIPDYPKKGILFRDITTLIKDENAYAETINQIVERSKKFSFTKIAAIESRGFVFASAVSFVLKKPFVMLRKKNKLPADVHSVDFDLEYGTATIEVHKDSINEKDEVLIIDDLIATGGTAKAAAKLVEVSKGKVAAFVFVINLFDLGGSDNLVKSNYKVENLIEFPGH

SEQ ID NO: 119130 - protein, 163 aa, Unknown
  Bacterial polypetide isolated from the Sargasso Sea
MNLKDFIRSIPDYPKKGILFRDITTLIKDEKAFADTINQIVERSKKFNFNKIAAIESRGFVFASAVSYIVKKPFIMLRKKNKLPAEVHSVDFELEYGTATIEVHKDSINKDDKVLIIDDLIATGGTAEAAAKLVEISGGNVACFVFVINLFDLNGSDNLIKKG

SEQ ID NO: 119131 - protein, 130 aa, Unknown
  Bacterial polypetide isolated from the Sargasso Sea
MNLKEYIRSIQDYPKKGILFRDITTLIKNEKAFKECINQIVERSKKFKFDKIAAVESRGFVFASAISYILDKPFIMLRKKNKLPAEVHSIDFELEYGTATIEVHKDSFDKNDNVLIIDDLIATGGTAEAA

SEQ ID NO: 119132 - protein, 147 aa, Unknown
  Bacterial polypetide isolated from the Sargasso Sea
LQNAGHFKHVIDEMTTPWINKKIDAVLSIESRGFIMAGAIAYNIGAAFIPFRKPDKLPGETYKVSYDLEYGSTEMHVHKDALDNHTNLLIIDDLLATGGTALAAIELVNMFENKNIIGAGFIINLPKLKGDQKLINKGINIHSLMEF

SEQ ID NO: 119133 - protein, 163 aa, Unknown
  Bacterial polypetide isolated from the Sargasso Sea
YPKKGILFRDITTLIKSPQAFKYTVDKIIEISKKIKFDKVSAIESRGFVFASAVSYLLNKPLILLRKKNKLPAERHSVDFKLEYGEATIEVHKDSINKGENILVIDDLIATGGTAEAAAKLIELSGGSVAGFIFVINLFDLPGNDLLKKKSYFTESLIEFPGH

SEQ ID NO: 119134 - protein, 175 aa, Unknown
  Bacterial polypetide isolated from the Sargasso Sea
MNLKDFIRSIPDYPKKGILFRDITTLIKDENAFSETINQIIERSKKLRFNKIAAIESRGFVFASAVSYILKKPFIMLRKKNKLPSEVHSVDFELEYGTATIEVHKDSIGKDDNVLVIDDLIATGGTAEAAAKLVEISGGNVSGFIFVINLFDLNGSDNLQKKGYKVENLIEFPGH

SEQ ID NO: 119135 - protein, 161 aa, Unknown
  Bacterial polypetide isolated from the Sargasso Sea
MDLKDYIRSIKDYPKKGILFRDITTLIKDELAFEETINQIVERSKKFKVDKIAAIESRGFVFASAVSYILKKPFILLRKKNKLPAEVHSVNFELEYGTATIEVHKDSISKNESVLIIDDLIATGGTAEAAAKLIEVSEGKVEAFIFVINLFDLGGCDNLSK

SEQ ID NO: 119136 - protein, 60 aa, Unknown
  Bacterial polypetide isolated from the Sargasso Sea
MEDLQKWIKSYPDFPSKGILFRDISPLLAEPSALSLLKDKFVETIRPLSPDYIAGIDARG

SEQ ID NO: 119137 - protein, 175 aa, Unknown
  Bacterial polypetide isolated from the Sargasso Sea
MNLKDYIRSIPDYPKKGILFRDITTLIKDESAFAETINQIVERSKKYNFNKIAAIESRGFVFASAVSYILKKPFIMLRKKNKLPADVHSVDFELEYGTATIEVHKDSLDKNDSVLIIDDLIATGGTAEAAAKLVEISNSKVAAFIFVINLFDLGGSDNLKKNNYRVENLIDFPGH

SEQ ID NO: 119138 - protein, 30 aa, Unknown
  Bacterial polypetide isolated from the Sargasso Sea
MDLKKYIRSIPDYPKKGILFRDITTLIKNP

SEQ ID NO: 119139 - protein, 171 aa, Unknown
  Bacterial polypetide isolated from the Sargasso Sea
MKEFVRTIKDYPIKGIQFRDITTLLQRADLFHDLIDEMTKPWENKNIDAIVSIEARGFIMAGAIAYKLNTSFIPMRKPDKLPADTFKVKFDLEYGSTEMHLHKDALDNHQNILIIDDLLATGGTAVAAVKLINMFKNKNIVGAGFIINLPELKGEEILNKMGIKTHSLMEF

SEQ ID NO: 119140 - protein, 95 aa, Unknown
  Bacterial polypetide isolated from the Sargasso Sea
NQINYPGETYKVSYDLEYGSTEMHVHKDALDNHTNLLIIDDLLATGGTALAAIELVNMFENKNIIGAGFIINLPKLKGDQKLINKGINIHSLMEF

SEQ ID NO: 119141 - protein, 187 aa, Unknown
  Bacterial polypetide isolated from the Sargasso Sea
MGVKLKIVTDPLNLKKYIRNIKDFPIDGIEFRDITSLIESPEAFVRTCDELIKITKDFNPSAVASIESRGFIFAGSISYKLALPFVLARKPGKLPNATFKKNFDLEYGSTSIEIQKNTVLKASDRVVIVDDLVATGGTAIACAELLTENFNIKKSNILILSVIDLPDLGGSKLIQDQGYQIETLVSY

SEQ ID NO: 119142 - protein, 177 aa, Unknown
  Bacterial polypetide isolated from the Sargasso Sea
MAEKLIIKFDEYLDTVEKLALTISQNYKPTVLVGIMRGAAPIIDILSRILKLPTAYIVIQSYSGSGIENKQGELIFARDISSIASNIDYERVLLVDDLSDTGLTLNKSIEWLKQYEPVKNYIKEIKTACLWKKKSSSFTPDFCPVRLSSDPWIIQPTEHYEELNIEEIVSKRKKRAK

SEQ ID NO: 119143 - protein, 90 aa, Unknown
  Bacterial polypetide isolated from the Sargasso Sea
MKQFIRSINDYPKKGIIFRDITPLLEDPLQFRTMIDCMTNPWKEKNIDAVLSIEARGFIMAGAIAYNLGAAFIPLRKPDKLPCETYQVSY

SEQ ID NO: 119144 - protein, 172 aa, Unknown
  Bacterial polypetide isolated from the Sargasso Sea
MTSFNLNNYIKDHFDFPEKGIVFKDWLPLLQKPEAFNEVINQISNWDQFNNADAIIAIDARGFILGSCIAYRLSKPLILARKPGKLPGELITKSYQLEYGKNELSIQKDSLAEFDNFLIIDDLLATGGTVNSVVNILEEAKKNIVGLFILIELLKLKGRENFNFPIKSIVSF

SEQ ID NO: 119145 - protein, 175 aa, Unknown
  Bacterial polypetide isolated from the Sargasso Sea
MNLKEYIRSIPDYPKKGILFRDITTLIKNEKAFTETINQIIEILKKYKFDKIAAIESRGFVFASAVSYLLKKPFILLRKKNKLPAERFSIDFELEYGTATIEMHKDSVNMGDKVVIIDDLIATGGTAEAGAKIIEMGNAQIELFIFVINLFDLGGCDKLIEKGYKVENLIEFPGH

SEQ ID NO: 119146 - protein, 119 aa, Unknown
  Bacterial polypetide isolated from the Sargasso Sea
MKEYVRTIADYPVEGIQFRDITTLLQNAGHFKQVIDDMVKPWENKKIDAVLSIESRGFIMAGAIAYFLNAAFVPLRKPHKLPFDTFKTSYDLEYGSTEMHIHTDALDGHKDLLIIDDLL

SEQ ID NO: 119147 - protein, 175 aa, Unknown
  Bacterial polypetide isolated from the Sargasso Sea
MDLKEHIRSIQDYPKKGILFRDITTLIKNEKAFCECVDQIVERSKKFQFNKLAAIESRGFVFASAVSYLLKKPFILLRKKNKLPAETHSIEFKLEYGTATMEMHKDAIDKNDNVLLIDDLIATGGTAEAAAKLIEMSGGNVAGYVFVINLFDLDGCDKLIKKGYKVENLIEFPGH

SEQ ID NO: 119148 - protein, 175 aa, Unknown
  Bacterial polypetide isolated from the Sargasso Sea
MDLKKFIRSIPDYPKKGILFRDITTLIKEEKAFEETINQIVERSRKFKFSKIAAIESRGFVFASAVSYILKKPFIMLRKKNKLPAETHSVDFELEYGKATIEVHKDSINQGEAVLIIDDLIATGGTAEAAAKLIDFSKGSVAGFIFVINLFDLKGSDKLINLGYKVENLINFPGH

SEQ ID NO: 119149 - protein, 175 aa, Unknown
  Bacterial polypetide isolated from the Sargasso Sea
MNLKKYIRSIPDYPKKGILFRDITTLIKNPEAFNYTVDRIVEISKKIKFDKISAIESRGFIFASAVSYLLNKPLILLRKKNKLPAERHSVDFKLEYGEATIEVHKDSIEKKEKILVIDDLIATGGTAEAAAKIIEISGGTVAGFIFVINLFDLPGNNLLKKKSYFTESLIEFPGH

SEQ ID NO: 119150 - protein, 134 aa, Unknown
  Bacterial polypetide isolated from the Sargasso Sea
MQSLNELIDTYKDYPKKGIEFKDVLGIIQKPQVFKQLVLNMSSSQIIKNAEAIIAIDARGFIFGSAISLHASKPMVVARKPGKLPGELLEEKYNLEYGENSLSIQKKALKKFKSYAIVDDLLATGGTVNCVSKI

SEQ ID NO: 119151 - protein, 175 aa, Unknown
  Bacterial polypetide isolated from the Sargasso Sea
MDLKEYIRSIPDYPKKGILFRDITTLIKNETAFAETINQILERSKKYKFDKIAAIESRGFVFASAVSYLLKKPFILLRKKNKLPADTYSVDFELEYGTATIEMHKDSINENESVLIIDDLIATGGTAKAAAKLIKMSKGNVSAFIFVINLFDLGGCDNLVEEGYKIENLIEFPGH

SEQ ID NO: 119152 - protein, 87 aa, Unknown
  Bacterial polypetide isolated from the Sargasso Sea
MKKNLDNSIKKAIRTIPDFPKSGIMFRDITSLLEKPLIFKRVVNKISGLARKKKITKIIGIESRGFIFAAPVAAKLGLPLILIRKSG

SEQ ID NO: 119153 - protein, 175 aa, Unknown
  Bacterial polypetide isolated from the Sargasso Sea
MDLKEYIRSIPDYPKKGILFRDITTLIKNEKAFEETINQIIERSKKYKVDKIAAIESRGFVFASAVSYLLKKPFIMLRKKNKLPADVHSIDFELEYGTATIEVHKDSINENDNVLIIDDLIATGGTADAAAKLVKISKGKVAAFIFVINLFDLGGCKKLIQNNYKVENLIEFPGH

SEQ ID NO: 119154 - protein, 171 aa, Unknown
  Bacterial polypetide isolated from the Sargasso Sea
MKEHVRTILDYPVKGIKFRDITTLLQDSKHFKNVIDLMTDPWRDSKIDAILSIESRGFIMAGAIAYKLDTAFIPLRKPDKLPGETYKVSYTLEYGSTEMHIHKDALDNHTNLLIIDDLLATGGTALAAIELINRFKNKNIIGAGFIINLPDLKGEKKLLDKKIRIHSLMEF

SEQ ID NO: 119155 - protein, 115 aa, Unknown
  Bacterial polypetide isolated from the Sargasso Sea
MKEYVRTIADYPVKGIQFRDITTLLQNAGHFKQVIDDMVKPWQNKKIDAVLSIESRGFIMAGAIAYFLNAAFVPLRKPHKLPFDTFKTSYDLEYGSTEMHIHTDALDGHKDLLII

SEQ ID NO: 119156 - protein, 175 aa, Unknown
  Bacterial polypetide isolated from the Sargasso Sea
MNLKDFIRSIPDYPKKGILFRDITTLIKDEKAFAETINKIVKKSKNFNFDKIAAIESRGFVFASAVSYILKKPFIMLRKKNKLPAEVHSVDFELEYGKATIEVHKDSIEKNDKVLIIDDLIATGGTAEAAAKLVEISEGNVSGFVFVINLFDLKGSDNLVNRGYKVESLIEFPGH

SEQ ID NO: 119157 - protein, 156 aa, Unknown
  Bacterial polypetide isolated from the Sargasso Sea
ITSLIETPDAFVETCTQLTDITKSFDATSIASIESRGFIFAGSIAKDLSLPFILARKPGKLPNETFVKDFDLEYGSTSIEIQKNTMVNESDRVVIVDDLVATGGTAIACAELLTENFNVRRENILILAVIDLPDLGGSHLIADQGYGIETLVSYTA

SEQ ID NO: 119158 - protein, 175 aa, Unknown
  Bacterial polypetide isolated from the Sargasso Sea
MDLKDYIRSIKDYPKKGILFRDITTLIKNETAFQETINQIVERSKKFKVDKIAAIESRGFVFASAVSYILKKPFIMLRKRNKLPADVHSVDFELEYGTATIEVHKDSISENESVLIIDDLIATGGTAEAAAKLIEISKGKVAAFIFVINLFDLGGCDNLITKGYKIENLMDFSGH

SEQ ID NO: 119159 - protein, 99 aa, Unknown
  Bacterial polypetide isolated from the Sargasso Sea
MKEYVRTISDYPVNGIQFRDITTLLQDAGHFKKVIEDMTSPWKDKKIDAVLSIESRGFIMAGAIAYFLNAAFIPLRKPHKLPFETYKVSYELEYGSTEM

SEQ ID NO: 119160 - protein, 175 aa, Unknown
  Bacterial polypetide isolated from the Sargasso Sea
MDLKNFIRSIPDYPKKGILFRDITTLIKDENAFAATINQIVERSKKYNFTKIAAIESRGFVFASAVSYILKKPFIMLRKKNKLPADVHSVDFELEYGTATIEVHKDSIGNEDSVLIIDDLIATGGTAEAAAKLVEISNGKVAAFIFVINLFDLGGSDNLIKKNYKVENLIKFPGH

SEQ ID NO: 119161 - protein, 175 aa, Unknown
  Bacterial polypetide isolated from the Sargasso Sea
MDLKEYIRSIQDYPKKGILFRDITTLIKNEKAFSNTIDQIIERSKKFKIDKIAAIESRGFVFASAVSYLLKKPFILLRKKNKLPADTHSVDFDLEYGKATIEVHKDSVNEKDSVLIIDDLIATGGTAEAAAKLVEISKGKVAGFIFVINLFDLGGNDKLIKKGYKTESLIEFPGH

SEQ ID NO: 119162 - protein, 175 aa, Unknown
  Bacterial polypetide isolated from the Sargasso Sea
MDLKEYIRSIPDYPKKGILFRDITTLIKDEKAFSECINQIVEKSKNFKFNKIAAIESRGFVFASAVSYLLKKPFIMLRKKNKLPADTYSVDFELEYGTATIEVHKDSIQKEDSVLIIDDLIATGGTAEAASKLVELSNGNIAGFIFVINLFDLGGCNKLKKKNYKVSSLIEFPGH

SEQ ID NO: 119163 - protein, 164 aa, Unknown
  Bacterial polypetide isolated from the Sargasso Sea
MIKTYKNFPKQGIAFIDVLGIIQDPEAFRELILKMASNNIVKNSEAIISIEARGFIFGSAISLQASKPMIVARKPGKLPGELIQEKYDLEYGEDSICIQQEALKKFNYYIIIDDILATGGTAQCVANLIYKNGGNVAGLLTVVELINLDGRSKFNFPVESILKI

SEQ ID NO: 119164 - protein, 175 aa, Unknown
  Bacterial polypetide isolated from the Sargasso Sea
MNLKDHIRSIKDYPKKGILFRDITTLIKNEKAFCECIDQIVKVSKKFEFNKIAAMESRGFVFASAVSYILKKPFILLRKKNKLPAETYSIDFELEYGKATMEVHKDSIEKNDNVLLIDDLIATGGTAQAAAKLIEISMGKVAGFIFVINLFDLNGCNNLTKKGYKIENLIEFPGH

SEQ ID NO: 119165 - protein, 171 aa, Unknown
  Bacterial polypetide isolated from the Sargasso Sea
MKEFVRTILDYPVKGIQFRDITTLLQNAGHFKQVIDEMTNPWVNKKIDAVLSIESRGFIMAGAIAYKLNSAFIPFRKPDKLPGETYKVSYTLEYGSTEMHVHKDALEGHTNLLIVDDLLATGGTALAALDLVNMFKNKNIIGAGFIINLPELKGDQKLINKGINIHSLMEF

SEQ ID NO: 119166 - protein, 71 aa, Unknown
  Bacterial polypetide isolated from the Sargasso Sea
EVHKDAIKSGSRVLMVDDLLATGGTMEGSSRLIEKAGGIIIGYAFVIELIDLKGRTKLDKPVYSLVSFEGD

SEQ ID NO: 119167 - protein, 161 aa, Unknown
  Bacterial polypetide isolated from the Sargasso Sea
KKGILFRDITTLIKNEKAFSKCIDQIIERSKKFKFNKLAAIESRGFVFASAASYLLKKPFILLRKKNKLPAETHSVEFELEYGTATIEVHKDSINKDDNVLIIDDLIATGGTAEAAAKLIEMSDGKVAGYVFVINLFDLGGCDNLLKKGYEVENLIDFPGH

SEQ ID NO: 119168 - protein, 105 aa, Unknown
  Bacterial polypetide isolated from the Sargasso Sea
YALSKSFVLARKPGKLPRKAAEKFFSLEYGTNTVHIHEDAISEGDKVLVVDDLIATGGTAMATAELCQELGASEVHIIALIDLPKLGGSKKLAEKFGEVITLIDY

SEQ ID NO: 119169 - protein, 175 aa, Unknown
  Bacterial polypetide isolated from the Sargasso Sea
MNLKKFIRSIPDYPKKGILFRDITTLIKDENAFRETINQILERSKKINFNKIAAIESRGFVFASAVSYLLKKPLIMLRKKNKLPAEVHSVDFELEYGKATIEVHKDSIEKNDSVLIVDDLIATGGTAEAAAKLIEISNGEVAGFIFVINLFDLGGSENLIKKNYKVENLINFPGH

SEQ ID NO: 119170 - protein, 101 aa, Unknown
  Bacterial polypetide isolated from the Sargasso Sea
MNNDLKSIRIIKDFPKKGIAFYDISTILSNPKIFNRVVNSMSKEVNKLNANTIVGIDSRGFIFASAIAFKLKKKLVMIRKKGKLPGKTFNTSYKLEYGSNN

SEQ ID NO: 119171 - protein, 195 aa, Unknown
  Bacterial polypetide isolated from the Sargasso Sea
VSSPPATRTGASRAPAGKESAGCRLTLIPISQRRRAFRRKVSRFYDISPILEDSAVIRQAMDALADLTRPMQPDIIAGVDARGFLFALPLALELACGMVMVRKAGKLPGELFEQSYALEYGEARLSIQTSRQLRGKRVVLCDDLLATGGTLEASARLVEQCGGILAGAVCVIELTGLKGRARLDCPVAALQTYEF

SEQ ID NO: 119172 - protein, 175 aa, Unknown
  Bacterial polypetide isolated from the Sargasso Sea
MDLKKHIRSIQDYPKKGILFRDITTLIKNPEAFRFANDKIIELSKKIEFDKVSAIESRGFVFASAVSYVLNKPFILLRKKNKLPAETHSVDFKLEYGEATIEVHKDSILKGEKILVIDDLIATGGTAEAAAKLIEISGGKVAGFIFVINLFDLPGNNLLKKKGYKTESLIEFPGH

SEQ ID NO: 119173 - protein, 175 aa, Unknown
  Bacterial polypetide isolated from the Sargasso Sea
MNLKDYIRSIPDYPKKGILFRDITTLIKDENAFAETINQIVERSKKYNFTKIAAIESRGFVFASAVSYILKKPFIMLRKKNKLPANVHSIDFELEYGTATIEVHKDSLDEKDSVLIIDDLIATGGTAGAAAKLIEMSKSKVSAFVFVINLFDLGGSDNLVKKNYYVENLIEFPGH

SEQ ID NO: 119174 - protein, 175 aa, Unknown
  Bacterial polypetide isolated from the Sargasso Sea
MDLKDYIRSIQDYPKKGILFRDITTLIKNEKAFKQCINQIVERCKKFKVDKIAAVESRGFVFASAVSYLISKPFILLRKKNKLPAETHSIDFQLEYGTATIEVHKDSIKEKDSVLIIDDLIATGGTAEAAAKLVEISKGSVAGFIFVINLFDLGGCDKLLKSGYKVENLIEFPGH

SEQ ID NO: 119175 - protein, 171 aa, Unknown
  Bacterial polypetide isolated from the Sargasso Sea
MKEYVRTILDYPVKGIQFRDITTLLQDAGIFRKVIDEMTEAWKNEKIDAILSIESRGFIMAGAMAYNLNTAFIPLRKPDKLPSQTYKVSFDLEYGSTEIHIHTDALDNHKNLLIIDDLLATGGTALAAIELVRKFKDKNIVGAGFIINLPNLKGEEKLKEQKIKTHSLMEF

SEQ ID NO: 119176 - protein, 171 aa, Unknown
  Bacterial polypetide isolated from the Sargasso Sea
MKEYVRTILDYPVKGIQFRDITTLLQDAGHFKQVIDEMTEPWKNNSIDAVLSIESRGFIMAGAIAYNIGAAFIPLRKPDKLPGATYKVSYTLEYGSTEMHIHKDALDNHKNLLIIDDLLATGGTALASVDLIEKFENKNIVGAGFIINLPDLKGDKKLQERGINIHSLMDF

SEQ ID NO: 119177 - protein, 175 aa, Unknown
  Bacterial polypetide isolated from the Sargasso Sea
MDLKKFIRSIPDYPKKGILFRDITTLIKDDKAFEETINQIVERSKKFQFNKIAAIESRGFVFASAVSYILKKPFIMLRKKNKLPAETYSVDFELEYGTATIEVHKDSINENDSVLIIDDLIATGGTAEAASKLIEISKGKVEAFIFVINLFDLGGSDKLIDKGFKVENLINFPGH

SEQ ID NO: 119178 - protein, 134 aa, Unknown
  Bacterial polypetide isolated from the Sargasso Sea
LIYQMSTNQIIKNSDAILSIEARGFIFGSAISLQASKPMIVARKPGKLPGELIQENYNLEYGEDSLSIQNEAIQKFSSYAIVDDLLATGGTVNCAAKLLKKNGKKITGLLTVVELVEFDGRSKFDFPVKSILSM

SEQ ID NO: 119179 - protein, 175 aa, Unknown
  Bacterial polypetide isolated from the Sargasso Sea
MNLKKHIRSIEDYPKKGILFRDITTLIKNEEAFSECIDQIVERSKKFKFNKLAAIESRGFVFASAVSYILKKPFILLRKKNKLPSEVHSVDFELEYGAATIEVHKDAIDKNDSVLIIDDLIATGGTAEAAAKLIEISNGKVAGYVFVINLFDLGGCDNLLKKGHKVENLVEFPGH

SEQ ID NO: 119180 - protein, 143 aa, Unknown
  Bacterial polypetide isolated from the Sargasso Sea
MNLRDKIGDYPDFPKKGILFRDFSPILGDPSALSFMVEEFSKKFHPNDVDVFAGIESRGFIIACALALKYNKGMILLRKAGKLPGKVAKTSYTLEYGKATLEVQKDVIEEGQRVVICDDLLATGGTAKAAAKLIEKIKGEIIG

SEQ ID NO: 119181 - protein, 153 aa, Unknown
  Bacterial polypetide isolated from the Sargasso Sea
RDITTLLQNAGHFKQVIDDMVKPWQNKKIDAVLSIESRGFIMAGAIAYFLNAAFIPLRKPHKLPFDTFKISYDLEYGSTEMHIHTDALDGHKDLLIIDDLLATGGTALAAVELIKKFEDKNIVGAGFIINLPDLSGDKKLIEKGIEIHSLMEF

SEQ ID NO: 119182 - protein, 175 aa, Unknown
  Bacterial polypetide isolated from the Sargasso Sea
MDLKEYIRSIPDYPKKGILFRDITTLIKNETAFAETINQIVERSKNYKVDKIAAIESRGFVFASAVSYLLKKPFILLRKKNKLPADTYSVDFELEYGTATIEMHKDSIDENDSVLIIDDLIATGGTAKAAAKLIEMSKGNISAFIFVINLFDLGGCNDLIKEEYKIENLIEFPGH

SEQ ID NO: 119183 - protein, 83 aa, Unknown
  Bacterial polypetide isolated from the Sargasso Sea
MSNINLYNCIESIIDFPKKGILFRDISPLLANFEATSELRNIFLNEALKYKIDYVAGIDARGFLFSTLLSQDLKVGSILIRKP

SEQ ID NO: 119184 - protein, 171 aa, Unknown
  Bacterial polypetide isolated from the Sargasso Sea
MKEYVRTILDYPVKGIQFRDITTLLQDAGHFKQVIDEMTEPWKNTPIDAVLSIESRGFIMAGAIAYNIGAAFVPLRKPDKLPGETYKVSYTLEYGSTEMHIHKDALDNHKNLLIIDDLLATGGTALASVDLIEKFDNKNIVGAGFIINLPDLNGDKKLQERGINIHSLMDF

SEQ ID NO: 119185 - protein, 175 aa, Unknown
  Bacterial polypetide isolated from the Sargasso Sea
MNLKDFIRSIQDYPKKGILFRDITTLIKDEKAFSQTINQIVERSKKYDFDKIAAIESRGFVFASAVSYILKKPFIMLRKKNKLPADVHSVDFKLEYGTATIEVHKDSIEKNEEVLIIDDLIATGGTAEAAAKLIEISGGKVACFIFVINLFDLNGSYNLLKKGYKIENLIEFPGH

SEQ ID NO: 119186 - protein, 175 aa, Unknown
  Bacterial polypetide isolated from the Sargasso Sea
MDLKKHIRSIPDYPKKGILFRDITTLIKDPAAFKYTNDKIVEIAKKLDFDKVAAIESRGFVFASTVSYILNKPFILLRKKNKLPADTHSVDFKLEYGEATIEVHKDSISKGEKILVIDDLIATGGTAEAAAKLINISGGEVSGFIFVINLFDLPGEKLLKNKGYKIQSLVEFPGH

SEQ ID NO: 119187 - protein, 46 aa, Unknown
  Bacterial polypetide isolated from the Sargasso Sea
MDLKKYIRSIPDYPKKGILFRDITTLIKDPKAFNFSVDKIIEISKK

SEQ ID NO: 119188 - protein, 113 aa, Unknown
  Bacterial polypetide isolated from the Sargasso Sea
MNKKLVNKLKKNIRVIPNFPKKGILFQDITSITDNKKLFAEVVNEISKYARKKKFTKIAGVEARGFIFGAAVAFKLGLPFVPIRKRGKLPGKILRQKYSLEYGNDEIQIHSNA

SEQ ID NO: 119189 - protein, 91 aa, Unknown
  Bacterial polypetide isolated from the Sargasso Sea
MDLKKYIRSIPDYPKKGILFRDITTLIKSPEAFKYTVNKIVEISKKVKFDKVAAIESRGFVFASAVSYLLNKPLILLRKKNKLPAERHSVD

SEQ ID NO: 119190 - protein, 172 aa, Unknown
  Bacterial polypetide isolated from the Sargasso Sea
MNNDLKSIRIIKDFPKKGIAFYDISTILSNPKVFNRVVSSMSKEVNKLNANTIVGIDSRGFIFASAIAYKLKKKLVMIRKKGKLPGKTFNTSYKLEYGSNKLEIQSDMIRNSDNVVIIDDIFATSGTIRASMKLIKKTKAKIKGIVVLLELSFLGGRSKIKNKLISLNKVNT

SEQ ID NO: 119191 - protein, 63 aa, Unknown
  Bacterial polypetide isolated from the Sargasso Sea
EGSRVLLVDDLIATGGTIQGSAKLIKMVGGVIVGYAFVIELVDLEGRKGLQEPVFSLIEFEGH

SEQ ID NO: 119192 - protein, 177 aa, Unknown
  Bacterial polypetide isolated from the Sargasso Sea
MAEKLIIKFDEYLDTVEKLALTISQNYKPTVLVGIMRGAAPIIDILSRILKLPTAYIVIQSYSGSGIENKQGELIFARDISSIASNIDYERVLLVDDLSDTGLTLNKSIEWLKQYEPVKNYIKEIKTACLWKKKSSSFTPDFCPVKLSSDPWIIQPTEHYEELNIEEIVSKQKKRAK

SEQ ID NO: 119193 - protein, 175 aa, Unknown
  Bacterial polypetide isolated from the Sargasso Sea
MNLKDYIRSIPDYPKKGILFRDITTLIKDKDAFSETINQIIDKSKQYEFDKIAAIESRGFVFASAVSYILKKPFIMLRKKNKLPADVHSVDFELEYGTATIEVHKDSINMNEKVLIIDDLIATGGTAEAAAKLIEMSEGKVAAFIFVINLFDLKGCDNLIKKNYKVENLIEFPGH

SEQ ID NO: 119194 - protein, 175 aa, Unknown
  Bacterial polypetide isolated from the Sargasso Sea
MNLKDFIRSIPDYPKKGILFRDITTLIKNEKAFSETIDQIVERSKKMKFNKIAAIESRGFVFASAVSYILKKPFIMLRKKDKLPADVHSVDFELEYGKATIEVHKDSISEGDSILIIDDLIATGGTADAAAKLVEISKGKVAGFIFVINLFDLNGSDGLIKKGYNVENLIEFPGH

SEQ ID NO: 119195 - protein, 175 aa, Unknown
  Bacterial polypetide isolated from the Sargasso Sea
MDLKDYIRQIKDYPKKGILFRDITTLIKDKLAFEETINQIVEKSKKFKVDKIAAIESRGFVFASAVSYILKKPFIMLRKKNKLPADVHSVDFQLEYGTATIEVHKDSISENDSVLIIDDLIATGGTAEAAAKLIEISKGNVAAFIFVINLFDLGGCDNLLKKGYEVENLMDFPGH

SEQ ID NO: 119196 - protein, 132 aa, Unknown
  Bacterial polypetide isolated from the Sargasso Sea
MNLKKFIRSIPDYPKKGILFRDITTLIKDQKAFEETINQIVERSKKFDFTKIAAIESRGFVFASAVSYLLKKPFILLRKKNKLPSDTHSVDFELEYGTATIEVHKDSINKDDSVLIIDDLIATGGTAEAAAK

SEQ ID NO: 119197 - protein, 150 aa, Unknown
  Bacterial polypetide isolated from the Sargasso Sea
MDLKDYIRSIQDYPKKGILFRDITTLVKNEKAFKECINQIVDRSKKFKIDKIAAIESRGFVFASAVSYLIDKPFILLRKKNKLPAETHSVDFELEYGTATIEVHKDSIEKNDSVLIIDDLIATGGTAEAAAKLVEISKGSVSGFIFVINL

SEQ ID NO: 119198 - protein, 175 aa, Unknown
  Bacterial polypetide isolated from the Sargasso Sea
MDLKEYIRSIPDYPKKGILFRDITTLIKNEKAFCNCIDKIVEKSKNFNFNKVAAVESRGFVFASAISYLVKKPFILLRKKNKLPADTHSVDFELEYGTATIEVHKDSIDDKDKVLVIDDLIATGGTAEASAKLIEMSKGSVAGFIFVINLFDLGGSKKLIDEGYKVENLMDFPGH

SEQ ID NO: 119199 - protein, 39 aa, Unknown
  Bacterial polypetide isolated from the Sargasso Sea
MDLKKYIRSIKDYPKKGILFRDITTLIKNEKAFEETINQ

SEQ ID NO: 119200 - protein, 137 aa, Unknown
  Bacterial polypetide isolated from the Sargasso Sea
MNLKDFIRSIPDYPKKGILFRDITTLIKNEKAFSETIDQIVERSKNMKFNKVAAIESRGFVFASAVSYILKKPFIMLRKKNKLPADVHSVDFQLEYGKATIEVHKDSIIDGDSILIIDDLIATGGTADAAAKLVEIS

SEQ ID NO: 119201 - protein, 175 aa, Unknown
  Bacterial polypetide isolated from the Sargasso Sea
MDLKDYIRSIPDYPKKGILFRDITTLIEDEKAFAHCIDLIFQKSKNFNFDKIAAIESRGFVFASAVSYLAKKPFIMLRKKNKLPSETHSVDFELEYGKATIEVHKDSIKENNKVLIIDDLIATGGTAEAAAKLVNISHGKVAGFIFVINLFDLSGCDNLRKQNYKVENLIEFPGH

SEQ ID NO: 119202 - protein, 175 aa, Unknown
  Bacterial polypetide isolated from the Sargasso Sea
MDLKEHIRSIKDYPKKGILFRDITTLIKNEKAFKECINQIVERSKKFQFDKIAAVESRGFVFASAISYILDKPFIMLRKKNKLPADVHSVDFELEYGTATIEVHKDSFGEGDKVLIIDDLIATGGTAEAAAKLIEISKSKVAGFIFVINLFDLGGTDNLLKKGYEVENLLDFPGH

SEQ ID NO: 119203 - protein, 59 aa, Unknown
  Bacterial polypetide isolated from the Sargasso Sea
MDLKKYIRSIPDYPKKGILFRDITTLIKDSKAFNYSIDQIIEISKKLDFDKIAAIESRG

SEQ ID NO: 119204 - protein, 164 aa, Unknown
  Bacterial polypetide isolated from the Sargasso Sea
MDLKEYIRSIPDYPKKGILFRDITTLIKDEKAFEKCINQIVEKSKNFKFNKIAAIESRGFVFASAVSYLLKKPLIMLRKKNKLPADTYSVDFELEYGKATIEVHKDSIKKEDSVLIIDDLIATGGTAEAASKLVEISNGKVAGFIFVINLFDLDGCNKLKKKNY

SEQ ID NO: 119205 - protein, 175 aa, Unknown
  Bacterial polypetide isolated from the Sargasso Sea
MDLKKHIRSIKDYPKKGILFRDITTLIKNPEAFKFTNDKIIEIAKKIDFDKVAAIESRGFVFASTVSYILSKPFILLRKKDKLPAETHSVDFKLEYGEATIEVHKDSINKDEKILVIDDLIATGGTAEAAAKLIGISGGKVAAFIFVINLFDLPGEKLLKDKGFIVKSLIEFPGH

SEQ ID NO: 119206 - protein, 175 aa, Unknown
  Bacterial polypetide isolated from the Sargasso Sea
MDLKDYIRSIPDYPKKGILFRDITTLIKDKDAFSECINQIVEKSKNYNFDKIAAIESRGFVFASAVSYILKKPFIMLRKKNKLPADVHSIDFELEYGTATIEVHKDSISQNENVLIIDDLIATGGTAEAAAKLVEISKGKIAAFIFVINLFDLGGCDKLMKKSFKVENLIEFPGH

SEQ ID NO: 119207 - protein, 171 aa, Unknown
  Bacterial polypetide isolated from the Sargasso Sea
MKEYVRTILDYPVKGIQFRDITTLLQDAGHFKQVIDEMTEPWKNTSIDAVLSIESRGFIMAGAIAYNIGAAFVPLRKPDKLPGETYKVSYTLEYGSTEMHIHKDALDNHKNLLIIDDLLATGGTALASVDLIEKFDKKNIVGAGFIINLPDLNGDKKLQERGINIHSLMDF

SEQ ID NO: 119208 - protein, 175 aa, Unknown
  Bacterial polypetide isolated from the Sargasso Sea
MDLKEYIRSIPDYPKKGILFRDITTLIKDEKAFAESINQIVEKSKNFKFNKIAAIESRGFVFASAVSYLLKKPFIMLRKKNKLPADTYSVDFELEYGTATIEVHKDSIQKEDSVLIIDDLIATGGTAEAAAKLVKISKGSVAGFIFVINLFDLGGCDSIKKKGHKVANLIEFPGH

SEQ ID NO: 119209 - protein, 175 aa, Unknown
  Bacterial polypetide isolated from the Sargasso Sea
MDLKEYIRSIADYPKKGILFRDITTLIKDEKAFAECINQIVEKSKNFKFNKIAAIESRGFVFASAVSYLLKKPFIMLRKKNKLPADTYSVDFELEYGTATIEVHKDSIQKEDSVLIIDDLIATGGTAEAAAKLVKISKGSVAGFIFVINLFDLGGCDSIKKKGHKVENLIEFPGH

SEQ ID NO: 119210 - protein, 175 aa, Unknown
  Bacterial polypetide isolated from the Sargasso Sea
MDLKEYIRSIPDYPKKGILFRDITTLIKNEKAFKNTIDQIVERSKNFKVDKIAAVESRGFVFASAVSYILNKPFVMLRKKNKLPADTHSVDFQLEYGTATIEVHKDSIDQNESILIIDDLIATGGTAEAAAKLVGMSGGKITGFIFVINLFDLGGCENLKKKGYKVESLIEFPGH

SEQ ID NO: 119211 - protein, 175 aa, Unknown
  Bacterial polypetide isolated from the Sargasso Sea
MNLKDHIRSIKDYPKKGILFRDITTLIKNEEAFAKCIDQIVDSSKKFKFDKIAAIESRGFVFASAVSYLLKKPFILLRKKNKLPAETHSIEFELEYGKAVMEIHKDSIKENDSVLLIDDLIATGGTAEAAAKLVEVSKGKVSGFIFVINLFDLGGCNNLLKNGYKVENLIEFPGH

SEQ ID NO: 119212 - protein, 175 aa, Unknown
  Bacterial polypetide isolated from the Sargasso Sea
MNLKDHIRSIPDYPKKGILFRDITTLIKNEKAFAETINQIIERSKKYKIDKIAAIESRGFVFASAVSYILKKPFIMLRKKNKLPAEVHSVDFELEYGTATIEVHKDSISKDETVLIIDDLIATGGTAKAAAKLVEMCEAKVAAFVFVINLFDLGGSDNLVKNNYKVENLINFPGH

SEQ ID NO: 119213 - protein, 177 aa, Unknown
  Bacterial polypetide isolated from the Sargasso Sea
TIMNLKDYIRSIPDYPKKGILFRDITTLIKDENAFAETINQIIERSKKYNFTKIAAIESRGFVFASAVSFVLKKPFIMLRKKNKLPADVHSVDFELEYGTATIEVHKDSINEKDEVLIIDDLIATGGTAEAAAKLVEISKGKVAAFVFVINLFDLGGSDNLVKSNYKVENLIEFPGH

SEQ ID NO: 119214 - protein, 171 aa, Unknown
  Bacterial polypetide isolated from the Sargasso Sea
MKEFVRTIKDYPIKGIQFRDITTLLQRADLFHDLIDEMTKPWENKNIDAIVSIEARGFIMAGAIAYKLNTAFIPMRKPDKLPADTFKIKFDLEYGSTEMHLHKDALDNHQNILIIDDLLATGGTAVAAVKLINMFENKNIVGAGFIINLPELKGEEILNKMDIETHSLMEF

SEQ ID NO: 119215 - protein, 137 aa, Unknown
  Bacterial polypetide isolated from the Sargasso Sea
MDLKEYIRSIPDYPKKGILFRDITTLIKNEKAFCYCIDQIVEKSKEFKFNKIAAVESRGFVFASAISYILKKPFILLRKKNKLPAETHSIDFELEYGTATIEMHKDSIIKDDSVIIIDDLIATGGTAEAAAKLIKIS

SEQ ID NO: 119216 - protein, 175 aa, Unknown
  Bacterial polypetide isolated from the Sargasso Sea
MDLKDYIRSIADYPKKGILFRDITTLIKNENAFKHTIDLLVEASKVFNSNKIAAIESRGFVFASAVSYLTNKPFIMLRKKNKLPAETYSVDFQLEYGDATIEVHKDSINKGDKVLIIDDLIATGGTAEASAKLVEMSEGSVAGFIFVINLFDLGGCEKLIEKGYKIKNLIEFPGH

SEQ ID NO: 119217 - protein, 175 aa, Unknown
  Bacterial polypetide isolated from the Sargasso Sea
MDLKEHIRSIQDYPKKGILFRDITTLIKNEKAFKECINQIVERSKKFNFDKIAAVESRGFVFASAISYILDKPFIMLRKKNKLPAEVHSVDFELEYGTATIEVHKDSFNENDNVLIIDDLIATGGTAEAAAQLIEISESKVAGFIFVINLFDLGGTDNLLKKGYKVENLLDFPGH

SEQ ID NO: 119218 - protein, 175 aa, Unknown
  Bacterial polypetide isolated from the Sargasso Sea
MDLKEYIRSIPDYPKKGILFRDITTLIKNEKAFTATIDQIIEVSKKYKIDKIAAIESRGFVFASAVSYLLKKPFVLLRKKNKLPADTYSVDFELEYGTATIEMHKDSVEKNDSVLIIDDLIATGGTADAAAKLIKMSGGNISAFIFVINLFDLGGIDKLIKDGYMVESLVKFPGH

SEQ ID NO: 119219 - protein, 180 aa, Unknown
  Bacterial polypetide isolated from the Sargasso Sea
MNDPLNLKRFIRTVDNFPIDGISFRDITSLIETPEAFVKTCDELTKIAKDFDSDIVASIESRGFIFAGTIARDLSLPFVLARKPGKLPNETYKKSFDLEYGSTSIEIQKNTLIGNNQKVVIVDDLVATGGTAIACAELFTENFNVKNSNILILSIIDLPELGGSKLIKEKGFAIKTIIDY

SEQ ID NO: 119220 - protein, 175 aa, Unknown
  Bacterial polypetide isolated from the Sargasso Sea
MDLKEYIRSIPDYPKKGILFRDITTLIKNEKAFTYCIDQIADKSKEFKFNKIAAVESRGFVFASALSYILKKPFILLRKKNKLPAETHSVDFELEYGTATIEVHKDSIDKDDSVIVIDDLIATGGTADAAAELIKISNGKVAGFIFVINLFDLGGSDKLIKQGYKVKNLINFPGH

SEQ ID NO: 119221 - protein, 175 aa, Unknown
  Bacterial polypetide isolated from the Sargasso Sea
MNLKDFIRSIPDYPKKGILFRDITTLIKNENAFAETINQIVERSKKYKFTKIAAIESRGFVFASAVSYLLKKPFIMLRKKNKLPADVHSIDFELEYGTATIEVHKDSLNENDSVLIIDDLIATGGTAEAAAKLVEISNGKVAAFIFVINLFDLGGSDNLIKNNYKVENLINFPGH

SEQ ID NO: 119222 - protein, 175 aa, Unknown
  Bacterial polypetide isolated from the Sargasso Sea
MDLKEYIRSIPDYPKKGILFRDITTLIKNEKAFTETINQIVERSKNFKFNKIAAIESRGFVFASAVSYLLKKPFILLRKKNKLPAERYSVDFELEYGTATIEMHKDSINKNDSVLIIDDLIATGGTADAAAKIIEMSKGKVSGFIFVINLFDLGGCDNLIEKGYKIENLISFPGH

SEQ ID NO: 119223 - protein, 180 aa, Unknown
  Bacterial polypetide isolated from the Sargasso Sea
MSDPLKLKQFIRTVNDFPIDGIAFRDITSLIETPVAFVKTCDELTSISELFDATSIASIESRGFIFAGSIAKDLSLPFILARKPGKLPNETFIKDFDLEYGSTSIEIQKNTVVNESDRVVIVDDLVATGGTAIACAELLTENFNVKKQNILILAVIDLPDLGGSKLIADQGYKIETLVSY

SEQ ID NO: 119224 - protein, 109 aa, Unknown
  Bacterial polypetide isolated from the Sargasso Sea
MSLPFILARKPGKLPNETYVKDFDLEYGSTSIEIQKNTMVNESDRVVIVDDLVATGGTAIACAELLTENFNVRRENILILAVIDLPDLGGSHLIADQGYGIETLVSYTS

SEQ ID NO: 119225 - protein, 175 aa, Unknown
  Bacterial polypetide isolated from the Sargasso Sea
MDLKEHIRSIQDYPKKGILFRDITTLIKNEKAFKECINQIVERSKKFQFNKIGAVESRGFVFASAISYILDKPFIMLRKKNKLPADVHSVDFELEYGTATIEVHKDSFDEGDKVLIIDDLIATGGTAEAAAKLIEISKSKVAGFIFVINLFDLGGTDNLVKKGYSVENLLDFPGH

SEQ ID NO: 119226 - protein, 139 aa, Unknown
  Bacterial polypetide isolated from the Sargasso Sea
MIFIFNRYKDKNITAIAGIEARGFIFGAIIAERLGISFVPIRKKNKLPCKVISEEYMLEYGSDILELDITALNSDSIVVIIDDLIATGGTAIAAGNLIKKLGANIHEYSFLVNLPDLGGENKLKDCNYSVHYLIEYEGE

SEQ ID NO: 119227 - protein, 175 aa, Unknown
  Bacterial polypetide isolated from the Sargasso Sea
MNLKDHIRSIPDYPKKGILFRDITTLIKNEKAFAETINQIIERSKKYKIDKIAAIESRGFVFASAVSYILKKPFIMLRKKNKLPAEVHSVDFELEYGTATIEVHKDSILKDESVLIIDDLIATGGTAEAAAKLVEMCEAKVAAFVFVINLFDLGGSDNLIKKNYKVENLIDFPGH

SEQ ID NO: 119228 - protein, 118 aa, Unknown
  Bacterial polypetide isolated from the Sargasso Sea
MKKLEDLIITYKDFPKKGIDFKDVLEILQYPEIFHDLILKMSSNEFLKNAEAIISIDARGFIFGSAVALQLSKPMIVARKPGKLPGHILTREYDLEYGKNSLSIQSKALKKFNSFVIV

SEQ ID NO: 119229 - protein, 191 aa, Unknown
  Bacterial polypetide isolated from the Sargasso Sea
MPYQKNNLFIYISQFIMDLKDYIRSIKDYPKKGILFRDITTLIKNEKAFKECIDQIVERTKKFKVDKIAAIESRGFVFASAVSYILNKPFILLRKKNKLPAESHSVDFELEYGTATIEVHKDSIKENDSVLIIDDLIATGGTAEAAAKLVTISKGSVSGFIFVINLFDLGGCDKLIKLGHKVENLIEFPGH

SEQ ID NO: 119230 - protein, 177 aa, Unknown
  Bacterial polypetide isolated from the Sargasso Sea
MAEKLIIKFDEYLDTVEKLALTISQNYKPTVLVGIMRGAAPIIDILSRILKLPTAYIVIQSYSGSGIENKQGELIFARDISSIASNSDYERVLLVDDLSDTGLTLNKSIEWLKQYEPVKNYIKEIKTACLWKKKSSSFTPDFCPIRLNSDPWIIQPTEHYEELNIEKIVSKQKKRAK

SEQ ID NO: 119231 - protein, 182 aa, Unknown
  Bacterial polypetide isolated from the Sargasso Sea
MSDPYNLKQFVRTVEDFPIDGITFRDITSLIETPDAFIKTCNKLTEISKLFDATSIASIESRGFIFAGSIAKDLSLPFILARKPGKLPNKTFIKDFDLEYGSTSIEIQKNTMVNKSDRVVIVDDLVATGGTAIACAELLTENFNVLNENILILAVIDLPDLGGSQLIADQGYGIETLLSYTS

SEQ ID NO: 119232 - protein, 175 aa, Unknown
  Bacterial polypetide isolated from the Sargasso Sea
MNLKDFIRSIPDYPKKGILFRDITTLIKDKNAFSETIDQIIEKSKKYDFDKIAAIESRGFVFASAVSYILKKPFILLRKKNKLPAEVHSVDFELEYGKATIEVHKDSIEKNDKVLIIDDLIATGGTAEAAAKLIEISGGKIACFIFVINLFDLNGSNKLVKIGHKVENLIEFPGH

SEQ ID NO: 119233 - protein, 180 aa, Unknown
  Bacterial polypetide isolated from the Sargasso Sea
MSDRLDLKKYIRTVKDFPIDGIIFRDITSLIETPEAFIKTCDELTRITKEFGANIVASIESRGFIFAGTIARDLELPFVLARKPGKLPNQTYKKSFDLEYGSTSIEIQQNTNVNKDQKIVIVDDLVATGGTAIACAELFTENFNINASDILILTVIDLPDLGGSDLIKNQGYHIETIVDY

SEQ ID NO: 119234 - protein, 175 aa, Unknown
  Bacterial polypetide isolated from the Sargasso Sea
MKLEKTIKSIPNYPKKGILFRDITSLLENKRAFNTTVKRMYKITKKIPHNKLAAIESRGFIFASVLAYLEKKPLILLRKKNKLPDKRISQKFTLEYGKATIEVHKRSVKKNDKILIVDDLIATGGTALAAAKLIEKCKGKVAGYIFLINLFDLPGNEKLEKKDYKSFSLIKFPGH

SEQ ID NO: 119235 - protein, 175 aa, Unknown
  Bacterial polypetide isolated from the Sargasso Sea
MNLKDYIRSIPDYPKKGILFRDITTLIKDENAFAETIDQIIERSKKYNFTKIAAIESRGFVFASAVSYILKKPFIMLRKKNKLPADVHSIDFKLEYGTATIEVHKDSINENDEVLIIDDLIATGGTAEAAAKLIEISRGKVSAFVFVINLFDLGGSENLVKNNYKVENLIEFPGH

SEQ ID NO: 119236 - protein, 175 aa, Unknown
  Bacterial polypetide isolated from the Sargasso Sea
MNLKDFIRSIPDYPKKGILFRDITTLIKDEKAFTETIDQIVERSKKFKVDKIAAIESRGFVFASAVSYVLKKPFIMLRKKNKLPADVHSIDFELEYGTATIEVHKDSIQENDSVLVIDDLIATGGTAEAAGKLIKQSKGNVSGFIFVINLFDLGGCDNLIKEGFKVENLIEFPGH

SEQ ID NO: 119237 - protein, 175 aa, Unknown
  Bacterial polypetide isolated from the Sargasso Sea
MNLKDFIRSIPDYPKKGILFRDITTLIKNEKAFSYTIDLIVEKSKQFKVDKIAAIESRGFVFASAVSYILKKPFILLRKKNKLPGDTYSVDFKLEYGDATMEVHKDSIDANDSVLLIDDLIATGGTAEAAAKLIEISKGKVAGFIFVINLFDLGGSDSLIKNGYKVENLIDFPGH

SEQ ID NO: 119238 - protein, 166 aa, Unknown
  Bacterial polypetide isolated from the Sargasso Sea
WIKCYLDFPKEGILFRDISLLLASPEGMSMVKKEFVSLISDWKPDLIAGIDARGFLFSSLIGEAMNIGTLMIRKSGKLPGEVIERSYDLEYGSNKLAMQKTNSLKGKKVVIMDDLLATGGTLMCARELIESQGALVCGCAVVVELSFLRGSELLECPVVSLASYED

SEQ ID NO: 119239 - protein, 166 aa, Unknown
  Bacterial polypetide isolated from the Sargasso Sea
MDLKNFIRSIPDYPKKGILFRDITTLIKDENAFAATINQIVERSKKYNFTKIAAIESRGFVFASAVSYILKKPFIMLRKKNKLPADVHSVDFELEYGTATIEVHKDSIGNEDSVLIIDDLIATGGTAEAAAKLVEISNGKVAAFIFVINLFDLGGSDNLIKKKLQS

SEQ ID NO: 119240 - protein, 122 aa, Unknown
  Bacterial polypetide isolated from the Sargasso Sea
MAEKLIIKFDEYLDTVEKLALTISQNYKPTVLVGIMRGAAPIIDILSRILKLPTAYIVIQSYSGSGIENKQGELIFARDISSIASNSDYERVLLVDDLSDTGLTLNKSIEWLKQYEPVKNYI

SEQ ID NO: 119241 - protein, 175 aa, Unknown
  Bacterial polypetide isolated from the Sargasso Sea
MDLKDYIRSIPDYPKKGILFRDITTLIEDEKAFAHCIDLIFEKSQNFKFDKIAAIESRGFVFASAVSYLAKKPFIMLRKKNKLPSDTHSVDFELEYGKATIEVHKDSIKKNDKVLIIDDLIATGGTAEAAAKLVNISHGTVAGFIFVINLFDLSGSDNLRKQNYKVENLIEFPGH

SEQ ID NO: 119242 - protein, 182 aa, Unknown
  Bacterial polypetide isolated from the Sargasso Sea
MSDPYNLKQYIRKVEDFPIDGITFRDITSLIETPDAFVETCTQLTDITKSFDATSIASIESRGFIFAGSIAKDLSLPFVLARKPGKLPNETFVKDFDLEYGSTSIEIQKNTMVNESDRVVIVDDLVATGGTAIACAELLTENFNVRKENILILAVIDLPDLGGSQLIADQGYGIETLVSYTS

SEQ ID NO: 119243 - protein, 180 aa, Unknown
  Bacterial polypetide isolated from the Sargasso Sea
MSDPLKIKQYIRTVNDFPIDGIAFRDITSLIETPVAFVETCEELTRISKSFDATSIASIESRGFIFAGSIAKDLSLPFILARKPGKLPNETFMKDFDLEYGSTSIEIQKNTVVSESDRVVIVDDLVATGGTAIACAELLTENFNVKKQNILILAVIDLPDLGGSKLIADQGYKIETLVSY

SEQ ID NO: 119244 - protein, 177 aa, Unknown
  Bacterial polypetide isolated from the Sargasso Sea
MSEKLIINFEEYLKTVEKLAIQINQTFNPTVLVGIMRGAAPIIDILSRIYKLPTAYIVIQSYSGEGMEDKQGNLVFARDISSIARNKDFERVLLVDDLSDTGLTLNRSIDWLKNYKPIKNYIKEIKTACLWKKKSSSFSPDFCPVKLNNDPWIVQPTEHFEELNIKQIIEKHKKKEG

SEQ ID NO: 119245 - protein, 175 aa, Unknown
  Bacterial polypetide isolated from the Sargasso Sea
MNLKDYIRSIKDYPKKGILFRDITTLIKNETAFEESINQIVERSKKFKVDKIAAIESRGFVFASAVSYILKKPFIMLRKKNKLPADVHSVDFELEYGTATIEVHKDSISENDSVLIIDDLIATGGTAEAAAELIEISKGNVAAFIFVINLFDLGGCDNLLKKGYKVENLMDFPGH

SEQ ID NO: 119246 - protein, 180 aa, Unknown
  Bacterial polypetide isolated from the Sargasso Sea
MNDFLNLKRFIRTVDNFPIDGISFRDITSLIETPEAFVKTCDELTKIAQDFGAEIVASIESRGFIFAGTIARDLSLPFVLARKPGKLPNETYKKSFDLEYGSTSIEIQKNTVIGNNQKVVIVDDLVATGGTAIACAELFTENFNVKNSDILILSIIDLPDLGGSKLIKEKGFAIKTIIDY

SEQ ID NO: 119247 - protein, 182 aa, Unknown
  Bacterial polypetide isolated from the Sargasso Sea
MSDQYNLKQHIRTVNDFPIDGITFRDITSLIEHPEAFVETCTQLTKISKSFNATSIASIESRGFIFAGSIAKDLSLPFILARKPGKLPNETFVKGFDLEYGSTSIEIQKNTMVNESDRVVIVDDLVATGGTAIACAELLTENFSVQNENILILAVIDLPDLGGSQLIADQGYGIETLVSYSS

SEQ ID NO: 119248 - protein, 175 aa, Unknown
  Bacterial polypetide isolated from the Sargasso Sea
MNLKDYIRSIPDYPKKGILFRDITTLIKDSKAFNYSIDQIIKISNKLDFDKIAAIESRGFVFASAVSYKLKKPFIMMRKKNKLPSEKISVDFQLEYGTATLEIHKDSLSEGDKVLIIDDLIATGGTAEAGAKLVEMSKAKVAGFIFIINLFDLGGNKKLIDKSYFTKSLIEFPGH

SEQ ID NO: 119249 - protein, 123 aa, Unknown
  Bacterial polypetide isolated from the Sargasso Sea
MKEYVRTILDYPVKGIQFRDITTLLQDADHFKQVIDKMTEPWKNNSIDAVLSIESRGFIMAGAIAYNIGAAFIPLRKPDKLPGATYKVSYTLEYGSTEMHIHKDALDNHKNLLIIDDLLATGG

SEQ ID NO: 119250 - protein, 171 aa, Unknown
  Bacterial polypetide isolated from the Sargasso Sea
MKEYVRTILDYPVKGIQFRDITTLLQDAGHFKQVIDEMTNPWKNLDIDAVLSIESRGFIMAGAIAYHIGAAFIPLRKPDKLPGETFKVSYTLEYGSTEMHIHKDALDNHKNLLIIDDLLATGGTALAAIDLINMFENKNIIGAGFIINLPELKGDKKLQERGVKIHSLMEF

SEQ ID NO: 119251 - protein, 136 aa, Unknown
  Bacterial polypetide isolated from the Sargasso Sea
MSDPLKIKQYIRTVNDFPIDGIAFRDITSLIETPVAFVETCEELTRISESFDATSIASIESRGFIFAGSIAKDLSLPFILARKPGKLPNETFMKDFDLEYGSTSIEIQKNTVVNESDSVVIVDDLVATGGTAIACA

SEQ ID NO: 119252 - protein, 148 aa, Unknown
  Bacterial polypetide isolated from the Sargasso Sea
KKIFSLVIDHISVIAKKKKINKIIGIDSRGFIFAAPVAYKNKIPLVLIRKSGKLPGNTFKARYSLEYGNDQMELNKMSINKYDSVMIVDDLIATGGTAKASADLIKKTNSKPIEFIFIIGLSDLLGIQKLTKKGHKCTLLSSFKESEK

SEQ ID NO: 119253 - protein, 86 aa, Unknown
  Bacterial polypetide isolated from the Sargasso Sea
YKVSYDLEYGSTEMHVHKDALDNHTNLLIIDDLLATGGTALAAIELVNMFENKNIIGAGFIINLPELKGDQKLINKDINIHSLMEF

SEQ ID NO: 119254 - protein, 175 aa, Unknown
  Bacterial polypetide isolated from the Sargasso Sea
MNLKDYIRSIPDYPKKGILFRDITTLIKNEKAFAKTIDLIVERSKQFQVDKIAAIESRGFVFASAVSYILKKPFILLRKKNKLPAETHSIDFKLEYGDATMEVHKDSINEKDNVLLIDDLIATGGTAEAAAKLIEISKGKVSGFIFVINLFDLKGSDNLINKGYKVENLMDFPGH

SEQ ID NO: 119255 - protein, 143 aa, Unknown
  Bacterial polypetide isolated from the Sargasso Sea
MDLKEYIRSIPDYPKKGILFRDITTLIKNETAFAETINQIVERSKNYKIDKIAAIESRGFVFASAVSYLLKKPFILLRKKNKLPADTYSVDFELEYGTATIEMHKDSIDENDSVLIIDDLIATGGTAKAAAKLIEMSKGNISA

SEQ ID NO: 119256 - protein, 177 aa, Unknown
  Bacterial polypetide isolated from the Sargasso Sea
MAEKLIIKFNEYLDTVEKLALVINQKYKPTVLVGIMRGAAPIIDILSRILKLPTAYIVIQSYSGSGIENKQGELIFARDISSIAKNVDYERVLLVDDLSDTGLTLNKSIEWLKQYKPVKNYIKEIKTACLWKKKSSSFTPDFCPVMLENDPWIIQPTEHYEELNIEEIISKQKKGAK

SEQ ID NO: 119257 - protein, 134 aa, Unknown
  Bacterial polypetide isolated from the Sargasso Sea
MTDKFKLKEYIRTVNNFPIAGIKFRDITSLIENPSAFKITCNELSNATSKYRASKIVSIESRGFIFAGSVANDLSLPFVLARKPGKLPNETHQKSFDLEYGSTSIEIQKNTSISIKDKIVIIDDLIATGGTAIA

SEQ ID NO: 119258 - protein, 171 aa, Unknown
  Bacterial polypetide isolated from the Sargasso Sea
MKDYVRTILDYPVKGIKFRDITTLLQNAGHFKQVIDEMTIPWKNKKIDAVLSIESRGFIMAGAIAYNIGAAFIPLRKPDKLPGETYKVSYTLEYGSTEMHIHKDALDNHLNLLIIDDLLATGGTALAALELIEKFENKNIIGSGFIINLPDLGGEKKLKNKGIKIHSLMEF

SEQ ID NO: 119259 - protein, 95 aa, Unknown
  Bacterial polypetide isolated from the Sargasso Sea
MADSLDQQLRALVRDVPDFPKPGILFRDLTPVMRDPQAWRQVMEGMQASLSPLQPEVIVGIEARGFIVGTSLAMAMGLGFVPVRKPGKLPGPITA

SEQ ID NO: 119260 - protein, 142 aa, Unknown
  Bacterial polypetide isolated from the Sargasso Sea
MKEYVRTIADYPVQGIQFRDITTLLQNAGHFKQVIDDMVKPWKNKKIDAVLSIESRGFIMAGAIAYFLNAAFIPLRKPHKLPFDTFKVSYDLEYGSTEMHIHTDALDGHKDLLIIDDLLATGGTALAAIEFNNKFSNKMYLE

SEQ ID NO: 119261 - protein, 161 aa, Unknown
  Bacterial polypetide isolated from the Sargasso Sea
MNKKLKNKLKKKIRVIPDFPKKGILFQDITSITDNKKLFKEVVLEISKYVKKNKFTKIAAVEARGFIFGSAVSFKTEIPFVPIRKKDKLPGKILKQKYKLEYGIDEIQIHKNSINEQDRVLIIDDLIATGGTALASAQLVRKCKAKSIEFYFIIDLKNIGG

SEQ ID NO: 119262 - protein, 134 aa, Unknown
  Bacterial polypetide isolated from the Sargasso Sea
MEIKTIESYISKIPDYPKPGILFYDISTLISDKAAFSASIKLLSKAVQKYNFDMIAAIDARGFLFGSAIAFHLEKGLIMVRKKNKLPGKKISFEYELEYGTDTLELNTEAKGKKILIVDDLLATGGTAGATIEL

SEQ ID NO: 119263 - protein, 167 aa, Unknown
  Bacterial polypetide isolated from the Sargasso Sea
MKEYVRTIADYPVEGIQFRDITTLLQNAGHFKQVIDDMVKPWQNKKIDAVLSIESRGFIMAGAIAYFLNAAFVPLRKPHKLPFDTFKTSYDLEYGSTEMHIHTDALDGHKDLLIIDDLLATGGTALAAVELIKKFEDKNIVGAGFIINLPDLSGDKKLIEKEIEIHS

SEQ ID NO: 119264 - protein, 167 aa, Unknown
  Bacterial polypetide isolated from the Sargasso Sea
MDLKKIIREIQDYPEKGIIFRDISTILANPDAFSFTINELGKNIQKFNPDYLAAVESRGFIFASPLSQIFKIPLILIRKKGKLPPPVIGIDYDLEYGKDTLEVSSSVIPKSKNILIVDDIIATGGTVNASIDLIEKTGNKVLGILSVIDLKLYKKPFTVPLRSIIHY

SEQ ID NO: 119265 - protein, 137 aa, Unknown
  Bacterial polypetide isolated from the Sargasso Sea
MNIQELKKKIRNIPDFPKKGIQYKDITTVLENYDAFKYSIDFFYDKFVNKEIDTVVGIESRGFIFGAPLALRLKKGFVLARKPNKLPAKKISKSYKLEYGMDSIEMHADSINENDKVLIVDDLLATGGTAKAVGELV

SEQ ID NO: 119266 - protein, 171 aa, Unknown
  Bacterial polypetide isolated from the Sargasso Sea
MKEYVRTIADYPVEGIQFRDITTLLQNAGHFKKVIDDMVKPWQNKKIDAVLSIESRGFIMAGAIAYFLNAAFVPLRKPHKLPFDTFKVSYDLEYGSTEMHIHTDALENHKDLLIIDDLLATGGTALAAVELIKKFEDKNIVGAGFIINLPDLSGDKKLIEKGIEIHSLMEF

SEQ ID NO: 119267 - protein, 179 aa, Unknown
  Bacterial polypetide isolated from the Sargasso Sea
MNKKLVNKLKKNIRVIPNFPKKGILFQDITSITDNKKLFTEVINEISKYARKKKFTKIAGVEARGFIFGATVAFKLGLPFVPIRKKGKLPGKVMRQKYYLEYGNDEIQIHSNSITSRDRILIIDDLIATGGTAIASAKLISKCKVKNIEFYFIIDLKNIGGSQKLGKKFKLSSILEAEG

SEQ ID NO: 119268 - protein, 113 aa, Unknown
  Bacterial polypetide isolated from the Sargasso Sea
ASAVAYNLSKSFILLRKKGKLPAERLSQDFVLEYGKATIEVHKDSIEQNDSVLIIDDLIATGGTAEAGAKLIEKSGGKVAGFVFVINLFDLNGTKKLIEKGYKVTSLINFPGH

SEQ ID NO: 119269 - protein, 167 aa, Unknown
  Bacterial polypetide isolated from the Sargasso Sea
MKEHIRTIYDFPIKGIKYRDITTLLKNPKLFSSLIDQMTEPWKEKSIDAVLSIESRGFIMAGAIAYKLNAAFVPLRKPGKLPSDTYKVSYDLEYGSTDMEIHKDALEGHTNLLIIDDLLATGGTVIAAIDLINKFEAKKIIGAGFIINLSDLEGQKKLDLKGINYHF

SEQ ID NO: 119270 - protein, 177 aa, Unknown
  Bacterial polypetide isolated from the Sargasso Sea
MKEFQDLKDSIRTVPDYPVQGVQFRDITTLLQNADLFKKMIDGMTNQWVETSIDAILSIESRGFIMAGALAYNLGTAFVPLRKPEKLPYDTYSVSYDLEYGSTDMHIHIDALRGHKKLLIIDDLLATGGTVLASLDLIKKFEGKEIVGAGFVINLPSLGGLDKLNSLNVNTRFLMEF

SEQ ID NO: 119271 - protein, 116 aa, Unknown
  Bacterial polypetide isolated from the Sargasso Sea
MFLPSAVSYLLKKPFILLRKKGKLPAETHSVEFELEYGRATMEIHKDSIVKNDLVLLIDDLIATGGTAEAAAKLVEKSEGKVAGFLFVINLFDLNGIKKLKEKGYNSISLLDFPGH

SEQ ID NO: 119272 - protein, 175 aa, Unknown
  Bacterial polypetide isolated from the Sargasso Sea
MNIEQIKETITIVKNYPIKGIVFKDITTLLENPEAFKSTVDIMVDKVKHLDFNRVVGVESRGFFWSGPIAYALSKSFVLARKPGKLPRKAAEKFFSLEYGTNTVHIHEDAIKKGDKVLVVDDLIATGGTAMATAELCQELGATEVHIIALIDLPKLGGSKKLAEKFGEVITLLDY

SEQ ID NO: 119273 - protein, 171 aa, Unknown
  Bacterial polypetide isolated from the Sargasso Sea
MKEYVRTIADYPVKGIQFRDITTLLQDAGHFKEVIDDMTKPWKNKNIDAVLSIESRGFIMAGAIAYFLNAAFIPLRKPDKLPFKTYKVSYDLEYGSTEMHIHTDALDGHDNLLIIDDLLATGGTALAAVELIEKFNDKNIVGAGFIINLPDLNGDKKLIDKGINIHSLMEF

SEQ ID NO: 119274 - protein, 180 aa, Unknown
  Bacterial polypetide isolated from the Sargasso Sea
FDEYAIKSLIRPVPGFPKEGVTFRDITPLFQSPKALRMVADSLIQRYIDSPVTHIGAIDARGFLIGSILAYELNRPLVLFRKAGKLPADTLSASYETEYGEATLQMHRDALSGGEQVLLLDDLIATGGTFLAAASLVRQSGADVYEAAAIIDLPDLGGSQQMQDTGIPTYTLCAFAESER

SEQ ID NO: 119275 - protein, 170 aa, Unknown
  Bacterial polypetide isolated from the Sargasso Sea
MKKLEDLIFTYKDFPKKGIDFKDVLEILQYPDIFQDLISKMSSSNFLKNAEAIVSIDARGFIFGSAVALESSKPMIVARKPGKLPGHLLTREYDLEYGKNSLSIQSNAMKKFNSFVIVDDLLATGGTVNCVSRLLQDQRKEVLGLITVIELSKLKGRSNINFPVESIISL

SEQ ID NO: 119276 - protein, 100 aa, Unknown
  Bacterial polypetide isolated from the Sargasso Sea
GGGVVCARKEGKTPTAKHTVSYDLEYGSATLEMAVVEHLDSSRAVIVDDVLATGGTLQATNQLATEVGYDVIDNIVLVDLSFIPRTENFNLNVKSVVTYE

SEQ ID NO: 119277 - protein, 143 aa, Unknown
  Bacterial polypetide isolated from the Sargasso Sea
NQEPEVFREVILKMSSHKIIKNSEAIISIEARGFIFGSAISFHASKPMIVARKPGKLPGELIKEDYDLEYGKNSLSIQKDAIKKFSSYAIVDDLLATGGTVNCVSKLAYQNGKSITGLLTVVELVELCGRSKFNFPVESIISI

SEQ ID NO: 119278 - protein, 170 aa, Unknown
  Bacterial polypetide isolated from the Sargasso Sea
MNLKDKIADYPNFPKKGILFRDFSPILGDPSALSFMVEEFSKKFHPNDVDVFAGIESRGFIIACALALKYNKGMILVRKAGKLPGKVVKTSYTLEYGKATLEIQKDVIQEGQRVLICDDLLATGGTAKAAAKLIEKINGTIVGFAFIIELLELNGRDKIKDYRSESLVEY

SEQ ID NO: 119279 - protein, 152 aa, Unknown
  Bacterial polypetide isolated from the Sargasso Sea
MFRDFSPILGDPSALSFMIEEFSKKFHPNDVDVFAGIESRGFIIACALALKYNKGMILVRKAGKLPGKVVKTSYTLEYGKATLEVQKDVIQEGQRVLICDDLLATGGTAKAAAKLIEKINGTIVGFAFIIELLELNGRDKIKDYRSESLVEY

SEQ ID NO: 119280 - protein, 176 aa, Unknown
  Bacterial polypetide isolated from the Sargasso Sea
MSSIKDLIRTIPDFPIEGIMFRDVTTLFDDAIGFQKCIDRLAEPYKKANVDKVIGLEARGFIIGGAIAKELECGFIPIRKEGKLPSKTIAQDYELEYGKATLEIHEDALSAGDKVIIVDDLLATGGTAEAGIALIEKLGGEILGCSFIVNLPDLGGSKKLEQMGVSTHILCEFEGN

SEQ ID NO: 119281 - protein, 166 aa, Unknown
  Bacterial polypetide isolated from the Sargasso Sea
MSFKNYITEIPNFPIDGVNFKDLSPLISDSKMFREAIKTMGDLIIWEDKKYVGGVDYWIGIESRGFIFASALAMHFGGGVVCARKEGKTPTAKHTVSYDLEYGSATLEMAHVEHLDSSRAVIVDDVLATGGTLQATNQLAKEVGYEIVDNLVLVDLQFVPRTENLT

SEQ ID NO: 119282 - protein, 177 aa, Unknown
  Bacterial polypetide isolated from the Sargasso Sea
LSSNFLLMKIEEIESFIGKVPDFPKPGILFYDISTLIYNNEAFTSSLEKFGELFDKYKFDTIAAIDARGFIFGSALAHKLKLGMMMIRKKNKLPGKKISFEYDLEYGKDTLEININVKNKKFLLIDDLLATGGTANAAVKLIEKAGGKVSCFGSLIELSFLKGRNKLSVPVQTLIKY

SEQ ID NO: 119283 - protein, 127 aa, Unknown
  Bacterial polypetide isolated from the Sargasso Sea
MDLKKYIRSIPDYPKKGILFRDITTLIKDENAFAETINQIVERSKKFEFSKIAAIESRGFVFASAVSYILKKPFVMLRKKNKLPADVHSVDFELEYGKATIEVHKDSISEKDSVLIIDDLIATGGTA

SEQ ID NO: 119284 - protein, 175 aa, Unknown
  Bacterial polypetide isolated from the Sargasso Sea
MDLKKYIRSIPDYPKKGILFRDITTLIKNPEAFKFTNDKIIEIAKKMQFDKVAAIESRGFVFASTVSYILNKPFILLRKRNKLPAETFSVDFTLEYGDATIEVHKDSISKDEKILVIDDLIATGGTAEAAAKLIKISGGSVAGFIFVINLFDLPGNKLLKDKGFKTDCLVEFPGH

SEQ ID NO: 119285 - protein, 157 aa, Unknown
  Bacterial polypetide isolated from the Sargasso Sea
MDLKKYIRSIQDYPKKGVLFRDITTLIKNEKAFCECIDQIVSKSNNFQFNKLAAIESRGFVFASAVSYILKKPFILLRKKNKLPAALHSVDFKLEYGTATMQVHKDAINENDTVLLIDDLIATGGTAEAAAKLIEISNGKVAGYIFVINLFDLGGCD

SEQ ID NO: 119286 - protein, 133 aa, Unknown
  Bacterial polypetide isolated from the Sargasso Sea
EEFSKKFHPNDIDVFAGIESRGFIIACALALKYNKGMILVRKAGKLPGKIVKTSYTLEYGKATLEIQKDVIQEGQRVLICDDLLATGGTAKAAAKLIEKINGTVVGFAFIIELLDLNGRDKIKEYRSESLVEY

SEQ ID NO: 119287 - protein, 120 aa, Unknown
  Bacterial polypetide isolated from the Sargasso Sea
MNLKQHIRDVPDFPKPGILFRDITPLLASHEAFAESIHKLAEPWQNSAIDAVAAVEARGFLFAGPLALKLGVGLIPVRKPGKLPADTISYQYELEYGTDTLEMHSGILTPQSRVLIIDDV

SEQ ID NO: 119288 - protein, 175 aa, Unknown
  Bacterial polypetide isolated from the Sargasso Sea
MDLKKYIRSIPDYPKKGILFRDITTLIKNADAFKVTNDKILEIAKKIEFSKVAAIESRGFIFASTISYLLKKPFILLRKKNKLPGEVHSIDFELEYGKATIEVHKDSIEKNDKILVIDDLIATGGTAEAAAKLIEISGGKVAAFIFVINLFDLPGNDLLKKKGYLTKSLIEFPGH

SEQ ID NO: 119289 - protein, 133 aa, Unknown
  Bacterial polypetide isolated from the Sargasso Sea
MDYKSLITDIQNFPIDGVNFKDISPLLASPQFDEVILKMGELVEKPDYWVGIESRGFIFASALSVKFGGGVILCRKAGKLPGKIITKTYVTEYSEDELSIQKGTGKVIIVDDVLATGGTLSTVNSLCVSAGYD

SEQ ID NO: 119290 - protein, 160 aa, Unknown
  Bacterial polypetide isolated from the Sargasso Sea
MNIEQIKETITIVKDYPIKGIVFKDITTLLENPEAFKSTVDIMVDKVKHLDFNRVVGVESRGFFWSGPIAYALSKSFVLARKPGKLPRKAAEKFFSLEYGTNTVHIHEDAISKGDKVLVVDDLIATGGTAMATAELCQELGASEVHIIALIDLPKLGGSK

SEQ ID NO: 119291 - protein, 171 aa, Unknown
  Bacterial polypetide isolated from the Sargasso Sea
MEDLKKWIKSYPDFPSKGILFRDISPLLAEPKALSLLKDRFIETIKPLNADYVAGIDARGFLFCTLVAENLGLGALMIRKPNKLPGELIEKSYELEYGSNSLTVQKKDLEGKSIVIVDDLLATGGSMQCSKELLESLGANVVAGAVVIELKSLKGSSALNMPIISLISYED

SEQ ID NO: 119292 - protein, 171 aa, Unknown
  Bacterial polypetide isolated from the Sargasso Sea
MDLKKYIRSIQDYPKKGILFRDITTLIKNAEAFKYTNDKIIEISKKIDFDKVAAIESRGFIFASTVSYLMEKPFILLRKKDKLPAETHSIDFELEYGKATIEVHKDSINKGEKVLIIDDLIATGGTAEAAAKLVELSGGKVAGFIFVINLFDLPGEKLLKKKGYLTKSLIE

SEQ ID NO: 119293 - protein, 76 aa, Unknown
  Bacterial polypetide isolated from the Sargasso Sea
MDYIKQKIRTIPDFPKPGILFRDITTLLSDPEAFNSVIDLFVEHYQKQQIDLVVGIESRGFIVGAPLALRLGKGLS

SEQ ID NO: 119294 - protein, 44 aa, Unknown
  Bacterial polypetide isolated from the Sargasso Sea
MNLSEHIRPIPDFPKPGILFRDITPLLAHPEALKEAIQQIAAPW

SEQ ID NO: 119295 - protein, 87 aa, Unknown
  Bacterial polypetide isolated from the Sargasso Sea
MSIKSKIRTIPNYPKDGIMFRDISSLLSDADGFIETIETLANRYYEKKDDFDFIIGIESRGFILGAALALKLEKGFIMVRKPGKLPG

SEQ ID NO: 119296 - protein, 152 aa, Unknown
  Bacterial polypetide isolated from the Sargasso Sea
MNLKDFIRSIPNYPKKGILFRDITTLIKDEKAFAETINQIVEKSKKFEFNKIAAIESRGFVFASAVSYLLNKPFIMLRKKNKLPADVHSVDFELEYGTATIEVHKDSINKEDKVLIIDDLIATGGTAKAAAQLVEISKGKVSAFIFVINLFD

SEQ ID NO: 119297 - protein, 170 aa, Unknown
  Bacterial polypetide isolated from the Sargasso Sea
MKNLESLIKTYYDFPKKGIAFKDILGIIQDPEVFRELILKMSSNNVIKNSEAIISIEARGFIFGSAISLQASKPMLVARKPGKLPGELINEKYSLEYGQSTISIQKESLNRFKSYAIVDDLLATGGTVECVANLIRKEGKSVCGLVTVVELLELEGRSRFDFPVESIICL

SEQ ID NO: 119298 - protein, 158 aa, Unknown
  Bacterial polypetide isolated from the Sargasso Sea
MKSLIEKIRTVPNFPQNGIMFRDITTLLIDPDGFKTAIDMTVKKWRGLGVTKIVGIDARGFILGGAIAYNLGVGFLPVRKKGKLPPETISEEYQLEYGVDTLEVLQESLDSSDKVVVVDDLIATGGTAEATVKLIRRLRAEVLGCSFIINLPDLGGVS

SEQ ID NO: 119299 - protein, 87 aa, Unknown
  Bacterial polypetide isolated from the Sargasso Sea
PTHGVDYELEYGKDRVKVHQDAISEGSRVLLVDDLIATGGTIQGSAKLIKMAGGVIVGYAFVIELIDLEGRKGLQEPVFSLIEFEGH

SEQ ID NO: 119300 - protein, 175 aa, Unknown
  Bacterial polypetide isolated from the Sargasso Sea
MLESIDLDRTIAKVPDYPKPGILFYDISTLLMNTQAWAATVRRLADKISQYKPDIIAGIESRGFLLASPVAIELTAGVQMIRKQGKLPGETLSHTYDLEYGHDTLEIQKSSALSGKRVAIIDDIFATGGTLSAATTLIRKQESIVVCSACILELAFLKGRSKLDAPFISLVQVTE

SEQ ID NO: 119301 - protein, 176 aa, Unknown
  Bacterial polypetide isolated from the Sargasso Sea
KEFQDLKDSIRTVPDYPVQGVQFRDITTLLQKPHLFKKMIDAMTNQWKAYQIDAILSIESRGFIMAGALAYNLNTAFIPLRKPQKLPFKTHSVSYELEYGATDMHIHIDALDGHTNLLIIDDLLATGGTVIAALDLIKKFQDKIIVGAGFVINLPELGGGTKLEKLGVESKYLLEF

SEQ ID NO: 119302 - protein, 99 aa, Unknown
  Bacterial polypetide isolated from the Sargasso Sea
MNKKLKNKLKKKIRVIPNFPKKGIQFQDITSITDNRKLFTEVIDEISKYCKKNKFSKVAGIEARGFIFGSAISYKLGLPFVPIRKKGKLPGKVIKQNTS

SEQ ID NO: 119303 - protein, 175 aa, Unknown
  Bacterial polypetide isolated from the Sargasso Sea
MDLKKYIRSIPDYPKKGILFRDITTLIKNPEAFNFSVDKIIEISKKIKFDKVAAIESRGFIFAAVVSYRLKKPLVMMRKKNKLPAARYSVDFELEYGKATIEVHKDSINKDDNILIIDDLIATGGTAEAGAKLVEISKGKVAGFIFIINLFDLGGNQKLKDNSYFTESLIDFPGH

SEQ ID NO: 119304 - protein, 48 aa, Unknown
  Bacterial polypetide isolated from the Sargasso Sea
MDLKKYIRSIPNYPKKGILFRDITTLIKNPEAFNFSVDKIIEISKKIK

SEQ ID NO: 119305 - protein, 135 aa, Unknown
  Bacterial polypetide isolated from the Sargasso Sea
MNLTDYIKDVPNFPKKGIIFKDICPLLKSPEAWTKVMTQLGLFCEETTPDLIVGIESRGFIVGSSLATRQRLGFVPIRKSGKLPGNVLKADYTLEYGEDELEIQIDAFEGNPRVLLIDDLLATGGTVNASTELIE

SEQ ID NO: 119306 - protein, 70 aa, Unknown
  Bacterial polypetide isolated from the Sargasso Sea
MDLRQFIRDIPDFPKPGILFRDFTPLLRDPEAWRAVMKQMGTICEALKPDLIVGIESRGFIVGDVLATDL

SEQ ID NO: 119307 - protein, 175 aa, Unknown
  Bacterial polypetide isolated from the Sargasso Sea
MDLKKYIRSIPDYPKKGILFRDITTLIKNPEAFNFTIDKIVEISKKLKFDKISAIESRGFVFASVVSYKLKKPLIMMRKKNKLPAERYSVDFELEYGKATIEIHKDSINKNDKVLIIDDLIATGGTAEAGAKLVEISGGKVAGFIFIINLFDLGGNKKLLAKSYFAESLLEFPGH

SEQ ID NO: 119308 - protein, 175 aa, Unknown
  Bacterial polypetide isolated from the Sargasso Sea
MDLKKYIRSIPDYPKKGILFRDITTLIKNPDAFNYSVDKIIEISKKIKFDKVSAIESRGFIFASVVSYKLKKPLVMMRKKNKLPAERHSVDFELEYGKATIEVHKDSISKGESILIIDDLIATGGTAEAAAKLVEISGGKVSGFIFIINLFDLGGNKKLEDNSYFTESLIDFPGH

SEQ ID NO: 119309 - protein, 136 aa, Unknown
  Bacterial polypetide isolated from the Sargasso Sea
MKEYVRTIADYPVKGIQFRDITTLLQNAGHFKQVIDDMVKPWQNKKIDAVLSIESRGFIMAGAIAYFLNAAFIPLRKPHKLPFDTFKISYDLEYGSTEMHIHTDALDGHKDLLIIDDLLATGGTALAAVELIKKFE

SEQ ID NO: 119310 - protein, 122 aa, Unknown
  Bacterial polypetide isolated from the Sargasso Sea
MNIEKYIRDIQDFPKPGIGFKDITPLLQNAQATQACLNLLVSSLQDKKIDKVVGVESRGFFFGMLLAQKLGVGFIPVRKPKKLPFDTISASYELEYGSDVLEMHTDAIEKGENVLIHDDVLA

SEQ ID NO: 119311 - protein, 179 aa, Unknown
  Bacterial polypetide isolated from the Sargasso Sea
MNKKLKNNLEKKIRVIPNFPKKGIQFQDITSITDSRRLFTEVVNEISKYCKKNKFTKVAGIEARGFIFGSAVAYKLGLPFIPIRKKGKLPGKIVKQKYKLEYGMDEIQVHKHSITSRDKVLIIDDLIATGGTASAAAKLISKLGVKKIEFFMIIDLWNLEGSKKISKSYQVRSLMKAEG

SEQ ID NO: 119312 - protein, 128 aa, Unknown
  Bacterial polypetide isolated from the Sargasso Sea
MEKKLIISFDQYLETVEKLSVEINKTYNPTVLVGIMRGAAPIIDILSRIFKLPTAYIVIQSYSGKGIEDKQGELVFSREISSIASERDFKRVLLVDDLSDTGLTLNKSIDWLKNYDPIKNFITEIKTA

SEQ ID NO: 119313 - protein, 135 aa, Unknown
  Bacterial polypetide isolated from the Sargasso Sea
TIDIFYEEFKNSNIDTVVGIESRGFIFAAPLALRLNCGMVLARKPGKLPSKIISEEYSLEYGEDSIEMHVDSINVKSNVLIVDDLLATGGTAKSVCNLVAKLGGKIHAASFLIILKDLNGKEMLPVDQIFSILEF

SEQ ID NO: 119314 - protein, 151 aa, Unknown
  Bacterial polypetide isolated from the Sargasso Sea
RDHPKTGILFRDIQPLLANHEIFRKAINDMLNLIDYTKVDYFIGIESRGFIFSTSLAINSGKGNKLIRKKGKLPPHNLVSLKYDTEYSSDNIEMEKGQGRVIIVDDVYATGGTMSASIELAEKAGYNVIDTICFLDIGLKKNHNTKCVIYY

SEQ ID NO: 119315 - protein, 80 aa, Unknown
  Bacterial polypetide isolated from the Sargasso Sea
MKLTERINQSIRDVADFPKKGIVFKDITPILKDAQLSKDICDELAINFDSEVTHVAGIESRGFLFGFPAAMKKDISFILI

SEQ ID NO: 119316 - protein, 170 aa, Unknown
  Bacterial polypetide isolated from the Sargasso Sea
MDLSKYIRDIPDFPIQGIIFKDITPLLSDTGAFQETINRIIKNYNFDEIDVIAGVESRGFLLAAPIADRMKKPLVLFRKSGKLPYKTKSASYDLEYGSSTIEIHEDSIKTKDRILLIDDLIATGGTLSACLDLVDQFNAKVNGIAVIIELSFLNGRDMLKNVDIFSLIKY

SEQ ID NO: 119317 - protein, 127 aa, Unknown
  Bacterial polypetide isolated from the Sargasso Sea
MELSKYIDTVLNYPQDGVAFKDITPLLRNKDAFRFALDEFERHFAGDGIQYVAGIEARGFLFASALADRLKCGLIPIRKSGKLPGDVITQEYDLEYGTAELGIRKDSLTDNARVLIIDDVLATGGTA

SEQ ID NO: 119318 - protein, 175 aa, Unknown
  Bacterial polypetide isolated from the Sargasso Sea
MDLKKYIRSIPDYPKKGILFRDITTLIKNAEAFKYTNDKIIELSKKIQFDKVAAIESRGFVFASTVSYQLSKPFVLLRKKNKLPAETHSVDFELEYGKATIEVHKDSISENEKILIIDDLIATGGTAEAAAKLVEISGGKVAGFIFVINLFDLPGNKLLNKKGYKTHSLIEFPGH

SEQ ID NO: 119319 - protein, 176 aa, Unknown
  Bacterial polypetide isolated from the Sargasso Sea
MKSNINYLEKKIRAIKDYPKPGIIYQDITPLLRDPQAFSLAIDLCCEKVDRDIDLIAAIDARGFILGSGIAYKTGKGIIPIRKMNKLPYNVIAEKYSLEYGHDQIELHTDSIEEGQKIVLVDDVLATGGTTEAAIKLIDRLGGQLCAIIFLLELKDLNGRTKIAKYADNIHSLIEF

SEQ ID NO: 119320 - protein, 158 aa, Unknown
  Bacterial polypetide isolated from the Sargasso Sea
KRNLFQTFTSITDDAKLLRQVVKSISRYAKKNKFTKIAAVEARGFIFGTAIAYECNVPLVPIRKKGKLPGDVLKQKYSLEYGNDEIQIHKGSINSKDKVLIVDDLIATGGTALASAKLISKLKVKKIEFYMIIDLENVGGSQAVGKKYKISSLLKTKG

SEQ ID NO: 119321 - protein, 151 aa, Unknown
  Bacterial polypetide isolated from the Sargasso Sea
FSLVSDPTCQKKIVEKIASYARKNSITKIAGIEARGFIFGSLVAYKLNIPFVPIRKKGKLPGKVNKIKYKLEYGFDQIEMQDCSLKKQDKVLIVDDLIATGGTALASSKLISKMGIKSIFFAFVINLYNLKGVRLLEKNKYSYMSIIDAEG

SEQ ID NO: 119322 - protein, 167 aa, Unknown
  Bacterial polypetide isolated from the Sargasso Sea
KDKIADYPNFPKKGILFRDFSPILGDPSALSFMIEEFSKKFHPNDVDVFAGIESRGFIIACALAQKYNKGMILVRKAGKLPGKVVKTSYTLEYGKATLEIQKDVIQEGERVLICDDLLATGGTAKAAAKLIEKINGTIVGFAFIIELLELNGRDKIKDYRSESLVEY

SEQ ID NO: 119323 - protein, 170 aa, Unknown
  Bacterial polypetide isolated from the Sargasso Sea
MKKLEDLILTYKDFPKKGIDFKDVLEILQYPDIFKDIILKMSANKFLKNAEAIVSIDARGFIFGSAVALESSKPMIVARKPGKLPGHIFEREYALEYGKNSLSIQSNALKKFNSFVIVDDLLATGGTVNCVSRLLHEERKEILGLITVVELKKLKGRSKLNFPVQSMVKV

SEQ ID NO: 119324 - protein, 172 aa, Unknown
  Bacterial polypetide isolated from the Sargasso Sea
MNKFDQWIDNYPDFPKKGILFKDISPLLASPEGMSLLKKEFVKLIAVLKPDLIAGIDARGFLFSTLIGESLNIGSLMIRKSGKLPGEVIERSYDLEYGSNTLAMQKLNNLKDKKVVIMDDLLATGGTMQCAKDLIESQGAEVCGCAVVVELNFLEASKFLECPVISLASYEI

SEQ ID NO: 119325 - protein, 175 aa, Unknown
  Bacterial polypetide isolated from the Sargasso Sea
MNIEQIKETITIVKDYPIKGIVFKDITTLLENPEAFKSTVNIMVDKVKHLDFNRVVGVESRGFFWSGPIAYALSKSFVLARKPGKLPRKAAEKFFSLEYGTNTVHIHEDAIKKGDKVLVVDDLIATGGTAMATAELCQELGATEVHIIALIDLPKLGGSKKLAEKFGEVITLLDY

SEQ ID NO: 119326 - protein, 105 aa, Unknown
  Bacterial polypetide isolated from the Sargasso Sea
QRQSLGFVPVRKPGKLPGGVIGIDYSLEYGSDRLEIQEDALNGKPRVLVVDDLLATGGTASAAGALVDKAGGTLCGFAFVIELDGLGGRAALPQGLPVEALLVYS

SEQ ID NO: 119327 - protein, 171 aa, Unknown
  Bacterial polypetide isolated from the Sargasso Sea
MEDLQKWIKSYPDFPSKGILFRDISPLLAEPSALSLLKDKFVETIRPLSPDYIAGIDARGFLFCTLVAEQLGLGALMIRKPNKLPGELIEKKYELEYGTNSLSIQKLNLENKSIVIIDDLLATGGSMQCSKDLLESLGANVVGGAVVIELTSLKGSSQLNMPIISLISYAD

SEQ ID NO: 119328 - protein, 175 aa, Unknown
  Bacterial polypetide isolated from the Sargasso Sea
MDLKKYIRSIPDYPKKGILFRDITTLIKNAGAFKYANDKIIEISNKLDFDKVAAIESRGFVFASTLSYHSQKPFILLRKKDKLPAPTHSVDFELEYGKATIEIHKDSIEKGEKILIIDDLIATGGTADAAAKLIEISGGKVAGFIFVINLFDLPGEKLLKDKGYILKSLVRFPGH

SEQ ID NO: 119329 - protein, 170 aa, Unknown
  Bacterial polypetide isolated from the Sargasso Sea
MNLRDKIGDYPDFPKKGILFRDFSPILGDPSALSFMVEEFSKKFHPNDVDVFAGIESRGFIIACALALKYNKGMILLRKAGKLPGKVAKTSYTLEYGKAILEVQKDVIKEGQRVVICDDLLATGGTAKAAAKLIEKIKGKITGFAFIIELLELNGRDKIKDYRSESLVEY

SEQ ID NO: 119330 - protein, 171 aa, Unknown
  Bacterial polypetide isolated from the Sargasso Sea
MKEYVRTIADYPVKGIQFRDITTLLQNAGHFKQVIDDMVKPWQNKKIDAVLSIESRGFIMAGAIAYFLNAAFVPLRKPHKLPFETFKTSYDLEYGSTEMHIHTDALDGHKDLLIIDDLLATGGTALAAVELIKKFEDKNIVGAGFIINLPDLSGDKKLIEKGIEIHSLMEF

SEQ ID NO: 119331 - protein, 175 aa, Unknown
  Bacterial polypetide isolated from the Sargasso Sea
MDLKKYIRSIPDYPKKGILFRDITTLIKNAEAFKFTNDRIVEIAKTIDFDKVAAIESRGFVFASTVSYLLNKPFVLLRKKNKLPADVHSIDFKLEYGDATIEVHKDSIEKNEKILIIDDLIATGGTAEAAAKLIEISGGKVAAFIFVINLFDLPGNNLLKEKGYKTQSLIEFPGH

SEQ ID NO: 119332 - protein, 175 aa, Unknown
  Bacterial polypetide isolated from the Sargasso Sea
MDLKKYIRSIPDYPKKGILFRDITTLIKNPEAFNFSVDKIIEISKKIKFDKVAAIESRGFIFAAVVSYRLKKPLIMMRKKNKLPAERHSVDFELEYGRATIEVHKDSIGKDDNVLIIDDLIATGGTAEAGAKLVEISEGKVAGFIFIINLFDLGGNQKLKDNSYFTESLIDFPGH

SEQ ID NO: 119333 - protein, 178 aa, Unknown
  Bacterial polypetide isolated from the Sargasso Sea
MDKIGIKKYIRTITDFPHKGIMFRDVTTLFSDPNGFDLTIKGMLSSVENTNIDKVVGIEARGFILGGALANKLHCGFVPIRKSGKLPGSVISQDYELEYGQDTLEIHLESIGPGERVLLIDDLLATGGTAEAGVKLIEKLGGNIVSCNFIVNLPDLGGSKKLANLGLSTHFLCSFSGT

SEQ ID NO: 119334 - protein, 170 aa, Unknown
  Bacterial polypetide isolated from the Sargasso Sea
MNLKDKIADYPNFPKKGILFRDFSPILGDPSSLSFMIEEFSKKFHPNDVDVFAGIESRGFIIACALAQKYNKGMILVRKAGKLPGKVVKTSYTLEYGKATLEVQKDVIQEGQRVLICDDLLATGGTAKAAAKLIEKINGTIVGFAFIIELLELNGRDKIKDYRSESLVEY

SEQ ID NO: 119335 - protein, 179 aa, Unknown
  Bacterial polypetide isolated from the Sargasso Sea
MNKKLKNNLEKKIRVIPNFPKKGIQFQDITSITDSKQLFTEVVNEISKYCKKNKFTKVAGIEARGFIFGSAVAYKLGLPFIPIRKKGKLPGKIVKQKYKLEYGMDEIQVHKHSITSRDKVLIVDDLIATGGTANAAAKLISKLGVKRIEFFMIIDLWNLEGSKKISKSYQIRSLMKAEG

SEQ ID NO: 119336 - protein, 175 aa, Unknown
  Bacterial polypetide isolated from the Sargasso Sea
MNIEQIKETITIVKDYPIKGIVFKDITTLLENPDAFKSTVDIMIDKVRHLDFNRVVGVESRGFFWSGPIAYALSKSFVLARKPGKLPRKAAEKFFSLEYGTNTVHIHEDAISEGDKVLVVDDLIATGGTAMATAELCQELGASEVHIIALIDLPKLGGSKMLSEKFGEVITLIDY

SEQ ID NO: 119337 - protein, 177 aa, Unknown
  Bacterial polypetide isolated from the Sargasso Sea
MKEFQDLKDSIRTVPDYPVQGVQFRDITTLLQKPHLFKKMIDAMTSQWEPYLIDAILSIESRGFIMAGALAYNLETAFIPLRKPQKLPFKTHSVSYELEYGATDMHIHTDALDGHTNLLIIDDLLATGGTVIAALDLIKKFQDKEVVGAGFVINLPELGGHTKLENLGVESKYLLEF

SEQ ID NO: 119338 - protein, 171 aa, Unknown
  Bacterial polypetide isolated from the Sargasso Sea
MEDLQKWIKSYPDFPSKGILFRDISPLLAEPAALSLLKDRFAETIRPLSPDYIAGIDARGFLFCTLVAEYLGVGALMIRKPDKLPGELVEKSYKLEYGTNSLSIQEQNLENKSIVIIDDLLATGGSMQCSKELLESLGANVVAGAVVIELTSLKGSTKLDMPIISLISYAD

SEQ ID NO: 119339 - protein, 170 aa, Unknown
  Bacterial polypetide isolated from the Sargasso Sea
MNLRDKIGDYPDFPKKGILFRDFSPILGDPSALSFMVEEFSKKFHPNDVDVFAGIESRGFIIACALALKYNKGMILLRKAGKLPGKVAKTSYTLEYGKATLEVQKDVIKEGQRVVICDDLLATGGTAKAAAKLIEKINGEITGFAFIIELLELDGREKIKDYRSESLVEY

SEQ ID NO: 119340 - protein, 175 aa, Unknown
  Bacterial polypetide isolated from the Sargasso Sea
MSIKSKIRTIENYPIEGVMFRDISSLISDSKGLKDTIDLLRKKFIDDDFNYIAGIESRGFILGSALAYSMKKGFVMIRKPGKLPGNVIEEEYQLEYGTDKIEIQSDAFPDKSKILLVDDLIATGGTIIAAISLIERLGGIISSTAFIVDLPDLGGSQKIKDLGYNFFALTEFDGE

SEQ ID NO: 119341 - protein, 171 aa, Unknown
  Bacterial polypetide isolated from the Sargasso Sea
MKEYVRTIADYPVEGIQFRDITTLLQNAGHFKQVIDDMVKPWQNKKIDAVLSIESRGFIMAGAIAYFLNAAFVPLRKPHKLPFDTFKTSYDLEYGSTEMHIHTDALDGHKDLLIIDDLLATGGTALAAVELIKKFEDKNIVGAGFIINLPDLSGDKKLIEKGIEIHSLMEF

SEQ ID NO: 119342 - protein, 180 aa, Unknown
  Bacterial polypetide isolated from the Sargasso Sea
MKNQLAILLKRNLRVIPNFPKKGIMFQDIFSLIEKPELLKKIVNEISKIVKKEKITKIIGIDARGFIFGSIVSNNNNIPFVPIRKKGKLPGAVYKKKYKLEYGYDQVELQKNSLLKKDKVLIVDDLIATGGTAIAAAKLVENVSSKKVSFMFVIDLYNLNGATVLKNKGYKVFSIMKAEG

SEQ ID NO: 119343 - protein, 181 aa, Unknown
  Bacterial polypetide isolated from the Sargasso Sea
MNTETLSLIKQSIKTIPNYPKEGILFRDVTSLLENAAAYKATIDLLVEQYRNKGFTKIVGTEARGFLFGAPLALELGIGFVPVRKPGKLPRATISQSYELEYGHDSLEIHTDAITANDKVLVVDDLLATGGTIEATVKLIRQLGGEVQDAAFVISLPDLGGEARLTALGLELVKLCEFEGE

SEQ ID NO: 119344 - protein, 123 aa, Unknown
  Bacterial polypetide isolated from the Sargasso Sea
MAQPLEGLIRSLPDYPKKGIIFRDITTLLQSPSGFRQAVDEMVQPFAGSGIGCVAGIEARGFILGGAVAHQLSVGFVAIRKKGKLPWQTISVEYELEYGSDEVEIHTDSFEPGQKVLIVDDLI

SEQ ID NO: 119345 - protein, 172 aa, Unknown
  Bacterial polypetide isolated from the Sargasso Sea
MDLQTTIRSIPDFPKPGILFRDISPMLRNPAAMNEVMRRLGQVCDAVQPDLIVGIESRGFVVGTPLALQRSLGFVPVRKPGKLPGAVIGVDYALEYGSDRLEIQSDALSGKPRVLVVDDLLATGGTAAATGTLVRDAGGQLVGFAFVIELEALGGRSALPDDVPVESLIRYP

SEQ ID NO: 119346 - protein, 183 aa, Unknown
  Bacterial polypetide isolated from the Sargasso Sea
MDYLKQKIRTIPDFPKPGILFRDITTLLADSEAFNSVIDLFVEHYKEEQIDIVVGIESRGFIVGAPLALRLDKGFIPVRKAGKLPGPTHGVEYNLEYGSDLVEVHKDAIEPGSRVLMVDDLLATGGTMVGSSKLIEKAGGIIIGYAFVIELIDLKGRTSLDKPVYSLVSFDRRLIQSKSMNKY

SEQ ID NO: 119347 - protein, 163 aa, Unknown
  Bacterial polypetide isolated from the Sargasso Sea
MESLKSLIRHVPDFPKPGILFYDITTLLADADGLRQSIDALADPFRDQEIDLVVGIESRGFIFGTAVADRLGVGFVPVRKPGKLPSTTVRVEYELEYGTDALEMHDDAVQKGQRVLLVDDLLATGGTAKAVVELPTGRGAEVHALAFLIELEFLPGREKLGAQ

SEQ ID NO: 119348 - protein, 99 aa, Unknown
  Bacterial polypetide isolated from the Sargasso Sea
MEDEILSRIKSTIRTVPDFPIEGIMFRDITPVLGEPGLLSSITDRFAEDLQKLGWEPEAVVGPEARGFIFGPLLAERIGCGFVPVRKPGKLPSSTRRVE

SEQ ID NO: 119349 - protein, 172 aa, Unknown
  Bacterial polypetide isolated from the Sargasso Sea
MDLKQKIRTIPDFPEPGILFRDITTLLSDAEALNEMIERFTEHYRDEKIDLVVGIESRGFIVGTPLAIRLGKGFVPIRKAGKLPGPTHGVDYELEYGKDRVEVHQDAIPEGSRVLLVDDLIATGGTIQGSAKLIKMVGGVIVGYAFVIELVDLEGRKGLQEPVFSLIEFEGH

SEQ ID NO: 119350 - protein, 176 aa, Unknown
  Bacterial polypetide isolated from the Sargasso Sea
MSDVTVGDLEAAIRNVPDFPQSGIQFKDITPVLGDARLFAGAIDLMAARHADASIDACVGIDARGFIFAAAAAKQLGTGFVPVRKKGKLPWKTHEESYSLEYGEATVAIHQDALQPGARVLLLDDLLATGGTAAAAVKLLKKIGAEIVEIGFLIELGFLNGREKMNGSPINSLITY

SEQ ID NO: 119351 - protein, 181 aa, Unknown
  Bacterial polypetide isolated from the Sargasso Sea
MNQDSLALIKNSIKTIPDYPKPGIMFRDVTSLLESAEAYKATIAILVAHYQSKGFTKVVGTEARGFLFGAPLALELGVGFVPVRKPGKLPRETISQTYELEYGKDTLEIHTDAINANDKVLVIDDLLATGGTIEATVKLIRQLGGEVAHAAFVISLPEIGGEKRLQDLGIEVLSLCEFEGE

SEQ ID NO: 119352 - protein, 188 aa, Unknown
  Bacterial polypetide isolated from the Sargasso Sea
MSNALASAPLDAADYIKSHIRTVSDWPQPGVQFRDITPLLQEPKSLRVLIDLFVQRYIDAKLDYIAGLDARGFIIGPILAYELNLGFIPIRKQGKLPYKRVAQSYELEYGTATVEIHEDACKPGDRVVIVDDLIATGGTMMAGKILLERLGAVVVEGAAIIDLPELGGSALLRNGGLPLYTVTEFGGH

SEQ ID NO: 119353 - protein, 151 aa, Unknown
  Bacterial polypetide isolated from the Sargasso Sea
MDYLKQKIRTIPDFPKPGILFRDITTLLADSEAFNSVIDLFVEHYKEEQIDVVVGIESRGFIVGAPLALRLDKGFIPVRKAGKLPGPTHGVEYDLEYGSDLVEVHKDAIESGSRVLMVDDLLATGGTMEGSSKLIEKAGGIIIWICLLLLN

SEQ ID NO: 119354 - protein, 118 aa, Unknown
  Bacterial polypetide isolated from the Sargasso Sea
NEARGFIFGASLASSLGCGFVPIRKPGKLPYKTYSQDYSLEYGTDIMEIHTDAIESKDNILLLDDVLATGGTACAALKLLQKFKCKIIECLFLLEISSLKGSEKIVSQNKKYFSLIKY

SEQ ID NO: 119355 - protein, 175 aa, Unknown
  Bacterial polypetide isolated from the Sargasso Sea
MNLKNYIKDIPDFPKKGILFRDISPLLKSPEGWSKVITQLGFFCEEITPDIIVGIESRGFIVGSALATQQKTGFVPIRKKGKLPGVPGKDVIGVDYALEYGQDTLEILVDAFDNNPRVLLVDDLLATGGTVDAASELIERVGGQLVGCAFIIELNELNGRENIPNVPIRSLIRYE

SEQ ID NO: 119356 - protein, 132 aa, Unknown
  Bacterial polypetide isolated from the Sargasso Sea
DLQQLGWEPDSVVGPEARGFIFGPLLADRLGCGFVPVRKPGKLPSSTRRVEYSLEYGSNALEIHEDAIQPGQRVVIIDDLLATGGTISACARLCEELGAEVLGALFLIELDGLGAREAIEPVKAHALLSYPA

SEQ ID NO: 119357 - protein, 157 aa, Unknown
  Bacterial polypetide isolated from the Sargasso Sea
MNIKSYITDIMDFPSDGIIFRDISPLIGNYEALNYVLDSFEKYALTLDFDCIAAIDARGFIFGAPIANRLKVPFVPIRKSGKLPPPLKSIRYDLEYGKSSLECKDDILKNNKKVILIDDLLATGGTINAAIELISSTGAAVKSALLVVELLYLNGRN

SEQ ID NO: 119358 - protein, 176 aa, Unknown
  Bacterial polypetide isolated from the Sargasso Sea
MTQKLRDAVRTVPDFPIEGIMFRDITPVLSDGTLLSATTDLFIERMNEAGWTPEAIVGPEARGFIFGALLAAELGISFVPVRKPGKLPASKMRVDYSLEYGTNSLEMHEDALKPGERAVIVDDLLATGGTVNACIELCQKAGAEVVGALFVIELDGLDGRGTISPVPSISLLDFPC

SEQ ID NO: 119359 - protein, 155 aa, Unknown
  Bacterial polypetide isolated from the Sargasso Sea
MNTETLSLIKQSIKTIPNYPKEGILFRDVTSLLENAAAYKATIDLLVEHYRNKGFTKIVGTEARGFLFGAPLALELGIGFVPVRKPGKLPRATISQSYELEYGHDSLEIHTDAITANDKVLVVDDLLATGGTIEATVKLIRQLGGEVQDAALVIS

SEQ ID NO: 119360 - protein, 173 aa, Unknown
  Bacterial polypetide isolated from the Sargasso Sea
MDYLKKKIRTIPDFPKPGILFRDITTLLADPEAFNSVIDLFVEHYKEEQIDLVVGIESRGFIIGAPLSLRLGKSFIPVRKAGKLPGPTHGVEYDLEYGTDLVEVHQDAIESGSRVLMVDDLLATGGTMEGSSRLIEKAGGIITGYAFVIELMDLKGRNRLDKPVYSLVTFEGD

SEQ ID NO: 119361 - protein, 170 aa, Unknown
  Bacterial polypetide isolated from the Sargasso Sea
MIVDFPQSGVVFRDITPILASPQISDAASTSLAENIRSFGGTKVIGIESRGFIFASVAANKTVLPMLLARKPGKLPKETFVKNYHLEYGTSSIELHMDSDISKTDRVVIVDDLVATGGTALAVATLVSENFGVPHQNILISALIDIGECDGGTQITSKGYNYHALAQSIL

SEQ ID NO: 119362 - protein, 140 aa, Unknown
  Bacterial polypetide isolated from the Sargasso Sea
MTLQKRISNTVRDVEDFPKKGIVFKDITPILKNASLCADIIDFFVAELPLDVSHVVGVESRGFLFGFPVSIKKEIPFVLIRKKGKLPFDKVSLSYELEYGNAEIEMNVDSVGPGDKVVIHDDLLATGGTAIAAAKLIKNQ

SEQ ID NO: 119363 - protein, 121 aa, Unknown
  Bacterial polypetide isolated from the Sargasso Sea
MSSKKNITAIATKIRDIPDFPKKGIIFKDITPVLSDIETFRMSVEEMTAPYMDQNIDVVVGIESRGFIFGAPIADILNCSFVPVRKPGKLPSKTKSISYDLEYGSDSLEIHEDAIDSGQNI

SEQ ID NO: 119364 - protein, 95 aa, Unknown
  Bacterial polypetide isolated from the Sargasso Sea
MDLQTYIRSIPDFPKPGILFRDINPLLRNPAAMVEVMRRLGAICDAVQPDLIVGIESRGFIVGTPLALQRSLGFVPVRKPGKLPGAVIGVDYALE

SEQ ID NO: 119365 - protein, 156 aa, Unknown
  Bacterial polypetide isolated from the Sargasso Sea
MSNINLYDFIDEIQDFPKKGILFRDISPLLEDKDAFKLLILKMLKEINNYKIDLIAGIDSRGFLFSTILAHQLNVGSIMIRKTNKLPGNVIEKKYELEYGYSILTLQKKRNLNGKNLLIVDDLLATGGTLKCAEELISEVGGNVVLTGVAIELKCF

SEQ ID NO: 119366 - protein, 154 aa, Unknown
  Bacterial polypetide isolated from the Sargasso Sea
KEGIVFKDIAPLLLSPKALRSVCEELASSNHSATLVAGIEARGFIFGSLVANILEVGFVPLRKPGKLPRETFNISYELEYGKAELEMHTDALKQSDSVLIIDDVLATGGTATAGVQLIEKAGAKVSGLGFVIEIKLLKGKNRLKNYPVKTLVTY

SEQ ID NO: 119367 - protein, 173 aa, Unknown
  Bacterial polypetide isolated from the Sargasso Sea
MDHLKQKIRTIPDFPKPGILFRDITTLLADPEAFNSVIDLFVEHYQEEQIDLVVGIESRGFIIGAPLALRLGKSFIPVRKAGKLPGPTHGVEYDLEYGTDLVEVHQDAIDSGSRVLMVDDLLATGGTMEGSSRLIEKAGGIITGYAFVIELIDLKGRNRLDKPVFSLVTFEGD

SEQ ID NO: 119368 - protein, 172 aa, Unknown
  Bacterial polypetide isolated from the Sargasso Sea
MDLKEKIRTIPDFPEPGILFRDITTLLSDAEALNEMIERFTEHYRDEKIDLVVGIESRGFIVGTPLAIRLGKGFVPIRKAGKLPGPTHGVDYELEYGKDRVEVHQDAIPEGSRVLLVDDLIATGGTIQGSAKLVKMVGGVIVGYAFVIELVDLEGRKGLQEPVFSLIEFEGH

SEQ ID NO: 119369 - protein, 173 aa, Unknown
  Bacterial polypetide isolated from the Sargasso Sea
MDYLKQKIRTIPDFPKKGILFRDITTLLADPEAFKSVIDLFIEHYRKEQIDLVVGIESRGFIVGAPLALGLGKGFIPVRKAGKLPGPTHGVEYELEYGTDLVEVHKDAIEKGSRVLMVDDLLATGGTMEGSSKLIEKAGGIINGYAFVIELIDLKGRSRLDKPVYSLVSFEGD

SEQ ID NO: 119370 - protein, 188 aa, Unknown
  Bacterial polypetide isolated from the Sargasso Sea
MPHSSSGAPLDPVAFIHSQIRTVPDWPQPGVMFRDITTLLQSPKALRILVDLFVERYVDAKLDYVAGLDARGFIIAPIVAYELSVGFVPIRKVGKLPYKTRSESYDLEYGSATVEIHEDACRPGDRVIIMDDLIATGGTMMAGRNLLQRLGAEVVEGAAIIDLPDLGGSALLRNAGLPVYTVTEFAGH

SEQ ID NO: 119371 - protein, 103 aa, Unknown
  Bacterial polypetide isolated from the Sargasso Sea
GLPFVPIRKKGKLPGKVLRQKYSLEYGNDEIQIHSNSITSRDRVLIIDDLIATGGTAVASAKLISKCKVKNIEFYFIIDLKNVGGSQKLGKKFKLSSILEAEG

SEQ ID NO: 119372 - protein, 115 aa, Unknown
  Bacterial polypetide isolated from the Sargasso Sea
MDLKEKIRTIPDFPEPGILFRDITTLLSDAEALNEMIERFTEHYRDEKIDMVVGIESRGFIVGTPLAIRLGKGFVPIRKAGKLPGPTHGVDYELEYGKDRVEVHQDAIPEGSRVL

SEQ ID NO: 119373 - protein, 175 aa, Unknown
  Bacterial polypetide isolated from the Sargasso Sea
MLESINLEETIAKVPDYPKPGILFYDISTLLMNTQAWTATMKRLAGEISQYKPDIIAGIESRGFLLASPVAIELEVGVQMIRKKGKLPGETLSHTYDLEYGHDTLEIQKSSALSGKRVAIVDDIFATGGTLSAATTLIRKQGSIVVCLACILELAFLKGKAKLDAPFISLVQVSE

SEQ ID NO: 119374 - protein, 177 aa, Unknown
  Bacterial polypetide isolated from the Sargasso Sea
MAQPLEGLIRSLPDYPKEGIIFRDITTLLQSPSGFRQAVDEMVQPFAGSGIGCVAGIEARGFILGGAVAHQLSVGFVAIRKKGKLPWQTLSVEYELEYGSDEVEIHTDSFEPGQKVLIVDDLIATGGTACAAVQLVRQAGAEVVGASFVIDLPDLGGREKLAAMDVPVRTLIGFEGE

SEQ ID NO: 119375 - protein, 181 aa, Unknown
  Bacterial polypetide isolated from the Sargasso Sea
MNPETLKFIEASIKTIPDYPKPGILFRDITSLIENADAFKATIDLLANHYRDQGITKIVGTEARGFIFGAPVAYAMGLGFVPVRKPGKLPRAVIEESYALEYGTDTLQLHTDAIVPGDKVLVVDDLLATGGTVDATVKLIRRAGGEVVDAAFIISLPSLGGDARLTAAGVKVVSLVELPGE

SEQ ID NO: 119376 - protein, 172 aa, Unknown
  Bacterial polypetide isolated from the Sargasso Sea
MDLQTYIRSIPDFPKPGILFRDINPLLRNPAAMVEVMRRLGAICDAVQPDLIVGIESRGFIVGTPLALQRSLGFVPVRKPGKLPGAVIGVDYALEYGTDRLEIQSDALTGNPRVLVVDDLLATGGTAAATGSLVRAAGGELVGFAFVIELEPLGGRSALPDEVPAESLIRYP

SEQ ID NO: 119377 - protein, 179 aa, Unknown
  Bacterial polypetide isolated from the Sargasso Sea
MNKKLVNKLKKNIRVIPDFPKKGILFQDITSITDNKKLFTEVINEISKYARKQKFTKIAGVEARGFIFGASVAFKLGLPFVPIRKKGKLPGKVLRQRYSLEYGNDEIQIHSNSITSQDRVLIIDDLIATGGTAVASAKLISKCKVKNIEFYFIIDLKNVGGSKELEKKFKLSSILEAEG

SEQ ID NO: 119378 - protein, 170 aa, Unknown
  Bacterial polypetide isolated from the Sargasso Sea
MNISNYIRSIDNFPSKGITFRDITPIFQDPNIFNFVIEEMRKYIDKVKPDYLAAIDSRGFLLGSALALSSKIPLILIRKKGKLPPPVISQKYSLEYGDDYLELSSQINLSGKNVIIIDDVLATGGTITAAIKLIEKLEGEVIGLNFLINLINIEKPSEIKNYPINFLKSY

SEQ ID NO: 119379 - protein, 170 aa, Unknown
  Bacterial polypetide isolated from the Sargasso Sea
MKISKTLISQEEIENKISEIAEIINSKYKDEELVVIGILKGAFIVVSDLAKQLQIDVTFDFMSIKSYYGSESSGQIKIVKDLEYDISNKNILIVEDIYDTGLTLSSLKKLLESRNPKTIEIFSMFVKKGVSKDPIEIDYSGFEIGPEFVVGYGLDYNGKYRELPYLAVLS

SEQ ID NO: 119380 - protein, 134 aa, Unknown
  Bacterial polypetide isolated from the Sargasso Sea
VLNGSFIFLADLVRCINIDVEISFIKARSYNGKQKFDKIKFDFFDFDSIKGKDIIIIEDIVDTGDTVSKIRNKMINKANSVAIAAFLLKPNKAKLNFEIDWVGFEIPDEFVVGYGLDYNQKFRNLNGIYQGIEI

SEQ ID NO: 119381 - protein, 47 aa, Unknown
  Bacterial polypetide isolated from the Sargasso Sea
DKPSRREIQIKSRWLGFEIPDEFVVGYGIDYAQMNRNLSYIGKVRFI

SEQ ID NO: 119382 - protein, 138 aa, Unknown
  Bacterial polypetide isolated from the Sargasso Sea
VVGLLRGSFMFIADLVRCLDIPVEVDFITVSSYGSEMFSSGNVKILKDLDGDINGHDVLLVEDIVDTGKTLEAVIEMLETRVPNSIKVCALLNKQSRRISNIKADWIGFEIPDEFVVGYGIDYDQRNRNLPYIGKVVK

SEQ ID NO: 119383 - protein, 176 aa, Unknown
  Bacterial polypetide isolated from the Sargasso Sea
MIERENLKEVISKEELSSRIAEIGAEISNAYNLESVVFIVVLNGSFIFASDLIRAVDIECEVDFIKVTSYSGMKSEGKINFEKDISTEIAGKNIIIVEDIIDSGNTINFVKEFIDNKNPKSLKIATLLLKTKIAKLSFKIDWVGFEISSEFVVGYGLDYNQKLRNLNAVYRLGGVN

SEQ ID NO: 119384 - protein, 94 aa, Unknown
  Bacterial polypetide isolated from the Sargasso Sea
MVMSKSLDLDIKNRSIIIVEDIIDSGMSIEFIYNYLNDFNPKDISIVSLLAKKSVSKLNFKIDFIGFEISSEFVVGYGLDYNQRFRNIDSIYKL

SEQ ID NO: 119385 - protein, 167 aa, Unknown
  Bacterial polypetide isolated from the Sargasso Sea
MKLNKRKLRILFDKVTIEKRVEEMAIELSNKFENKKPIFIGVLNGSFIFASDLLRNLSINCEIDFIKLSSYKGQNTTGTVRLLKDISADITNRDVIIVEDIIDSGLTIEFLVKRLKGASPRSITIVTLLFKPDIAKISLPIDIIGFEIAPHFVVGYGLDYDQNYRQL

SEQ ID NO: 119386 - protein, 155 aa, Unknown
  Bacterial polypetide isolated from the Sargasso Sea
NIGESISKKFIGKKPIFIGVLKGSFIFTADLLRSIKIDCEVEFIKVQSYKGTQSTGNVKITSDIKANLEGRHIILVEDIIDSGKTIKFLISEFKKKSVKSISIATFLMKSNQQKFDFPIDYIGFEIKQGFVVGYGLDYNQKYRNLDSVYVLERKN

SEQ ID NO: 119387 - protein, 332 aa, Unknown
  Bacterial polypetide isolated from the Sargasso Sea
IYCTAFPAEVAVLPFKSPSQGFSYDQGRLFRPFKGEAGSGKSAGTLKEPLAMHAISFIQDLAVIMLVAGVVTILFHRFKQPVVLGYIVAGFIIGPHTPPFGLIHDEDTIKTLAELGVIFLMFCLGLEFSLRKLFKVGATAFIAAFLEIVLMIWIGYEIGRWFDWSTMDSLFLGAILAISSTTIIVKALNDLKMKDQRFAQLIFGVLIVEDILGIGIIALLSSIAVSGTVSSGEVFSTVGKLSLFMIVALVIGILLVPRLLAYVAKFESNEMLLITVLGLCFGFCLLVVKLEYSMVLGAFLIGAIMAESRQLIKIKRLIEPVRDMFSAISSWR

SEQ ID NO: 119388 - protein, 83 aa, Unknown
  Bacterial polypetide isolated from the Sargasso Sea
MDNSKYVIDQMISAKSIAARVEALAHQITNHFHDTEKLIVVGLLRGSFVFIADLAREISLPIEIDFLEASSYGNQMESSREVR

SEQ ID NO: 119389 - protein, 176 aa, Unknown
  Bacterial polypetide isolated from the Sargasso Sea
MGEHKNLIELISSSEIDVKIKDIADDISLYFNNESVVFVIVLNGGFIFGSEITKSVDLDCEVDFIKVSSYNGRDSQTDIKLEKDLSIDVAGKNVVIIEDIIDTGNTINYLIKLIERHNPKLIKVATLLLKPERAISKTNIDWVGFKIETDFVVGFGLDYDQKFRNLNGIYKLGGVN

SEQ ID NO: 119390 - protein, 515 aa, Unknown
  Bacterial polypetide isolated from the Sargasso Sea
MSKIYKLFLVTFFLFNTNHIYSDVSFYIGETKIIGTIENNVHTYLGIPFAEPPIGELRWEKTKAKIFNEDKYYANKFASACMQGPRIVNWYKGVAIGFGGDPNYIDMPDVSEDCLYLNMWVPENIEKQTKLPVLVYIHGGSNRAGWSFEPNYIGEKLSKEGVIVVTVAYRLGIFGFYSHPQLGVSNFALLDLIESLKWIKKNISKVGGDPHNVTISGESAGATNVAHLIASPLSKNLFKRAIHQSAGWSISDKDYIESNEHIKLSNKLSVELTGYDNKRASINELKKINSIKLLNQAEKIYGYTGYYPVVDNHSILEPIFTSFDTGNFNHVDLIIGTNSDEELMYLAEDYYLSNFYDERESWGFYVDDDKLNLIVEDIKSEKKKLNYLLTSRNWTCPSSFIAKSLTKHTNNNVWFYSFDRVREGEKSKEMGAYHGAEIPYIFNTHDKWLPTSRIDDLITRKIQAHWINFLKTGNPNTTYKTWHQFDSEKFNIFSYDRYSKMKISQAKPVCIELGY

SEQ ID NO: 119391 - protein, 170 aa, Unknown
  Bacterial polypetide isolated from the Sargasso Sea
MKITKKILSEEQIQERIIKLASEINTDYEGKNLIILGVLKGAFIAISDLAKNLNIDVSFEFMSISSYEGSESTGQIKIEKDLDIDISGKNILIVEDIFDTGLTLSSLIDILESRNPKSIEIMCMFVKSVEKKIPVKIKYKGFEIGSEFVVGYGLDYMGKYRELPYLAELS

SEQ ID NO: 119392 - protein, 159 aa, Unknown
  Bacterial polypetide isolated from the Sargasso Sea
MENYKVDILISDKEITERVSQLGKIISASYSDTNKLIVVGLLRGSFMFIADLVRCLNIPVEVDFITVSSYGSEMFSSGNVKILKDLDGDINGHDVLLVEDIVDTGKTLEAVIEMLETRVPNSIKVCALLNKQSRRISDIKADWIGFEIPDEFVVGYGID

SEQ ID NO: 119393 - protein, 139 aa, Unknown
  Bacterial polypetide isolated from the Sargasso Sea
IIGVLNGSFIFLSDLVRLFDFDCEIDFVKANSYVGKESSGKVKLDKDVSIDINNRRVILVEDIIDTGLTMEFLYEHILSFGPKDITIVTLLSKKNNYKLNFKIDFIGFEIDSDFIVGYGLDLNHKYRNLDSLYGLNRKN

SEQ ID NO: 119394 - protein, 170 aa, Unknown
  Bacterial polypetide isolated from the Sargasso Sea
MKITKKILSEEQIQERIIKLASEINTDYKGKNLIILGVLKGAFIAISDLAKNLNIDVSFEFMSISSYEGSESTGQIKIEKDLDIDISGKNILIVEDIFDTGLTLSSLIDILESRNPESIEIMCMFVKSVEKKIPVKIKYKGFEIGSEFVVGYGLDYMGKYRELPYLAELS

SEQ ID NO: 119395 - protein, 170 aa, Unknown
  Bacterial polypetide isolated from the Sargasso Sea
MKISKTLISQEEIENKISEIAEIINSKYKDEELVIIGILKGAFIVVSDLAKQLQIDVTFDFMSIKSYYGSESSGQIKIIKDLEYDISNKNILIVEDIYDTGLTLSSLKKLLESRNPKSIEIFSMFVKKGVSKDPIEIDYSGFEIGPEFVVGYGLDYNGKYRELPYLALLS

SEQ ID NO: 119396 - protein, 175 aa, Unknown
  Bacterial polypetide isolated from the Sargasso Sea
MRINNKKLIKIIDEVSIQKRVKEIAIELTSKFKDNKPIFIGVLNGSFIFISDLVRNLNINCEIDFIKVSSYKGQDTTGTVKLLKDISADITNRDVIIVEDIIDSGLTIEFLVKRLKGASPKSISIVTLLLKPDIARLGLPIDIIGFEIAPDFVVGYGLDYDQDLRHLPEIYRLDK

SEQ ID NO: 119397 - protein, 175 aa, Unknown
  Bacterial polypetide isolated from the Sargasso Sea
MIERENLKEVISKEELSSRIAEIGAEISNAYNLESVVFIVVLNGSFIFASDLIRAVDIECEVDFIKVTSYSGMKSEGKINFEKDISTEIAGKNIIIVEDIIDSGNTINFVKEFIDNKNPKSLKIATFLLKTKIAKLSFKIDWVGFEISPEFVVGYGLDYNQKLRNLNAVYRLGGS

SEQ ID NO: 119398 - protein, 156 aa, Unknown
  Bacterial polypetide isolated from the Sargasso Sea
HLAKEIELEFKETDKLIVVGLLRGSFVFIADLVRELNLPVEVDFLEASSYGDEMVSSKEVRILKDLRAAIEGKDVLLVEDIVDTGFTLHHVTNLLLSRGPAKLKTIALLDKPSRRETEIKADWTGFEIPDEFVVGYGIDYAQRNRNLSFIGKVRFI

SEQ ID NO: 119399 - protein, 170 aa, Unknown
  Bacterial polypetide isolated from the Sargasso Sea
LKITKKIISEEEIQERIINLANEINNDYREKNLIILGVLKGAFIAISDLAKNLNIDVSFEFMSISSYEGSESTGQIKIEKDLDIDISGKNVLIVEDIFDTGLTLSSLIDILKSRNPESIEIMCMFVKPIEKKIPVEIKYKGFQIGSEFVVGYGLDYMGKYRELPYLAELS

SEQ ID NO: 119400 - protein, 140 aa, Unknown
  Bacterial polypetide isolated from the Sargasso Sea
DGGIVKGSVVFMADLCRRIKGHVEIDFMSVSSYGNAMTSSRDVKVLKDVQSDIAGRDVLIVEDLIDSGNTLNKVREMLLLREPKSLALCTLLDKPERREVDVKVDFIGFTIPDEFIVGYGIDYAEQYRNLPYIAKVVPLE

SEQ ID NO: 119401 - protein, 179 aa, Unknown
  Bacterial polypetide isolated from the Sargasso Sea
MSERPYVIDEMISAKAIAARVEELCKNIQNEFVGTDKLIVVGLLRGSFVFIADLVRELDLPVEVDFLEASSYGDGMESSREVRILKDLRGAIEGRDVLVVEDIVDTGYTLSHVIALLKSRGPARLKSIALLDKPSRREIDVKADWTGFKIPDEFVVGYGIDYAQRNRNLDHIGKVRFTG

SEQ ID NO: 119402 - protein, 183 aa, Unknown
  Bacterial polypetide isolated from the Sargasso Sea
MVKVVKKTRYKIDQMISAKMVAARVESLAEEITEFYKDTEQLIVVGLLRGSFVFIADLAREIDLPVEIDFLEASSYGNAMESSREVRILKDINGEISGKDVLVVEDIVDTGHTLNHVLNLLKSREPKRIEACALLDKPLRREVEVYSKWIGFEIPDEFVVGYGIDYAQRDRNLSYIGKVRFLD

SEQ ID NO: 119403 - protein, 140 aa, Unknown
  Bacterial polypetide isolated from the Sargasso Sea
MKKNIKPYSVDTLISEKEIKKRIIELGKEVNLFYKETKKLLVVGLLRGSFVFIADLVRELKIPVEVDFMTASSYGNSMQSSNNIRILTDLNTDIKNLDVLLVEDIIDTGHTLNQVIKLLKSRKPRSLEVCCLLNKFSRRG

SEQ ID NO: 119404 - protein, 165 aa, Unknown
  Bacterial polypetide isolated from the Sargasso Sea
MKLKISSKKIKTRVEQIGRELSQEYKQENPIFIGVLNGSFMFLSDLIRALSIECEISFLQLKSYDGKKSTGSVDIIKDFDVSLKNRHVVIVEDIIDTGTTLKFLLNKINEIPIKSIRIVTLLVRDIERPFEFTIDHIGFEISQEFVVGYGLDYNQKFRHLDSIYV

SEQ ID NO: 119405 - protein, 176 aa, Unknown
  Bacterial polypetide isolated from the Sargasso Sea
MKHTTEVMISAEEISQKLDQMAEQINAHYANSERLLMVGLLKGSVVFMADLCRRIKGHVEIDFMSVSSYGNSMTSSRDVKVLKDVQSDIAGRDVLIVEDLIDSGNTLNKVREMLLLREPKSLALCTLLDKPERREVDVKVDFIGFTIPDEFIVGYGIDYAEQYRNLPYIAKVVPLE

SEQ ID NO: 119406 - protein, 179 aa, Unknown
  Bacterial polypetide isolated from the Sargasso Sea
MKKIDDNLISLYSSSDIKNRVEELGSEISEEYEKKEPIFIGVLNGSFIFMADLMRSLSIDCEMDFIKVRSYSGKKSSGTIQLLKDISADVKDRNIILVEDIIDTGLTIKFLRERLFGSSPKSIAIATLLYKPSVAKIDFKIDYIGFEIPQEFVVGYGLDYEQKMRHLSGLYMIKNDLSE

SEQ ID NO: 119407 - protein, 176 aa, Unknown
  Bacterial polypetide isolated from the Sargasso Sea
MKHTTEVMISAEEISQKLDQMAEQINAHYANSERLLMVGLLKGSVVFMADLCRRIKGHVEIDFMSVSSYGNAMTSSRDVKVLKDVQSDIAGRDVLIVEDLIDSGNTLNKVREMLLLREPKSLALCTLLDKPERREVDVKVDFIGFTIPDEFIVGYGIDYAEQYRNLPYIAKVVPLE

SEQ ID NO: 119408 - protein, 168 aa, Unknown
  Bacterial polypetide isolated from the Sargasso Sea
MITETEIAARTTQLARMIKEQYRDTEQLVVVGLLRGSFVFIADLVRRLDLPVEVDFMTVSSYGDKMESSRQVRIIQDLETPIKRRDVLIVEDIIDTGHTLSQVYDILETREPRSLRVCALLNKPSRREVDVEIDWVGFEIPDEFVIGYGIDFAQQGRNLPHIGVVVRK

SEQ ID NO: 119409 - protein, 130 aa, Unknown
  Bacterial polypetide isolated from the Sargasso Sea
MTVLSNQQDIEILITEAEIAARTTKLARKITEHYAGTQQLVVVGLLRGSFVFIADLVRRIDLPVEVDFMTVSSYGNKKESSRQVRIIQDLETSIAGRDVLIVEDIIDTGHTLSQVLKILKTRQPKSLRVC

SEQ ID NO: 119410 - protein, 112 aa, Unknown
  Bacterial polypetide isolated from the Sargasso Sea
TVSSYGNSMSSSENVRILSDLNTDIKNIDVLLVEDIIDTGYTLFQVIKLLNGRKPNSLEVCCLLNKSSRRETDIDIRWSGFDIPDEFVVGYGIDYAQNNRNLPYIGKVIKAN

SEQ ID NO: 119411 - protein, 178 aa, Unknown
  Bacterial polypetide isolated from the Sargasso Sea
MTKNYDVQVLIDELKIKSRIKVLSSEINQFYTNTNKLLVVGLLRGSFVFIADLAREIKVPVEIDFMTVSSYGNSMVTSHNVRILSDLNTDIKNTDVLLVEDIIDTGHTLNQVIKMLNEREPKSLEVCCLLNKSSRRETDINVNWVGFDIPDEFVVGYGIDYAQNDRNLPYIGKVVQSN

SEQ ID NO: 119412 - protein, 176 aa, Unknown
  Bacterial polypetide isolated from the Sargasso Sea
MKHTVEVMISEAEVAARIAKLGEEITARYQGSDEVVMIGLLRGSCIFLADLCRQTQLPITLDFMTASSYGSGMHSTRDVRILKDLDDDIKGKDVVIVEDIIDTGYTLNKVREILSLREPKSLAICTLLDKPSRREVQVPVDWIGFSIPDEFVVGCGIDYAQKYRNLKFIGKVVPQE

SEQ ID NO: 119413 - protein, 107 aa, Unknown
  Bacterial polypetide isolated from the Sargasso Sea
MQDEETAQPKLFYAKLPDDIAQRYILLLDPMLATGGSCIKAIEVLLDQGVQEEKILFLNLIASPEGINKVCTRFPKLTIITAWVDEGLDNHSYIVPGLGDFGDRYFL

SEQ ID NO: 119414 - protein, 126 aa, Unknown
  Bacterial polypetide isolated from the Sargasso Sea
MLTLIKSPFLEYKLTILRNKRTKNSLFRQTMNEISYLIAAEVLKHIKFKKIKIRTPIQNTSGSEIFNPIIIVPILRAGLGLVEGFVKFLPNVEKGHIGLYRDEQTYQPVEYLCKLPKVINRTILVL

SEQ ID NO: 119415 - protein, 202 aa, Unknown
  Bacterial polypetide isolated from the Sargasso Sea
EISHPLKDHYLSILRNKDTDFDTFRISASKLSYLLAVEATKHLSLKNIEIETPLVTTSAYEIENNSVAISVLRAGLGLVDGVKDLIPNVSFGYIGVQRNEETAEPENYYEKLPELNDKNVFILEPMLATGGSLSFAIETVKKYNPKNIHALTVIAAPEGIELIKEKHADITLITASIDEKLNESWYIVPGLGDMGDRLFGTT

SEQ ID NO: 119416 - protein, 100 aa, Unknown
  Bacterial polypetide isolated from the Sargasso Sea
MVQHLTVVDHPLVQHKLTLMRKKTTSTVEFRQLLREISQFLAYEITRNLPMTTRRIETPIEEMDAPTLDGKKLALISILRAGNGLLDGVLELVPSARVGF

SEQ ID NO: 119417 - protein, 56 aa, Unknown
  Bacterial polypetide isolated from the Sargasso Sea
YIRFVCLLAAPEGVEYFNKIHPDVKIFTAALDDKLNDHAYILPGLGDAGDRIFGTK

SEQ ID NO: 119418 - protein, 146 aa, Unknown
  Bacterial polypetide isolated from the Sargasso Sea
EQKIVIKASSGLSDEEIEKMISEAEANADSDKDFRELVDIKNQADQVIHATEKSLEDLGEKVTNEERSTVESALNDLKDALKSDEKEKIESKLKTLSEASVGIAQKAFEEAQASTDDETTETDSKDENVVDAEYEEVDSEENKNTH

SEQ ID NO: 119419 - protein, 188 aa, Unknown
  Bacterial polypetide isolated from the Sargasso Sea
LGRFDLTDIPSKPRGMPQIEVAFDIDANGIINVSATDKETGKEQKIVIKASSGLSDEEIEKMISEAEANADSDKDFRELVDIKNQADQVIHATEKSLEDLGEKVTNEERSTVESALNDLKDALKSDEKEKIESKLKTLSEASVGIAQKAFEEAQASTDGETTETDSKDENVVDAEYEEVDSEENKNTH

SEQ ID NO: 119420 - protein, 31 aa, Unknown
  Bacterial polypetide isolated from the Sargasso Sea
AGLDSHLDQNAYIVPGLGDAGDRLFGTPAKY

SEQ ID NO: 119421 - protein, 130 aa, Unknown
  Bacterial polypetide isolated from the Sargasso Sea
MITVIKSQFVQHKLTILRSKKTSNTVFRQTMNETSYLIAAEVLKYLPYKRTKVQTPLKNTNGIILSKQIILVPILRAGLGLLEGFAKFLPDVEKGHIGLYRDEQTYEPVEYLFKLPKIKNKKILILDPML

SEQ ID NO: 119422 - protein, 28 aa, Unknown
  Bacterial polypetide isolated from the Sargasso Sea
SLDSHLNEQAYIVPGLGDAGDRLFGTKN

SEQ ID NO: 119423 - protein, 56 aa, Unknown
  Bacterial polypetide isolated from the Sargasso Sea
NIKLCIFVGSSRKVLKNIRKNHKDLHIFTCSLDKGLNKKKYIVPGLGDAGDRYMGT

SEQ ID NO: 119424 - protein, 136 aa, Unknown
  Bacterial polypetide isolated from the Sargasso Sea
GLSDEEIEKMISEAEANADSDKDFRELVDIKNQADQVIHATEKSLEDLGEKVTNEERSTVESALNDLKDALKSDEKEKIESKLKTLSEASVGIAQKAFEEAQASTDSETTETDSKDENVVDAEYEEVDSEENKNTH

SEQ ID NO: 119425 - protein, 277 aa, Unknown
  Bacterial polypetide isolated from the Sargasso Sea
IRQYLLDQLAYFLTRDLPLEKKVLRIFQDALADFELSPRQISSWLKRLGLHQLAGKPEIAVQTTHDYVRTALLDCTEDHALFHFHRPLVRGVFIMLELKKDCRTEAFHSPLHATVKKVRVNPLKESEYQVQVEFQQLLEEKHGILDLLKPPSQSTDQFLEFGDIPSPSRSLKLKLVGCPLCEETRLPFWSLKPGAIRESRNVFGFPVYHSPYPGFEECDFHRLRVTVCPRCFYASSRIEDFIVQAGEPFQKDRVMIRKLWSHSCPELKKTLNELPSR

SEQ ID NO: 119426 - protein, 216 aa, Unknown
  Bacterial polypetide isolated from the Sargasso Sea
MSESLQIISHPVVQHKLGLLRKVETTSPEFRLIVQQLSPLLAYEACRDWLHQEEKEVLTPMEEVAKANFIIDWPVLVSIMRAGNGMLDPILSLFSSSAAGHIGIYRDKFIKNTVEYYFRLPDNVQDKNILLLDPLVATADTVIASIDRLKQYDVGEIRMLTLLISSLGASKIKSFHPDVKIFAAGCQEELDSNGYLVPGLGDAGDRLYQINNGKHL

SEQ ID NO: 119427 - protein, 519 aa, Unknown
  Bacterial polypetide isolated from the Sargasso Sea
MKETAESYLGESISEAVITVPAYFNDSQRQATKDAGKIAGLEVKRIINEPTAAALAYGMDKKRGDKKIAVYDLGGGTFDVSIIEIADVDGENQFEVLATNGDTFLGGEDFDLRVIDHLLGEFQNQTGMDISSDPQAVQRLKEAAEKAKIELSNQAQTDINLPYLTADASGPKHLNLTLTRAKLETLVEDLIVQTIEPCKTALSDAGLSTSEINDVILVGGQTRMPKVVEEVKSFFGVEPRKDVNPDEAVAIGAAIQGGVLSGDVKDVLLLDVTPLSLGIETLGGVTTRLIEKNTTIPTKAEQIFSTAEDNQTAVTIHVLQGERERSQDNKSLGRFDLTDIPSKPRGMPQIEVAFDIDANGIINVSATDKETGKEQKIVIKASSGLSDEEIEKMISEAEANADSDKDFRELVDIKNQADQVIHATEKSLEDLGEKVTNEERSTVESALNDLKDALKSDEKEKIESKLKTLSEASVGIAQKAFEEAQASTDSETTETDSKDENVVDAEYEEVDSEENKNTH

SEQ ID NO: 119428 - protein, 188 aa, Unknown
  Bacterial polypetide isolated from the Sargasso Sea
MGRFDLTDIPSKPRGMPQIEVAFDIDANGIINVSATDKETGKEQKIVIKASSGLSDEEIEKMISEAEANADSDKDFRELVDIKNQADQVIHATEKSLEDLGEKVTNEERSTVESALNDLKDALKSDEKEKIESKLKTLSEASVGIAQKAFEEAQASTDSETTETDSKDENVVDAEYEEVDSEENKNTH

SEQ ID NO: 119429 - protein, 206 aa, Unknown
  Bacterial polypetide isolated from the Sargasso Sea
MELIEISHPLKDHYLSILRNKDTDFDTFRISASKLSYLLAVEATKHLSLKNIEIETPLVTTSAYEVENNSVAISVLRAGLGLVDGVKDLIPNVSFGYIGVQRNEETAEPENYYEKLPELNDKNVFILEPMLATGGSLSFAIETVKKYNPKNIHALTVIAAPEGIELIKEMHPDITLITASIDEKLNENWYIVPGLGDMGDRLFGTT

SEQ ID NO: 119430 - protein, 517 aa, Unknown
  Bacterial polypetide isolated from the Sargasso Sea
RTAESYLGESISEAVITVPAYFNDSQRQATKDAGKIAGLEVKRIINEPTAAALAYGMDKKRGDKKIAVYDLGGGTFDVSIIEIADVDGENQFEVLATNGDTFLGGEDFDLRVIDHLLGEFQNQTGMDISSDPQAVQRLKEAAEKAKIELSNQAQTDINLPYLTADASGPKHLNLTLTRAKLETLVEDLIVQTIEPCKTALSDAGLSTSEINDVILVGGQTRMPKVVEEVKSFFGVEPRKDVNPDEAVAIGAAIQGGVLSGDVKDVLLLDVTPLSLGIETLGGVTTRLIEKNTTIPTKAEQVFSTAEDNQTAVTIHVLQGERERSQDNKSLGRFDLTDIPSKPRGMPQIEVAFDIDANGIINVSATDKETGKEQKIVIKASSGLSDEEIEKMISEAEANADSDKDFRELVDIKNQADQVIHATEKSLEDLGEKVTNEERSTVESALNDLKDALKSDEKEKIESKLKTLSEASVGIAQKAFEEAQASTDSETTETDSKEENVVDAEYEEVDSEENKNTH

SEQ ID NO: 119431 - protein, 128 aa, Unknown
  Bacterial polypetide isolated from the Sargasso Sea
MSCQRQLKILDHPLIQHKLTLMRSVETPSHSFRRLLKEISILMSYEVFSDLPLQNIHTNTPMQSMESPVLSENTVCLVPIMRAGNGMLDGFIEIVSNALVGHIGLYRNKETLKAHDYYINPPQAIDVG

SEQ ID NO: 119432 - protein, 166 aa, Unknown
  Bacterial polypetide isolated from the Sargasso Sea
MNIPDNFHIVDHALLKHKLSILRDINTRSKEFRELTREITSLLAYQATKELHTSMYDIQTPITTAKGYKVELDNIILIPVLRAGLGMLQGMLDLIPNSCVGYIGMERDHNTHLPVDYYFKIPKEADKKTFIILDPMLATGGTMIAAIDRLKKLGANDILSISIISS

SEQ ID NO: 119433 - protein, 206 aa, Unknown
  Bacterial polypetide isolated from the Sargasso Sea
MELIEISHPLKDHYLSILRNKETDFDTFRISASKLSYLLAVEATKHLSLKNIEIETPLVTTSAHEIENNSVAISVLRAGLGLVDGVKDLIPNVSFGYIGVQRNEETAEPENYYEKLPELNDKNVFILEPMLATGGSLSFAIETVKKYNPKNIHALTVIAAPEGIKLIKEKHSDITLITASIDEKLDENWYIVPGLGDMGDRLFGTT

SEQ ID NO: 119434 - protein, 43 aa, Unknown
  Bacterial polypetide isolated from the Sargasso Sea
MKEFCNQHQDVDIYTGALDEKLNKNKYIVPGLGDAGDRLYGTE

SEQ ID NO: 119435 - protein, 441 aa, Unknown
  Bacterial polypetide isolated from the Sargasso Sea
MVFDIQENYQDEQYSIHVNEKIHVKGGSYRALAMAKSSLLQILIKNKGSLAFPLVEINDNPDSEYRGLLIDLARMWHDIPTLKNIIDMAAFYKINHIQLHLSDDQSFTFPMEKYPKIATPDRPYSKKDFRELVKYADDRGIIIIPELDVPGHSRQLVEIYPEIFGVNNGFLQINPWKSNVINIASEKVYEAIDDMIGEIVEVFDTSPYFHIGGDEANLDLYKNVPEVKDFMKKNGIENDVHELFRYFLVRMNKIVKKHNKKMFLWEGFRREGKIEIPRDVVVFEFETMYHLPNHLIEDGFTVVNTSWQPLYLVSGGLKQPRSRRAMWSPEKIYSWNIWRWEHWWENTPVYKKPMQLEETSQIIGAQMCSWEQAGEAEIPTLRKRLPVFIERVWNNKQKIPFEKFFPTVEKNDFKLSKIINDKRQDTLLLGYDFEGDCLWCD

SEQ ID NO: 119436 - protein, 136 aa, Unknown
  Bacterial polypetide isolated from the Sargasso Sea
QWPADDSLHRMVVLTGGEPLLQVDEALIAALHARGFRISVESNGTVAAPEGIDWLCISPKAGADWIQRSGQELKLVWPQPTFDLAAIEASTDFQHYFLQPMDNAQQSGNITACIEQCMQRPGWRLSLQTHKLTGIR

SEQ ID NO: 119437 - protein, 208 aa, Unknown
  Bacterial polypetide isolated from the Sargasso Sea
MSVKILNHPLIDHHMNKLRSKDTNNFDFRISAKIVSNLMGYEIFKTLSTENVQINTPLEKFKGREVKKPFPCLVSILRAGSIIVDGLLEVLPNCSVGHIGIYRDHKTLLPKDYLTKLPNNIHKKKVFLCDPMLATGGSAIRAIEVLNENNCYDISLICLLACDEGINLTLKKYPKTNIFAAQKDPVLNKKGYILPGLGDAGDRIYGTE

SEQ ID NO: 119438 - protein, 147 aa, Unknown
  Bacterial polypetide isolated from the Sargasso Sea
MLIAPKNVVEVKHPLLQHKLSLMRDKKTRSVIFRALMKEAGMILGVEATKELKSYEKNISTPLEDMSATFLKEPEPAVVSILRAGNGLLEGLLQILPNAAVGFLGMSRDHDTLMPIDYYQNLPANMSDRSVIIVDPHACYSWKWDRS

SEQ ID NO: 119439 - protein, 197 aa, Unknown
  Bacterial polypetide isolated from the Sargasso Sea
MVQTRLATLRNVDTDMETFRRALGQIGLMLLTEALRPLETKTHRVRTPLARTTGHRLRREILLVPILRAGQGLVGLADQLLPEARLGYLGMVRNEATLQPECYLEKLPPRLRRYEVMICDPMLATGGSAVAAGQLLQQRGAERLHFLHALAAPEGVRALRKAFPNEPVYLGAVDERLNEHGYIHPGLGDAGDRCFGT

SEQ ID NO: 119440 - protein, 158 aa, Unknown
  Bacterial polypetide isolated from the Sargasso Sea
MITSIKSSFLEYKMTILRNKKTSNSLFRQTMNEASYLIAAEVLKHLQYKKISVQTPLTKTTGTDLAQQVILVPILRAGLGLLEGFVKFLPDAEKGHIGLYRDEQTYEPVEYLFKLPKTKDKKVLVLDPMLATGNSSIAAINLIKNKGVKVKDIFLVSL

SEQ ID NO: 119441 - protein, 205 aa, Unknown
  Bacterial polypetide isolated from the Sargasso Sea
MEVLIVDHPVVAEKLTNIRRDATSNASFRQYLHEISIFLIYEALRDSSLDQIAVDTPLGQSSSFTVVNQPMFVPILRAGLGMLDAGLLMFPDATVGFVGAKRDEETLLPEIYLNTIPNDLDGTRVVLLDPALATGGSVKQAMQLAANAGADEIVIVTVLCSPEGIDAVEKSGLGSKVVTAGVDERLNDVGFIYPGLGDAGDRQFG

SEQ ID NO: 119442 - protein, 92 aa, Unknown
  Bacterial polypetide isolated from the Sargasso Sea
MPTDIVDRQVILGDPMLATGGSAIMAATKLREMGVSDIVFSCLVAAPEGVAAFHGAHPDIPIVTAALDRELNDKAYILPGLGDAGDRIYGTD

SEQ ID NO: 119443 - protein, 91 aa, Unknown
  Bacterial polypetide isolated from the Sargasso Sea
PELINQRLVVALDPMLATGHSSSAAVTRLKENGASNIRFVCLLAAPEGIEFFSKVHPDVPIFTAAIDEKLNDHAYILPGLGDAGDRIFGTK

SEQ ID NO: 119444 - protein, 75 aa, Unknown
  Bacterial polypetide isolated from the Sargasso Sea
NWNSSIAAINLIKNKGVKAKDIFLVSLLAAPEGIKNLQKNHRSLHIFTCKIDAKLNKNKFIVPGLGDAGDRYMGT

SEQ ID NO: 119445 - protein, 104 aa, Unknown
  Bacterial polypetide isolated from the Sargasso Sea
EQTYEPVEYLFKLPKIKNKKILILDPMLATGNSSIAAIDLIKNKGANIKDIFLISLLAAPEGLKNIQKIQKGIHIFTCSIDKKLNKNKFIVPGLGDAGDRYMGT

SEQ ID NO: 119446 - protein, 207 aa, Unknown
  Bacterial polypetide isolated from the Sargasso Sea
MKVEVINHPLINLYMTILRSKDTQSTKFRSLARKISSLMAFEIFKDLRVLPKTVETPLEKYNGVKLSDPKPCVISILRAGLIMSEGITDIFDVVSIGHIGMYRDEQTLKPINYVRKLPSDLKNRQCYLCDPMLATGGSAVSAIITLKDHFATDIKLICLLASDPGIKKVQDSFPEVEIICAQKDNKLNENGFILPGLGDAGDRIFET

SEQ ID NO: 119447 - protein, 191 aa, Unknown
  Bacterial polypetide isolated from the Sargasso Sea
MITVIKSPFVQYKLTILRNKKTSNTVFRQTMNEISYLIASDVLQHVPFKKQTIETPLKKMSGTALGQPIILVPILRAGLGLLEGFAKFLPEAEKGHIGLYRDEQTYEPVEYLFKLPRVKNKKVLILDPMLATGNSSIAAINLIKNKGVNIKDIFLVSLLAAPEGIKKIQKNQKGIHIFTCNIDAKLNKNKF

SEQ ID NO: 119448 - protein, 134 aa, Unknown
  Bacterial polypetide isolated from the Sargasso Sea
MSRQGQLKILNHPLIQHKLTLMRCTDTPSNSFRRLLKEISILMSYEVFRDLPLKNIITNTPIQSMRSPVLSEKTLCLVPILRAGNGMLDGFIEIVSGALVGHIGLYRDEETLKAHDYYINLPKGIGNAKTIILD

SEQ ID NO: 119449 - protein, 170 aa, Unknown
  Bacterial polypetide isolated from the Sargasso Sea
MLTLIKSSFIDYKLTILRNKKTRNSLFRQTMNEVSYLIAGEVFKFCKYNKITIETPITKTRGINISEKIIIVPILRAGLGLIEGFVKFLPNVEKGHIGLYRNEQTYQPVEYLCKLPKVGNKQVIILDPMLATGNSSSAAIDLVKKEGVKISNIKLVSLLASPEGLKNLRK

SEQ ID NO: 119450 - protein, 83 aa, Unknown
  Bacterial polypetide isolated from the Sargasso Sea
TVVLDPMLATGNSANTAISIIKKHGANDIVFTSILAAPEGVEAIEQKHPDVPIYTCSLDERLNENGYIIPGLGDAGDRLYGTT

SEQ ID NO: 119451 - protein, 136 aa, Unknown
  Bacterial polypetide isolated from the Sargasso Sea
MLTLIKSPFIEYKLTILRNKNTSNSLFRQTMNEISYLIAAEVLKHLEFKKTNIQTPLKKTNGLSLKCDPIIIPILRAGLGLVEGFVKFLPNVEKGHIGLYRDEQTYQPVEYLCKLPKVKNKIVLILDPMLATGNSS

SEQ ID NO: 119452 - protein, 98 aa, Unknown
  Bacterial polypetide isolated from the Sargasso Sea
VEYLFKLPKTKNKKILVLDPMLATGNSSIAAINLIKSKGVKTKDVFLVSLLAAPEGIKNLKKHHRSLHIFTCKIDAKLNKNKFIVPGLGDAGDRYMGT

SEQ ID NO: 119453 - protein, 91 aa, Unknown
  Bacterial polypetide isolated from the Sargasso Sea
PKPRNKKVIFLDPMLATGNSSIAAINLIKNKGVTNKDIFLVSLLAAPEGIKNIQKHQKGTHIFTCSIDTKLNKNKFIVPGLGDAGDRYMGT

SEQ ID NO: 119454 - protein, 160 aa, Unknown
  Bacterial polypetide isolated from the Sargasso Sea
MITSIRSPFIEHKMTILRDKRTSNSLFRQTMNETSYLIASEVLKFLPYKKVNVQTPLTKTVGRKLSQQIILVPILRAGLGLLEGFVKFLPDAEKGHIGLYRDEQTYKPVEYLFKLPKTKNKKLLVLDPMLATGNSSIAAIDLIKGKGVSPKDIFLISLLA

SEQ ID NO: 119455 - protein, 70 aa, Unknown
  Bacterial polypetide isolated from the Sargasso Sea
MIATIDLLKKAGCSSIKVLVLVAAPEGIAALEKAHPDVEMYTASIDQGLNEHGYIIPGLGDAGDKIFGTK

SEQ ID NO: 119456 - protein, 206 aa, Unknown
  Bacterial polypetide isolated from the Sargasso Sea
MITVIKSKFVQHKLTILRNKKTSNTIFRQTMNETSYLIAADVLQCLPYKRKKIQTPLKQTNGLTLSKQIILVPILRAGLGLLEGFTKFLPDAEKGHIGLYRDEQTYEPVEYLFKLPKIKNKKILILDPMLATGNSSIAAIDLIISKGANIKDIFLISLLAAPEGLKNIKKKQKGIHIFTCSIDSKLNKNKFIVPGLGDAGDRYMGT

SEQ ID NO: 119457 - protein, 206 aa, Unknown
  Bacterial polypetide isolated from the Sargasso Sea
MITSIKSSFLEYKMTILRNKKTSNSLFRQTMNEVSYLIATEVLKHLKYKKITVQTPLIKTKGLDLAQQVILVPILRAGLGLLEGFVKFLPDAEKGHIGLYRNEQTYEPVEYLCKLPKTKNKTVLVLDPMLATGNSSIAAINLIINKNVNIKDIFLVSLLAAPEGIKNLQKKHKSLHIFTCKIDAKLNKNKFIVPGLGDAGDRYMGT

SEQ ID NO: 119458 - protein, 127 aa, Unknown
  Bacterial polypetide isolated from the Sargasso Sea
MRVVEVSHPLVQHKIGLLRAADINTRQFRQLAVELGSLLTYEATKDLPTETVTIEAWSGPCQIKQIQGKKVTVVPILRAGLGMLDGVLDLIPSARISVVGIYRDETTLQPVPYFQKLAPEIDQRLAI

SEQ ID NO: 119459 - protein, 206 aa, Unknown
  Bacterial polypetide isolated from the Sargasso Sea
MLTLIKSPFLEYKLTILRNKRTKNSLFRQTMNEISYLIAAEVLKHIKFKKIKIQTPIQNTSGNEISNPLIIIPILRAGLGLVEGFVKFLPNVEKGHIGLYRDEQTYQPVEYLCKLPKVSNKTILVLDPMLATGNSSSAAIDLIKERGVKVKNIKLVSLLAAPEGIKNIRKNHKDLHIFTCSLDKGLNKKKYIVPGLGDAGDRYMGT

SEQ ID NO: 119460 - protein, 215 aa, Unknown
  Bacterial polypetide isolated from the Sargasso Sea
TRFITMAIHVISHPLVQHKLGLMRAHGISTKSFRELCSEVGTLLTYEATKNLELEDNEITGWDGNKLKVEHIKGKKITVVPILRAGLGMMDGVMQLLPAAKVSVVGLERNEETLEPVPYFEKLVGNIDERLSLVIDPMLATGGSMIATIDMLKKAGCKEIKVIVLVAAPEGVEKTLAAHPDVEIFTASVDSHLNEKGYIIPGLGDAGDKIFGTVY

SEQ ID NO: 119461 - protein, 204 aa, Unknown
  Bacterial polypetide isolated from the Sargasso Sea
TLIKSPFLEYKLTILENKRTKNSLFRQTMNEISYLIAAEVLKHIKFKKIKIQTPIQKTSGNEILNPLIIVPILRAGLGLVEGFVKFLPNVEKGHIGLYRDEHTYLPVEYLCKLPKVNNKTILVLDPMLATGNSSSAAIDLIKERGVKVKNIKLVSLLASPEGIKNLRKNHKDLHIFTCSLDKGLNKKKYIVPGLGDAGDRYMGT

SEQ ID NO: 119462 - protein, 170 aa, Unknown
  Bacterial polypetide isolated from the Sargasso Sea
LAYEITRNLPMTTRRIETPIEEMDAPTLDGKKLALISILRAGNGLLDGVLELVPSARVGFVGLYRDEETLQPVQYYYKVPHGLENRMVIAVDPMLATGNSSAAAVELLKKSGAKNIRFLCLLAAPEGIKRMEEAHPDVPIVTAAVDSHLNSHGYIVPGLGDAGDRMYGTK

SEQ ID NO: 119463 - protein, 198 aa, Unknown
  Bacterial polypetide isolated from the Sargasso Sea
FVQYKLTILRNKKTSNTVFRQTMNEISYLIASDVLQYVPFKRQTIETPLIKMSGTVLGQPIILVPILRAGLGLLEGFAKFLPEAEKGHIGLYRDEQTYEPVEYLFKLPRVKNKKVLILDPMLATGNSSIAAINLIKNKGVNIKDIFLVSLLAAPEGIKNIQKKQKGIHIFTCNIDAKLNKNKFIVPGLGDAGDRYMGT

SEQ ID NO: 119464 - protein, 168 aa, Unknown
  Bacterial polypetide isolated from the Sargasso Sea
YEVTKDLPLVYKEIETPLMKMNAPFLEGKKLCLVSILRAGNGLLDGFMDLVPSARVGHIGLYRDPETLVAVEYYMKLPDLINQRLVLALDPMLATGHSSSAAVTRLKENGASNIRFVCLLAAPEGIEYFSNVHPDVPIYTAAVDEKLNNHAYILPGLGDAGDRIFGTK

SEQ ID NO: 119465 - protein, 210 aa, Unknown
  Bacterial polypetide isolated from the Sargasso Sea
MVQHLTVVDHPLVQHKLTLMRKKTTSTVEFRQLLREISQFLAYEITRNLPMTTRRIETPIEEMDAPTLDGKKLALISILRAGNGLLDGVLELVPSARVGFVGLYRDEETLQPVQYYYKVPHGLENRMVIAVDPMLATGNSSAAAIELLKKSGAKNIRFLCLLAAPEGIKRMEEAHPDVPIVTAAVDSHLNSNGYIVPGLGDAGDRMYGTK

SEQ ID NO: 119466 - protein, 209 aa, Unknown
  Bacterial polypetide isolated from the Sargasso Sea
MYKHLDFANLFIVDHPLVQHKLTLMRRAETPTSLFRQLLKEVSLLMAYELTQPLPMTRERIDTPLAPMDAPVLAGRKPAIVSILRAGLGMAEGLRELLPSAREGHIGVYRDPKTKRPVEYYVKLPEPAGRLFIVSDPMLATGYSAAHAIDVLRQHGVSNQNIRFMALVAAPEGMRVVEEAHPGVHVYAAALDENLDENAYIVPGLGDAG

SEQ ID NO: 119467 - protein, 113 aa, Unknown
  Bacterial polypetide isolated from the Sargasso Sea
MHENLTIIDHPLVQHKLSLMRDKETSTRSFRILIRETGTLLAYEVTKDLPLITKEIETPLMKMNAPFLEGKKLCLVSILRAGNGLLDGFLDLVPSARVGHIGLYRDPEPLWLW

SEQ ID NO: 119468 - protein, 206 aa, Unknown
  Bacterial polypetide isolated from the Sargasso Sea
MITLIKSSFLEYKMTILRNKKTPNSLFRQTMNETSYLIAAEVLKHLKYKKISVQTPLKKTTGKDLAQQIILVPILRAGLGLLEGFVKFLPDAEKGHIGLYRDEETYKPVEYLFKLPKTKNKKIIVLDPMLATGNSSIAAINLIKNKGVNIKDVFLVSLLAAPEGIRNVQKNHKSLHVFTCKIDAKLNKNKFIVPGLGDAGDRYMGT

SEQ ID NO: 119469 - protein, 206 aa, Unknown
  Bacterial polypetide isolated from the Sargasso Sea
MITVIKSQFVQHKLTILRNKKTSNTVFRQTMNETSYLIAAEVLKHLPYKKTKVETPLKSTSGTILAKQIILVPILRAGLGLLEGFAKFLPDAEKGHIGLYRDEQTYEPVEYLFKLPKIRNKKILILDPMLATGNSSIAAIDLIRNKGANIKDISLISLLAAPEGLKNIQKIQKGIHIFTCSIDKKLNKNKFIVPGLGDAGDRYMGT

SEQ ID NO: 119470 - protein, 206 aa, Unknown
  Bacterial polypetide isolated from the Sargasso Sea
MLKLIKSSFIDYKLSILRNKKTSNALFRQTMNEVSYLIAAEVLKNLKFKKIYFDTPLKKTSGKEILKPIVIIPILRAGLGLVEGFLKLLPNVEKGHIGLYRDEHTYKPVEYLFKLPKIKNKTIIVLDPMLATGNSSVEAINLVKKSGVSINNIFLVSLLAAPEGIKNLNKSHKGLKLFTCSVDKGLNKSKFIVPGLGDAGDRYMGT

SEQ ID NO: 119471 - protein, 206 aa, Unknown
  Bacterial polypetide isolated from the Sargasso Sea
MITVIKSSFLQHKLTILRNKKTSNTVFRQTMNEASYLIAAEVLKYLKYKKTTIETPLKKMQGLTIGQPIILVPILRAGLGLLEGFSKFLPDAEKGHIGLYRDEQTYEPVEYLFKLPKPKNKKIIILDPMLATGNSSIAAINLIKNKGVSNKNIFLVSLLAAPEGVKNIQKHQKGIHIFTCSIDSKLNKNKFIVPGLGDAGDRYMGT

SEQ ID NO: 119472 - protein, 206 aa, Unknown
  Bacterial polypetide isolated from the Sargasso Sea
MLTLIKSPFLEYKLTILRNKRTKNSLFRQTMNEISYLIAAEVLKHIKFKKIKIQTPIQNTSGNEISNPLIIVPILRAGLGLVEGFVKFLPNVEKGHIGLYRDEQTYQPVEYLCKLPKVSNKTILVLDPMLATGNSSSAAIDLIKERGVKIKNIKLISLLAAPEGIKNLRKNHRDLHIFTCSLDKGLNKKKYIVPGLGDAGDRYMGT

SEQ ID NO: 119473 - protein, 205 aa, Unknown
  Bacterial polypetide isolated from the Sargasso Sea
SIHILDHALAKHHITTLRDKKTEADQFRRLLRRLTTLLVAEATKNLASDSYEVETPLALFQGKQISHSIGLVPILRAGLSMVDTALDLLPFAEVWHLGMYRDETTAHPVEYYSKIPKTDPIDVAIILDPMLATGGSASAVIDKLNAWGVQHIYLLSIIASQPGVDALCKNYPDVHYFICDIDSSLNDKKFIVPGLGDAGDRAFQT

SEQ ID NO: 119474 - protein, 210 aa, Unknown; identical to SEQ ID NO: 119465
  Bacterial polypetide isolated from the Sargasso Sea

SEQ ID NO: 119475 - protein, 123 aa, Unknown
  Bacterial polypetide isolated from the Sargasso Sea
PARLLPSAREGHIGLYRDPDTKIPVEYYVKLPKSAGRLFIVSDPMLATGHSAAHAIDVLRRHGVSNQNIRFMALVAAPEGMKVVEDAHPGVHVYAAALDERLDENAYIVPGLGDAGDRLFGTK

SEQ ID NO: 119476 - protein, 206 aa, Unknown
  Bacterial polypetide isolated from the Sargasso Sea
MLTLIKSPFLEYKLTILRNKRTKNSLFRQTMNEISYLIAAEVLKHIKFKKIKIQTPIQNTSGNEISNPLIIIPILRAGLGLVEGFVKFLPNVEKGHIGLYRDEQTYQPVEYLCKLPKVNNKNILVLDPMLATGNSSSAAIDLIKERGVKVKNIKLVSLLAAPEGIKNLRKNHKDLHIFTCSLDKGLNKKKYIVPGLGDAGDRYMGT

SEQ ID NO: 119477 - protein, 132 aa, Unknown
  Bacterial polypetide isolated from the Sargasso Sea
LRAGLGLLEGFVKFLPDAEKGHIGLYRNEQTYEPVEYLCKLPKTKNKTVLVLDPMLATGNSSIAAINLIINKNVNIKDIFLVSLLAAPEGIKNLQKKHKSLHIFTCKIDAKLNKNKFIVPGLGDAGDRYMGT

SEQ ID NO: 119478 - protein, 116 aa, Unknown
  Bacterial polypetide isolated from the Sargasso Sea
EAEKGHIGLYRDEQTYEPVEYLFKLPRVKNKKVLILDPMLATGNSSIAAINLIKNKGVNIKDIFLVSLLAAPEGIKNIQKKQKGIHIFTCNIDAKLNKNKFIVPGLGDAGDRYMGT

SEQ ID NO: 119479 - protein, 142 aa, Unknown
  Bacterial polypetide isolated from the Sargasso Sea
MHENLTIIDHPLVQHKLSLMRDKETSTRSFRILIRETGTLLAYEVTKDLPLITKEIETPLMKMNAPFLEGKKLCLVSILRAGNGLLDGFLDLVPSARVGHIGLYRDPETLVAVEYYLKLPELIDQRLVIALDPMLATGHSSA

SEQ ID NO: 119480 - protein, 165 aa, Unknown
  Bacterial polypetide isolated from the Sargasso Sea
QKILPLLYKEIETPLMKMNAPFLEGKKLCLVSILRAGNGLLDGFMDLVPSARVGHIGLYRDPETLVAVEYYMKLPELISRRLVLALDPMLATGHSSSAAVTRLKENGASNIRFVCLLAAPEGIEYFSKVHPDVPIYTAAIDEKLNNHAYIMPGLGDAGDRIFGTK

SEQ ID NO: 119481 - protein, 193 aa, Unknown
  Bacterial polypetide isolated from the Sargasso Sea
MQETFSLVDHPLVQHKLTLMRDKNCPTAHFRQLIREIALLLAYEVTRDLPLAQTEVETPLETMQAPILAGKKLCFISVLRAGNGLLEGMLDLIPSARVGHIGLYRDPDTLQAVEYYYKVPEDISERQAIVVDPMLATANSLSAAITRLKQDRPVKVKVVCLLAAPEGVAAFSEAHPDVPVFTAALDRELNDHG

SEQ ID NO: 119482 - protein, 212 aa, Unknown
  Bacterial polypetide isolated from the Sargasso Sea
MPTREIRHPLIRHKIGLMRRADISTKNFRELAQEVGALLTYEATNDLPLEAYDIEGWAGTVQVEKIAGKKITVVPILRAGIGMLDGVLSLIPGAKVSAVGVARNEETLEAHTYLEKLAPEIDSRLALIIDPMLATGGSMVATIDLLKKAGCKDIRAMVLVAAPEGIKAVEKAHPDVTIFTASIDQRLNEHGYIIPGLGDAGDKIFGTKQKDA

SEQ ID NO: 119483 - protein, 184 aa, Unknown
  Bacterial polypetide isolated from the Sargasso Sea
KSFRELCSEVGTLLTYEATKNIPLEDNEITSWDGNKLNVQHIKGKKITVVPILRAGLGMMDGVMQLLPAAKVSVVGLQRNEETLEPIPYFEKLVGNIEQRLSLVIDPMLATGGSMIATIDMLKKAGCKEIKVIVLVAAPEGVEKTLAAHPDVEIFTAAVDSHLNEKGYIVPGLGDAGDKIFGTV

SEQ ID NO: 119484 - protein, 122 aa, Unknown
  Bacterial polypetide isolated from the Sargasso Sea
MLDIIPFARVGFVGLYRDEETLEPVQYYFKVPDRLDERAVIVVDPMLATGHSSAAAIDLLKQHGARNIRLMCLVAAPEGVAHMREKHPDVPLVIAALDDRLDEKGYIVPGLGDAGDRMFGTK

SEQ ID NO: 119485 - protein, 144 aa, Unknown
  Bacterial polypetide isolated from the Sargasso Sea
FLEGKKLCLVSILRAGNGLLDGFMDLVPSARVGHIGLYRDPKTLEAVEYYMKLPELINQRLVLALDPMLATGHSSAAAVTRLKENGASNIRFVCLLAVPEGIEYFSKVHPDVPIYTAAVDEKLDSHAYILPGLGDAGDRIFGTK

SEQ ID NO: 119486 - protein, 181 aa, Unknown
  Bacterial polypetide isolated from the Sargasso Sea
LFRQTMNEASYLIAAEVLKHLRYKKISVHTPLTKTTGKELAQQIILVPILRAGLGLLEGFVKFLPDAEKGHIGLYRDEQTYEPVEYLFKLPKTKNKKVLVLDPMLATGNSSITAINLIKNNGVKIKDVFLVSLLAAPEGIKNLQKHHRSLHIFTCKIDAKLNKNKFIVPGLGDAGDRYMGT

SEQ ID NO: 119487 - protein, 208 aa, Unknown
  Bacterial polypetide isolated from the Sargasso Sea
MKVVEVKHPLVRHKIGLMREGDISTKRFRELAAEVGSLLTYEATADFETETVTIEGWNGPVDVDQIKGKKVTVVPILRAGLGMMDGVLEHIPSARISVVGIYRDEETLEPVPYFEKLASDMNERIALIVDPMLATGGSMIATIDLLKKRGCTSIKALVLVAAPEGIKALEAAHPDVELYTAAIDRCLNEKGYILPGLGDAGDKIFGTK

SEQ ID NO: 119488 - protein, 206 aa, Unknown
  Bacterial polypetide isolated from the Sargasso Sea
MITVIKSPFVQYKLTILRNKKTSNTVFRQTMNEISYLIASDVLQYVPFKKQTIETPLKKMSGTALGQPIILVPILRAGLGLLEGFAKFLPEAEKGHIGLYRDEQTYEPVEYLFKLPRVKNKKVLILDPMLATGNSSIAAINLIKNKGVNIKDIFLVSLLAAPEGIKNIQKKQKGIHIFTCNIDAKLNKNKFIVPGLGDAGDRYMGT

SEQ ID NO: 119489 - protein, 175 aa, Unknown
  Bacterial polypetide isolated from the Sargasso Sea
ILIYEAGREWLPTFEAQVQGPLAIADVEFVNPEKPVSVVPILRAGLTLLEESSSVLPASVTYHLGYVRDEETLQPKLYLNKLPEKFEEDAQVLISDPMLATGGTILAAVEEIISRGASPKNIRIICVVACPVSLTELSKRYPGLRVYAAMIDEHLNENGYIVPGLGDAGDRAFGT

SEQ ID NO: 119490 - protein, 216 aa, Unknown
  Bacterial polypetide isolated from the Sargasso Sea
MKQDSRFPNLFITDHPLIQHKLTHMRDKDTSTRTFRELLREITLLMGYEITRNLPITTKRVETPLVEVDAPVIAGKKLAIVPVLRAGIGMSDGLLDLVPSARVGHIGVYRADDHRPVEYLVRLPDLEDRIFILCDPMVATGYSAVHAVDVLKRRNVPAANIMFVALVAAPEGVQVFQDAHPDVKLFVASLDSHLNEHAYIVPGLGDAGDRLFGTKN

SEQ ID NO: 119491 - protein, 210 aa, Unknown
  Bacterial polypetide isolated from the Sargasso Sea
MHENLTVIDHPLVQHKLSLMRDKETSTRSFRILIRETGTLLAYEVTKDLLLITKEIETPLMKMNAPFLEGKKLCLVSILRAGNGLLDGFLDLVPSARVGHIGLYRDPETLVAVEYYLKLPELIDQRLVIALDPMLATGHSSAAAVTRIKENGAANIRFVCLLAAPEGVEYFNKIHPDVKIYTAALDDKLNDHAYILPGLGDAGDRIFGTK

SEQ ID NO: 119492 - protein, 126 aa, Unknown
  Bacterial polypetide isolated from the Sargasso Sea
LLEGFAKFLPEAEKGHIGLYRDEQTYAPVEYLFKLPRVKNKKVLILDPMLATGNSSIAAINLIKNKGVNIKDIFLVSLLAAPEGIKNIQKKQKDIHIFTCNIDAKLNKNKFIVPGLGDAGDRYMGT

SEQ ID NO: 119493 - protein, 208 aa, Unknown
  Bacterial polypetide isolated from the Sargasso Sea
MKVVEVKHPLVKHKIGLMREGDISTKRFRELAKEVGSLLTYEATSDFETEKVTIDGWNGPVEVDQIKGKKVTVVPILRAGLGMMDGVLEHMPSARVSVVGIYRDEETLQPVPYFEKIVSNIEERLALVIDPMLATGGSMIATIDLLKKKGCQSIKVLVLVAAPEGIKALEAAHPDVELFCASIDQGLNEKGYIVPGLGDAGDKIFGTK

SEQ ID NO: 119494 - protein, 210 aa, Unknown
  Bacterial polypetide isolated from the Sargasso Sea
MHENLTIIDHPLVQHKLSLMRDKETSTRSFRILIRETGTLLAYEVTKDLPLITKEIETPLMKMNAPFLEGKKLCLVSILRAGNGLLDGFLDLVPSARVGHIGLYRDPETLVAVEYYLKLPELIDQRLVIALDPMLATGHSSAAAVTRIKENGAANIRFVCLLAAPEGVDYFNKIHPDVKIYTAALDDKLNDHAYILPGLGDAGDRIFGTK

SEQ ID NO: 119495 - protein, 161 aa, Unknown
  Bacterial polypetide isolated from the Sargasso Sea
MPYKKTKVITPLKKTTGTTLVKQIILVPILRAGLGLLEGFAKFLPDAEKGHIGLYRDEQTYEPVEYLFKLPKIKNKKILILDPMLATGNSSIAAIDLIKNKGANIKDIYLISLLAAPEGLKNIQKKQKGIHIFTCSIDTKLNKNKFIVPGLGDAGDRYMGT

SEQ ID NO: 119496 - protein, 206 aa, Unknown; identical to SEQ ID NO: 119488
  Bacterial polypetide isolated from the Sargasso Sea

SEQ ID NO: 119497 - protein, 208 aa, Unknown
  Bacterial polypetide isolated from the Sargasso Sea
MKVVEVKHPLVRHKIGLMREGDISTKRFRELAAEVGSLLTYEATADFETETVTIEGWNGPVDVDQIKGKKVTVVPILRAGLGMMDGVLEHIPSARISVVGIYRDEETLEPVPYFEKLASDMNERIALIVDPMLATGGSMIATIDLLKKRGCTSIKALVLVAAPEGLKALEAAHPDVELYTAAIDRCLNEKGYILPGLGDAGDKIFGTK

SEQ ID NO: 119498 - protein, 180 aa, Unknown
  Bacterial polypetide isolated from the Sargasso Sea
RELTSEITSLLLYQATKELTLSNYNIETPITETIGYKIKLDNIVILPILRAGLGMVKGAQDLMPNSRVGYIGMERDHKTHQPVDYYFKIPKVTDSMVFIVLDPMLATGGTMIAAIDRLKDLGAKNIVSICIISSPEGMNEICNHHQDVKIYTGALDKKLNNNKYIVPGLGDAGDRLYGTE

SEQ ID NO: 119499 - protein, 209 aa, Unknown
  Bacterial polypetide isolated from the Sargasso Sea
MAVHEITHPLIAHKLGLMRYAKISSKDFRELASEVGNLLTYEATRTLPTERATIKSWSGDEVEVRQIKGKKITVVPILRAGLGMLEGVLELIPNAKISVVGLYRDEDTLQPVAYFDKVVKNIDERTALIVDPMLATGGTLIATIDLLKKKGCRRIMGLFLVAAPEGIKAVVEAHPDVDIFTAAIDDRLNEKGYILPGLGDAGDKIFGTR

SEQ ID NO: 119500 - protein, 210 aa, Unknown
  Bacterial polypetide isolated from the Sargasso Sea
MNENVQVINHPLVQHKLSLMRKKDTSTKSFRILIREVGTLLAYEVTKDLPLLYKEIETPLMKMNAPFLEGKKLCLVSILRAGNGLLDGFMDLVPSARVGHIGLYRDPETLVAVEYYLKLPELINRRLVLALDPMLATGHSSSAAVTRLKENGASNIRFVCLLAAPEGIDYFSKVHPDVPIFTAAIDEKLNNHAYILPGLGDAGDRIFGTK

SEQ ID NO: 119501 - protein, 206 aa, Unknown
  Bacterial polypetide isolated from the Sargasso Sea
MITSIKSSFLEYKMTILRNKKTSNSLFRQTMNEASYLIAAEVLKHLKYKKITIQTPLIKTQGLDLAQQVILVPILRAGLGLLEGFVKFLPDAEKGHIGLYRNEQTYEPVEYLCKLPKTKNKTVLVLDPMLATGNSSIAAINLIINKNVNIKDIFLVSLLAAPEGIKNLQKKHKSLHIFTCKIDAKLNKNKFIVPGLGDAGDRYMGT

SEQ ID NO: 119502 - protein, 210 aa, Unknown
  Bacterial polypetide isolated from the Sargasso Sea
MHENLTIIDHPLVQHKLSLMRDKETSTRSFRILIRETGTLLAYEVTKDLPLITKEIETPLMKMNAPFLEGKKLCLVSILRAGNGLLDGFLDLVPSARVGHIGLYRDPETLVAVEYYLKLPELIDQRLVIALDPMLATGHSSAAAVTRIKENGAANIRFVCLLAAPEGVEYFNKIHPDVKIYTAALDDKLNDHAYILPGLGDAGDRIFGTK

SEQ ID NO: 119503 - protein, 244 aa, Unknown
  Bacterial polypetide isolated from the Sargasso Sea
MRRGASVSRFPAGRRAEPIPLAAACAPAMTQDSRFPNLFILDHPLIQHKLSHMRDRDTSTRTFRELLREITLLMGYEITRNLPMTTRRITTPLVDIDAPVIAGKKLAIVPVLRAGIGMSDGLLELVPSARVGHIGVYRAEDHRPVEYLVRLPDLEDRVFILCDPMVATGYSAVHAVDVLKRRNVAGENILFLALVAAPEGVQVFQDAHPDVKLYVASLDSHLNEHAYIVPGLGDAGDRLFGTKN

SEQ ID NO: 119504 - protein, 154 aa, Unknown
  Bacterial polypetide isolated from the Sargasso Sea
MSEWFTENDDGVLNFGYKIEDHLFSKKSKFQKVDVYKTKAYGKILVLDDCIMMSEADEFVYHEMISHIPVCYHSNPKRVLVIGGGDGGTLRELSKHPSLEKIVLCEIDKLVIDVSKEYFPNVACGFDGPRVEVKVADGIDYIKKNKNYFDIVIV

SEQ ID NO: 119505 - protein, 179 aa, Unknown
  Bacterial polypetide isolated from the Sargasso Sea
EFGNALFIDDELQVAEKDEKLYSSTFVKSGTDICKRKGIAAVIGGGDGGVVRECLQNNFNFVDWFELDPQVVELSYKHLPKITSRIKKSNKVKTYWGDAFKSIKSIEDSKYDNIFVDLNDDQYCIDLAKRNMKSLKRILKKGGALTAQVGCQDKKPKQINNWTKVLKTSFGNTSLSEIF

SEQ ID NO: 119506 - protein, 181 aa, Unknown
  Bacterial polypetide isolated from the Sargasso Sea
MSGWIDEVHQGVRYGLAGEVLIEEISPFQRITVIRSERYGRGLMLDGCWMTAEGQERQYHEALVHPALCAAAAVERVLVIGGGDGGTARECLRHKDVKQLDLVEIDARVVELSRIHLPDIGGGAWDDPRLQLSIGDGIAWVLSAEAASYDVILVDGSDPAGPAEGLFNQAFFEHCRRVLRP

SEQ ID NO: 119507 - protein, 201 aa, Unknown
  Bacterial polypetide isolated from the Sargasso Sea
IGGGDGGTARECVKYSQISKIDLVEIDEEVIKISKKFLKEIGGEAWNDKRLEIHVDDGVKWVKKTRDNFYDVIFIDCSDPSEFSNLLFSDSFYKECKRILTPKGILATQSESPESFKNIHINILKTLKNIFKVSETMYSFVPIYPSGIWSWTFASSEDLNLSKQNYDEALRIEKGCEIWNLNFQNAAFKMMPNKIVKELDS

SEQ ID NO: 119508 - protein, 208 aa, Unknown
  Bacterial polypetide isolated from the Sargasso Sea
SKVGQKLEILNIEEFGNALFIDDELQVSEKDEKLYSSTFVKSGISICKKTDIAAVIGGGDGGVVRECLQNNFNFVDWFELDPQVVELSYKHLPKITSRIKKSNKVKSYWGDAFKSIKSIEDSKYDHIFVDLNDDQYCIDLAKRNMKGLKRILKKGGALTAQVGCQDKKPKQVKNWTKVLETSFGNANLSEIFIPSFDCRWNFISSSNK

SEQ ID NO: 119509 - protein, 186 aa, Unknown
  Bacterial polypetide isolated from the Sargasso Sea
MTSSGWIDEHHNGVRYGLAGQVLHEEQSPFQRVTIIDSERYGKGLLLDGCWMTAERQERHYHEALVHPALCSAERIERVLVIGGGDGGTARECLRHGEVQQLDLVEIDGRVVELSQQHLPSIGGSAWSDRRLQLTIGDGIAWAANAADASYDVVLVDGSDPTGPAEGLFNRAFFEHCRRLLKPGGV

SEQ ID NO: 119510 - protein, 218 aa, Unknown
  Bacterial polypetide isolated from the Sargasso Sea
MGGWIDEEHRGVRYGLAGEVLVEETSPFQRISVIRSERYGRGLLLDGCWMTAEQQERHYHEVLVHPALCSAEAIERVLVIGGGDGGTARECLRHPGVLHLDLVEIDGRVVELSQEHLPGIGGAAWSDPRCHLTVGDGIAWAAAAPDQSYDVVLVDGSDPAGPAEGLFNRAFFEHCRRILRPGGVFATQSESPEAFREVHVAMVRLLREVFGHADPLYG

SEQ ID NO: 119511 - protein, 265 aa, Unknown
  Bacterial polypetide isolated from the Sargasso Sea
MHNFSDKLDLIAKDTNFFLRKLFSKKNKISNLNTSMMYSIFSGGKRFRSAIIINSGKIFNINYKQLITVAAAVECIHSYSLIHDDLPAMDNDDLRRGKLATHKKFNEYTAILAGNSLLALAFEILSSKNLKLPPKIKNELITTLALYSGSSGLAGGQYSDLSFENKKISKRKIIEIQKNKTGKLFAFCCECSGIIKGQNFNKRKILREIGMDIGLLFQIADDLIDFKGDSKIVGKPTKKDKKKGKQTLVRMLGYEKTINFANNLK

SEQ ID NO: 119512 - protein, 153 aa, Unknown
  Bacterial polypetide isolated from the Sargasso Sea
IGGGDGGVARECISQNFGFIDWYELDQEVVEVCDKHLSKIGEKASEKNSVKCVWGDAFKSIKAVKDDTYDQIYVDLNDDQFCIDLAAKNMDSLVRILKPKGVITAQVGSQDKKPKQVENWMNVFNQNFGNANLSRVYVPSFDCSWNFSSSINH

SEQ ID NO: 119513 - protein, 239 aa, Unknown
  Bacterial polypetide isolated from the Sargasso Sea
EKYLIFSEKKLINICAAVECIHSYSLIHDDLPCMDNDTIRRGKPATHIKFGEASAVLAGSSLLTLAFEIIADKKYLLSPKEKNEIIKFLSSCSGHTGIAGGQELDLKFENKKKGINQIIDMQKKKTGKLFNFCLYAVGVVAKKNTKDKLFLSNLGEEIGLLFQLADDFLDFKGLKKLLGKPVKKDHKKGKSTLLNLMGEKKAYLFANNLKRKILRKLEKHGKNAKELISTIEFILERKF

SEQ ID NO: 119514 - protein, 148 aa, Unknown
  Bacterial polypetide isolated from the Sargasso Sea
MPVWVDEEHRQVRYGLAGEVLVEKTSPFQRITLIRSERYGNALLLDGCWMTAERQERHYHEALVHPALCGAEAIERVLVIGGGDGGTARECLRHQGVQHLDMVEIDGEVVNLCRTHLPSLGGSAWSDPRLHLTVGDGIAWAAGRPGQP

SEQ ID NO: 119515 - protein, 284 aa, Unknown
  Bacterial polypetide isolated from the Sargasso Sea
MIKVGEHVTLDIIGTKKEYDPSFFEGLVHKIADKAKVTVLNIAKYKFEPQGFTLVALLAESHISFHTYPEKGIISFDFYTCGTVSPSIALEVIKKEIEHKRIIKKELNRDTISFYHDTTSTKGLKKNYLVKEVLEDFTSKVGQHIEILNLVEYGKSLFIDNDLQVAESDEHIYSGTFVNSALKLNKSKDRAAIIGGGDGGVARECISKGFGFIDWYELDPEVVEVCKKHIGSIGKNATEKNSVKCVWGDAFESIKKVEDDAYDQIFIDLNDDQFCIDLAAKNMS

SEQ ID NO: 119516 - protein, 154 aa, Unknown
  Bacterial polypetide isolated from the Sargasso Sea
IIGGGDGGVARECISKKFNFIDWYELDPEVVEVCNKHLGDIGKKATEKNSVKCVWGDAFHSIKSVKDDTYDHIFVDLNDDQFCIDLAAKNMDSLVRILKPKGVITAQVGSQDKKPLQVENWMNVFHHHFGNTKLSRVYVPSFDCSWNFSSSINH

SEQ ID NO: 119517 - protein, 294 aa, Unknown
  Bacterial polypetide isolated from the Sargasso Sea
TLVALLAESHISFHTFPENEIISFDFLTCGKVSPSVALKVIKEEIEHKQIIIKEFNRDTIDLYHDNYSSPGLKKSYVVNKVLENFKSKAGQYIEILDLEQFGKALFIDNEIQVAEIDEHLYSSTFVNSGLNLNSNKEKAAIIGGGDGGVARECISQNFGFIDWYELDPEVVDVCDKHLSKIGEKATEKNSVKCVWGDAFESIKSVKDNTYDQIFVDLNDDQFCIDLAAKNMSSLERILKPKGVITAQVGSQDKKPKQVENWLNVFNKNFGNTKLSRVYIPSFDCSWNFSSSINH

SEQ ID NO: 119518 - protein, 259 aa, Unknown
  Bacterial polypetide isolated from the Sargasso Sea
IKKTSKYQEIIVIENEYYGKALMLDGCWMTSLKDEKYYHECLVHPVLSSTDAKSNVLIIGGGDGGTVRECVKYSQISKIDLVEIDEEVIKISKNFLKEIGGEAWNDKRLEIHIDDGVKWVKKTRDNFYDVIFIDCSDPSEFSNLLFSDIFYKECKRILTPKGIFATQSESPESFKNIHINILKTLKNIFKVSETMYSFVPIYPSGIWSWTFASSEDLNLSKQNYDEVLKIEKGCEIWNLNFQNAAYKMMPNKIVKELDS

SEQ ID NO: 119519 - protein, 189 aa, Unknown
  Bacterial polypetide isolated from the Sargasso Sea
MTDITTWIDEYHKGSRFGLNGKILIKKTSKYQEIIVIENEYYGKALMLDGCWMTSLKDEKYYHECLVHPALSSIDEKSNVLIIGGGDGGTVRECVKYSQISTIDLVEIDEEVIKISKKFLEEIAGEAWNDKRLEIHIDDGVKWVKKTKDNFYDVIFIDCSDPSEFSNLLFSHSFYKECKRILAPRGDIS

SEQ ID NO: 119520 - protein, 206 aa, Unknown
  Bacterial polypetide isolated from the Sargasso Sea
MKKVGEHVTIDFLGVKRDYTPEFYTKVIYKIAKKARVEVLNIAEKVFKPQGYTCVALLAESHMSFHTFPERGIISFDFFTCAKISPTAALDILKNEIKHERAVVRNFDRSNKGMYEDIYSTPGHQKYYIVNDVLENFISKVGQHIEIMKLEEFGNALFIDSELQVAEKDEKKYSGQFVNSALSLSKENSSAAIIGGGDGGVARELL

SEQ ID NO: 119521 - protein, 249 aa, Unknown
  Bacterial polypetide isolated from the Sargasso Sea
MTNISTWIDEYHKGSRFGLNGDVLIKQKSQYQEIIVIENEYYGRALMLDGCWMTSLKDEKYYHECLVHPALSSIDEKSNVLIIGGGDGGTARECVKYSQISKIDLVEIDEEVIKISKKFLKEIGGEAWNDKRLEIHVDDGVKWVKKTRDNFYDVIFIDCSDPSEFSNLLFSDSFYKECKRILTPKGILATQSESPESFKNIHINILKTLKNIFKVSQTMYSFVPIYPSGIWSWTFASSEESNLSKQNCD

SEQ ID NO: 119522 - protein, 243 aa, Unknown
  Bacterial polypetide isolated from the Sargasso Sea
MIKVGEHITIDFLGVKKDYSPEFYEKIIYKIAKAAKVEILNVASHKFEPQGFTLVALLAESHFSFHTFPEKSVISFDFFTCGKVNPKVALKILRKEIEHKRVVTNAFDRSSIGLYDDIYSTAGQKKFYVVKDVLEKFTSKVGQFVEIMDLEEFGHALFIDHEIQVAEKDEKIYSSNFFKSSYDLSKKNNNVAIIGGGDGGVARACLENNSNYIDWFELDPEIVDVCFRHLPKVCSKVKKSNKI

SEQ ID NO: 119523 - protein, 175 aa, Unknown
  Bacterial polypetide isolated from the Sargasso Sea
MYSSTFVNSGLNLNPKKEKAAIIGGGDGGVARECISKNFGFIDWYELDPEVVKVCDKHLSKIGEKASEKNSVKCVWGDAFKSIKSVKDDTYDQIYVDLNDDQFCIDLAAKNMDSLVRILKPKGVITAQVGSQDKKPKQVDNWMNVFNESFGNTKLSRVYIPSFDCSWNFSSSINH

SEQ ID NO: 119524 - protein, 267 aa, Unknown
  Bacterial polypetide isolated from the Sargasso Sea
QIHIERIFAKKISKYQEIMIFQSKLFGKILTLDGVIQITEKDHHPYSEMLTHVPTLSHNQIKKVLIIGGGDGAIAHECLKYSEIDEITLCEIDEEVINLSKKYLRKINYGSLNNKKVKILIKNAFEFVSNKNFKNYFDLIIVDRPDPIGPGKQLFRKIFYENIKQIMKEKGIAVFQTGVPFFQKKELKETMIKLKSIFKHSGVYLTVIPTYTGGYMALTWASNKTDIKNKKIRDNFIQDNNIKTKYYNEHIHYSSFNLPEWIFNIIT

SEQ ID NO: 119525 - protein, 246 aa, Unknown
  Bacterial polypetide isolated from the Sargasso Sea
NIIIKKFNRDTIDHYHDNYSSPGLKKSYIVKKVLEKFKSEVGQQIEILELEQFGKALFIDNEIQVAEKDEHLYSSTFVKSGLSLNSNKEKAAIIGGGDGGVARECISKNFGFIDWYELDPEVVEVCDKHLGTIGDKATEKNSVKCVWGDAFESIKAVKDDTYDQIYVDLNDDQYCIDLAAKNMKSLVRILKPKGVITAQVGSQDKKPKQVENWLNIFNQNFGNTKLSRVYIPSFDCSWNFSSSINH

SEQ ID NO: 119526 - protein, 223 aa, Unknown
  Bacterial polypetide isolated from the Sargasso Sea
QKKFYVVKDVLEKFTSKVGQFVEIMDLEEFGHALFIDHEIQVAEKDEKIYSSNFFKSSYDLSKKNNNVAIIGGGDGGVARACLENNSNYIDWFELDPEIVDVCYRHLPKVCSKVKKSNKIKSFWGDAFKSIKEIEDSKYDKIFVDLNDDQYCIDLAKKNMRGLKRILKKGGVITAQVGSQDKKPKQVDNWCKVLERSFGNVKLSGTYIPSFDCRWNFASSIMK

SEQ ID NO: 119527 - protein, 226 aa, Unknown
  Bacterial polypetide isolated from the Sargasso Sea
FQGFEINRTLFEGKSEYQDIAIYENDTLGRVLAIDGIIQITECDEFVYQEMMTHVPLFSHEKPEHILIIGGGDGGILREVLRHKGIKRVVMAEIDQMVIDACMEYIPSVNNGGEVYQDTRVQLMVGDAFAYVKETDLKFDVVIIDSTDPVGPGEKLFSYEFYKNLVEILKENAVVSTQGGVPQFQSGEVGSTLSCLEKAGLSASCYIAAIPTYYGGYMTLGFGVLN

SEQ ID NO: 119528 - protein, 234 aa, Unknown
  Bacterial polypetide isolated from the Sargasso Sea
MLAESHISFHTYPEKGIISFDFYTCGTVAPSIALDVIKKEIEHKRIIKKELNRDTISFYYDNTSTKGLQKNYLVKEVIEDFKSKVGQHIEILDLVEYGKSLFIDGDLQVAESDEHLYSGTFVNSAMKLNKSKDRAAIIGGGDGGVARECIAKGFGFIDWYELDPEVVEVCKKHIGSIGKNATEKNSVKCVWGDAFQSIKKVEDDSYDKIFIDLNDDQFCIDLAAKNMDSLSKNS

SEQ ID NO: 119529 - protein, 279 aa, Unknown
  Bacterial polypetide isolated from the Sargasso Sea
LFEKVIHDIAKAANVTILNISKYKFEPQGFTILALLAESHISFHTFPEKGMISFDFFTCGKISPSVAIDIIKKEFKHQRIVKKEFNRDTKALYHDIYSSPGLQKAYVVNDVLEDFKSKVGQHIEILDLEQFGKSLFIDGEIQVAASDEHLYSSTFVGAGLNLNKKNDRAAIIGGGDGGVARECVTKKFNFIDWYELDPEVVEVCNKHLGNIANKATEKNSVKCVWGDAFKSIKSVEDDTYDHIFVDLNDDQFCIDLAAKNMDSLVRILKPKRSYYCTSW

SEQ ID NO: 119530 - protein, 205 aa, Unknown
  Bacterial polypetide isolated from the Sargasso Sea
MEKVGEHIILDIVGTKKEYTPEFYEKLVYKIAKAAKVTVLKISKYKFEPQGFTLVALLAESHISFHTFPEKEIVSFDFFTCGKVSPKVSLDIIKDEIEHSNIIIKEFNRDTIDLYHDNYSSPGLKKSYVVNKVLENFKSKVGQYIEILDLEQFGKALFIDNEIQVAESDEHLYSSTFVNSGLNLNSYKEKAAIIGGGDGGVAREL

SEQ ID NO: 119531 - protein, 216 aa, Unknown
  Bacterial polypetide isolated from the Sargasso Sea
MITKVGEHITLDIIGTNKEYDPVFFEKLVYKIAKIAKVTVLKISKYKFEPQGFTLVALLAESHISFHTFPEKGIISFDFFTCAKISPSVAINVIKEEIEHSRIVKKEFNRDTVDLYHDIYSSPGLKKSYIVNKVLENFKSNVGQHIEILELEQFGKALFIDNEIQVAEKDEHLYSTTFVKAGLDLNSNKEKAAIIGGGDGGVARECISKNFGFIDW

SEQ ID NO: 119532 - protein, 219 aa, Unknown
  Bacterial polypetide isolated from the Sargasso Sea
MAESHISFHTFPEKGIISFDFFTCGKISPSVAIDVLKKEIKHKRIVKKEFNRDTVTLYDDIYSSPGLKKYYIVNNVLEDFTSKVGQHIEILDLEQFGKSLFIDNELQVSSKDEHLYSSTFVNAGLKLNKAKDKAAIIGGGDGGVARECVSKNFNFIDWFELDPEVVEVCSKYLSKVGNNATKKNSVKCIWGDAFESIKSVEDNRYDKIFVDLNDDQYCI

SEQ ID NO: 119533 - protein, 215 aa, Unknown
  Bacterial polypetide isolated from the Sargasso Sea
MIKVGEHITLDIIGTTKEYDPSIYEKVINKIAKAADVTILNISKYKFEPQGFTILALLAESHISFHTFPEKGIISFDFFTCGKISPSVAIDIVKKEFEHKRIVKKEFNRDTRSFYHDIYSSPGLQKSYVVNEVLEDFKSKVGQHIEILELEQFGKSLFIDGEIQVAASDEHLYSSTFVGAGLKLNKKNERAAIIGGGDGGVARECISKKFNFIDW

SEQ ID NO: 119534 - protein, 204 aa, Unknown
  Bacterial polypetide isolated from the Sargasso Sea
VLIIGGGDGGTVRECVKYSQISKIDLVEIDEEVIKISKKFLKEIAGEAWNDKRLEIHIDDGVKWVKKTKDNFYDVIFIDCSDPSEFSNLLFSHSFYKECKRILAPRGILATQSESPESFKNIHINILKSLKNIFKVSETMYSFVPIYPSGIWSWTFASSEDLSLSKQNYDEVVKIEKGCEIWNLNFQNAAFKMMPNKIVKELDS

SEQ ID NO: 119535 - protein, 209 aa, Unknown
  Bacterial polypetide isolated from the Sargasso Sea
KSKVGQYVEILDLEQFGKSLFIDNEIQVAESDEHLYSSTFVNSGLKLNSKKEKAAIIGGGDGGVARECISQNFGFIDWYELDPEVVDVCDKHLSKIGEKASEKNSVKCVWGDAFESIKSVKDDSYDQIYVDLNDDQFCIDLAAKNMDSLVRILKPKGVITAQVGSQDKKQKQVENWMNVFNHSFGNTKLSRVYIPSFDCSWNFSSSINH

SEQ ID NO: 119536 - protein, 256 aa, Unknown
  Bacterial polypetide isolated from the Sargasso Sea
NSKYQEIIVIENEYYGRALMLDGCWMTSLKDEKYYHECLVHPALSSIDEKSNVLIIGGGDGGSLRECVKYTQISKIDLVEIDEEVIKISKKFLKEIGGEAWNDNRLEIHVDDGVQWVKKTKDNFYDVIFIDCSDPSEFSNLLFSDSFYEECKRILTPKGILATQSESPESFKNIHINILKTLKNIFKVSKTMYSFVPIYPSGIWSWTFASSEVLNLSKQNYTETLRIEKGCEIWNLNFQNAAFKMMPNKIVKELDS

SEQ ID NO: 119537 - protein, 210 aa, Unknown
  Bacterial polypetide isolated from the Sargasso Sea
FTSKVGQNIEILDLEQFGKSLFIDGELQVAENDEHLYSSTFVNSGLKLNPSNDKTAIIGGGDGGVARECISKGFKLIDWYELDPEVVTMCEKYLSKVGKKATTKNHVQCVWGDAFESIKSVEDNKYDKIYVDLNDDQYCIDLAAKNIKSLKRILKPNGTITAQVGSQDKKPKQVDKWLNLFEKSFGNTSLDRVYIPSFDCSWNFASSLNK

SEQ ID NO: 119538 - protein, 174 aa, Unknown
  Bacterial polypetide isolated from the Sargasso Sea
YSSTFVNSGLKLNSSKDRAAIIGGGDGGVARECISKNFGFIDWYELDPEVVEVCDKHLGTIGQKATEKNSVKCVWGDAFESIKKVETDTYDKIYIDLNDDQFCIDLAAKNMDQIIRVLKPNGVVTAQVGSQDKRPKQVENWKDVFNKNFGNATLDRVYIPSFDSSWNFYTSVNH

SEQ ID NO: 119539 - protein, 175 aa, Unknown
  Bacterial polypetide isolated from the Sargasso Sea
LYSSTFVGAGLKLNKKNERAAIIGGGDGGVARECISKKFNFIDWYELDPEVVEVCNKHLGDIGKKSTEKNSVKCVWGDAFETIKTVNEDTYDHIFVDLNDDQFCIDLAAKNMDSLVRILKPKGVITAQVGSQDKKPLQVENWLNVFNHHFGNTNLSRVYIPSFDCSWNFSSSINH

SEQ ID NO: 119540 - protein, 202 aa, Unknown
  Bacterial polypetide isolated from the Sargasso Sea
MTKVGEHITLDIIGTTKEYDPSVYEKVINEIAKAAKVSILNISKYKFEPQGFTILALLAESHMSFHTFPEKGIISFDFFTCGKVSPSVAIDIIKKEFEHKRIVKKEFNRDTKSLYHDIYSSPGLQKSYVVNDVLEDFKSKVGQHIEILDLEQFGKSLFIDGEIQVAATDEHLYSSTFVGSGLNLNNDNERAAIIGGGDGGVA

SEQ ID NO: 119541 - protein, 284 aa, Unknown
  Bacterial polypetide isolated from the Sargasso Sea
YEKIIYTIAKAAKVEILNVSSHRFQPQGFTLVALLAESHFSFHTFPEKGVISFDFFTCGKVNPKVALKILRKEIQHERVVTNAFDRSSIGLYDDIYSTPGQKKYYVVKNVLEKFTSKVGQFVEIMDLEEFGHALFIDHEIQVAEKDEKIYSSNFFKSSYDLSKKNNNVAIIGGGDGGVARACLENNSNFIDWFELDPEIVDACYKHLPKVCSKVKKSNKIKTFWGDAFKSIKGVENSKYDKIFVDLNDDQYCIDLAKKNMKDLKRILKKGGVITAQVGSQDKKP

SEQ ID NO: 119542 - protein, 260 aa, Unknown
  Bacterial polypetide isolated from the Sargasso Sea
IAKAADVKILNISKYKFEPQGFTIIALLAESHISFHTFPEKGIISFDFFTCGKISPSVAIDIIKKEFEHKRIVKKEFNRDTKSLYHDIYSSPGLQKSYVVNDVLEDFKSKVGQHIEILDLEQFGKSLFIDGEIQVASTDEHLYSSTFVGSGLDLNKDNERAAIIGGGDGGVARECIYKKFNFIDWYELDPEVVDICNKHLGDIGKKATEKNSVKCVWGDAFESIKTVSDDTYDHIFVDLNDDQFCIDLAAKNMDSLVRIL

SEQ ID NO: 119543 - protein, 210 aa, Unknown
  Bacterial polypetide isolated from the Sargasso Sea
MAESHISFHTFPEKGIISFDFFTCAKISPSVALEVIKDEIEYTHIIKKQFNRDTVDLYHDNYSSPGLKKTYVVNKVIENFKSKVGQHIEILELEQFGKALFIDNEIQVAEKDEHLYSSTFVNSGLSLNSNKEKAAIIGGGDGGVARECISRNFGFIDWYELDPEVVEVCDKHLGTIGDKATEKNSVKCVWGDAFESIKAVKDDTYDQIYV

SEQ ID NO: 119544 - protein, 265 aa, Unknown
  Bacterial polypetide isolated from the Sargasso Sea
WQVSPSIAIDIIKKEFEHTRIVKKEFNRDTKSLYHDIYSSPGLQKSYVVNNVLEDFKSKVGQHIEILDLEQFGKSLFIDGEIQVAATDEHLYSSTFVGAGLKLNKQSESAAIIGGGDGGVARECISKDFSFIDWYELDPEVVDVCNKHLGDIGKKATEKNSVKCVWGDAFESIKSIKDDTYDHIFVDLNDDQFCIDLAAKNMDSMIRILKPKGVITAQVGSQDKKPKQVDNWLNVFNHHFGNTKLSRVYVPSFDCSWNFSSSINH

SEQ ID NO: 119545 - protein, 71 aa, Unknown
  Bacterial polypetide isolated from the Sargasso Sea
QHIEILELEQFGKSLFIDGEIQVATTDEHLYSSTFVGAGLDLNQNNERAAIIGGGDGGVARECISKNFNFI

SEQ ID NO: 119546 - protein, 164 aa, Unknown
  Bacterial polypetide isolated from the Sargasso Sea
KLNKSNERAAIIGGGDGGVARECISKKFNFIDWFELDPEVVEVCNKHLGDIGKKATEKNSVKCVWGDAFESIKSVKDDSYDHIFVDLNDDQFCIDLAANNMDSLVRILKPKGVITAQVGSQDKKPQQVENWLNVFHHHFGNTKLSRVYVPSFDCSWNFSSSINH

SEQ ID NO: 119547 - protein, 289 aa, Unknown
  Bacterial polypetide isolated from the Sargasso Sea
MSESHFSFHTFPERGVISFDFFTCGKVNPKVALKILRKEIDHQRVVTNTFDRSSIGLYDDIYSTPGQKKFYVVKDVLEKFTSKVGQFVEIMDLEEFGHALFIDHEIQVAEKDEKIYSSNFFKSSYDLSKKNNNVAIIGGGDGGVARACLENNSNYIDWFELDPEIVDVCYRHLPKVCSKVKKSNKIKTFWGDAFKSIKEIEDSKYDKIFVDLNDDQYCIDLAKKNMRGLKRILKRGGVITAQVGSQDKKPKQVDNWCKVLEKSFGNVKLSGAYIPSFDCKWNFASSIMK

SEQ ID NO: 119548 - protein, 156 aa, Unknown
  Bacterial polypetide isolated from the Sargasso Sea
AAIIGGGDGGVARECISQNFGFIDWYELDPEVVDVCDKHLSKIGEKASEKNSVKCVWGDAFKSIKSVKDDTYDQIYVDLNDDQFCIDLAAKNMDSLVRILKPKGVITAQVGSQDKKPKQVDRWMNVFNESFGNTKLSRVYIPSFDCSWNFSSSINH

SEQ ID NO: 119549 - protein, 231 aa, Unknown
  Bacterial polypetide isolated from the Sargasso Sea
MIKVGEHITIDFLGVKKDYSPEFYEKVIYTIAKAAKVEILNVSSHKFEPQGFTLVALLAESHFSFHTFPEKGVISFDFFTCGKVNPKVALKILRKEIEHKRVVTNAFERSSIGLYDDIYSTPGQKKFYVVKDVLEKFTSKVGQFVEVMDLEEFGHALFIDHEIQVAEKDEKIYSSNFFKSSYDLSKKNNNVAIIGGGDGGVARACLENNSNYIDWFELDPEIVEACYRHLP

SEQ ID NO: 119550 - protein, 241 aa, Unknown
  Bacterial polypetide isolated from the Sargasso Sea
MTTKVGEHITLDILGTKKEYDPAFYEKLVYKIAKIAKVTVLEITKYKFEPQGFTLVALLAESHISFHTFPEKGIISFDFFTCAKVSPLVALDVIKEEIDHTNIIIKKFNRDTIDHYHDNYSSPGLKKSYIVKKILEKFKSEVGQQIEILELEQFGKALFIDNEIQVAESDEHLYSSTFVNSGLNLNSNKEKAAIIGGGDGGVARECISKNFGFIDWFELDPEVVNVCDKHLAKIGNKATEK

SEQ ID NO: 119551 - protein, 266 aa, Unknown
  Bacterial polypetide isolated from the Sargasso Sea
EKGIISFDFYTCGTVAPSIALEVIKKEIEHKRIIKKELNRDTISFYYDNTSTKGLQKNYLVKEVLEDFKSKVGQHVEILDLVEYGKSLFIDGDLQVAESDEHLYSGTFVNSAMKLNKSKDRAAIIGGGDGGVARECIAKGFGFIDWYELDPEVVEVCKKHIGSIGKNATEKNSVKCVWGDAFESIKKVEDDSYDKIFIDLNDDQFCIDLAAKNMNSLVRILKPDGVITAQVGSQDKKPKQVDNWLNVFNKNFGNATLDRVYIPSFD

SEQ ID NO: 119552 - protein, 246 aa, Unknown
  Bacterial polypetide isolated from the Sargasso Sea
MTKVGEHITLDIIGTTKEYDSSFFEKVIYDIAKAAKVTILNISKYKFEPQGFTILALLAESHISFHTFPEKGIISFDFFTCGKINPSVAVEIIKKEFEHTRIVKKEFNRDTKSLYPDIYSSPGIQKSYVVNDVLEDFKSKVGQHIEILELEQFGKSLFIDGEIQVATTDEHLYSSTFVGAGLDLNQNNERAAIIGGGDGGVARECISKNFNFIDWYELDPEVVDVCNKHLGDIGKKATEKNSVKCV

SEQ ID NO: 119553 - protein, 278 aa, Unknown
  Bacterial polypetide isolated from the Sargasso Sea
PERGVISFDFFTCGKVNPKVALKILRNEIQHERVVTNTFDRSSIGLYDDIYSSPGQKKYYVVKNVLEKFTSKVGQFVEVMDIEEFGNALFIDHEIQVAEKDEKIYSSTFFNSSYDLSKKNNNVAIIGGGDGGVARACLENNSNYIDWFELDPEIVDACYRHLPKVCSKVKKSNKVKTFWGDAFKSIKEIEDAKYDKIFVDLNDDQYCIDLARKNMKGLKRILKKGGVITAQVGSKDKKPKQVENWCKVFNKSFGNVNLSGAYVPSFDCNWNFASSIMK

SEQ ID NO: 119554 - protein, 216 aa, Unknown
  Bacterial polypetide isolated from the Sargasso Sea
MENFVSKVGQHIEILKLEEFGPALFIDSELQVAEKDEKKYSSQFVGSALNLSKNNSSAAIIGGGDGGVARELSSKGFDLIDWYELDPEVVKVCQKHLIKVCGDVKANNKVKTFWGDAFESIKKVKDSKYDKIFVDLNDDQFCIDLAAKNMKALKRILKSGGVITAQVGCMSKKPRQVKNWLELLKNNFGNVTLDEVFIPSFDCRWNFASSHNKDQY

SEQ ID NO: 119555 - protein, 190 aa, Unknown
  Bacterial polypetide isolated from the Sargasso Sea
MTNISTWIDEYHKGSRFGLNGKILIKKNSKYQEIIVIKNEYYGKALMLDGCWMTSLKDEKYYHECLVHPALSSIDEKSNVLIIGGGDGGTVRECVKYSQISKIDLVEIDEEVIKISKKFLKEIGGEAWNDKRLEIHIDDGVKWVKKTRDNFYDVIFIDCSDPSEFSNLLFSDSFYKECKRILTRKGILAT

SEQ ID NO: 119556 - protein, 295 aa, Unknown
  Bacterial polypetide isolated from the Sargasso Sea
FTILALLAESHISFHTFPEKGIISFDFFTCGKITPSVAIDIVKKEFKHKRIVRKEFNRDTRALYHDIYSSPGLQKSYVVNDVLEDFKSKVGQHIEILDLEQFGKSLFIDGEIQVASTDEHLYSSTFVGSGLKLNKSNEKAAIIGGGDGGVARECISKKFNFIDWYELDPEVVEVCKKHLGEIGKKATEKNSVKCVWGDAFESIKSVKEDTYDHIFVDLNDDQFCIDLAAKNMDSLVRILKPKGVITAQVGSQDKKPLQVENWLNVFNHHFGNTNLSRVYIPSFDCSWNFSSSINH

SEQ ID NO: 119557 - protein, 273 aa, Unknown
  Bacterial polypetide isolated from the Sargasso Sea
SKNDIEIKSITTKGDKVKNTRLSDIGGKGLFSTEIEKELENKNIDIAVHALKDMPAIETSGLQTDTFLERNDPREILITTNKKKLNDLKLKSIIGTSSFRREFQIKKLRSDLTCKIIRGNVDTRMKKLKNGDYDAIILSYAGIKNLNLENEIAEVFSVQEIIPSAGQGIIALQCRDTDKDIISILQKVNHEETYKRAHAERNVLKVLEGDCQTAIGVYSKIDGEAIVVEAELFSIDGSQRFYEKKSDRIDKFKEVGEQIGQNLKIKSNNSYKK

SEQ ID NO: 119558 - protein, 148 aa, Unknown
  Bacterial polypetide isolated from the Sargasso Sea
MYDDIYSTPGQKKYYVVKDVLERLTTKVGQYIEVLNLEEFGHALFIDHEIQVAEKDEKIYSSSFFKSSYDLSKKNSNVAIIGGGDGGVARACIENNSNFIDWYELDPEVVDVCYKHLPKVCSKVKKSNKIKTFWGDAFESIKSIEDSK

SEQ ID NO: 119559 - protein, 261 aa, Unknown
  Bacterial polypetide isolated from the Sargasso Sea
MIKVGEHITIDFLGVKKDYAPSFYEKVIYKIAKSAKVQILKVNSHKFEPQGFTLVALLSESHMSFHTFPEKGVISFDFFTCGKVNPKIALKILRKEIQHERVVTNNFDRNSISLYDDIYSTPGQKKYYVVKDVLERLTTKVGQYIEVLNLEEFGHALFIDHEIQVAEKDEKIYSSSFFKSSYDLSKKNSNVAIIGGGDGGVARACIENNSNFIDWYELDPEVVDVCYKHLPKVCSKVKKSNKIKTFWGDAFESIKSIEDSK

SEQ ID NO: 119560 - protein, 232 aa, Unknown
  Bacterial polypetide isolated from the Sargasso Sea
MTKVGEHITLDIIGTIKEYDPSVFERVIYDIAKAAKVTILKISKYKFEPQGFTILALLAESHISFHTFPEKGIISFDFFTCGKVSPSVAIDIIKKEFEHKRIVKKEFNRDTKSLYHDIYSSPGLQKSYVVNDVLEDFKSKVGQHIEILDLEQFGKSLFIDGEIQVASTDEHLYSSTFVGSGLGLNNDKERAAIIGGGDGGVARECISKNFNFIDWYEQDPEVVDVCNKHLGD

SEQ ID NO: 119561 - protein, 218 aa, Unknown
  Bacterial polypetide isolated from the Sargasso Sea
MTTKVGEHITLDIIGTKKEYDPVFFEKLVYKIAKIAKVTVLEISKYKFEPQGFTLVALLAESHISFHTFPEKGIISFDFFTCAKISPSVAINVIKEEIEHSRIIKKEFNRDTVDLYHDIYSSPGLKKSYVVNKVLENFKSNVGQHIEILELEQFGKALFIDNEIQVAEKDEHFYSSTFVNAGLDLNSNKEKAAIIGGGDGGVARECISKNFGFIDWYE

SEQ ID NO: 119562 - protein, 240 aa, Unknown
  Bacterial polypetide isolated from the Sargasso Sea
MIKVGEHITLDIIGTDKEYDPSVYEKVIKEIAKVANVTILNISKYKFEPQGFTILALLAESHISFHTFPEKGIISFDFFTCGKISPSVAIDIIKKEFKHKRIVKKEFNRDTKSLYHDIYSSPGLKKSYVVNDVLEDFKSKVGQHIEILELEQFGKSLFIDGEIQVAASDEHLYSSTFVGAGINLNKNNERAAIIGGGDGGVARECISKKFNFIDWFELDPEVVEVCNKHLGDIEKKQLKK

SEQ ID NO: 119563 - protein, 262 aa, Unknown
  Bacterial polypetide isolated from the Sargasso Sea
MVDHKSPFQKVEVYDTYKYGKMLTLDGLIMTTEKDEYVYHEMIAHPAMQAHKQAKRVLIIGGGDGGVARELLRYEQLEEVVIAEVDEVVIKTAREHFPKIASSFAHPKSKLEIGDGMKYVSESADESFDLVIVDSPDRVGPAEGLYSEDFYQNIHRILKPNGIMVAQSESPRFNEHVFVGIANCHRKLFGKDNVWTYLAFVPTYTTGMWAFSFASKGALSPSSVDRAEAAKFAHEHELQYYNEDIHNAAFVLPTYVKKMLEE

SEQ ID NO: 119564 - protein, 251 aa, Unknown
  Bacterial polypetide isolated from the Sargasso Sea
SEIGGKGLFSSNIEKELINNNIDIAVHALKDMPTTETKGLRTDTFLERNDPREILVTKDKKKLSQLNPNSILGTSSYRREFQIRKIRPDINCKLIRGNVDTRIKKLKDGDYDAIILSYAGLKCLELENEISEIFSAKDIIPSAGQGIIALQCRENDNETASILEKINHEGTHKRAHSERNILKVLEGDCETAIGAHSVINGNKIILEAELFSIDGTKRYYEKKIGDLKEFSQIGREIGETLKVKSNGSYKK

SEQ ID NO: 119565 - protein, 241 aa, Unknown
  Bacterial polypetide isolated from the Sargasso Sea
NLIETQNSLYHDIYSSPGLQKSYVVNDVLEDFKSKVGQHIEILDLEQFGKSLFIDGEIQVATTDEHLYSSTFVGSGLNLNKDNERAAIIGGGDGGVARECISKNFNFIDWYELDPEVVDVCNKHLGDIGKKATEKNSVKCVWGDAFESIKSVGDDTYDHIFVDLNDDQFCIDLAAKNMDSLVRILKPKGVITAQVGSQDKKPQQVENWLNVFNQNFGNAKLSRVYIPSFDCSWNFSSSINH

SEQ ID NO: 119566 - protein, 230 aa, Unknown
  Bacterial polypetide isolated from the Sargasso Sea
MKKEIKHKRIVKKEFNRDTVEYYDDIYSSPGLKKFYIVNNVLENFTSKMGQHIEILELEQFGKSLFIDNELQVAEKDEHLYSSTFVNSGLKLNPDKNKSAIIGGGDGGVARECIHQGFNYIDWYELDQEVVTACEKHLSKIGKKATSKNSVKCIWGDAFESIKSIEDNKYDKIFVDLNDDQYCIDLAAKNINSLKRILKPKGTITAQVGSQDKKPKQVQNWLKLLIKTLI

SEQ ID NO: 119567 - protein, 292 aa, Unknown
  Bacterial polypetide isolated from the Sargasso Sea
IAKKAKVTVLNISKYKFEPQGFTLVALLAESHISFHTFPEKGIISFDFFTCGKINPNVSIDILKKEIKHKRIVKKEFNRDTVEYYDDIYSSPGLKKFYIVNNVLENFTSKMGQHIEILELEQFGKSLFIDNELQVAEKDEHLYSSTFVNSGLKLNPDKNKSAIIGGGDGGVARECIHQGFNYIDWYELDQEVVTACEKHLSKIGKKATSKNSVKCIWGDAFESIKSIEDNKYDKIFVDLNDDQYCIDLAAKNINSLKRILKPKGTITAQVGSQDKKPKQVQNWLKLLIKTLI

SEQ ID NO: 119568 - protein, 223 aa, Unknown
  Bacterial polypetide isolated from the Sargasso Sea
MAVSQSHPNIVDGWFREINTQWPGQAMTLKVKQVLHQEKSLFQDVLVFESETYGNVLVLDGVIQATERDEFSYQEMITHLPMASHPNPENVLVIGGGDGGVIREVLKHKSVKKVTLCDIDEAVIRVSKQWLPLMSDCYKDPRVEVHIGDGFKFLPEHKNEYDVIITDSSDPVGPAEALFQPPYFQLLKEALKEGGSVSTQAECLWIHLPLIKTLKETCSKLFP

SEQ ID NO: 119569 - protein, 248 aa, Unknown
  Bacterial polypetide isolated from the Sargasso Sea
YKYGKMLALDDMVMTTEKDEFHYHEMISHPSVFIHGNVKNVLVIGGGDGGTIRELIRHEEIEKITMVEIDEEVVNACKKHLPSISHELNNPKLNLIIDDGIEFVKLAKKEIYDLIIVDGSDPIGPAEGLFTVDFYENCYNCLSSKGILVAQGESPKFNQNAFVDLNKTLQSIFGSSNTSVALFYAPTYPTGMWSFQYGFKGITNHISSSKREQIDTFVSDHQLLYYNYNIHLSSFALPNFVKNKISNL

SEQ ID NO: 119570 - protein, 271 aa, Unknown
  Bacterial polypetide isolated from the Sargasso Sea
FTCEKISPTAALDILKEEIKHERAVVRSFDRSNKGIYEDIYSTPGHKKYYVVSDVLENFVSKVGQHIEVLKLEEFGPSLFIDSELQVAEKDEKKYSGQFVGSALNLSKNNSSAAIIGGGDGGVARELSSKGFDLIDWYELDPEVVKVCQKHLLKVCGDIKANNKVKTYWGDAFESIKKVKDSKYDKIFVDLNDDQFCIDLAAKNMKGLKRILKPGGIITAQVGCMSKKPRQVKNWLELLKNNFGNVTLDEIFIPSFDCRWNFASSSNKNQS

SEQ ID NO: 119571 - protein, 234 aa, Unknown
  Bacterial polypetide isolated from the Sargasso Sea
SLYPDIYSSPGLQKSYVVKDVLEDFKSKVGQHIEILDLEQFGKSLFIDGEIQVASTDEHLYSSTFVGSGLDLNKVNERAAIIGGGDGGVARECITKKFNFIDWYELDPEVVDVCNKHIGDIGKKATEKNSVKCVWGDAFESIKSVSDDSYDHIFVDLNDDQFCIDLAAKNMESLVRILKPKGVITAQVGSQDKKPQQVENWLNVFNQNFGNAKLSRVYIPSFDCSWNFSSSINH

SEQ ID NO: 119572 - protein, 211 aa, Unknown
  Bacterial polypetide isolated from the Sargasso Sea
DFLGVKKDYSPEFYEKVIYKIAKAAKVEILNVASHKFEPQGFTLVALLSESHFSFHTFPERGVISFDFFTCGKVNPKVALKILRKEIDHQRVVTNAFDRSSVGLYDDIYSTLGQKKFYVVKDVLEKFTSKVGQFVEIMDLEEFGHALFIDHEIQVAEKDEKIYSSNFFKSSYDLSKKNNNVAIIGGGDGGVARACLENNSNYIDWFELDPE

SEQ ID NO: 119573 - protein, 253 aa, Unknown
  Bacterial polypetide isolated from the Sargasso Sea
NNHERAVVRSFDRSNKGIYEDIYSTPGHKKYYVVSDVLENFVSKVGQHIEVLKLEEFGPSLFIDSELQVAEKDEKKYSGQFVGSALNLSKNNSSAAIIGGGDGGVARELSSKGFDLIDWYELDPEVVKVCQKHLLKVCGDIKANNKVKTYWGDAFESIKKVKNSKYDKIFVDLNDDQFCIDLAAKNMKGLKRILKPGGVITAQVGCMSKKPRQVKNWLELLKNNFGNVILDEVFIPSFDCRWNFASSSNRDHS

SEQ ID NO: 119574 - protein, 93 aa, Unknown
  Bacterial polypetide isolated from the Sargasso Sea
MDIEEFGHALFIDHEIQVAEKDEKIYSSTFFKSSYDLSKKNNNVAIIGGGDGGVARACLENNSNYIDWFELDPEIVDACYRHLPKVCSKVKKS

SEQ ID NO: 119575 - protein, 190 aa, Unknown
  Bacterial polypetide isolated from the Sargasso Sea
LFIDGEIQVASTDEHLYSSTFVGSGLDLNKDNERAAIIGGGDGGVARECISKKFNFIDWYELDPEVVDVCNKHLGEIGKKATEKNSVKCVWGDAFKSIKSVGDDTYDHIFVDLNDDQFCIDLAAKNMDSLVRILKPKGVITTQVGSQDKKPQQVENWLNVFNQNFGNAKLSRVYIPSFDCSWNFSSSINH

SEQ ID NO: 119576 - protein, 255 aa, Unknown
  Bacterial polypetide isolated from the Sargasso Sea
MTKVGEHITLDIIGTTKEYDPSIFEKVIYDIAKAAKVTILNISKYKFEPQGFTIIALLAESHISFHTFPEKGIISFDFFTCGKVSPSVAIDIIKKEFEHTRIVKKEFNRDTKSLYHDIYSSPGLQKSYVVNDVLEDFKSKVGQHIEILDLEQFGKSLFIDGEIQVASTDEHLYSSTFVGSGLDLNKDNERAAIIGGGDGGVARECISKKFNFIDWYELDPEVVDVCNKHLGDIGKKSTEKNSVKCVWGDAFESSK

SEQ ID NO: 119577 - protein, 235 aa, Unknown
  Bacterial polypetide isolated from the Sargasso Sea
MDLYHDIYSSPGLKKSYVVNKVLENFKSDVGQHIEILELEQFGKALFIDNEIQVAEKDEYLYSSTFVNAGLDLNSHKEKAAIIGGGDGGVARECISKNFSFIDWYELDPEVVEVCDKHLGKIGEKATEKNSVKCVWGDAFESIKSVKENTYDQIYVDLNDDQYCIDLAAKNMNSLARILKPKGVITAQIGSQDKKPKQVENWLNIFNKNFGNTKLSRVYIPSFDCSWNFSSSINH

SEQ ID NO: 119578 - protein, 197 aa, Unknown
  Bacterial polypetide isolated from the Sargasso Sea
MEQFGKSLFIDGEIQVATTDEHLYSSTFVEAGLNLNKNNERAAIIGGGDGGVARECISKNFNFIDWYELDPEVVDVCNKHLGEIGKKATEKNSVKCVWGDAFESIKSVSDDTYDHIYVDLNDDQFCIDLASNNMDSLVRILKPKGVITAQVGSQDKKPQQVENWLNVFNQNFGNTKLSRVYIPSFDCSWNFSSSINH

SEQ ID NO: 119579 - protein, 177 aa, Unknown
  Bacterial polypetide isolated from the Sargasso Sea
EHLYSSTFVGSGLKLNRSNERAAIIGGGDGGVARECISKKFNFIDWYELDPEVVEVCNKHLGDIGKKAIEKNSVKCVWGDAFESIKLVKEDTYDHIFVDLNDDQFCIDLAAKNMDSLVRILKPKGVITAQVGSQDKKPHQVENWLNIFHHHFGNTKLSRVYVPSFDCSWNFSSSINH

SEQ ID NO: 119580 - protein, 203 aa, Unknown
  Bacterial polypetide isolated from the Sargasso Sea
MVKKVGEHITLDIIGTKKEYKPTFFENLVHKIADKAKVTVLNTAKYKFEPQGFTLVALLAESHMSFHTYPEKGIISFDFYTCGIVSPSVALNIIKKEIEHKRIIKKEISRDTISYYKDITSTKGLKKNYLVKEILEDFTSKVGQHIEILDLVEYGKSLFIDNDLQVAESDEHIYSGTFVNSALKLNSSKDRAAIIGGGDGGVA

SEQ ID NO: 119581 - protein, 218 aa, Unknown
  Bacterial polypetide isolated from the Sargasso Sea
MIKVGEHITIDFLGVKKDYSPEFYEKVIYKIAKAAKVEILNVASHKFEPQGFTLVALLSESHFSFHTFPERNVISFDFFTCGKVNPKVALKILRNEIEHKRVVTNTFERSSVGLYDDIYSTPGQKKFYVIKDVLEKFTSKVGQFVEIMDLEEFGNALFIDHEIQVAEKDEKIYSSNFFKSSYDLSKKNNNVAIIGGGDGGVARACLENNSNYIDWFEL

SEQ ID NO: 119582 - protein, 218 aa, Unknown
  Bacterial polypetide isolated from the Sargasso Sea
MTKVGEHITLDILGATKDHDSKFFEKLVYKIAKKAKVTVLEISKYKFEPQGFTLVALLAESHISFHTFPEKGIISFDFFTCGKVNPIIALDIIKKEIDHKRIVKKEFNRDTVAYYDDIYSSPGLKKFYIVNNVLEDFTSKVGQHIEILELEQFGKSLFIDNELQVAEKDEHLYSSTFVNSGLKLNPEKNNAAIIGGGDGGVARECISQNFNFIDWFEL

SEQ ID NO: 119583 - protein, 208 aa, Unknown
  Bacterial polypetide isolated from the Sargasso Sea
EKSNILIIGGGDGGTLRECVKYSQISKIDLVEIDEEVIKISKKFLKEIGGEAWNDKRLEIHVDDGVKWVKKTRDNFYDVIFIDCSDPSEFSNLLFSDSFYKECKRILTTRGILATQSESPESFKNIHMDILKTLKNIFKVSETMYSFVPIYPSGIWSWTFASSEDLNLSKQNYDEVLKIEKGCEIWNLNFQNAAFKMMPNKIVKALDS

SEQ ID NO: 119584 - protein, 210 aa, Unknown
  Bacterial polypetide isolated from the Sargasso Sea
FKSKVGQHIEILDLEQFGKSLFIDGEIQVAATDEHLYSSTFVGSGLNLNKDNERAAIIGGGDGGVARECISKNFNFIDWYELDPEVVDVCNKHLGDIGKKSIEKNSVKCVWGDAFESIKSVADDTYDHIFVDLNDDQFCIDLAAKNMDSLVRILKPKGVITAQVGSQDKKPKQVDSWLNVFNQNFGNAKLSRVYIPSFDCAWNFSSSINH

SEQ ID NO: 119585 - protein, 258 aa, Unknown
  Bacterial polypetide isolated from the Sargasso Sea
MAESHISFHTFPEKGIISFDFFTCGKISPSVAIDIVKKEFEHKRIVKKEFNRDTKSLYHDIYSSPGLQKSYVVNDVLEDFKSRVGQHIEILDLEQFGKSLFIDGEIQVASTDEHLYSSTFVGSGLDLNKDNERAAIIGGGDGGVARECISKKFNFVDWYELDPEVVDVCNKHLGDIGKKATEKNSVKCVWGDAFESIKSVSDDTYDHIFVDLNDDQFCIDLAAKNMDSLVRILKPKGVITAQVGSQDKKPHQVENWLN

SEQ ID NO: 119586 - protein, 300 aa, Unknown
  Bacterial polypetide isolated from the Sargasso Sea
MSHKDFTLVACWAESHISFHTFPEKGIISFDFFTCAKISPSIALDVIKDEIEHAQIIKKEFNRDTVDLYHDNYSSPGLKKSYVVKNVIENFKSGVGQHIEILELEQFGKALFIDNEIQVAEKDEYLYSSTFVNSGLDLNSNKEKAAIIGGGDGGVARECISKNFSFIDWYELDPEVVEVCDKHLGKIGEKATEKNSVKCVWGDAFESIKSVKDDTYDQIYVDLNDDQYCIDLASKNMNSLARILKPKGVITAQVGSQDKKPKQVENWLNIFNENFGNTKLSRIYIPSFDCSWNFSSSINH

SEQ ID NO: 119587 - protein, 184 aa, Unknown
  Bacterial polypetide isolated from the Sargasso Sea
MFIDHEIQVAESDEHLYSSTFVNSGLKLNPKKEKAAIIGGGDGGVARECISKNFGFIDWYELDPEVVEVCDEHLSKIGEKASEKNSVKCVWGDAFESIKSVKDDTYDQIYVDLNDDQFCIDLAAKNMDSLVRILKPKGVITAQVGSQDKKPKQVENWMNVFNQSFGNTKLSRVYIPSFDCSWNF

SEQ ID NO: 119588 - protein, 285 aa, Unknown
  Bacterial polypetide isolated from the Sargasso Sea
KVTILNISKYKFEPQGFTILALLAESHISFHTFPEKGIISFDFFTCGKVSPSVAIDIIKKEFDHKRIVKKEFNRDTKSLYHDIYSSPGLQKSYVVNDVLEDFKSKVGQHIEILDLEQFGKSLFIDGEIQVATTDEHLYSSTFVGSGLNLNKDNERVAIIGGGDGGVARECISKNFNFIDWYELDPEVVDVCNKHLGDIGKKANEKNSVKCVWGDAFESIKSVGDDTYDHIFVDLNDDQFCIDLAAKNMETLERILKPKGVITAQVGSQDKKPQQVENWLNVFNQN

SEQ ID NO: 119589 - protein, 234 aa, Unknown
  Bacterial polypetide isolated from the Sargasso Sea
MAESHISFHTFPEKGIISFDFFTCGKISPSVAIDIIKKEFKHKRIVKKEFNRDTKSLYHDIYSTPGLQKSYVVNDVLEDFKSKVGQHIEILDLEQFGKSLFIDGEIQVASTDEHLYSSTFVGAGLKLNKFNERAAIIGGGDGGVARECISKKFNFIDWFELDPEVVEVCNKHLGDIGKKATEKNSVKCVWGDAFESIKSVKEDTYDHIFVDLNDDQFCIDLAAKNMESIIRILK

SEQ ID NO: 119590 - protein, 249 aa, Unknown
  Bacterial polypetide isolated from the Sargasso Sea
MNTKVGEHITLDIIGTNKEYDPVFFEKLVYKIAKIAKVTVLEISKYKFEPQGFTLVALLAESHISFHTFPEKGIISFDFFTCAKISPSVAINVIKEEIEHSRIVKKEFNRDTVDLYHDIYSSPGLKKSYVVNKVLENFKSNVGQHIEILELEQFGKALFIDNEIQVAEKDEHLYSSTFVNAGLDLNSNKDKAAIIGGGDGGVARECISKNFGFIDWYELDPEVVDVCDKHLGKIGDKATEKNSVKCVWG

SEQ ID NO: 119591 - protein, 208 aa, Unknown
  Bacterial polypetide isolated from the Sargasso Sea
MAESHISFHTFPEKGIISFDFFTCAKISPSVALEVIKDEIEYTHIIKKQFNRDTVDLYHDNYSSPGLKKTYVVNKVIENFKSKVGQHIEILELEQFGKALFIDNEIQVAEKDEHLYSSTFVNSGLSLNSNKEKAAIIGGGDGGVARECISRNFGFIDWYELDPEVVEVCDKHLGTIGDKATEKNSVKCVWGDAFESIKAVKDDTYDQI

SEQ ID NO: 119592 - protein, 233 aa, Unknown
  Bacterial polypetide isolated from the Sargasso Sea
MYEDIYSTPGHKKYYVVDDVLENFVSKVGQHIEIVKLEEFGNGLFIDSELQVAERDEKKYSGQFVNSALNLSKDNSSAAIIGGGDGGVARELSSKGFDLIDWYELDPEVVKVCQKHLPKVFGDVKANNKVKTYWGDAFESIKKVKDSKYDKIFVDLNDDDFCINLAAKNMKGLKRILKPGGVITAQVGCMSKKPKQVKGWMDLLNNNFGNVKLSEVFIPSFDCRWNFASSSQK

SEQ ID NO: 119593 - protein, 209 aa, Unknown
  Bacterial polypetide isolated from the Sargasso Sea
KTKVGQHIEILNLEQFGKSLFIDGEIQVAASDEHLYSSTFVGAGLKLNKNNERAAIIGGGDGGVARECISKKFNFIDWFELDPEVVEVCNKHLGDIGNKATEKNSVKCVWGDAFESIKSVKDDSYDHIFVDLNDDQFCIDLAAKNMDSLVRILKPKGVITAQVGSQDKKPHQVENWLNVFHHYFGNTKLSRVYVPSFDCSWNFSSSINH

SEQ ID NO: 119594 - protein, 227 aa, Unknown
  Bacterial polypetide isolated from the Sargasso Sea
MAESHISFHTFPEKGIISFDFFTCAKISPSVALEVIKDEIEHTHIIKKQFNRDTVDLYHDNYSSPGLKKSYVVNKVIENFKSKVGQHIEILELEQFGKALFIDNEIQVAESDEHLYSSTFVNSGLKLNSNKEKAAIIGGGDGGVARECILKNFGFIDWFELDPEVVDVCDKHIGTIGNKATEKNSVKCIWGDAFESIKAIKDDTYDQIFVDLNDDQYCIDLAANNMN

SEQ ID NO: 119595 - protein, 223 aa, Unknown
  Bacterial polypetide isolated from the Sargasso Sea
MAESHISFHTFPENGIISFDFFTCGKISPSVAIDIVKKEFEHKRIVKKEFNRDTRSLYHDIYSSPGLQKSYVVNEVLEDFKSKVGQHIEILELEQFGKSLFIDGEIQVAASDEHLYSSTFVGAGLNLNKKNERAAIIGGGDGGVARECISKKFNFIDWYELDPEVVEVCNKHLGDIGKKSTEKNSVKCVWGDAFESIKTINEDTYDHIFVDLNDDQFCIDLAA

SEQ ID NO: 119596 - protein, 158 aa, Unknown
  Bacterial polypetide isolated from the Sargasso Sea
DRAAIIGGGDGGVARECIAKGFGFIDWYELDPEVVEICKKHIGSIGKNATEKNSVKCVWGDAFASIKKVEDDTYDKIFVDLNDDQFCIDLAAKNMDSLVRILKPNGVITAQVGSQDKKPKQVENWLKVFNKNFGNATLDRVYIPSFDSSWNFSSSINH

SEQ ID NO: 119597 - protein, 272 aa, Unknown
  Bacterial polypetide isolated from the Sargasso Sea
MIFLPGGKISPTAALDILKSEIKHERAVVRSFDRSNKGLYEDIYSTPGHQKFYIVNDVLENFVSKVGQHIEIMKLEEFGNALFIDSELQVAEKDEKKYSGQFVNSALSLSKNNSSAAIIGGGDGGVARELLSKGFDLIDWYELDPEVVKVCQKHLPKICGDVKANNRVKTFWGDAFESIKKVKDSKYDKIFVDLNDDQFCIDLAAKNMKSLKRILKPGGVITAQVGTLSKKPKQVNNWLKVLSDNFGNSKLDETVIPSFDCRWNFASSIMNS

SEQ ID NO: 119598 - protein, 158 aa, Unknown
  Bacterial polypetide isolated from the Sargasso Sea
SAAIIGGGDGGVARECLSKGFDLVDWYELDPEVVKVCQKHLPKISGDVKANNNVKTYWGDAFESIKKVKDAKYDKIFVDLNDDQFCIDLAAKNMKGLKRILKPGGVITAQVGTLSKKPKQVNNWLKVLSDNFGNSKLDEVMIPSFDCRWNFASSIMNS

SEQ ID NO: 119599 - protein, 236 aa, Unknown
  Bacterial polypetide isolated from the Sargasso Sea
MKKVGEHVTIDFLGVKKEYSPDFYSKVIYKIAKKAKIEVLNISEKVFKPQGYTCLALLAESHMSFHTFPERGVISFDFFTCGKISPTAALDVLKTEIKHERAVVRSFDRSNKGIYEDIYSTPGHKKYYVVDDVLENFVSKAGQHVEILKLEEFGYALFIDSELQVAEKDEKKYSGQFVNSALSLSKDNSSAAIIGGGDGGVARELSSKGFDLIDWYELDPEVVKVCQKYLPKICGD

SEQ ID NO: 119600 - protein, 148 aa, Unknown
  Bacterial polypetide isolated from the Sargasso Sea
MSFHTFPERGIISFDFFTCGKISPKAALEVLKTEIKHERAVVRSFDRSNKGVYEDIYSTPGHKKYYIVDDALENFVSKAGQHIEILKLEEFGNALFIDSELQVAEKDEKKYSGQFVNSSLSLSKDNSSAAIIGGGDGGVARELSSKRF

SEQ ID NO: 119601 - protein, 251 aa, Unknown
  Bacterial polypetide isolated from the Sargasso Sea
EFEHKRIVKKEFNRDTRSLYHDIYSSPGLQKSYVVNEVLEDFKSKVGQHIEILELEQFGKSLFIDGEIQVAASDEHLYSSTFVGAGLKLNKDNERAAIIGGGDGGVARECISKKFNFVDWYELDPEVVEICNKHLGNISNKATEKNSVKCVWGDAFESIKAVGDDTYDHIFVDLNDDQFCIDLAAKNMDSLVRILKPKGVITTQVGSQDKKPLQVENWLNVFNHHFGNTNLSRVYIPSFDCSWNFSSSINH

SEQ ID NO: 119602 - protein, 197 aa, Unknown
  Bacterial polypetide isolated from the Sargasso Sea
MRNEIDHKRVVTNAFDRSSVGLYDDIYSTPGQKKYYVVKDVLEKFTSKVGQFVEVMDIEEFGHALFIDHEIQVAEKDEKIYSSNFFKSSYDLSKKNNNVAIIGGGDGGVARACLENNSHYIDWFELDPEIVDACYRHLPKVCSKVKKSNKIKTFWGDAFKSIKEIEDSKYDKIFVDLNDDQYCIDLARKNMKGLKRI

SEQ ID NO: 119603 - protein, 277 aa, Unknown
  Bacterial polypetide isolated from the Sargasso Sea
MGVKKDYSPEFYEKVIYKIAKAAKVEILNVASHKFEPQGFTLVALLSESHFSFHTFPERGVISFDFFTCGKVNPKVALKILRNEIDHKRVVTNAFDRSSVGLYDDIYSTPGQKKYYVVKDVLEKFTSKVGQFVEVMDIEEFGHALFIDHEIQVAEKDEKIYSSNFFKSSYDLSKKNNNVAIIGGGDGGVARACLENNSHYIDWFELDPEIVDACYRHLPKVCSKVKKSNKIKTFWGDAFKSIKEIEDSKYDKIFVDLNDDQYCIDLARKNMKGLKRI

SEQ ID NO: 119604 - protein, 197 aa, Unknown
  Bacterial polypetide isolated from the Sargasso Sea
MEVIEDEIEHTHIVKKQFNRDTVDLYYDNYSSPGLKKSYVVNKVLENFKSKVGQHIEILELEQFGKALFIDNEIQVAEKDEHLYSSTFVNSGLGLNANKEKAAIIGGGDGGVARECISKNFGFIDWYELDPEVVDVCDKHLGTIGEKATEKNSVKCVWGDAFESIKAVKDDTYDQIYVDLNDDQYCIDLAAKNMNSL

SEQ ID NO: 119605 - protein, 278 aa, Unknown
  Bacterial polypetide isolated from the Sargasso Sea
TLDIIGTKKEYDPVFFEKLVYKIAKIAKVTVLQISKYKFEPQGFTLVALLAESHISFHTFPEKGIISFDFFTCAKISPSVALEVIEDEIEHTHIVKKQFNRDTVDLYYDNYSSPGLKKSYVVNKVLENFKSKVGQHIEILELEQFGKALFIDNEIQVAEKDEHLYSSTFVNSGLGLNANKEKAAIIGGGDGGVARECISKNFGFIDWYELDPEVVDVCDKHLGTIGEKATEKNSVKCVWGDAFESIKAVKDDTYDQIYVDLNDDQYCIDLAAKNMNSL

SEQ ID NO: 119606 - protein, 187 aa, Unknown
  Bacterial polypetide isolated from the Sargasso Sea
MKILRKEIQHERVVTNAFDRSSIGLYDDIYSTPGQKKYYVVKNVLEKFTSKVGQFVEIMDLEEFGHALFIDHEIQVAEKDEKIYSSNFFKSSYDLSRKNNNIAIIGGGDGGVARACLENNSNFIDWFELDPEIVDACYKHLPKVCTKVKKSNKIKTFWGDAFKSIKGVEDSKYDKIFVDLNDDQNIV

SEQ ID NO: 119607 - protein, 271 aa, Unknown
  Bacterial polypetide isolated from the Sargasso Sea
EHITIDFLGVKKDYTPEFYEKIIYTIAKAAKVEILNVSSHRFQPQGFTLVALLAESHFSFHTFPEKGVISFDFFTCGKVNPKVALKILRKEIQHERVVTNAFDRSSIGLYDDIYSTPGQKKYYVVKNVLEKFTSKVGQFVEIMDLEEFGHALFIDHEIQVAEKDEKIYSSNFFKSSYDLSRKNNNIAIIGGGDGGVARACLENNSNFIDWFELDPEIVDACYKHLPKVCTKVKKSNKIKTFWGDAFKSIKGVEDSKYDKIFVDLNDDQNIV

SEQ ID NO: 119608 - protein, 157 aa, Unknown
  Bacterial polypetide isolated from the Sargasso Sea
MVKDVLENFTSKVGQNIEILDLEQFGKSLFIDGELQVAENDEHLYSSTFVNSGLKLNPSNDKTAIIGGGDGGVARECISKGFKLIDWYELDPEVVTMCEKYLSKVGKKATTKNHVQCVWGDAFESIKSVEDNKYDKIYVDLNDDQYCIDLAAKISNL

SEQ ID NO: 119609 - protein, 285 aa, Unknown
  Bacterial polypetide isolated from the Sargasso Sea
MTKVGEHVTLDIIGTEKEYEPKFFEKLVYKISKKAKVTVLEISKYKFEPQGFTLVALLAESHISFHTFPERGIISFDFFTCGKVNPNVAYDILKKEIKHKRIVKKEFNRDTISYYDDIYSSPGLKKFYMVKDVLENFTSKVGQNIEILDLEQFGKSLFIDGELQVAENDEHLYSSTFVNSGLKLNPSNDKTAIIGGGDGGVARECISKGFKLIDWYELDPEVVTMCEKYLSKVGKKATTKNHVQCVWGDAFESIKSVEDNKYDKIYVDLNDDQYCIDLAAKISNL

SEQ ID NO: 119610 - protein, 175 aa, Unknown
  Bacterial polypetide isolated from the Sargasso Sea
MYSSTFVGAGLDLNQNNERAAIIGGGDGGVARECISKNFNFIDWYELDPEVVDVCNKHLGDIGKKATEKNSVKCVWGDAFESIKSVNDDTYDHIYVDLNDDQFCIDLASKNMDSLVRILKPKGVITAQVGSQDKKPQQVENWLNVFNQNFGNTKLSRVYIPSFDCSWNFSSSINH

SEQ ID NO: 119611 - protein, 248 aa, Unknown
  Bacterial polypetide isolated from the Sargasso Sea
MIKVGEHIILDIIGTTKEYEPSFFEKLVYKIAKKAKVTVLEISKYKFEPQGFTLVALLAESHISFHTFPEKGIISFDFFTCAKVSPIVALKILKEEIEHTHIIKKEFNRDTVDLYNDNYSSPGLRKSYVVNKVLENFKSKVGQNIEILELEQFGKSLFIDNEIQVAESDEHLYSSTFVNSGLKLNPKKEKAAIIGGGDGGVARECISQSFGFIDWYELDPEVVEVCDKHLSKIGEKAVEKNSVKCVWG

SEQ ID NO: 119612 - protein, 287 aa, Unknown
  Bacterial polypetide isolated from the Sargasso Sea
MAESHISFHTFPEKGIISFDFFTCGKINPKVAVDIIKKEIKHKRIVKKEFNRDTKSLYHDIYSSPGLQKSYVVNDVLEDFKSKVGQHIEILDLEQFGKSLFIDGEIQVATTDEHLYSSTFVGAGLKLNNNNERAAIIGGGDGGVARECISKNFNFIDWYELDPEVVEVCKKHLGEIGKKATEKNSVKCIWGDAFESIKSAKDDTYDHIFVDLNDDQFCIDLAAKNMDSLVRILKPKGVITAQVGSQDKKPLQVENWMNVFNHNFGNTTLSRVYIPSFDCSWNFSSSI

SEQ ID NO: 119613 - protein, 279 aa, Unknown
  Bacterial polypetide isolated from the Sargasso Sea
FPERGIISFDFFTCGIISPSIAIDIVKKEFKHKRIVKKEFNRDTRALYHDIYSSPGLQKAYVVNDVLEDFKSKVGQHIEILDLEQFGKSLFIDGEIQVAALDEHLYSSTFVGSGLNLNKNNERAAIIGGGDGGVARECISKKFNFIDWFELDPEVVEVCNKHLGDIGKKATEKNSVKCVWGDAFESIKTVKEDTYDHIFVDLNDDQFCIDLAAKNMDSLVRILKPKGVITAQVGSQDKKPQQVENWLNVFHHHFGNTKLSRIYVPSFDCSWNFSSSINH

SEQ ID NO: 119614 - protein, 182 aa, Unknown
  Bacterial polypetide isolated from the Sargasso Sea
AEKDEKKYSGQFVNSALSLSKENSSAAIIGGGDGGVARECLSKGFDLVDWYELDPEVVKVCQKHLPKICGDVKANNNVKTYWGDAFESIKKVKDSKYDKIFVDLNDDQFCIDLAAKNMKSLKRILKPGGVITAQVGTLSKKPKQVNNWLKVLSDNFGNSKLDEAMIPSFDCRWNFASSIMNS

SEQ ID NO: 119615 - protein, 285 aa, Unknown
  Bacterial polypetide isolated from the Sargasso Sea
MSFHTFPERGIISFDFFTCAKISPTAALDILKSEIKHERAVVRNFDRSNKGVYEDIYSTPGHQKYYIVNDVLENFVSKVGQHVEVMKLEEFGNALFIDSELQVAEKDEKKYSGQFVNSALSLSKDNSSAAIIGGGDGGVARECLAKGFDLVDWYELDPEVVKVCQKHLPKICGDVKANNNVKTYWGDAFESIKKVKDSKYDKIFVDLNDDQFCIDLAAKNMKGLKRILKPGGVITAQVGTLSKKPKQVNNWLKVLSDNFGNSKLDEVMIPSFDCRWNFASSIMNS

SEQ ID NO: 119616 - protein, 132 aa, Unknown
  Bacterial polypetide isolated from the Sargasso Sea
MDILKEEIKHERAVVRSFDRSNKGIYEDIYSTPGHKKYYVVSDVLENFVSKVGQHIEILKLEEFGPALFIDSELQVAEKDEKKYSGQFVGSALNLSKNNSSAAIIGGGDGGVARELSSKGFNLIDWYELDPE

SEQ ID NO: 119617 - protein, 221 aa, Unknown
  Bacterial polypetide isolated from the Sargasso Sea
MKKVGEHVTIDFLGVKRDYAPEFYNKVIYKIAKKAKIEVLNIAEKIFKPQGYTCLALLAESHMSFHTFPEKGIISFDFFTCGKISPTAALDILKEEIKHERAVVRSFDRSNKGIYEDIYSTPGHKKYYVVSDVLENFVSKVGQHIEILKLEEFGPALFIDSELQVAEKDEKKYSGQFVGSALNLSKNNSSAAIIGGGDGGVARELSSKGFNLIDWYELDPE

SEQ ID NO: 119618 - protein, 230 aa, Unknown
  Bacterial polypetide isolated from the Sargasso Sea
DIYSSPGLQKSYVVNDVLEDFNSNVGQHIEILELEQFGKSLFIDGEIQVAASDEYLYSSTFVGAGLKLNKNNERAAIIGGGDGGVARECISKKFNFVDWYELDPEVVEVCNKHLGDIGKKATEKNSVKCVWGDAFESIKSVGDDTYDHIFVDLNDDQFCIDLASKNMDSLIRILKPKGVITAQVGSQDKKPLQVENWLNVFNHHFGNTNLARVYIPSFDCSWNFSSSINH

SEQ ID NO: 119619 - protein, 248 aa, Unknown
  Bacterial polypetide isolated from the Sargasso Sea
SLPHLFSSIFNLPPDVVLNGYVFQKLQEWSRFLPYVFGLVLGLFIGMEIPLIARIRQHVYGRFLENNAGTIYGADYIGAGIGAAIWVSIMLAMPIMQAAAWTALFNIIAGLAFLWRYHAHVRFAKALLVCHILLLVLFGFILVLGSSWMNSLSNVLYKDKVIYSQATKYQHVVLTERLSKNQPQPITDLYLNGRLQFSSVDEQIYHSMLVYPAMLASNRHDKVLIIGGGDGLALRDVLKWSVNEVTLI

SEQ ID NO: 119620 - protein, 165 aa, Unknown
  Bacterial polypetide isolated from the Sargasso Sea
LDLNKDNERAAIIGGGDGGIARECISKNFNFIDWFELDPEVVEVCNKHLGDIGKKATEKNSVKCVWGDAFESIKSVSDDTYDHIFVDLNDDQFCIDLAAKNMDSLVRILKPKGVITAQVGSQDKKPQQVENWLNVFNQNFGNAKLSRVYIPSFDCSWNFSSSINH

SEQ ID NO: 119621 - protein, 166 aa, Unknown
  Bacterial polypetide isolated from the Sargasso Sea
KINKDKDKAAIIGGGDGGVARECISKNFNFIDWFELDPEVVQVCNKHLSKVGNKATKKNSVKCIWGDAFESIKSVEDNRYDKIFVDLNDDQFCIDLAAKNMKSLKRILKPNGVITAQVGSQDKKPKQVDNWLKVFNKNFKNTTLDRVYIPSFDCSWNFASSINHSS

SEQ ID NO: 119622 - protein, 248 aa, Unknown
  Bacterial polypetide isolated from the Sargasso Sea
MVALLAESHISFHTFPEKGIVSFDFFTCGKVTPSVAIDIIRKEIEHTQLIKKEFNRDTVDWYHDIYSSSGLKKSYLVKKVIENFKSKVGQHIEILELEQFGKSLFIDNEIQVAESDEHLYSSTFVKSGLNLNPNKEKAAIIGGGDGGVARECISKNFGFIDWFELDPEVVEVCDKHLGKIGEKATEKNSVKCVWGDAFESIKSIKDDTYDQIFVDLNDDQFCIDLASKNMDSLVRILKPKGVITAQVG

SEQ ID NO: 119623 - protein, 177 aa, Unknown
  Bacterial polypetide isolated from the Sargasso Sea
EKIYSSNFFKSSYDLSKKNNNVAIIGGGDGGVARACLENNSNYIDWFELDPEIVDVCYRHLPKVCSKVKKSNKIKTFWGDAFKSIKEIEDSKYDKIFVDLNDDQYCIDLAKKNMKGLKRILKKGGVITAQVGSQDKKPKQVDNWCKVLGKSFGNVKLSGAYIPSFDCKWNFASSIMK

SEQ ID NO: 119624 - protein, 243 aa, Unknown
  Bacterial polypetide isolated from the Sargasso Sea
MIKVGEHVTLDIIGTKKEYDASFFESLVHKIAEKAKVTVLNIAKYKFEPQGFTLVALLAESHISFHTYPEKGIISFDFYTCGTVAPSIALDVIKKEIEHKRIIKKELNRDTISFYYDNTSTKGLKKNYLVKDVLEDFKSKVGQHIEILDLVEYGKSLFIDGDLQVAESDEHLYSGTFVNSAMKLNKSKDRAAIIGGGDGGVARECIAKGFGFIDWYELDQEVVEVCKKHIGSIGKNATEKNSV

SEQ ID NO: 119625 - protein, 204 aa, Unknown
  Bacterial polypetide isolated from the Sargasso Sea
MYHDNYSSLGLRKSYVVNKVLENFKSKAGQYIEILELEQFGKSLFIDNEIQVAETDEHLYSSTFVNSGLKLNPKKEKAAIIGGGDGGVARECISKNFGFIDWYELDPEVVEVCDKHLSKIGEKASEKNSVKCVWGDAFESIKSVKDDTYDQIYVDLNDDQFCIDLAAKNMDSLVRILKPKGVITAQVGSQDKKPKQVEKWMNVF

SEQ ID NO: 119626 - protein, 247 aa, Unknown
  Bacterial polypetide isolated from the Sargasso Sea
MTKVGEHITLDIIGTTKEYDPTVFEKVINDIAKAAKVTILNISKYKFEPQGFTILALLAESHISFHTFPEKGIISFDFFTCGKVNPSVAIDIIKKEFEHKRIVKKEFNRDTKSLYHDIYSTPGLQKSYVVNDVLEDFKSKVGQHIEILDLEQFGKSLFIDGEIQVAATDEHLYSSTFVGSGLNLNKNNERAAIIGGGDGGVARECISKNFNFIDWYELDPEVVDVCNKHLGDIGKKATEKNSVNMCL

SEQ ID NO: 119627 - protein, 167 aa, Unknown
  Bacterial polypetide isolated from the Sargasso Sea
SGLNLNKNRDKAAIIGGGDGGVARECISKNFGFIDWFELDPQVVKVCEKHLAKVGDRATKKNSVKCFWGDAFESIKNIENNKYDKIFVDLNDDQYCIDLAAKNMKSLKRILKTNGTITAQVGSQDKKPKQVRNWLNVFNKNFGNATLDRVYIPSFDCSWNFASSINN

SEQ ID NO: 119628 - protein, 267 aa, Unknown
  Bacterial polypetide isolated from the Sargasso Sea
MTKVGEHLTLDIIGTDKEYEPKFYEKLIYKIAKKAKVSVLKISSHKFEPQGFTLVALLAESHMSFHTFPENGIISFDFFTCGKVSPNIALSIIKDEIKHKQIIKREFNRDTKDLYHDIYSSPGLSKNYIVKKVLENFKSKVGQHVEILELEQFGKALFIDNEIQVSETDEHLYSSTFVNCGIKLNSNNNKAAIIGGGDGGVARECITKNFGFIDWFELDPEVVEVCDKHLAKVGNKATKNNSVSCVWGDAFESIKKINDNNYDQNIY

SEQ ID NO: 119629 - protein, 245 aa, Unknown
  Bacterial polypetide isolated from the Sargasso Sea
IIKKEFNRDTVDLYHDNYSSPGLRKSYVVNKVLENFKSKAGQYIEILELEQFGKSLFIDNEIQVAESDEHLYSSTFVNSGLNLNPKKEKAAIIGGGDGGVARECISQNFGFIDWYELDPEVVEVCDKHLSKIGEKASEKNSVKCVWGDAFKSIKSVKDDTYDQIYVDLNDDQFCIDLAAKNMDSLVRILKPKGVITAQVGSQDKKPKQVDSWMNVFNESFGNTKLSRVYIPSFDCSWNFSSSINH

SEQ ID NO: 119630 - protein, 207 aa, Unknown
  Bacterial polypetide isolated from the Sargasso Sea
MTKVGEHITLDIIGTTKEYDPSVFEKVIHEIAKAAKVTILNISKYKFEPQGFTILALLAESHISFHTFPEKGIISFDFFTCGKISPSVAIDIIKKKFEHKRIVKKEFKRDTKSLYHDIYSSPGLQKSYVVNDVLEDFKSKVGQHIEILDLEQFGKSLFIDGEIQVAATDEHLYSSTFVGSGLNLNKDNDRAAIIGGGDGGVARECIS

SEQ ID NO: 119631 - protein, 289 aa, Unknown
  Bacterial polypetide isolated from the Sargasso Sea
MAESHISFHTFPEKGIISFDFFTCAKISPSVALDIIKDEIEHTQIIKKEFNRDTVDLYHDNYSSPGLRKTYVVNKVIENFKSEVGQHIEILELEQFGKALFIDNEIQVAEKDEYLYSSTFVNSGLELNSNKEKAAIIGGGDGGVARECISRNFSFIDWYELDPEVVDVCDKHLGKIGEKATEKNSVKCVWGDAFESIKSVKDDTYDQIYVDLNDDQYCIDLAAKNMNSLVRILKPKGVITAQVGSQDKKPRQVESWLNVFNENFGNAKLSRIYIPSFDCSWNFSSSINH

SEQ ID NO: 119632 - protein, 204 aa, Unknown
  Bacterial polypetide isolated from the Sargasso Sea
MTKVGEHITLDIIGTTKEYDPSVFEKIIYDIAKAAKVTILNISKHKFEPQGFTILALLAESHISFHTFPEKGIISFDFFTCGKINPSVAVEIIKKEFEHTRIVKKEFNRDTKSLYPDIYSSPGLQKSYVVNNVLEDFKSKVGQHIEILELEQFGKSLFIDGEIQVATTDEHLYSSTFVGAGLSLNKNNERVAIIGGGDGGVARE

SEQ ID NO: 119633 - protein, 233 aa, Unknown
  Bacterial polypetide isolated from the Sargasso Sea
LYDDIYSTPGQKKFYVVKDVLEKFTSKVGQFVEIMDLEEFGHALFIDHEIQVAEKDEKIYSTNFFKSSYDLSKKNNNVAIIGGGDGGVARACLENNTDYIDWFELDPEIVDVCFRHLPKVCSKVKKSNKIKTFWGDAFKSIKEIEDSKYDKIFVDLNDDQYCIDLAKKNMKGLKRILKKGGVITAQVGSQDKKPKQVDNWCKVLGKSFGNVKLSGAYIPSFDCKWNFASSIMK

SEQ ID NO: 119634 - protein, 239 aa, Unknown
  Bacterial polypetide isolated from the Sargasso Sea
MTKVGEHITLDIIGTTKEYDPSFFEKVIHDIAKTAKVTILNISKYKFEPQGFTILALLAESHISFHTFPEKGIISFDFFTCGKINPSVAVEIIKKEFEHTRIVKKEFNRDTKSLYPDIYSSPGLQKSYVVNDVLEDFKSKVGQHIEILELEQFGKSLFIDGEIQVATTDEHLYSSTFVGAGLDLNQNNERAAIIGGGDGGIARECISKNFNFIDWYELDPEVVDVCNKHLGDIGKKATE

SEQ ID NO: 119635 - protein, 86 aa, Unknown
  Bacterial polypetide isolated from the Sargasso Sea
KSLFIDGEIQVAASDEHLYSSTFVGAGLKLNNSNERAAIIGGGDGGVARECISKKFNFIDWFELDPEVVEVCNKHLGDIGKKATEK

SEQ ID NO: 119636 - protein, 215 aa, Unknown
  Bacterial polypetide isolated from the Sargasso Sea
MAKKVGEHITIDIIGTKKEYAPSFFEKLVYKIAKKAKVTVLEISRHRFEPQGFTLVALLAESHISFHTFPEKGIISFDFFTCGKISPSVAIDILKEEIEHKRIVKKEFNRDTITFYDDIYSSTGLKKYYIVNNVLEDFTSKVGQHIEILDLEQFGKSLFIDSELQVAASDEHLYSSTFVNSSLKLNKAKNKAAIIGGGDGGVARECISKDFNYID

SEQ ID NO: 119637 - protein, 168 aa, Unknown
  Bacterial polypetide isolated from the Sargasso Sea
NSGLKLNSSKDRAAIIGGGDGGVARECISKNFGFIDWFELDPEVVEVCDKHLGTIGQKATEKNSVKCVWGDAFESIKNIETDTYDKIFIDLNDDQFCIDLAAKNMDQIIRVLKPNGVVTAQVGSQDKRPKQVENWKDVFNKNFGNATLDRVYIPSFDSSWNFYTSINH

SEQ ID NO: 119638 - protein, 259 aa, Unknown
  Bacterial polypetide isolated from the Sargasso Sea
VAIDIVKKEFEHKRIVKKEFNRDTRSLYHDIYSSPGLQKSYIVNEVLEDFKSKVGQHIEILELEQFGKSLFIDGEIQVAASDEHLYSSTFVGAGLKLNKKNERAAIIGGGDGGVARECISKKFNFIDWYELDPEVVEVCNKHLGEIGKKSTEKNSVKCVWGDAFENIKTVNEDTYDHIFVDLNDDQFCIDLAAKNMDSLVRILKPKGVITAQVGSQDKKPLQVENWLNVFNHHFGNTNLARVYIPSFDCSWNFSSSINH

SEQ ID NO: 119639 - protein, 210 aa, Unknown
  Bacterial polypetide isolated from the Sargasso Sea
MTTKVGEHITLDIIGTKKEYDPVFFEKLVYKIAKIAKVKVLEISKYKFEPQGFTLVALLAESHISFHTFPEKGIISFDFFTCANISPSVAINVIKDEIEHSRIVKKEFNRDTVDLYHDIYSSPGLKKSYVVNKVLENFKSNVGQHIEILELEQFGKALFIDNEIQVAEKDEHLYSSTFVNSGLDLNSNKEKAAIIGGGDGGVARECISKN

SEQ ID NO: 119640 - protein, 250 aa, Unknown
  Bacterial polypetide isolated from the Sargasso Sea
MLAESHISFHTFPEHGIISFDFFTCGKVSPSVALDVIKNEIKCKRIVKKSFDRHTIENYFDTSSTSGMQKSYVVKDVLEDFVSKVGQHVQILDLEEFGKSLFIDKDLQVASCDEHLYSSTFVNSGLKLNPSKERAAIIGGGDGGVARECISKNFGFIDWYELDPEVVEVCDKHLGTIGQKATEKNSVKCVWGDAFESIKKIETDTYDKIYIDLNDDQFCIDLAAKNMDQIIRVLKPNGVVTAQVGSQDKR

SEQ ID NO: 119641 - protein, 224 aa, Unknown
  Bacterial polypetide isolated from the Sargasso Sea
GQKKYYVVKNVLEKFTSKVGQFVEIMDLEEFGNALFIDHEIQVSEKDEKIYSSNFFKSSYDLSKKNNNIAIIGGGDGGVARACLENNSNYIDWFELDPEIVDACFKHLPKVCSKVKKSNRIKTFWGDAFKSIKEIEDSKYDKIFVDLNDDQYCIDLAKKNMKGLKRILKKGGVITAQVGSQDKKPKQVEKWCNVLEKNFGNVKLSGAYVPSFDCKWNFASSVMR

SEQ ID NO: 119642 - protein, 347 aa, Unknown
  Bacterial polypetide isolated from the Sargasso Sea
MVKKVGEHVTLDIIGTKKEYEPSFFEGLVHKIADKAKVTVLNIAKYKFEPQGFTLVALLAESHMSFHTYPEKGIISFDFYTCGIISPTVALDILKKEIDHKRIVKKEISRDTISYYHDITSTKGLQKNYLVKEVLEDFTSKVGQHIEILDLVEYGKSLFIDNDLQVAESDEHIYSGTFVNSALKLNKSKDRAAIIGGGDGGVARECISKGFGFIDWYELDPEVVEVCKKHIGSIGKNATEKNSVKCVWGDAFESIKKVEDDSYDKIFIDLNDDQFCIDLAAKNMNSLVRILKPDGVITAQVGSKDKKPKQVDNWLNVFNKNFGNATLDRVYIPSFDSSWNFYSSINH

SEQ ID NO: 119643 - protein, 346 aa, Unknown
  Bacterial polypetide isolated from the Sargasso Sea
MTKVGEHITLDIIGTNKEYDPSVFERVIHEIAKAAKVTILNISKYKFEPQGFTILALLAESHISFHTFPEKGIISFDFFTCGKVSPSVAIEIIKKEFEHTRIVKKEFNRDTKSLYHDIYSSPGLQKSYVVNDVLEDFKSKVGQHIEILDLEQFGKSLFIDGEIQVAATDEHLYSSTFVGSGLNLNKDNERAAIIGGGDGGVARECISKNFNFIDWYELDQEVVDVCNKHLGDIGKKATEKNSVKCVWGDAFESIKSVSDDTYDHIFVDLNDDQFCIDLAAKNMDSLVRILKPKGVITAQVGSQDKKPKQVDNWLNVFNQNFGNAKLSRVYIPSFDCAWNFSSSINH

SEQ ID NO: 119644 - protein, 229 aa, Unknown
  Bacterial polypetide isolated from the Sargasso Sea
MIKVGEHVTLDIIGTKKEYDASFFEGLVHKIAEKAKVTVLNIAKYKFEPQGFTLVALLAESHISFHTYPEKGIISFDFYTCGTVAPSIALDVIKKEIEHKRIIKKELNRDTISFYYDNTSTKGLKKNYLVKDVIEDFKSKVGQHIEILDLVEYGKSLFIDGDLQVAESDEHIYSGTFVNSAMKLNKSKDRAAIIGGGDGGVARECIAKGFGFIDWYELDPEVVEVCKKH

SEQ ID NO: 119645 - protein, 235 aa, Unknown
  Bacterial polypetide isolated from the Sargasso Sea
MTKVGEHITLDIIGTKKEYDPSFYEKLVYKIAKKAKVTVLEISRYKFKPQGFTLVALLAESHISFHTFPENGIISFDFFTCGKVSPSIAIDIIKKEIEHKRIVKKEFNRDTIALYHDIYSSPGLQKSYVVKNVLEDFTSKVGQHIEILDLEQFGKSLFIDNEIQVATKDEHLYSGTFVNAGLKLNKNKETAAIIGGGDGGVARECISKEFGYIDWFELDPEVVEVCEKHLGFNWK

SEQ ID NO: 119646 - protein, 347 aa, Unknown
  Bacterial polypetide isolated from the Sargasso Sea
MTTKVGEHITLDIIGTKKEYDPVFFEKLVYKIAKIAKVTVLEISKYKFEPQGFTLVALLAESHISFHTFPEKGIISFDFFTCAKISPSVAINIIKEEIEHRRIVKKEFNRDTVDLYHDIYSSPGLKKSYVVNKVLENFKSNVGQHIEILELEQFGKALFIDNEIQVAEKDEHLYSSTFVNSGLDLNSNKEKAAIIGGGDGGVARECISKNFGFIDWYELDPEVVDVCDKHLGKIGDKATEKNSVKCVWGDAFESIKSVKDDTYDQIYVDLNDDQYCIDLASKNMNSLVRILKPKGVITAQVGSQDKKPKQVENWLNIFNENFGNTKLSRIYIPSFDCSWNFSSSINH

SEQ ID NO: 119647 - protein, 241 aa, Unknown
  Bacterial polypetide isolated from the Sargasso Sea
MSKVGEHVTLDIIGISKEYEPKFFEKLVYKIAKKAKVTVLEISKYKFEPQGFTLVALLAESHISFHTFPEKNIISFDFFTCGKVSPTVALDILKKEIKHKRIIKKEFNRDTVSYYDDIYSSPGLKKFYIVKNVLEDFTSKVGQHIEILDLEQFGKSLFIDNELQVAESDEHLYSSTFVNSGIKLNPAKDKSAIIGGGDGGVARECISQGFNLIDWYELDPEVVHVCEKHISKMEKKLLLKI

SEQ ID NO: 119648 - protein, 346 aa, Unknown
  Bacterial polypetide isolated from the Sargasso Sea
MTKVGEHVTLDIIGTEKEYEPKFFEKLVYKISKKAKVTVLEISKYKFEPQGFTLVALLAESHISFHTFPERGIISFDFFTCGKVNPNVAYDILKKEIKHKRIVKKEFNRDTISYYDDIYSSPGLKKYYMVKDVLENFTSKVGQNIEILDLEQFGKSLFIDGELQVAENDEHLYSSTFVNSGLKLNPSNDKTAIIGGGDGGVARECISKGFKLIDWYELDPEVVTMCEKYLSKVGKKATTKNHVQCVWGDAFESIKSVEDNKYDKIYVDLNDDQYCIDLAAKNIKSLKRILKPNGTITAQVGSQDKKPKQVDKWLNLFEKSFGNTSLDRVYIPSFDCSWNFASSLNE

SEQ ID NO: 119649 - protein, 172 aa, Unknown
  Bacterial polypetide isolated from the Sargasso Sea
STFVGSGLNLNKDNERAAIIGGGDGGVARECISKNFNFIDWYELDPEVVDVCNKHLGDIGKKATEKNSVKCVWGDAFESIKSVGDDTYDHIFVDLNDDQFCIDLAAKNMDSLVRILKPKGVITAQVGSQDKKPQQVENWLNVFNQNFGNAKLARVYIPSFDCSWNFSSSINH

SEQ ID NO: 119650 - protein, 206 aa, Unknown
  Bacterial polypetide isolated from the Sargasso Sea
VGQHIEILDLEQFGKSLFIDSEIQVAATDEHLYSSTFVGSGLNLNKDNDRAAIIGGGDGGVARECISKKFNFIDWYELDPEVVDVCKKHLGNIGNKATEKNSVKCVWGDAFESIKSVSDDTYDHIFVDLNDDQFCIDLAAKNMDSLVRILKPKGVITAQVGSQDKKPHQVENWLNVFNQNFGNAKLSRVYIPSFDCSWNFSSSINH

SEQ ID NO: 119651 - protein, 259 aa, Unknown
  Bacterial polypetide isolated from the Sargasso Sea
MTKVGEHITLDIIGTNKEYDPNFFEKLVYKIAKAAKVTVLEISKYKFEPQGFTLVALLAESHISFHTFPEKGIISFDFFTCGKISPSVALKVIKEEIQHTNIIKKEFNRDTIDLYQDNYSSPGLNKAYVVNNVLENFKSKVGQYIEILDLEQFGKALFIDNEIQVAESDEHLYSSTFVNSGLKLNPKKEKAAIIGGGDGGVARECISQNFGFIDWFELDPEVVDVCDKHLSKIGERSTEKNSVKCVWGDAFESIKSVND

SEQ ID NO: 119652 - protein, 339 aa, Unknown
  Bacterial polypetide isolated from the Sargasso Sea
MIKVGEHITIDFLGVKKDYSPEFYEKVIYKIAKAAKVEILNVSSHKFEPQGFTLVALLAESHFSFHTFPERGVISFDFFTCGKVNPKVALKILRKEIDHTRVVTHAFDRSSVGLYDDIYSTPGQKKFYVVKDVLEKFTSKVGQFVEIMDLEEYGHALFIDHEIQVAEKDEKIYSSNFFKSSYDLSKKNNNVAIIGGGDGGVARACLENNSNYIDWFELDPEIVDVCYRHLPKVCSKVKKSNKIKTFWGDAFKSIKEIEDSKYDKIFVDLNDDQYCIDLAKKNMKGLKRILKKGGVITAQVGSKDKKPKQVDNWCKVLDKSFGNVRVSGTYIPSFDCNWN

SEQ ID NO: 119653 - protein, 262 aa, Unknown
  Bacterial polypetide isolated from the Sargasso Sea
SPSVALKIIKEEIQHTNIIKKEFNRDTIDLYHDNYSSPGLNKAYVVNKVLENFKSKVGQYIEILDLEQFGKALFIDNEIQVAESDEHLYSSTFVNSGLKLNSKKEKAAIIGGGDGGVARECISQNFGFIDWFELDPEVVDVCDKHLSKIGEKATEKNSVKCVWGDAFESIKSVKDDTYDQIFVDLNDDQFCIDLAAKNMDSLVRILKPKGVITAQVGSQDKKPKQVDNWLNVFNKNFGNTQLSRVYIPSFDCAWNFSSSINH

SEQ ID NO: 119654 - protein, 183 aa, Unknown
  Bacterial polypetide isolated from the Sargasso Sea
QVAEKDEHLYSSTFVNSGIKLNPNKDKSAIIGGGDGGVARELISKGFNLIDWYELDPEVVKVCEKHLSKIGEKATTKNSVKCVWGDAFESIKKVEDNKYDKIFVDLNDDQYCIDLAAKNIKSLKRILKSDGTITAQVGSQDKKPKQVEKWLNLFQKSFGNTSLDRIYIPSFDCSWNFASSINK

SEQ ID NO: 119655 - protein, 289 aa, Unknown
  Bacterial polypetide isolated from the Sargasso Sea
MAESHISFHTFPEKGIISFDFFTCAKISPSIALDVIKDEIEHSQIITKKFNRDTVDLYHDNYSSPGLKKSYVVNNIIENFKSKVGQHIEILELEQFGKALFIDNEIQVAERDEYLYSSTFVKSGLDLNSSKEKAAIIGGGDGGVARECISKNFSFIDWYELDPEVVEVCDKHLGKIGEKATEKNSVKCIWGDAFESIKTVKDDTYDQIYVDLNDDQYCIDLAAKNMNSLVRILKPKGVITAQVGSQDKKPKQVENWLNIFNENFGNTKLSRVYIPSFDCSWNFSSSINH

SEQ ID NO: 119656 - protein, 206 aa, Unknown
  Bacterial polypetide isolated from the Sargasso Sea
MTKVGEHITLDIIGTKKEYSPSFYEKLVYKIAKKAKVTVLEIAKYKFEPQGFTLVALLAESHISFHTFPEKGIISFDFFTCAKISPAVALDIIKKEIGHTRIVKKEFNRDSLGLYDDIYSSPGQKKYYVVKKYLENFTSKVGQHIEIIELEEFGKSLFIDNELQVAEKDEHLYSSTFVNSGMKLNKNKDKAAIIGGGDGGVARECI

SEQ ID NO: 119657 - protein, 168 aa, Unknown
  Bacterial polypetide isolated from the Sargasso Sea
MTNITTWIDEYHKGSRFGLNGEILIKKTSKYQEIIVIENEYYGKALMLDGCWMTSLKDEKYYHECLVHPALSSIDEKSNVLIIGGGDGGTARECVKYSQISKIDLVEIDEEVIKISKKFLKEIGGEAWNDKRLEIHVDDGAKWVKKTRDNFYDVIFIDCSDPSEFSNL

SEQ ID NO: 119658 - protein, 334 aa, Unknown
  Bacterial polypetide isolated from the Sargasso Sea
MGTTKEYDPSVFEKVIHDIAKAAKVTILNISKYKFEPQGFTILALLAESHISFHTFPEKGIISFDFFTCGKINPSVAVEIIKKEFEHTRIIKKEFNRDTKSLYPDIYSSPGLQKSYVVNDVLEDFKSKVGQHIEILDLEQFGKSLFIDGEIQVATTDEHLYSSTFVGAGLNLNKNNERAAIIGGGDGGVARECISKNFNFIDWYELDPEVVDVCNKHLGDIGKKATEKNSVKCVWGDAFESIKSVSDDTYDHIYVDLNDDQFCIDLASNNMDSLVRILKPKGVITAQVGSQDKKPQQVENWLNVFNQNFGNTNLSRVYIPSFDCSWNFSSSINH

SEQ ID NO: 119659 - protein, 271 aa, Unknown
  Bacterial polypetide isolated from the Sargasso Sea
MIFLHVGKISPSIAIDIVKKEFKHKRIVKKEFNRDTRALYHDIYSSPGLQKAYVVNDVLEDFKSKVGQHIEILDLEQFGKSLFIDGEIQVAASDEHLYSSTFVGSGLNLQKNNERAAIIGGGDGGVARECISKKFNFIDWFELDPEVVEVCNKHLGDIGKKATEKNSVKCVWGDAFESIKTVKDDSYDHIFVDLNDDQFCIDLAAKNMDSLVRILKPKGVITAQVGSQDKKPQQVENWLNVFHHHFGNTKLSRVYIPSFDCSWNFSSSINH

SEQ ID NO: 119660 - protein, 234 aa, Unknown
  Bacterial polypetide isolated from the Sargasso Sea
GIIQTTERDEFSYHEMLAHVPIMDHGNVKKVLIIGGGDGGVLKEVLKHKKIERVTLVEIDARVIELCKLHLPSVNSGAFESSRVDILIENGFDFVSTNRNLFDLIIVDSTDPSPSSKLLFSRKFFESCQACLAPKGIFVNQNGVPFLQGYQFKNTSDIIQHIFVYPRFYFVAVPTYVGGHMALGHFSDSNYGNEGIDKIIRRFQQTELDTCYYNPDIHQSAFAAPNFISNLVYK

SEQ ID NO: 119661 - protein, 345 aa, Unknown
  Bacterial polypetide isolated from the Sargasso Sea
MKVGEHITLDIIGTKKEYDPVFFEKLVYKIAKIAKVTVLEISKYKFEPQGFTLVALLAESHISFHTFPEKGIISFDFFTCAKISPSVALEVIKDEIEHTNIIKKEFDRDTVDLYHDNYSSPGLKKSYVVNNVIENFKSKVGQHIEILELEQFGKALFIDNEIQVAEKDEYLYSSTFVKSGLDLNSSKEKVAIIGGGDGGVARECISKNFSFIDWYELDPEVVEVCDKHLGKIGEKATEKNSVKCVWGDAFESIKSVKDDTYDQIYVDLNDDQYCIDLAAKNMNSLLRILKPKGVITAQVGSQDKKPKQVENWLNIFNENFGNTKLSRVYIPSFDCSWNFSSSINH

SEQ ID NO: 119662 - protein, 346 aa, Unknown
  Bacterial polypetide isolated from the Sargasso Sea
MIKVGEHIILDIIGTTKEYDPSVFEKVINKIAKAADVTILNISKYKFEPQGFTILALLAESHISFHTFPEKGIISFDFFTCGKINPSVAIDIVKKEFEHRRIVKKEFNRDTRSLYHDIYSSPGLQKSYVVNEVLEDFKSKVGQHIEILELEQFGKSLFIDGEIQVAASDEHLYSSTFVGAGLKLNKKNERAAIIGGGDGGVARECISKKFNFIDWYELDPEVVEVCNKHLGDIGKKATEKNSVKCVWGDAFESIKTVNEDTYDHIFVDLNDDQFCIDLAAKNMDSLVRILKPKGVITAQVGSQDKKPLQVENWLNVFNHHFGNTSLSRVYIPSFDCSWNFSSSINH

SEQ ID NO: 119663 - protein, 346 aa, Unknown
  Bacterial polypetide isolated from the Sargasso Sea
MTKVGEHITLDIIGTNKEYEPKFFEKLVYKIAKKAKVTVLNISKYKFEPQGFTLVALLAESHISFHTFPEKGIISFDFFTCGKVNPNVSIDILKKEIKHKRIVKKEFNRDTIEYYDDIYSSPGLKKFYIVNNVLEDFNSKVGQHIEILELEQFGKSLFIDNELQVAEKDEHLYSSTFVNSGLKLNPDKNNSAIIGGGDGGVARECINQGFNYIDWYELDPEVVTVCEKHLSKIGKKATSKNSVKCVWGDAFESIKNIEDNKYDKIFVDLNDDQYCIDLAAKNINSLKRILKPQGTITAQVGSQDKKPKQVEKWLQLFEKNFANTSLDRIYIPSFDCSWNFASSINK

SEQ ID NO: 119664 - protein, 272 aa, Unknown
  Bacterial polypetide isolated from the Sargasso Sea
SFDFFTCGKVNPKVALKILRKEIEHKRVVTNAFDRSSIGLYDDIYSTPGQKKFYVVKDVLEKFTSKVGQFVEIMDLEEFGHALFIDHEIQVAEKDEKIYSSNFFKSSYDLSKKNNNVAIIGGGDGGVARACLENNSNYIDWFELDPEIVDVCYRHLPKVCSKVKKSNKIKTFWGDAFKSIKEIEDSKYDKIFVDLNDDQYCIDLAKKNMKGLKRILKKGGVITAQVGSQDKKPKQVDNWCKVLGKSFGNVKVSGAYIPSFDCKWNFASSIMK

SEQ ID NO: 119665 - protein, 235 aa, Unknown
  Bacterial polypetide isolated from the Sargasso Sea
MVKVGEHITIDFLGVKKDYTPEFYEKIIYTIAKAAKVEILNVASHRFQPQGFTLVALLAESHFSFHTFPEKGVISFDFFTCGKVNPKVALKILRKEISHDRVVTNAFDRSSIGLYDDIYSTPGQKKYYVVKNVLEKFTSKVGQFVEIMDLEEFGHALFIDHEIQVAEKDEKIYSSNFFKSSYDLSKKNNNVAIIGGGDGGVARSCLDNNSNFIDWFELDPEIVDVCYRHLPKVCS

SEQ ID NO: 119666 - protein, 346 aa, Unknown
  Bacterial polypetide isolated from the Sargasso Sea
MTKVGEHITLDIIGTFKEYDPKFFEKLVYRIAKLAKVTVLEISKYKFEPQGFTLVALLAESHISFHTFPEKGIISFDFFTCANVSPSVAINVIKEEIEHTHIIKKEFNRDTVDLYHDNYSSPGLRKSYVVNKVLENFKSKAGQYVEILELEQFGTSLFIDNEIQVAESDEHLYSSTFVNSGLKLNSNKQKAAIIGGGDGGVARECISQNFGFIDWYELDPEVVEVCDKHLSKIGEKASEKNSVKCVWGDAFESIKSVKDDTYDQIYVDLNDDQFCIDLAAKNMESLVRILKPKGVITAQVGSQDKKPKQVENWMNVFNHSFGNTKLSRIYIPSFDCSWNFSSSINH

SEQ ID NO: 119667 - protein, 262 aa, Unknown
  Bacterial polypetide isolated from the Sargasso Sea
MVFERVIYDIAKAAKVTILNISKYKFEPQGFTILALLAESHISFHTFPEKGIISFDFFTCGKINPSVAVEIIKKEFEHTRIVKKELNRDTKSLYPDIYSSPGIQKSYVVNDVLEDFKSKVGQHIEILELEQFGKSLFIDGEIQVAATDEYLYSSTFVGAGLSLNKNNERAAIIGGGDGGVARECISKNFNFIDWYELDPEVVDVCNKHLGDIGKKATEKNSVKCVWGDAFESIKSVSDDTYNHIYVDLNDDQFCIDLASKNM

SEQ ID NO: 119668 - protein, 176 aa, Unknown
  Bacterial polypetide isolated from the Sargasso Sea
KIYSSNFFKSSYDLSKKNSNVAIIGGGDGGVARECLENNANYIDWYELDPEIVETCFKHLPKVCSKVKKSNKVKTFWGDAFESIKSVEDSKYDKIFVDLNDDQYCIDLAKKNMKGLKRILKKGGVITAQVGSKDKKPKQVENWCKVLDKSFGNVKVSGVHIPSFDCNWNFASSVMK

SEQ ID NO: 119669 - protein, 248 aa, Unknown
  Bacterial polypetide isolated from the Sargasso Sea
MTKVGEHITLDIIGIEKEYDPVFFEKLVYKIAKIAKVTVLQISKYKFEPQGFTLVALLAESHISFHTFPEKGVISFDFFTCAKISPSVALEVIKDEIEHTHIIKKQFNRDTVDLYHDNYSSPGLKKSYVVNKVFENFKSKVGQHIEILELEQFGKALFIDNEIQVAEKDEHLYSSTFVSSGLSLNSNKEKAAIIGGGDGGVARECISKNFGFIDWYELDPEVVEVCDKHLGTIGDKATRKKFSKMCMG

SEQ ID NO: 119670 - protein, 346 aa, Unknown
  Bacterial polypetide isolated from the Sargasso Sea
MSKVGEHITLDIIGTTKEYEPSFFEKLVYKIAKKAKVTVLEISKYKFEPQGFTIVALLAESHISFHTFPEKGIISFDFFTCGKINPIVALDVLKKEIKHKRIIKKEFNRDAVDYYDDIYSSRGLKKFYLVKEVLEDFRSKVGQHVQILELEQFGKSLFIDNELQVAEKDEHLYSSTFVNSGLKLNPEKNNSAIIGGGDGGVARECISKGFNYIDWYELDPEVVDVCEKHLSKVGQKATKKNSVKCVWGDAFESIKKVEDSKYDKIFVDLNDDQYCIDLAAKNINSLKRILKPNGTITAQVGSQDKKPKQVDKWLNLFEKSFKNTSLDRIYIPSFDCSWNFATSINK

SEQ ID NO: 119671 - protein, 236 aa, Unknown
  Bacterial polypetide isolated from the Sargasso Sea
MTKVGEHVTLDIIGTEKEYEPKFFEKLVYKISKKAKVTVLEISKYKFEPQGFTLVALLAESHISFHTFPERGIISFDFFTCGKVNPNVAFDILKKEIKHKRIVKKEFNRDTISYYDDIYSSPGLKKYYMVKDVLENFTSKVGQNIEILDLEQFGKSLFIDGELQVAENDEHLYSSTFVNSGLKLNPSNDKTAIIGGGDGGVARECISKGFKLIDWYELDPEVVTMCEKYLSKVGKK

SEQ ID NO: 119672 - protein, 279 aa, Unknown
  Bacterial polypetide isolated from the Sargasso Sea
MKKVGEHVTLDIIGTEKEYEPKFFEKLVYKIAKKAKVTVLEISKYKFEPQGFTLVALLAESHISFHTFPEKGIISFDFFTCGTVSPNIALDILKKEIKHKRIVKKEFNRDTISYYDDIYSSIGLKKFYMVRNILEDFTSKVGQHIEILELEQFGKSLFIDNELQVAEKDEHLYSSTFVNSGIKLNPAKEKSAIIGGGDGGVARECISQGFNIIDWYELDPEVVKVCEKHLSKIGEKATSKNSVKCFWGDAFESIKKVEDNKYDKIFVDLNDDQYCIDLA

SEQ ID NO: 119673 - protein, 313 aa, Unknown
  Bacterial polypetide isolated from the Sargasso Sea
MLKLPYLIFPNIKFEPQGFTILALLAESHISFHTFPEKGIISFDFFTCGKINPSVAVEIIKKEFEHTRIVKKEFNRDTKSLYPDIYSSPGLQKSYVVNDVLEDFKSKVGQHIEILELEQFGKSLFIDGEIQVATTDEHLYSSTFVGAGLDLNQNNERAAIIGGGDGGVARECISKNFNFIDWYELDPEVVDVCNKHLGDIGKKATEKNSVKCVWGDAFESIKSVNDDTYDHIYVDLNDDQFCIDLASKNMDSLVRILKPKGVITAQVGSQDKKPQQVENWLNVFNQNFGNTKLSRVYIPSFDCSWNFSSSINH

SEQ ID NO: 119674 - protein, 334 aa, Unknown
  Bacterial polypetide isolated from the Sargasso Sea
MGVKKDYTPDFYEKVIYKIAKAAKVEILNVSSHKFEPQGFTLVALLAESHFSFHTFPEKGVISFDFFTCSKVNPKVALKILRKEIDHNRVVTHSFDRSSVGLYDDIYSTPGQKKFYVVKDVLEKFTSKVGQFVEIMDLEEFGHALFIDHEIQVAEKDEKIYSSNFFKSSYELSKKNNNVAIIGGGDGGVARACLENNSSYIDWFELDPEIVDVCYRHLPKVCSKVKKSNKIKTFWGDAFESIKSVENSKYDKIFVDLNDDQYCIDLAKKNMKNLKRILKKGGIITAQVGCQDKKPKQVGNWLKVLEKNFGNVKLSGAFIPSFDCKWNFASSIMK

SEQ ID NO: 119675 - protein, 283 aa, Unknown
  Bacterial polypetide isolated from the Sargasso Sea
MTDITTWIDEYHKGSRFGLNGKILIKKTSKYQEIIVIENEYYGKALMLDGCWMTSLKDEKYYHECLVHPALSSIDEKSNVLIIGGGDGGTVRECVKYSQISKIDLVEIDEEVIKISKKFLKEIAGEAWNDKRLEIHIDDGVKWVKKTKDNFYDVIFIDCSDPSEFSNLLFSHSFYKECKRILAPRGILATQSESPESFKNIHINILKSLKNIFKFSETMYSFVPIYPSGIWSWTFASSEDLSLSKQNYDEVVKIEKGCEIWNLNFQNAAFKMMPNKIVKELDS

SEQ ID NO: 119676 - protein, 296 aa, Unknown
  Bacterial polypetide isolated from the Sargasso Sea
YTCLALLAESHMSFHTFPERGIISFDFFTCAKISPTAALDILKSEIKHERAVVRNFDRSNKGVYEDIYSTPGHQKYYIVNDVLENFVSKVGQHIEIMKLEEFGNALFIDSELQVAEKDEKKYSGQFVNSALGLSKDNSSAAIIGGGDGGVARELLSKGFDLIDWYELDPEVVKVCQKHLPKICGNVKANNNVKTYWGDAFESIKKVKDSKYDKIFVDLNDDQFCIDLAAKNMKGLKRILKPGGVITAQVGTLSKKPKQVNNWLKVLSDNFGNSKLDEVMIPSFDCRWNFASSIMNS

SEQ ID NO: 119677 - protein, 290 aa, Unknown
  Bacterial polypetide isolated from the Sargasso Sea
MLAESHISFHTFPEKGIISFDFFTCGKISPSVAIEIVKKEFKHKRIVKKEFNRDTKGLYHDIYSSPGLQKSYVVNDVLEDFRSKVGQHIEILDLEQFGKSLFIDGEIQVASSDEHFYSSTFVGAGLKLNKSNERAAIIGGGDGGVARECISKKFNFIDWYELDPEVVKVCTKHLGKIGNKATEKNSVKCVWGDAFESIKSVKDDTYDHIFVDLNDDQFCIDLAAKNMESLVRILKPKGVITAQVGSQDKKPLQVDNWLNVFNHHFGNTKLSRVYIPSFDCSWNFSSSINH

SEQ ID NO: 119678 - protein, 317 aa, Unknown
  Bacterial polypetide isolated from the Sargasso Sea
MSKVGEHVTLDIIGTSKEYEPKFFEKLVYKIAKKAKVTVLEISKYKFQPQGFTLVALLAESHISFHTFPEKNIISFDFFTCGKVSPTVALDILKKEIKHKRIIKKEFNRDTISYYDDIYSSPGLKKFYMVRNVLEDFTSKVGQHIEILDLEQFGKSLFIDNELQVAESDEHLYSSTFVNSGIKLNSAKDKSAIIGGGDGGVARECISQGFNLIDWYELDPEVVHVCEKHISKIGEKATAKNSVQCVWGDAFESIKKVEDNKYDKIFVDLNDDQYCIDLAAKNINSLKRILKPNGTITAQVGSQDKKPKQVDNWLKFV

SEQ ID NO: 119679 - protein, 346 aa, Unknown
  Bacterial polypetide isolated from the Sargasso Sea
MSKVGEHVTLDIIGTSKEYEPKFFEKLVYKIAKKAKVTVLEISKYKFQPQGFTLVALLAESHISFHTFPEKNIISFDFFTCGKVSPVVALEILKKEIKHKRIIKKEFNRDTVSYYDDIYSSPGLKKFYMVRNVLEDFTSKVGQHIEILDLEQFGKSLFIDNELQVAESDEHLYSSTFVNSGIKLNPAKDKSAIIGGGDGGVARECISQGFNLIDWYELDPEVVHVCEKHISKIGEKATAKNSVQCVWGDAFESIKKVEDNKYDKIFVDLNDDQYCIDLAAKNINSLKRILKPNGTITAQVGSQDKKPKQIDNWLNLFDKSFGNTSLDRIYIPSFDCSWNFASSLNK

SEQ ID NO: 119680 - protein, 346 aa, Unknown
  Bacterial polypetide isolated from the Sargasso Sea
MTKVGEHITLDIIGTTKEYDPGVFEKIINDIAKAAKVTILNISKYKFEPQGFTILALLAESHISFHTFPEKGIISFDFFTCGKVNPSVAIDIIKKEFEHKRIVKKEFNRDTKSLYHDIYSSPGLQKSYVVNDVLEDFKSKVGQHIEILDLEQFGKSLFIDGEIQVAATDEHLYSSTFVGSGLNLNKDNERAAIIGGGDGGVARECISKNFNFIDWYELDPEVVDVCNKHLGDIGKKATEKNSVKCVWGDAFESIKLVGDDTYDHIFVDLNDDQFCIDLAAKNMDSLVRILKPKGVITAQVGSQDKKPQQVENWLNVFNQNFGNAKLSRVYIPSFDCSWNFSSSINH

SEQ ID NO: 119681 - protein, 314 aa, Unknown
  Bacterial polypetide isolated from the Sargasso Sea
KKAKVTVLNIAKYKFEPQGFTLVALLAESHISFHTYPEKGIISFDFYTCGTVAPSIALDVIKNEIEHKRIIKKDISRDTISLYHDITSTKGLQKKYLVKEVLEDFTSKVGQHIEILDLVEYGKSLFIDNDLQVAERDEHIYSGTFVNSALKLNNSKDRAAIIGGGDGGVARECISKGFGFIDWYELDPEVVEVCKKHIGSIGNNATEKNSVKCVWGDAFQSIKKVEDDSYDKIFIDLNDDQFCIDLAAKNMDSLVRILKPNGVITAQVGSQDKKPKQVENWLKVFNKNFGNATLDRVYIPSFDSSWNFYSSINH

SEQ ID NO: 119682 - protein, 284 aa, Unknown
  Bacterial polypetide isolated from the Sargasso Sea
MSFHTFPEKGIISFDFFTCGKISPTAALDVLKEEIKHDRAVVRSFDRSNKGVYEDIYSTPGHKKYYVVSDVIENFVSKVGQHVEILKLEEFGNALFLDSELQVAEKDEKKYSGQFVNSSLNLSKDNSSAAIIGGGDGGVARELSSKGFDLIDWYELDPEVVKVCQKHLPKICGDIKANNKVKTYWGDAFESIKKVKDSKYDKIFVDLNDDQFCIDLAAKNMKGLKRILKPGGVITAQVGCLSKKPKQIKNWMELLKNNFGNVELTEVFIPSFDCRWNFASSSNK

SEQ ID NO: 119683 - protein, 346 aa, Unknown
  Bacterial polypetide isolated from the Sargasso Sea
MTKVGDHVTLDIIGTKKEYSPSFYEKLVYKIAKKAKVTVLGISKHKFEPQGFTLVALLAESHISFHTFPEKSIISFDFFTCGKVSPVVALDIIKKEIEHKRIVKKEFNRDSLGLYDDIYSTPGQKKYYVVKKYLENFTSKVGQHIEIIDLEEFGKSLFIDNELQVAEKDEHLYSSTFVNSGIKLNNKKDNAAIIGGGDGGVARECINKNFNFIDWYELDPEVVEVCDKHLSKVGQRATKKNSVKCIWGDAFESIKKVEDNRYDKIFVDLNDDQYCIDLAAKNIKSLKRILKSNGTITAQVGSQDKKPKQVKNWLNLFNKEFGNAELDRTYIPSFDCNWNFASSINN

SEQ ID NO: 119684 - protein, 193 aa, Unknown
  Bacterial polypetide isolated from the Sargasso Sea
SSPGLRKSYVVNKVLENFKSKAGQYVEILELEQFGKSLFIDHEIQVAESDEHLYSSTFVNSGLKLNPKKEKAAIIGGGDGGVARECISKNFGFIDWYELDPEVVEVCDEHLSKIGEKASEKNSVKCVWGDAFESIKSVKDDTYDQIYVDLNDDQFCIDLAAKNIDSLVRILKPKGVITAQVGSQDKKPKQVEN

SEQ ID NO: 119685 - protein, 159 aa, Unknown
  Bacterial polypetide isolated from the Sargasso Sea
NDRAAIIGGGDGGVARECISKKFNFIDWFELDPEVVEVCSKHLGDIGKKATEKNSVKCVWGDAFESIKSVKDDSYDHIFVDLNDDQFCIDLAAKNMDSLVRILKPKGVITAQVGSQDKKPHQVENWLNVFHHHFGNTKLSRVYVPSFDCSWNFSSSINH

SEQ ID NO: 119686 - protein, 240 aa, Unknown
  Bacterial polypetide isolated from the Sargasso Sea
FDRSSIGLYDDIYSTPGQKKFYVVKDVLEKFTSKVGQFVEIMDLEEFGHALFIDHEIQVAEKDEKIYSSNFFKSSYDLSKKNNNVAIIGGGDGGVARACLENNSNYIDWFELDPEIVDVCYRHLPKVCSKVKKSNKIKTFWGDAFKSIKEIEDSKYDKIFVDLNDDQYCIDLAKKNMKGLKRILKKGGVITAQVGSQDKKPKQVDNWCKVLGKSFGNVKLSGAYIPSFDCKWNFASSIMR

SEQ ID NO: 119687 - protein, 346 aa, Unknown
  Bacterial polypetide isolated from the Sargasso Sea
MIKVGEHITLDIIGTTKEYDPSVYEKVIYKIAKAANVTILNISKYKFEPQGFTILALLAESHISFHTFPENGIISFDFFTCGKISPSVAIDIIKKEFEHKRIVKKEFNRDTRSLYHDIYSSPGLQKSYVVNEVLEDFKSKVGQHIEILELEQFGKSLFIDGEIQVAASDEHLYSSTFVGAGLKLNKKNERAAIIGGGDGGVARECISKKFNFIDWYELDPEVVEVCNKHLGDIGKKTTEKNSVKCVWGDAFESIKTVNEDTYDHIFVDLNDDQFCIELAAKNMDSLVRILKPKGVISAQVGSQDKKPLQVENWLNVFNHHFGNTNLSRVYIPSFDCSWNFSSSINH

SEQ ID NO: 119688 - protein, 146 aa, Unknown
  Bacterial polypetide isolated from the Sargasso Sea
MTNISKWIDEYHKGSRFGLNGDVLIKQKSQYQEIIVIENEYYGRALMLDGCWMTSLKDEKYYHECLVHPALSSIDEKSNVLIIGGGDGGTARECVKYSQISKIDLVEIDEEVIKISKKFLKEIGGEAWNDKRLEIHVDDGVKWVKK

SEQ ID NO: 119689 - protein, 285 aa, Unknown
  Bacterial polypetide isolated from the Sargasso Sea
HISFHTYPEKGIISFDFYTCGTVAPSIALEVIKKEIEHKRIIKKELNRDTISFYYDNTSTKGLQKNYLVKEILEDFKSKVGQHVEILDLVEYGKSLFIDGDLQVAESDEHLYSGTFVNSAMKLNKSKDRAAIIGGGDGGVARECIAKGFGFIDWYELDPEVVEVCKKHIGSIGKNATEKNSVKCVWGDAFESIKKVEDDSYDKIFIDLNDDQFCIDLAAKNMNSLVRILKPDGVITAQVGSQDKKPKQVNNWLDVFNKNFGNATLDRVYIPSFDSSWNFYSSINH

SEQ ID NO: 119690 - protein, 346 aa, Unknown
  Bacterial polypetide isolated from the Sargasso Sea
MTKVGEHITLDIIGTKKEYEPSFYEKLVYKIAKKAKVTVLEISKYKFKPQGFTMVALLAESHISFHTFPEKSIISFDFFTCGKVSPSIALDIIRKEIEHKRIVKKEFNRDTIALYHDIYSSPGLRKSYVVKNVLEDFTSKVGQHIEILDLEQFGKSLFIDNEIQVATSDEHLYSGTFVNAGLKLNKDKETAAIIGGGDGGVARECISKGFGYIDWFELDPEVVDVCEKHLGSIGNKSTRKNSVKCVWGDAFESIKKVEDDRYDKIFVDLNDDQFCIDLAAKNMDSLVRILKPNGVITAQVGSQDKKPKQVDKWLKVFNKNFGNATLDRVYIPSFDCSWNFSSSINH

SEQ ID NO: 119691 - protein, 223 aa, Unknown
  Bacterial polypetide isolated from the Sargasso Sea
LKKYYMVKNILEDFTSKVGQHIQILDLEQFGKALFIDNELQVAEKDEHLYSSTFVNSGLKLNPNKNNSAIIGGGDGGVARECINQGFNYVDWFELDPQVVDVCEKHLSKVGQKATKKNSVKCVWGDAFESIKKVEDNKYDKIFVDLNDDQYCIDLAAKNIKSLKRILKPNGTITAQVGSQDKKPKQVEKWLNLFRKSFGNSSLDRIYIPSFDCSWNFASSLNK

SEQ ID NO: 119692 - protein, 346 aa, Unknown
  Bacterial polypetide isolated from the Sargasso Sea
MIKVGEHVTLDIIGTKKEYDSSFFESLVHKIAEKAKVTVLNIAKYKFEPQGFTLVALLAESHISFHTYPEKGIISFDFYTCGTVAPSIALDVIKKEIEHKRIIKKELNRDTISFYYDNTSTKGLQKNYLVKEVLEDFKSKMGQHIEILDLVEYGKSLFIDGDLQVAESDEHIYSGTFVNSAMKLNKSKDRAAIIGGGDGGVARECIAKGFGFIDWYELDPEVVEVCKKHIGSIGKNATEKNSVKCVWGDAFESIKKVEDDAYDKIFIDLNDDQFCIDLAAKNMNSLVRILKPDGVITAQVGSQDKKPKQVDNWLDVFNKNFGNATLDRVYIPSFDSSWNFYSSINH

SEQ ID NO: 119693 - protein, 577 aa, Unknown
  Bacterial polypetide isolated from the Sargasso Sea
MHESQTTGSATQAVKTSRLSWFDDVLLLGIMAVLAGCGLIYEYLLSHYAGRILGALEAAIYTMIGLMIVSMGLGAFAARKIKDAFTGFVVLELTVALCGSLAILITAAVIGFGQQLPMLIASTLGLPPDQLPEGGMIGSLQKLSEYLPYVWGVLLGLMIGMEIPLIARVRQSLSDEHLLHNAGTIYGADYIGAGIGAAIWVGFMLAIDIQLAAALTASFNLLAGFVFIWRFWPKIQRAKLLLAGHFVVTGVLLLLAIQGPSWEQQFNNLLYKDKVVYAKATRFQQLTFTERLRGNGLSPIYSLYINGRLQFSSIDEHIYHAFLVHPTLAASARHNKVLIIGGGDGLGLKQVLRWEPEQVTLLDLDAALVQLFKTPDTDMPKRLSQALLALNGNAFNDPRVNVIHDDAFNGVDKLIAAGDKYDAIIVDLPDPSHPDLNKLYSDYFYRKLKELMSSDGALTVQSTSPYHAQKAFISVAKTLALAGFDVKQYHHNVPSFGEWGWSIATLSGKDAQHRLGELTTLPIADDWLTLGLVKGAFEFPANFYQDAASIKPNELGSLQLYHYHQQAWSETQGLDLF

SEQ ID NO: 119694 - protein, 346 aa, Unknown
  Bacterial polypetide isolated from the Sargasso Sea
MTKVGEHITLDIIGTTKEYDPVVFEKVIHDIAKAAKVTILNISKYKFEPQGFTILALLAESHISFHTFPEKGIISFDFFTCGKVSPSIAIDIIKKEFQHKRIVKKEFNRDTKSLYHDIYSSPGLQKSYVVNDVLEDFKSKVGQHIEILDLEQFGKSLFIDGEIQVAATDEHLYSSTFVGSGLNLNKDNERAAIIGGGDGGVARECISKNFNFIDWYELDPEVVDVCNKHLGDIGKKATEKNSVKCVWGDAFESIKSVTDDTYDHIFVDLNDDQFCIDLAAKNMDSLVRILKPKGVITAQVGSQDKKPQQVENWLNVFNQNFGNAKLSRVYIPSFDCSWNFSSSINH

SEQ ID NO: 119695 - protein, 346 aa, Unknown
  Bacterial polypetide isolated from the Sargasso Sea
MTKVGEHITLDIIGANKEHSPDFYEKIIYKIAKLAKVTVLKISKYKFEPQGFTLVALLAESHMSFHTFPEKGITSFDFFTCGNISPSVATDVIKDEIEHTHIIKKLFNRDTIDLYHDNYSSPGLRKSYVVKKVLENFKSKVGQYIEILELEQFGKSLFIDNEIQVAESDEHLYSSTFVNSGLNLNPKKEKSAIIGGGDGGVARECISQNFGFIDWYELDPEVVEVCDKHLSKIGEKASEKNSVKCVWGDAFKSIKSVKDDTYDQIYVDLNDDQFCINLAAKNMESLIRILKPKGVITAQVGSQDKKPKQVENWMNVFNESFGNTKLSRVYIPSFDCSWNFASSINH

SEQ ID NO: 119696 - protein, 346 aa, Unknown
  Bacterial polypetide isolated from the Sargasso Sea
MIKVGEHITLDIIGTKKEYDASFFESLVHKIAEKAKVTVLNIAKYKFEPQGFTLVALLAESHISFHTYPEKGIISFDFYTCGTVAPSIALDVIKKEIEHKRIIKKELNRDTISFYYDNTSTKGLQKNYLVKEVIEDFKSKVGQHIEILDLVEYGKSLFIDGDLQVAESDEHLYSGTFVNSAMKLNKSKDRAAIIGGGDGGVARECIAKGFGFIDWYELDPEVVEVCKKHIGSIGKNATEKNSVKCVWGDAFESIKKVEDDSYDKIFIDLNDDQFCIDLAAKNMDSLVRILKPDGVITAQVGSQDKKPKQVDNWLDVFNKNFGNATLDRVYIPSFDSSWNFYSSINH

SEQ ID NO: 119697 - protein, 319 aa, Unknown
  Bacterial polypetide isolated from the Sargasso Sea
MKKVGEHVTIDFLGVKKDYTPDFYNKVIYKIAKKARIEVLNISEKVFKPQGYTCVALLAESHMSFHTFPERGVISFDFFTCGKISPTTALDILKSEIKHERAVVRSFDRSNKGLYEDIYSSPGHQKYYIVNDVLENFVSKVGQHIEIMKLEEFGNALFIDSELQVAEKDEKKYSGQFVNSALSLSKDNSSAAIIGGGDGGVARECLSKGFDLVDWFELDPEVVKVCQKHLPKICGEVKANNNVKTYFGDAFESIKKVRDSKYDKIFVDLNDDQFCIDLAAKNMKGLKRILKPGGVITAQVGCLSKKPRQVNNWMKVLSQ

SEQ ID NO: 119698 - protein, 346 aa, Unknown
  Bacterial polypetide isolated from the Sargasso Sea
MTKVGEHITLDIIGTTKEYDPSLYERVIKEIAKAADVTILNISKYKFEPQGFTILALLAESHISFHTFPEKGIISFDFFTCGKVNPSIAIEIIKKEFEHTRIVKKEFNRDTKSLYHDIYSSPGLQKSYVVNDVLEDFKSKVGQHIEILDLEQFGKSLFIDGEIQVAATDEHLYSSTFVGAGLELNKQSEIAGIIGGGDGGVARECISKDFSFIDWYELDREVVDVCNKHLGDIGKKANEKNSVKCVWGDAFESIKSVEDDTYDHIFVDLNDDQFCIDLAAKNMDSMIRILKPKGVITAQVGSQDKKPKQVDSWLNVFNHHFGNTKLSRVYIPSFDCSWNFSSSINH

SEQ ID NO: 119699 - protein, 346 aa, Unknown
  Bacterial polypetide isolated from the Sargasso Sea
MIKVGEHITLDIIGTTKEYDPSVYESVIHKIAKAANVTILNISKYKFEPQGFTILALLAESHISFHTFPENGIISFDFFTCGKISPSVAIDIVKKEFEHKRIVKKEFNRDTRSLYHDIYSSPGLQKSYVVNEVLEDFKSKVGQHIEILELEQFGKSLFIDGEIQVAASDEHLYSSTFVGAGLKLNKKNERAAIIGGGDGGVARECILKKFNFIDWYELDPEVVEVCNKHLGDIGKKATEKNSVKCVWGDAFESIKSVNEDTYDHIFVDLNDDQFCIDLAAKNMDSLVRILKPKGVITAQVGSQDKKPLQVENWLNVFNHHFGNTNLSRVYIPSFDCSWNFSSSINH

SEQ ID NO: 119700 - protein, 346 aa, Unknown
  Bacterial polypetide isolated from the Sargasso Sea
MTKVGEHITLDIIGTTKEYEASLFEKVIHDIAKAANVTILNISKYKFEPQGFTILALLAESHISFHTFPEKGIISFDFFTCGKISPSVAIDIIKKEFKHTRIVKKEFNRDTKALYHDIYSSPGLQKAYVVNDVLEDFKSKVGQHIEILELEQFGKSLFIDGEIQVAASDEHLYSSTFVGAGLNLNKNNERAAIIGGGDGGVARECVTKKFNFIDWYELDPEVVEACNKHLGNIANKATEKNSVKCVWGDAFKSIKSIEDDTYDHIFVDLNDDQFCINLAAKNMDSLVRILKPKGVITAQVGSQDKKPLQVENWLNVFNHHFGNTNLARVYIPSFDCSWNFSSSINH

SEQ ID NO: 119701 - protein, 310 aa, Unknown
  Bacterial polypetide isolated from the Sargasso Sea
MSKVGEHVTLDIIGTSKEYEPKFFEKLVYKIAKKAKVTVLEISKYKFEPQGFTLVALLAESHISFHTFPEKGIISFDFFTCGKVSPTVALDILKKEIKHKRIIKKEFNRDTVSYYDDIYSSPGLKKFYIVKNVLEDFTSKVGQHIEILDLEQFGKSLFIDNELQVAESDEHLYSSTFVNSGIKLNPAKDKSAIIGGGDGGVARECISQGFNLIDWYELDPEVVHVCEKHISKIGEKATAKNSVQCVWGDAFESIKKVEDNKYDKIFVDLNDDQYCIDLAAKNINSLKRILKPNGTITAQVGSQDKKPKQV

SEQ ID NO: 119702 - protein, 335 aa, Unknown
  Bacterial polypetide isolated from the Sargasso Sea
MKKVGEHVTIDFLGVKRDYAPDFYNKVIYKIAKKAKIEVLNIAEKVFKPQGYTCLALLAESHMSFHTFPEKGIISFDFFTCGKISPTAALDILKEEIKHERAVVRSFDRSNKGIYEDIYSTPGHKKYYVVSDVLENFVSKVGQHIEILKLEEFGSALFIDSELQVAERDEKKYSGQFVGSALNLSKNNSSAAIIGGGDGGVARELSSKGFDLIDWYELDPEVVKVCQKHLLKVCGDIKANNKVKTFWGDAFESIKKVKDSKYDKIFVDLNDDQFCINLAAKNMKGLKRILKPGGVITAQVGCMSKKPKQVKNWMELLRSNFGNVELSEVFIRSFD

SEQ ID NO: 119703 - protein, 346 aa, Unknown
  Bacterial polypetide isolated from the Sargasso Sea
MIKVGEHITLDIIGTTKEYDSSVYEKVIHKIAKAANVTILNISKYKFEPQGFTILALLAESHISFHTFPENGIISFDFFTCGKISPSVAIDIVKKEFEHKRIVKKEFNRDTRSLYHDIYSSPGLQKSYVVNEVLEDFKSKVGQHIEILELEQFGKSLFIDGEIQVAASDEHLYSSTFVGAGLNLNKKNERAAIIGGGDGGVARECISKKFNFIDWYELDPEVVEVCNKHLGDIGKKSTEKNSVKCVWGDAFESIKTVNEDTYDHIFVDLNDDQFCIDLAAKNMDSLVRILKPKGVITAQVGSQDKKPLQVENWLNVFNHHFGNTNLSRVYIPSFDCSWNFSSSINH

SEQ ID NO: 119704 - protein, 346 aa, Unknown
  Bacterial polypetide isolated from the Sargasso Sea
MIKVGEHITIDFLGVKKDYSPEFYEKVIYKIAKAAKVEILNVSSHRFEPQGFTLVALLAESHFSFHTFPEKNVISFDFFTCGKVNPKVALKILRKEIDHTRVVTHTFDRGSVGLYDDIYSTPGQKKFYVVKDVLEKFTSKVGQFVEIMDLEEFGHALFIDHEIQVAEKDEKIYSSNFFKSSNDLSKKNNNVAIIGGGDGGVARASLENNANYIDWFELDPEIVDVCYRHLPKVCSKVKKSNKVKTFWGDAFKSIKEIEDSKYDKIFVDLNDDQYCIDLARKNMKGLKRILKKGGVITAQVGSKDKKPKQVENWCKVLDKSFGNVKVSGAHIPSFDCNWNFASSIMK

SEQ ID NO: 119705 - protein, 346 aa, Unknown
  Bacterial polypetide isolated from the Sargasso Sea
MTKVGEHVTFDIIGTQKEYDPKFYEKLVYKIAKKAKVVVLEISKYKFEPQGFTLVALLAESHISFHTFPEKGIISFDFFTCGKISPSVALEVLKKEIKHTRIVKKEFNRDTVDYYDDIYSSPGLKKYYIVKNILEDFTSKVGQHIQILDLEQFGKALFIDNELQVAEKDEHLYSSTFVNSGLKLNSEKNNSAIIGGGDGGVARECINQGFNYLDWYELDPQVVDVCEKHLSKVGQKATKKNSVKCVWGDAFESIKKVEDNKYDKIFVDLNDDQYCIDLAAKNIKSLKRILKPNGTITAQVGSQDKKPKQVEKWLNLFKKSFGNSSLDRIYIPSFDCSWNFASSLNK

SEQ ID NO: 119706 - protein, 346 aa, Unknown
  Bacterial polypetide isolated from the Sargasso Sea
MTKVGEHITLDIIGTTKEYDPSVFEKVINEIAKAAKVTILNISKYKFEPQGFTILALLAESHISFHTFPEKGIISFDFFTCGKVSPSVAIDIIKKEFKHKRIVKKEFNRDTKSLYHDIYSSPGLQKSYVVNDVLEDFKSKVGQHIEILDLEQFGKSLFIDGEIQVAATDEHLYSSTFVGSGLNLNKDNERAAIIGGGDGGVARECISKNFNFIDWYELDPEVVDVCNKHLGDIGKKATEKNSVKCVWGDAFESIKTVGDDTYDHIFVDLNDDQFCIDLAAKNMDSLVRILKPKGVITAQVGSQDKKPQQVENWLNVFNQNFGNAKLARVYIPSFDCSWNFSSSINH

SEQ ID NO: 119707 - protein, 282 aa, Unknown
  Bacterial polypetide isolated from the Sargasso Sea
FHTFPEKGIISFDFFTCGKVNPSVAIDIIKKEFEHKRIVKKEFNRDTKSLYYDIYSSPGLQKSYVVNDVLEDFKSKVGQHIEILDLEQFGKSLFIDGEIQVASTDEHLYSSTFVGSGLDLNKDNERAAIIGGGDGGVARECISKNFNFIDWYELDPEVVDVCNKHLGDIGKKATEKNSVKCVWGDAFESIKSVGDDTYNHIFVDLNDDQLCIDLAAKNMDSLIRILKPKGVITAQVGSQDKKPHQVENWLNVFNQNFGNAKLSRVYVPSFDCSWNFSSSINH

SEQ ID NO: 119708 - protein, 271 aa, Unknown
  Bacterial polypetide isolated from the Sargasso Sea
FDFFTCGKVNPNVAFDILKKEIKHKRIVKKEFNRDTISYYDDIYSSPGLKKHYMVKDVLENFTSKVGQNIEILDLVQFGKSLFIDGELQVAENDEHLYSSTFVNSGLKLNPSNDKTAIIGGGDGGVARECISKGFKLIDWYELDPEVVTMCEKYLSKVGKKSTTKNHVQCVWGDAFESIKSVEDNKYDKIYVDLNDDQYCIDLAAKNIKSLKRILKPNGTITAQVGSQDKKPKQVDKWLNLFEKSFGNTSLDRVYIPSFDCSWNFASSLNK

SEQ ID NO: 119709 - protein, 283 aa, Unknown
  Bacterial polypetide isolated from the Sargasso Sea
SFHTFPEKGIISFDFFTCGKVNPIVALDILKKEINHKRIVKKEFNRDTVSLYDDIYSSPGLKKYYMVKNVLEDFTSKVGQHIEILDLEQFGKSLFIDNELQVAEKDEHLYSSTFVNSGLKLSQKKEKAAIIGGGDGGVARECISKNFSFIDWYELDPEVVEVCDKYLSKVGKKATSKNSVKCIWGDAFESIKKVEDNKYDKIFVDLNDDQYCIDLAARNINSLKRILKPSGTITAQVGSQDKKPKQVNNWLKLFDKSFGNTALDRVYIPSFDCSWNFATSINR

SEQ ID NO: 119710 - protein, 38 aa, Unknown
  Bacterial polypetide isolated from the Sargasso Sea
MGVINMTPDSFSDGGKYNKINLALKRAKYFIKKRLSNN

SEQ ID NO: 119711 - protein, 175 aa, Unknown
  Bacterial polypetide isolated from the Sargasso Sea
MIMGIINMTPDSFSDGGKFNSINSAIDYAYKLLDTGADILDIGGESSRPGADPVSNSEEIDRISPLIKELGKNANCLISVDTYKSSTAKFGLDNGATIINDISGLTYDSEMANVISNFNAAVVVMHMKGTPKTMQKNPNYFDLIKEIKSFFSKQIEFAIKNGINRKNIILDPGIG

SEQ ID NO: 119712 - protein, 254 aa, Unknown
  Bacterial polypetide isolated from the Sargasso Sea
MQIINKRNPWPKGWGQKTSIMGVINLTPDSFSDGGELNSSKKVLDQVNHFLSNGVDVIDLGAQSTRPGAEEVGTSVEIERLIPYLKLIKSEFPDVLISIDTFNSEVAYEALLNGANWINDVTGGRRDIKILDVASKFKCPFVITHSRGNSQNMNQLSNYQNVLSDVKCSLDNLIKNALEKNISERNIIVDPGIGFSKDINHNLEILRNLDEFKKWNLPILIGASRKRFIGEILNEKNQKERDIGTLAISCLCSQ

SEQ ID NO: 119713 - protein, 233 aa, Unknown
  Bacterial polypetide isolated from the Sargasso Sea
INKLINDGAKIIDVGGESTRPGSKEIKQLKEWNRIKNSMKYLKKNKFFVSVDTRKSLVMKKALNYKLDLVNDISGLSYDKDTIEFLKKTRLPFVLHHIKGTPNSMQIKPNYKNVLLDIYDYFEEKLKQIRKKGIKHNNIILDPGIGFGKNLKHNITLINKISIFHSLGLPIMLGVSRKRFIKDISGLNDSKERVGGTVASCIYSMSQGVQILRVHDVNEINQGIKVFKKLNYQ

SEQ ID NO: 119714 - protein, 188 aa, Unknown
  Bacterial polypetide isolated from the Sargasso Sea
MNKNFRNSSFRKWIKKTNRNTLIMGILNITPDSFSDGGKYLNKKTALIHATNLINSGADIIDVGGESSRPGALPITIDEEKNRVIPIISDLRKKNPEILISVDTCKSEVAKEAIEVGADIINDISGMKNDRKMSNVIQENKIPIVIMHMKGLPINMQKNISYNNFLDDILFFFKERLEYAKLYNIQKD

SEQ ID NO: 119715 - protein, 237 aa, Unknown
  Bacterial polypetide isolated from the Sargasso Sea
GINHAISLFNCGANLIDIGGESTRPGSKVIKENLEWQRIEKILKLLIKKKIPISLDTRKSRIMSKGIDLGVKLINDVSGLEFDTETLNILKKYKVPFVIQHSQGTPENMQKNPRYKNELLDIYDFFEKKIKLLRSKGIKHNKIILDPGIGFGKNLKHNMNLIRNISIFHSLGFPILVGNSRKRFIKELSGKNDSKFRNGGTIASSIYLMMQGVQILRIHDVNETIQGLKIFKNIINN

SEQ ID NO: 119716 - protein, 225 aa, Unknown
  Bacterial polypetide isolated from the Sargasso Sea
ADLIDIGGESTRPGSKGISERLEWNRINKILKLLTKKKIPLSLDTRKSNIMEKGINQGVRLINDVSGLDFDVNTISVLKKYKVPFVIQHAKGLPENMQKKPSYKNVLLDIYDFFEDKIKLLRSKGIKHNNIILDPGIGFGKNLKHNMSLIRNISIFHSLGFPILVGNSRKRFIKDLSGKNDSKSRIGGTIASSIYLMMQGVQILRIHDVNEVTQSLKIFKKIMNN

SEQ ID NO: 119717 - protein, 229 aa, Unknown
  Bacterial polypetide isolated from the Sargasso Sea
MGVLNVTPDSFSDGGKFWSFDKALEHARKMISLGADWLDIGGESSGPGSREISLDEELSRVMPLIEVLRRESEIWLSVDTWKSAVAAEAIDGGVDCVNDVTALRGDPKMASLISRQGCALVMMFSKDSSARTTKKMVHYDDVILTVRDFFIERLGYASEMKIPADAIMLDPGMGHFISSDPKYSFEIIRRFSEFSDLQKSMLIGPSRKSFLAKVSSGIELSPLERDFPC

SEQ ID NO: 119718 - protein, 265 aa, Unknown
  Bacterial polypetide isolated from the Sargasso Sea
MLFSDKELNFDIPKVMGIINLTPDSFSDGGRFISKKSLKVDRSKVLKEIEAMENSGASFIDIGAESTRPNSLRISAQEEMDRLMPILEEIKNIRAVVSIDSSKGEVIFEAIKKGVNLINDINSLEDKKSLELVKKYNLPVCIMHKKENLLKNPICLEIENFFYNKLKELSEKGISKEKIILDPGFGFKKTSMENLEIISKFDYTKFDNLSLIGISRKGFLKKITKDSNLDQTSITTGIISLLNGAKILRVHDVPSTVLAVEEVFG

SEQ ID NO: 119719 - protein, 246 aa, Unknown
  Bacterial polypetide isolated from the Sargasso Sea
MGGKFNKKNKAIKHAVHLFKSGSNLIDVGGESTRPGSKTINEDLEWNRINKILKLIGKKIPISLDTRKSSIMKKGIQLGVKLINDVSGLNFDNETINVLKKYKIPFVIQHSQGVPSTMQKKPSYKNELLDIYDFFEQKIKIIRSKGINHNNIILDPGIGFGKNLKHNMNLIHNISIFHSLGFPILVGNSRKSFIKELSGNNDSKLRIGGTMSSSVYLMMQGVQILRIHDVNEIIQGIKIFKKIINN

SEQ ID NO: 119720 - protein, 228 aa, Unknown
  Bacterial polypetide isolated from the Sargasso Sea
NDGAKIIDIGGESTRPGAKDISAKIEWNRLKSALQYLKKQNCFISLDTRKVLIMKKSLPYKINLINDVSGLTYDEDTINFLKKSKIPFILHHMKGTPKTMQIRPNYKNVLLDLYDFFEKKLSLIREMGIKHNNIILDPGIGFGKNLKHNITLISQISIFHSLGFPIMLGLSRKKFIKEISGVNDSKERIGGTVSSCIYSALQGVQILRVHDVNEVNQALKVFKKLIFN

SEQ ID NO: 119721 - protein, 44 aa, Unknown
  Bacterial polypetide isolated from the Sargasso Sea
MTPNHRTAVMGILNITPDSFSDGGRFESTETAFRAAKRMAAQGA

SEQ ID NO: 119722 - protein, 44 aa, Unknown
  Bacterial polypetide isolated from the Sargasso Sea
MNITPDSFSDGGKFYRRSSVMLEQVLAQGAAMIADGARILDVGG

SEQ ID NO: 119723 - protein, 138 aa, Unknown
  Bacterial polypetide isolated from the Sargasso Sea
MKKYYRPMIRTGKNNSENSFGLCNTSFWFDHLEVFQRGKSSYITPANKVPSEIVDNICDARKNRLLSKFPKPAIMGILNLTPDSFSDGGANSNAEVAINSAMSMTKSGANIIDIGAESTRPGSDPVEAEEEMNRLEPV

SEQ ID NO: 119724 - protein, 160 aa, Unknown
  Bacterial polypetide isolated from the Sargasso Sea
GGADMEVRVHDVRRTGSVAMFDGAESDIEHIAVNPALPHFFVSSSRDGVARIYDMRRSGSGPVVHAGKNIHGINQAAFSLDGRWLYVALQKKDWSIFDGYTGQLVQEVRGHADVVTSIAVSGNGAVCTGSKDNSVLLWDLSLPSYHTKTLRASKVEPDDL

SEQ ID NO: 119725 - protein, 226 aa, Unknown
  Bacterial polypetide isolated from the Sargasso Sea
FKWCHLVDIGGESTRPGSKAVKSKIEWNRIKKVLKKIDKKKMISLDTRKSEIMKKGINLGVKLINDVSGLNYDKNSINILKQYKIPFVLQHSLRNPNTMQNNPRYTNVLLDIYDFFEEKIKFLRSIGINHNKIILDPGIGFGKNLKHNMTIIKNISIYHSLGFPILLGISRKRFIKEISLDNDSSLRSGGTISSSIFAMMQGVQILRVHDVNEVIQSIKVFKKLVS

SEQ ID NO: 119726 - protein, 174 aa, Unknown
  Bacterial polypetide isolated from the Sargasso Sea
MQIINKKNPWPKGWGQKTSIMGVINLTPDSFSDGGELNSSKKVIDQVDHFLNNGVDVIDLGAQSTRPGAEEVGSSIEIKRLIPYLKLIKSEFPDVLISIDTFNSEVAYEALLNGANWINDVTGGRRDIKILDVVSKFNCPFVITHSRGNSQNMNQLSNYQNVLSDVRCSLDNLI

SEQ ID NO: 119727 - protein, 48 aa, Unknown
  Bacterial polypetide isolated from the Sargasso Sea
MSILNITPDSFSDGGTFYTGKHRLDRVLKYAEGSISAGSSILDVGGES

SEQ ID NO: 119728 - protein, 42 aa, Unknown
  Bacterial polypetide isolated from the Sargasso Sea
MGIVNMTPDSFSDGGKFNSYEKAISRIDNLKNSGADIIDIGG

SEQ ID NO: 119729 - protein, 164 aa, Unknown
  Bacterial polypetide isolated from the Sargasso Sea
MGILNLTPDSFSDGGKFDKIISAKKQIDKLIKDGAKIIDVGGESSKPGSLEIKKSKEWNRIKNTMKYLKSKKFFVSLDTRKSFIMKKAFNYKLDLINDVSGLNHDKHTIDFLKKTKLPFVLHHMRGTPKTMQIKPSYKNVLLDIYEYFEAKLKEIRNMGIKHNN

SEQ ID NO: 119730 - protein, 181 aa, Unknown
  Bacterial polypetide isolated from the Sargasso Sea
TTKSMVAQKAIQSGANIINDISGFSYDNKMIDVVQESKVPIIIMHMQGNPLNMQNNPVYDDLITDISSFFKSKIKLAIDAGIKKKQIILDPGIGFGKTVGDNFQLINQLNEFCKLGFPVMIGPSRKSFIGTTLNLPVDDRLEGTAAAVAVGVMNGARIVRVHDVKEIKRVVKIVEKIRTAA

SEQ ID NO: 119731 - protein, 136 aa, Unknown
  Bacterial polypetide isolated from the Sargasso Sea
MGQYYTRPCNFYFGKNSINKIYEGKALPLHANKLISFSSLEILNRKKSKIIGINDVKFLSEKLKHKIKKDLKNITKNKKFKNLKFSISPVLMGIINLTPDSFSDGGKYNKKKLSITRKKNLIKSGSTILDIGGEST

SEQ ID NO: 119732 - protein, 102 aa, Unknown
  Bacterial polypetide isolated from the Sargasso Sea
MKEYFRPILRSDSVKPKKAFYLAGQNLWFDQIEVLSRKKKPRIISVTNVSELVISILVKRRVCSIFNNFERPLVMGILNLTPDSFSDGGTYFRPQSAFMAIK

SEQ ID NO: 119733 - protein, 58 aa, Unknown
  Bacterial polypetide isolated from the Sargasso Sea
MQIINKKNPWPKGWGQKTSIMGVINLTPDSFSDGGELNSSKKVLDQVNHFLRNGVDVI

SEQ ID NO: 119734 - protein, 237 aa, Unknown
  Bacterial polypetide isolated from the Sargasso Sea
GGKYNKKKAGLIQARKLFHDGCKILDIGGESTRPGSNDINPIKEWERIAPTLFQIKKMKKIISLDTRKSLVMKNGIKNKVNIINDVSGFQYDQNTIKVLRESNTPFVIHHMQGNPKTMQKKPKYKNVILDIYDFFEHKIKYVRSKGIKHNNIILDPGIGFGKNLKHNITLLRNISIFHSLGFPVMLGTSRKRFIKDLSGVNDSKERLGGTISSSLFAMMHGIQILRVHDVNEVKQSI

SEQ ID NO: 119735 - protein, 246 aa, Unknown
  Bacterial polypetide isolated from the Sargasso Sea
DGGKYNKKNLALKHVNNLLSNGAKIIDVGGESTRPGAKDINPRKEWDRVKFILKILKNKKSFVSLDTRKSFVMKNASKIKVDLINDVSGLSYDPETINYLKKTKKPFVIHHMKGTPKSMQLKPSYNNVLLDIYDFFENKLKYLRNEGIKHNNIILDPGIGFGKNLKHNITLLKNISIFHSLGLPVMLGLSRKRFIKDISRENDTKERIGGTVSSCIQAYLQGVQILRVHDIKEINQAFKVFKELQN

SEQ ID NO: 119736 - protein, 43 aa, Unknown
  Bacterial polypetide isolated from the Sargasso Sea
MGILNLTPDSFSDGGKYNKKKAALIQAKKLFNDGCKILDIGGE

SEQ ID NO: 119737 - protein, 227 aa, Unknown
  Bacterial polypetide isolated from the Sargasso Sea
SGSTILDIGGESTRPGSHEVNEMVEWKRIEGFLKNRKKFNSLISLDTRKKNIMEKAFKYKIDIINDVSGMTYNTDTTNFLKKTKIPFIIHHMQGTPKTMQKNPKYKNVVLDIYDFFDKKINEIRAMGIKHNNIILDPGIGFGKNLKHNITILNQVSIFHSLGFPIMLGISRKRFIKDLAGNNDSKERIGGTVSSSIWAMTQGIQILRIHDVNEVNQAIKIFKSLHFI

SEQ ID NO: 119738 - protein, 244 aa, Unknown
  Bacterial polypetide isolated from the Sargasso Sea
KFNKKDKSFKQISKMINSGAKIIDVGGESTRPGSKSIDTITEWKRVKEVIKSFKKKNKRICLSLDTRKSDLMMKGIRYGVDLINDVSGFKYDKDSLNKIKQHKSVTKVVHHMKGTPNTMQINPKYNNVLLDIYDFFQKKINNKIIGKKIILDPGIGFGKTLKHNLSLISNISLFHSLGFPIMIGTSRKRFINQISGKNDSEDRTGGTIASVLYLLSQGVQIFRVHNVNEVKQGILVFGKILNNR

SEQ ID NO: 119739 - protein, 117 aa, Unknown
  Bacterial polypetide isolated from the Sargasso Sea
MISSINIFGILNITPDSFSDGGAYIDDKKAFKHVERMIKNGAQGIDVGAESSRPGSERISIKEEIKRLKPVITTFKKYFDVTLSVDTTKSQVAEFALNYGADIINDISACRDDINMA

SEQ ID NO: 119740 - protein, 199 aa, Unknown
  Bacterial polypetide isolated from the Sargasso Sea
MQIINKKNPWPKGWGQKTSIMGVINLTPDSFSDGGELDSTKKVIDQVDHFLSNGVDVIDLGAQSTRPGAEEVGSSKEIKRLIPYLKLIKSEFPDVLISIDTFNSEVAYEALLNGANWINDVTGGRRDIKILDVVSKFNCPFVITHSRGNSQNMNQLSNYQNVLSDVKCSLDNLIKNALEKNISERNIIVDPGNGFSKNI

SEQ ID NO: 119741 - protein, 236 aa, Unknown
  Bacterial polypetide isolated from the Sargasso Sea
NKSINHITDMIKSGANIIDVGGESTRPGSKNIDPIVEWKRVKYVIEKFKKKYKKTCLSIDTRKSYLMTKGVKRGVDLINDVSGFSHDRDALRKLKKYNVAKVLHHMQGTPNTMQKNPKYKNVLLDIYDFFEKSLKKFDNKKIILDPGIGFGKNLKHNLTLISKISLFHSLGFPILIGTSRKRFINQISGNFDSKDRTGGTIASVLFLLSQGVQIFRVHNVKEVKQGILVFKEILSN

SEQ ID NO: 119742 - protein, 187 aa, Unknown
  Bacterial polypetide isolated from the Sargasso Sea
MQIINKKNPWPKGWGQKTSIMGVINLTPDSFSDGGELNSSKKVLDQVNHFLRNGVDVIDLGAQSTRPGAEEVGSSIEIKRLIPYLKLIKSEFPDVLTSIDTFNSEVAYEALLNGANWINDVTGGRRDKKILDVVSKFNCPLVITHSRGNSQNMNQLSNYQNVLSDVKCSLDNLIKNALEKNIPERNI

SEQ ID NO: 119743 - protein, 263 aa, Unknown
  Bacterial polypetide isolated from the Sargasso Sea
RCRLMGILNVTPDSFHADSRVELDSAVERAMEMWSDGADWVDIGGESTRPGADPVNLQEEIARVIPVIRAIRKANPTGLISIDTRRFEVARAALEAGANMINDVSGLRDPEMADLVLEQGCAVCVMHMQGEPGNMQQNPQYEDVHKEVYETLNETAAALVEGGHNPGLICLDPGIGFGKTLTHNLELLHSRSDSDYSILWGVSRKSMFGQLLGRTGTDERLSGTLAVAAHAMLEGVDILRIHDVRAHADLLTTLATLRPEVDA

SEQ ID NO: 119744 - protein, 33 aa, Unknown
  Bacterial polypetide isolated from the Sargasso Sea
MGILNVTPDSFSDGGRFTDINIAVDHTLKMIDD

SEQ ID NO: 119745 - protein, 252 aa, Unknown
  Bacterial polypetide isolated from the Sargasso Sea
TPDSFSDGGKFNNIFSARKQIDKLIIDGAKIIDVGGESSRPGSKEILKTEEWLRVHKVMNYLKSKSFFVSLDTRKSFVMKKASKYKLNLINDISGLSHDKETINFLKKTKLPFVLHHMKGNTETMQKNPSYNNVLLDIYDYFVDKLRLIRKSGIKHDHIILDPGLGFGKNMKHNITLINNVSIFHSLGLPVMLGISRKRFIKDISGNNDSKERIGGTVSSSIFSMLQGVQILRVHDVNEVNQGIKVFKKLNF

SEQ ID NO: 119746 - protein, 261 aa, Unknown
  Bacterial polypetide isolated from the Sargasso Sea
MGVINLTPDSFSDGGDLDSSKKVLDQVNHFLRNGVDVIDLGAQSTRPGAKEVGPSIEIKRLIPYLKLIKSEYPEVLISIDTFNSDVAYEALLNGANWINDVTGGRRDINILDVVSKFNCPFVITHSRGNSQNMNQLSNYKNVLSDVKCSLDNLIKSALEKNISERNIIVDPGIGFSKDIIHNLEILRNLDVFKKWNLPILIGASRKRFIGEILHEKNPKERDIGTLAISCLCSQFNIDIVRVHNVKLNYQILKVADRIYRK

SEQ ID NO: 119747 - protein, 243 aa, Unknown
  Bacterial polypetide isolated from the Sargasso Sea
KFNKKNKGVSHAINLYKNGASLVDVGGESTRPGSKEVNEKLEWYRINKILKLIVKKIPISLDTRKSRIMENGIRMGVKLINDVSGLSYDFKTVNVLKKYKIPFVIQHSVGTPENMQKNPTYKNELLDIYDYFEEKIKLIRSKGIKHNNIILDPGIGFGKNLKHNMNLIRDVSIFHSLGFPILVGNSRKRFIKDISKKNDSKTRIGGTMASSIYLMMQGIQILRIHDVNEVMQGIKVFNQIIKN

SEQ ID NO: 119748 - protein, 63 aa, Unknown
  Bacterial polypetide isolated from the Sargasso Sea
MNIKQFNDWLSNDKKQSLIMGILNVTPDSFSDGGQYFDKNVAVEHALAMIRNGANIIDIGGES

SEQ ID NO: 119749 - protein, 202 aa, Unknown
  Bacterial polypetide isolated from the Sargasso Sea
IKHFIKKGSSIIDIGGESTRPGSNDVNEKIEWKRIKEVLKKIKKLKNVISIDTRKSTIMEKSLKYGAHIINDVSGLNYDPNTLKILRNKKTPFIIHHMQGNPKTMQIKPSYKNVLLDIYDFFQNKILELEANGINHKNIILDPGIGFGKRLKHNITLLRNISIFHSLGFPIMLGTSRKRFIKDISGINDSKERLRGTISSSL

SEQ ID NO: 119750 - protein, 188 aa, Unknown
  Bacterial polypetide isolated from the Sargasso Sea
MAVKFAGFNLDSPLIMGIVNLTPDSFSDGGETFKTSDAISRAIKYIDSGANIIDVGGQSTKPHSQPISVRQELERILPVVKWLVREGVSVSVDTYKAEVMEAVLDEGVKIINDVSALTADKRSLEVVASAKASVVLMHMRGNPHNMMANTNYKDVVCEVWEYLDNRIKVCVNAGIDLDCIAVDPRYWF

SEQ ID NO: 119751 - protein, 85 aa, Unknown
  Bacterial polypetide isolated from the Sargasso Sea
MQIINKKNPWPKGWGQKTSIMGVINLTPDSFSDGGDLNSSKKVLDQVNQFFCNGVDIVDLGAQSTRPGAEEVGSNKEIKRLIPYL

SEQ ID NO: 119752 - protein, 210 aa, Unknown
  Bacterial polypetide isolated from the Sargasso Sea
MGVLNLTPDSFSDGGKFNKKDKAIQQAINLFKSGANLIDIGGESIRPGSKPINEKLEWNRINKILKLLSKKIPISLDTRKSNIMKKGIKLGVKLINDVSGLEYDPKTANVFKLNNIPFVLQHSQGHPEDMQNNPSYQNELVDIYDFFVKKLKFLRSIGINHNKIIIDPGIGFGKNLKHNMNLIRNISIFHSLGFPILVGNSRKKFIKDIS

SEQ ID NO: 119753 - protein, 243 aa, Unknown
  Bacterial polypetide isolated from the Sargasso Sea
VKKVSAIKQINKLIFDGAKIIDVGGESTRPGSKEILQTEEWLRVNKIMDYLKSKKIFVSLDTRKSFVMKKSLKYKLDLINDVSGLSYDEETINFLKKSQLPFVLHHMKGTTENMQNNPSYRNVLLDIYDFFEDKLKIIRDRGIKHNHIILDPGIGFGKNMKHNITLINNVSIFHSLGLPVMLGISRKRFIKDISGQNDSEQRIGGTVSSSIFSMLQGVQILRVHDVNEVKQGIKVFKKLNCNL

SEQ ID NO: 119754 - protein, 234 aa, Unknown
  Bacterial polypetide isolated from the Sargasso Sea
SHAINLFKTGASLVDVGGESTRPGSREVNENREWYRINKTLKLIVKKIPISLDTRKSAIMENGIRMGVKLINDVSGLSYDPKTINVLKKYKIPFVIQHSVGTPENMQKKAKYKNELLDIYDYFEDKIKLIRSKGIKHNNIILDPGIGFGKNLKHNMNLIRGVSIFHSLGFPILVGNSRKRFIKDISKKNDSKTRIGGTMASSIYLLMQGIQILRIHDVNEVKQGIKVFNEIVKN

SEQ ID NO: 119755 - protein, 73 aa, Unknown
  Bacterial polypetide isolated from the Sargasso Sea
MGILNITPDSFSDGGKFFNYASAKKQLNFLLNSGANLVDIGAESTKPGSKAVKSKIEWNRLKNILRLIDKKNF

SEQ ID NO: 119756 - protein, 247 aa, Unknown
  Bacterial polypetide isolated from the Sargasso Sea
SDGGKFNRKNRSLKHISEMIKSGATIIDIGGESTRPGSKTVNSKDEWNRIQYVLKNFKKKFKKTTLSLDTRKSILMLKGIELGVDIINDVSGFKYDSNSISLLKKYQVSKVLHHMQGTPTTMQTNPHYSNVLLDIYDFFEKNINRNFKDKKIILDPGIGFGKTLKHNLTLISKISLFHSLGFPIMIGTSRKKFISQISNKFDSKDRTGGTIASVLYLLSQGVQIFRVHNVQEVKQGVLVFNRILMNK

SEQ ID NO: 119757 - protein, 102 aa, Unknown
  Bacterial polypetide isolated from the Sargasso Sea
MKLGKYNFKLTSPTVMGICNVTPDSFSDGGKSFKSSDALKNINEMIKNGASIIDIGAESTRPGSDPLTHKEEVKRLEPILKKLPKNKFVISVDTNKIETQEY

SEQ ID NO: 119758 - protein, 203 aa, Unknown
  Bacterial polypetide isolated from the Sargasso Sea
MKLGKYNFKLNSPVVMGICNVTPDSFSDGGQSFKKKDALNNINKMFNNGAQIIDIGAESAKPGSDPLSYKEEIKRLDPILKKLPKNKFVISVDSYKIETQEFALNNGAHVINDIFGGSQDLFDLTKKFKTGLILMHTPAPPKTMQSMVNSYSNVVSDIKKIFKQTIKKLEKSKIPPSKVWFDPGIGFGKNLKQNIEIMQKINQ

SEQ ID NO: 119759 - protein, 239 aa, Unknown
  Bacterial polypetide isolated from the Sargasso Sea
RNKGIKHAFEMIKDGANLIDIGGESTRPGSKTINSKKEWSRIYKILRSVCKKIPVSLDTRKSEIMEKGIKLGIKIINDVSGLNYDKRTLDILRKYQIPFVIQHSKGTPENMQIKPTYKNELLDIYDFFEKKIKTLRSIGIKHNNIILDPGIGFGKNLKHNMNLISKISIFHSLGFPILVGNSRKRFIKEIAKKNDSRNRIGGTVASSIYLMMQGVQILRIHDVNELIQGVKVFKELLKN

SEQ ID NO: 119760 - protein, 233 aa, Unknown
  Bacterial polypetide isolated from the Sargasso Sea
INKLIDDGAMIIDVGGESTRPGSKGVSQTEEWLRVNKVMSYLKSKKFFVSLDTRKSFVMKKASKYKLDLINDISGLSYDKETINFLKKSKLPFVLHHMKGDTKTMQRNPDYNNVLLDIYDFFEDRLKLIRKSGIKHNHIILDPGIGFGKNVKHNITLINNVSIFHSLGLPVMLGISRKRFIKDISGNNDSKERLGGTVSSSIFSMLQGVQILRVHDVNEVKQGIKVFKKLNFN

SEQ ID NO: 119761 - protein, 236 aa, Unknown
  Bacterial polypetide isolated from the Sargasso Sea
KKAFKQISYLISSGADIIDVGGESTRPGSKTIDTKIEWKRVKEIIKKFKKNYPKTCLSIDTRKSDIMIKCIRYGVDLINDVSGFQHDENSLQIIKKYKISKVLHHMQGNPKTMQKNPKYSNVLLDIYDFFEEKINKRIKEKNIILDPGIGFGKTLKHNLTLISKISLFHSLGLPILVGTSRKRFINQISKNFDSKERIGGTVASVLYLLLQGIQIFRVHDVREVKQGILIFKKIIS

SEQ ID NO: 119762 - protein, 87 aa, Unknown
  Bacterial polypetide isolated from the Sargasso Sea
MQIINNNNPWPKGWGQKTSIMGVINLTPDSFSDGGELNSSKKVLDQVNHFLHHGVDVIDLGAQSTRPGAQEVGSSIEIKRLIPYLKL

SEQ ID NO: 119763 - protein, 115 aa, Unknown
  Bacterial polypetide isolated from the Sargasso Sea
MKLGKNNFKLYSPIVMGICNVTPDSFSDGGKSFKQKDALKNIKNMLKEGAQIIDIGAESARPGSDPLSYKEEIKRLDPILKKLPKNKFIISIDSYKIETQEYALNNGVHIINDIF

SEQ ID NO: 119764 - protein, 112 aa, Unknown
  Bacterial polypetide isolated from the Sargasso Sea
MNSYFRPIVRTGSPRSKNSIFLAETNYWISEAEEIKFGEPTKLTSINDVPEWWKKRWLKKRSDILGMEFGFPKLMGILNVTPDSFSDGGQHVKLEAALNQAKFMEENGVDIS

SEQ ID NO: 119765 - protein, 179 aa, Unknown
  Bacterial polypetide isolated from the Sargasso Sea
KSIVAQKAIQSGANIINDISGFSFDNKMIDVVRESKVPVIIMHMQGDPSNMQNNPVYDDLIIDISSFFESKINLAIEAGIKKEQIILDPGIGFGKTVGDNFQLINQLNEFCKLGFPVMIGPSRKSFIGTTLNLPVDDRLEGTAATVAVGVMNGARIVRVHDVKEIKRVVTIVEKIRTAA

SEQ ID NO: 119766 - protein, 222 aa, Unknown
  Bacterial polypetide isolated from the Sargasso Sea
MKTLCSFATLLKKNKPLIMGILNTTPDSFSDGGKFTTLDFSSAHALQMINEGADLIDIGGQSTRPGAVEISAEEEIRRILPVIKYLRKKAPERILSVDTSKAEVAEIALKEGVAVINDVSGGQGKALLEVVSKYDAGLIIMHKKGSPESMQLNPSYKDVVGEIKAYLTHMCDLAYSAGVSKDKLVVDPGIGFGKLLEHNMAILNALTEFSEIGYPVMIGTSR

SEQ ID NO: 119767 - protein, 245 aa, Unknown
  Bacterial polypetide isolated from the Sargasso Sea
MRLISKKRVLDLDRPKLMGVLNVTPDSFSDGGKYWSFDKALEHARKMISLGADWLDMGGESSGPGSREISLDEELSRVMPLIEALRKESEIWLSVDTWKSVVAAEALDGGVDCVNDVTALRGDPKMASLISRQGCALVMMFSKDSSARTTQKNVRYDDVILSIRDFFIERLSYASEMKIPADAIMLDPGMGHFISSDPKYSFEIVRRFSEFSDLKQSMLIGPSRKSFLAKVSSEIELSPLERDFP

SEQ ID NO: 119768 - protein, 220 aa, Unknown
  Bacterial polypetide isolated from the Sargasso Sea
MARYYTRACNFYYGKISKNLVKNKKSLPLNGNKEISFDQIELISRNSKKKIKLTKLVNLPKILKKQVTQDLKHIISKKKNFANLNFNKSPNIMGVLNLTPDSFSDGGKFNSKTKGIKQAFKMFESGASIIDVGGESTKPGSKGINTKLEWNRINEILRSICKKIPISLDTRKSEIMQKGIKLGVKIINDVSGLNYDPKAINILNKYKIPFVLQHSQGTPD

SEQ ID NO: 119769 - protein, 115 aa, Unknown
  Bacterial polypetide isolated from the Sargasso Sea
MPRYYTRVCNLYYGKHSKKLVSKKKTIPLNHIKEISFDQIEILTRRSKRRVLINQVKNLSKSLKKKINLDLKKIKSKKNNFSNFNFKRFPNLLGVLNLTPDSFSDGGKFNTKKRG

SEQ ID NO: 119770 - protein, 121 aa, Unknown
  Bacterial polypetide isolated from the Sargasso Sea
MIKYYTRACNFKYGSIARKLINNKKALPLCGSKNISFDEIEIITRGKKKIHSRIINYKKVNKLSTFLKNKIKKDLKNITSKRKQFLKHVNLAEPSIMGILNLTPDSFSDGGKFNKNNKSLK

SEQ ID NO: 119771 - protein, 275 aa, Unknown
  Bacterial polypetide isolated from the Sargasso Sea
MAILNITPDSFSDGGLHLQPQQACRAARRMATQGADLLDIGAQSTRPGAVDVGPVEELRRLLPVLEQLVSARRDGDLPSGLLLSIDTFLAPVAAAALDAGADWINDVSGGLGDAAMLPLIAERNCPYVLMHRRGDARTMNDLASYSAVSTEVEQELMERTDAALKAGVSADQILWDPGLGFAKTTEHNLTLLEALPQLAAHGFPLLVGPSRKRFIGDVLNEPRPKARVWGTAASVCRAIAGGARVIRVHDVGPISQTCQMADALWPRREPLSPIA

SEQ ID NO: 119772 - protein, 282 aa, Unknown
  Bacterial polypetide isolated from the Sargasso Sea
MQIINRENPWPKGWGQKTSIMGVINLTPDSFSDGGELNSSKKVLDQLNYFLRNGVDVIDLGAQSTRPGAEEVGSSIEIKRLIPYLKLIKSEFPDVLISIDTFNSEVAYEALLNGANWINDVTGGRRDIKILDVVSKFNCPFVITHSRGNSQNMNQLSNYQNVLSDVKCSLDNLIKNALEKNISERNIIVDPGIGFSKDIFHNLEILRNLDVFKKWNLPILIGASRKRFIGEILNEENPKERDIGTLAISCLCSQFNIDIVRVHNVKLNYQVLKVADRIYRKK

SEQ ID NO: 119773 - protein, 150 aa, Unknown
  Bacterial polypetide isolated from the Sargasso Sea
MEKYYTRACNFYYGDQSVKKVRHKTALPLNNNKFISFDTVEIITRNYKKKIHLKDINLQSRNLKKKIKSDLKLIVKKKYFKKLNLENPPLLMGIINLTPDSFSDGGKYNKKNKGFIYAKNLIKNGCNILDIGGESSRPGSFEVKKNIRMK

SEQ ID NO: 119774 - protein, 138 aa, Unknown
  Bacterial polypetide isolated from the Sargasso Sea
MRKYYTRPCNFYYGSYAKHLVKIKKALPLAGRTNISFDQLEIFERKKGKKTKSYFYSINEIKKLNKNLKNIVSKDLKKITRKRNNILKIKFNNPHIMGVLNITPDSFSDGGLFFDDRKAYQQAESMINAGASIIDMEA

SEQ ID NO: 119775 - protein, 266 aa, Unknown
  Bacterial polypetide isolated from the Sargasso Sea
MSLVRIISKKRVLDLDRPKLMGVLNVTPDSFSDGGKFWSFDKALEHARKMISLGADWLDIGGESSGPGSREISLDEELSRVMPLIEVLRGESEIWLSVDTWKSAVAAEAIDGGVDCVNDVTALRGDPNMASLISRQGSAVVMMFSKDSSARTTQKMIHYDDVILTIRDFFIERLGYASEMKIPADAIMLDPGMGHFISSDPKYSFEIIRRFSEFSDLKQSMLIGPSRKSFLAKVSSGIELSPLERDFPCAAVCSIGVWNGAKVLRM

SEQ ID NO: 119776 - protein, 292 aa, Unknown
  Bacterial polypetide isolated from the Sargasso Sea
LKDGLWRWGRQMMVMGILNVTPDSFSDGGSYVDVNVALNHAREMVAAGATIIDVGGQSTRPGATRVSPEEESARVIPVISALAKEWRHRDDAYISVDTFYGSVASAAADAGVDIINDVSGGSWDPAMLPTVADMKKPLPYVVMHVRGDPSNMQDASNTTYEGHVCDEVGDGLLRTARRCIQHGIEPWRLWIDPGIGFAKTSRANVEILRDLPRVRSRLAPLGGAVMNAPMLVGASRKRFLGELSGKSEAGERDAASVAALVAAVHGGADVIRVHNVVDSASAAAVSDALWRM

SEQ ID NO: 119777 - protein, 243 aa, Unknown
  Bacterial polypetide isolated from the Sargasso Sea
KFIKFKSAERQINNLIKSGAKIIDIGGESTRPGAKEISVSDEWKRISKKLRLIKKKKAIFSLDTRKSQVMEKSLNYGINIINDVSGLEYDKKTINFLKKTKVPFVIHHMKGSPKTMQNSPKYKNVLLDIYDYFEAKIKYLRSIGIKHNNIILDPGIGFGKNLKHNITLIKKISVFHTLGFPILLGLSRKRFIKDISNENDSKDRIGGTVSSCIFSMLQGVQILRVHDVNEVNQSIKVYKKLNF

SEQ ID NO: 119778 - protein, 180 aa, Unknown
  Bacterial polypetide isolated from the Sargasso Sea
MKLGKCSFKLNSPIVMGICNVTPDSFSDGGQSFKKKDALNNINMMLKNGAQIIDIGAESARPGSDPLSYKEEIKRLHPILKKLPKNKFVISIDSYKIETQEFALNNGAHIINDIFGGSQDLFDLTKKFKTGLILMHTPAPPKTMQSMVNSYSNVVSDIKKIFKQTIKKLEKSKISPSKVW

SEQ ID NO: 119779 - protein, 238 aa, Unknown
  Bacterial polypetide isolated from the Sargasso Sea
MTHGKKLIADGCQILDIGGESTRPGSKTVEPNKEWKRIFSTLSQIKKIKKMKKIISLDTRKSSVMRKGINNNVNLINDVSGLQYDPNTIIVLKKTNIPFVINHTQDNPTTMQKNPKYKNVVLDIYDFFDEKIKYIRSKGIKHNNIILDPGIGFGKNLKHNITLMRNISIFHSLGFPVMLGASRKRFIRDLSGVNDSKERLGGTISSSLYAMMQGVQILRVHDVNEVNQSIKIFNSLKF

SEQ ID NO: 119780 - protein, 42 aa, Unknown
  Bacterial polypetide isolated from the Sargasso Sea
MQIINKKNPWPKGWGQKTSIMGVINLTPDSFSDGGELNSSKK

SEQ ID NO: 119781 - protein, 257 aa, Unknown
  Bacterial polypetide isolated from the Sargasso Sea
MGICNVTPDSFSDGGKSFKSSDALKNIKEMVKNGASIIDIGAESTRPGSDPLTHKEEVKRLEPILKKLPKNKFVISVDTNKIETQEYALNMGAHIINDVFGGSEDLFFLTKKFKTGLILMHTPAPPKTMQKKIHSYNNVVQDIKKIFLQKIKQLEKIKIPSSKVWFDPGIGFGKNLKQNIEIMQKINQFKFKGYGLLLGSSRKSWINFIDKSETNQRLGGSIASALYCYQKGVDIFRVHDIKETSQSLKIFEKLCSK

SEQ ID NO: 119782 - protein, 208 aa, Unknown
  Bacterial polypetide isolated from the Sargasso Sea
TIDPLIEWNRVKYVIKNFNKKFKKICLSIDTRKSDLMIKGIKNGVDIINDVSGFEYDKNALDQIKKHKISKVFHHMQGTPNTMQINPKYKNVLLDIYDFFERSISKDLKDKKIILDPGIGFGKNLKHNLTLISNISLFHSLGFPILVGTSRKRFINQISGKYDTKERIGGTLASVLFLLSQGVQIFRVHNVNEVKQGIMIFEKILSGK

SEQ ID NO: 119783 - protein, 160 aa, Unknown
  Bacterial polypetide isolated from the Sargasso Sea
MQIINKKNPWPKGWGQKTSIMGVINLTPDSFSDGGELNSSRKVIDQVDYFLSNGVDVIDLGAQSTRPGAEEVGSSKEIKRLIPYLKLIKSEFPDVLISIDTFNSEVAYEALLNGANWINDVTGGRRDIKILDVVSKFNCPFVITHSRGNSQNMNQLSNYQ

SEQ ID NO: 119784 - protein, 132 aa, Unknown
  Bacterial polypetide isolated from the Sargasso Sea
MIMGIVNITPDSFSDGGKYYTLESAYNHSLKLIDDGADIIDVGGESSRPGALPITLKEELDRTIPLITKIHNNFPNTIISIDTTKSEVAEEAILSGANIINDISGLTNDNRMVRVVSKYNTPSSYYAYERKS

SEQ ID NO: 119785 - protein, 275 aa, Unknown
  Bacterial polypetide isolated from the Sargasso Sea
MNKLSLNTKSLLIMGIINATPDSFSGDGIFKNNKFSLEKELDNMLKQSVDIIDVGGESTRPPSVYENVKEVTENEELDRVLPIIEFIKKNFPLYISIDTKKPLVAKEAVKLGVSIVNDISMFEDESILESICENNIFYVLNHFRKNKNHKNIIPEIIDDLSSKIDSILEKGFKRENIILDPGIGFGKKFDQSKDALSNIDIIKRSFNLPIMIGPSRKSFIGYYTDKEVDDRIFGTAASVAYGIMNGANIIRVHDYSEMNDIKKMINVLEESRFSS

SEQ ID NO: 119786 - protein, 176 aa, Unknown
  Bacterial polypetide isolated from the Sargasso Sea
MRITKPLDSGVWPQGWRQRTTVMGVINITPDSFSDGGRFLASERALAEAQRQLNNGADVLDLGAQSTRPGAEEVGEEEELRRLLPALKAIRERCPDALISVDTFLAPVAARALEAGASWINDVSGGRRDPDLLRVVADAGCPVVLMHSRGNSQSMDQLTNYSDVVADVKKGFSGAQ

SEQ ID NO: 119787 - protein, 115 aa, Unknown
  Bacterial polypetide isolated from the Sargasso Sea
MKKYYTRACNFYYGSTSKEKIKKKLSLPLNGNSLISFDTLEIITRKSKKKIHISEIKNQSFNIKKKIKNDIKLITKKKKFKGLSFLNFPILMGVINLTPDSFSDGGKYNKKNFRI

SEQ ID NO: 119788 - protein, 113 aa, Unknown
  Bacterial polypetide isolated from the Sargasso Sea
MRKYYTRACNFYHGSEATRLIQKKKALPLNGKNNIAFDSIEIFSREKRGVKVNLININKVSRLNKNIRKIVNEDLIKIASKRKDFLKHINFQSPSIMGILNLTPDSFSDGGKF

SEQ ID NO: 119789 - protein, 113 aa, Unknown
  Bacterial polypetide isolated from the Sargasso Sea
MPRYYTRACNFYFGNHSKILVNKKKSIPLHQIKEISFDHLEIITRKKIRRISINQVKKLPNNLKKKINADIKKINSKKKNFSNFNFKKIPNILGVLNLTPDSFSDGGKFNKKK

SEQ ID NO: 119790 - protein, 90 aa, Unknown
  Bacterial polypetide isolated from the Sargasso Sea
MNHIDKNKPTIMGILNVTPDSFSDGGSYPSSSDAVNRAMIMIEQGAKIIDIGGESTRPGSERVSALEQIKRISDVISQVCKEKPSDIIVS

SEQ ID NO: 119791 - protein, 257 aa, Unknown
  Bacterial polypetide isolated from the Sargasso Sea
GILNLTPDSFSDGGQFVDLDRAQEHFHKMISEGASIIDIGGESTRPGHMPISVEEEIKRVLPFIEKIRGETDCLISVDTSKSEVAEVCLKAGADIINDIWGGQGDPAMATTIAKYDAACILMHNSEQGISDKGQLVEHIKDYLKQSLDIALKAGVRAESICFDPGLGFGKSFEDNWEIMRNLDAFNAFEKPILLGASRKSMIAKLLNLEDPKDRLSGTLATTALAAIHDVDFVRVHDVLENSHCLKVINHCTHYEKN

SEQ ID NO: 119792 - protein, 243 aa, Unknown
  Bacterial polypetide isolated from the Sargasso Sea
MGIINMTPDSFSDGGKFNSINSAIDYAYKLLDTGADILDIGGESSRPGADPVSNSEEIDRISPLIKELGKNANCLISVDTYKSSTAKFGLDNGATIINDISGLTYDSEMASVISNFNAAVVVMHMKGTPKTMQKNPNYFDLIKEIKSFFSKQIEFAIKNGINRKNIILDPGIGFGKGLNDNFEIIGKLDQICDMGYPVLVGPSRKSFIGEVLNLSVNERLEGSLAAANACLMNGAKMIRVPRC

SEQ ID NO: 119793 - protein, 183 aa, Unknown
  Bacterial polypetide isolated from the Sargasso Sea
MGILNVTPDSFSDGGKYLKTNLANKHIKKLKKDGADIIDIGGESTRPNSNTVNSIVEWNRIKSKLKFAKKNNIFVSLDTRKSLVLKNSLPFKIDLLNDVSGLNYDYRIINILKKSKIPFVLHHMRGTPKTMQNNPKYKNVLLDIYDFFEKKLKFIRDNKIKHKNIILDPGIGFGKNLKHNITI

SEQ ID NO: 119794 - protein, 143 aa, Unknown
  Bacterial polypetide isolated from the Sargasso Sea
MKNNYSVKPKIMGILNVTPDSFSDGGEFNNLDSAVSQGKKMIDEGADIIDIGGESTRPGSKRISSQEQIDRVVHIIEAINETKPGHVEISIDTTQSEVAEAALSVGANIVNDVSGGNDDPEIIQLCAEKKCPYIIMHMQGTPE

SEQ ID NO: 119795 - protein, 158 aa, Unknown
  Bacterial polypetide isolated from the Sargasso Sea
MGILNITPDSFSDGGRFIGKDAAIAQARAMLAAGAAILDIGGESTRPGAEEVSVQQELDRVLPVIEAIRSELDCVISIDTCKSQVMKEAVAAGADIINDIKALLDHGAVEVAAAAQVPVCLMHMQGQPRTMQHSPLYQDVVKEVGEFLQQRAEVCIAA

SEQ ID NO: 119796 - protein, 222 aa, Unknown
  Bacterial polypetide isolated from the Sargasso Sea
MGVLNLTPDSFSDGGKFNNKNKGTKYALQMFKAGANIIDIGGESTRPGSKAISVKLEWKRINKILKFICKRVPVSLDTRKAEIMKRGIGQGVKIINDVSGLNFDKESANILKKHRTPFVIQHSKGIPENMQNKPTYKNELLDIYDFFEDKIKFLRSIGIKHKNIIIDPGIGFGKNLKHNMNLISNISIFHSLGLPVLVGNSRKKFIKDLSGKNDSKKRIEAL

SEQ ID NO: 119797 - protein, 131 aa, Unknown
  Bacterial polypetide isolated from the Sargasso Sea
MKRKIKKDLKSIKKIKKIKKLKINSFPILMGVVNLTPDSFSDGGKYNKTDKAFKYAKNLINQGSSIIDIGGESTRPGSKEIKKEIEWKRISKTIKNIKKINIFISVDTRKSWIMKKVINEGVNLINDVSGL

SEQ ID NO: 119798 - protein, 149 aa, Unknown
  Bacterial polypetide isolated from the Sargasso Sea
MHFNNKPVLMGVLNLTPDSFSDGGKFNNQKKAFKHAQLLIKNGSEILDIGGESTRPGSRDILQSLEWKRLSKILKHRKKFKCLFSLDTRKSEIMKKAMKYNINIINDISGFSYDQNTLNFLKKSKVPFIINHIKGNPSNMQKNPKYKNV

SEQ ID NO: 119799 - protein, 64 aa, Unknown
  Bacterial polypetide isolated from the Sargasso Sea
MLLQLPRQRQLDLSRPKVMGILNITPDSFSDGGRFIGKEAAIRQAKAMLDAGAAILDIGGESTR

SEQ ID NO: 119800 - protein, 170 aa, Unknown
  Bacterial polypetide isolated from the Sargasso Sea
MGVLNLTPDSFSDGGKFNKKNKGVSHAINLYKTGASLVDVGGESTRPGSKEVNENREWNRIKMILKLIVKKIPISLDTRKSSIMENGIRMGVKLINDVSGLTYDPKTINVLKKYKIPFVIQHSVGTPENMQKKAKYKNELLDIYDYFEDKIKLIRSKGINHNNIILDPGI

SEQ ID NO: 119801 - protein, 80 aa, Unknown
  Bacterial polypetide isolated from the Sargasso Sea
MNLIKKKKSFKKLNFSNYPLLMGVINLTPDSFSDGGKYNKKNKGFDHAKYLIKKGCKIIDIGGESTRPGSKEVKKKIEWR

SEQ ID NO: 119802 - protein, 239 aa, Unknown
  Bacterial polypetide isolated from the Sargasso Sea
MGILNLTPDSFSDGGKFNNKKKASKQIAYMIDSGAKIIDVGGESTRPGSKTIDPNVEWKRVEYIIKNFKKKYKKICLSIDTRKSDIMIKSIKHGADIINDVSGFSYDPYAILKLKNLNISKVLHHMQGTPNTMQKNPKYQNVLLDIYDFFEKEILNISNNKKTILDPGIGFGKTLKHNLTLISKISLFHSLGLPILIGTSRKRFINQISGDYDTEDRIGGTLASVLYLLSQGVQIFRVH

SEQ ID NO: 119803 - protein, 253 aa, Unknown
  Bacterial polypetide isolated from the Sargasso Sea
LTPDSFSDGGQYNQIGLALKRLKSLLKAGCKIVDVGGESTRPGSKDIDKNVEWKRIKNLLKKIRNYKFFLSLDTRKTFVMHKALRYKLNIVNDVSGFSYDNKTIDFLKKTKLPLIINHSKGEPRTMQRKPSYKNVLFEIYDFFEKKIELLRKAGIKHNNIILDPGIGFGKNLKHNITIMNNISIFHSLGFPVMLGSSRKRFIKYISGKNDSNIRLGGTLASSIHAMMNGVQIMRVHDFNEISQGLKVFKSINK

SEQ ID NO: 119804 - protein, 202 aa, Unknown
  Bacterial polypetide isolated from the Sargasso Sea
MSRYYTRACNFYYGPKSKSYVKQSKALPLNGINEISFDKIEIISRKSNKKLSIKEINTLPKLIKKKVKKDLITLTSKKKDFANLNFSKIPNIMGILNLTPDSFSDGGKFNKMSKGIIKAHQMFKFGASIIDIGGESTRPGAKTINSKTEWKRINKTLKSICKKIPVSLDTRKSEIMEKGIKLGIKIINDVSGLEYDDKSKNI

SEQ ID NO: 119805 - protein, 105 aa, Unknown
  Bacterial polypetide isolated from the Sargasso Sea
MGILNLTPDSFSDGGKYNKKKVGLIHARKLFNDGCKILDIGGESTRPGSNNVEPKKEWERIAPTLLQIKKMKKIISLDTRKSLVMKKGIKNKINIINDVSGLQYD

SEQ ID NO: 119806 - protein, 125 aa, Unknown
  Bacterial polypetide isolated from the Sargasso Sea
DRKKRKIINLKDITKLNNKLKIKVNRDLKNIKKKKTLKKLNLSNIPILMGIINLTPDSFSDGGKYNKKNLAEKRVNSLLSSGAKIIDIGGESTRPGANDIHPGREWNRIKSILKILKNKKSFISL

SEQ ID NO: 119807 - protein, 250 aa, Unknown
  Bacterial polypetide isolated from the Sargasso Sea
MRSRSLELPHHNSSLQRPLVMGIVNVTPDSFSDGGRHTTVEQAVQHGLKLVADGADVLDVGGESTRPYSSPVSLDEELRRVNDVVRCLAAESGVPVSVDTSKASVAIRALEHGAEIINDVTGLEGDPDMISVARESGAGICAMHMQGTPQTMQDNPSYDDVVADVHAYLLARRDNLVRHGIALEKICLDPGIGFGKTHAHNRELMAHAERFLNLGTPILIGHSRKGFIGQTIKNALGRKGTQDEIDTATA

SEQ ID NO: 119808 - protein, 175 aa, Unknown
  Bacterial polypetide isolated from the Sargasso Sea
MGILNATPDSFSDGGKFNKFGLAKKQIEYLFQSGAEIVDIGGESTRPGAKSISPKTEWSRIKHVLKKFGKKKIISLDTRKSEIMEKGIKLGVKLINDVSGLNYDKKTIDILKKYKTSFVLHHSLGNPDVMQINPKYKNVLLDIYDFFEEKINFLKSVGINHNNIILDPGIGFGKI

SEQ ID NO: 119809 - protein, 178 aa, Unknown
  Bacterial polypetide isolated from the Sargasso Sea
MTAARKLVKYYVRPILNNIKKKDSLNLGSSKLYFDRIELIKRNGENISSKYLHIKEVNGLSGDISKIINIQLKKITKTRKKIKNLNFNKPLIMGILNITPDSFSDGGEFLSVDDAFAQYKKLKKEGAAIVDIGGESTRPGSKTVPAKKELQRIMPVIDQIKSSSKNTLVSVDTRKSTV

SEQ ID NO: 119810 - protein, 261 aa, Unknown
  Bacterial polypetide isolated from the Sargasso Sea
MGILNLTPDSFSDGGKFNKKNKSIKHLSFMIKSGAEIIDVGGESTRPGSKTVPNKIEWKRVEHVIKNFKKINKKTCLSIDTRKSDIMLKSIKFGVDLINDVSGFSFDQSSLYKLKKYKIPKVLHHMKGTPNTMQKNPKYKNVLLDIYDFFEKNINMKLYDKKIILDPGIGFGKTLKHNLTLISKISLFHSLGFPILVGTSRKRFINQISNKYDSSDRIGGTLASVVFLLSQGVQIFRVHNVKEVKKGILVFNENFIKLMKN

SEQ ID NO: 119811 - protein, 268 aa, Unknown
  Bacterial polypetide isolated from the Sargasso Sea
MSVRRPLIMGIVNVTPDSFSDGGDHYDAGLAITRALEHAEAGADIVDIGGESTRPGATEIPIADEIDRVLPVVEAAVDSGICVSVDTRHVDVMQAAIEAGASIINDVTAFTDDHESLEIVAGSGAGIVLMHMQGTPKTMQHAPAYRLASADIYDWLSKRVSVCIAAGIPLNRIAVDPGIGFGKNDWDNMEILNRAAIFHGLGCPVAIGVSRKSFIGRLAAVDDPKQRLPGTIAATLMALDRGVQIHRVHDVAEVKQAVSIWDAQSHNR

SEQ ID NO: 119812 - protein, 245 aa, Unknown
  Bacterial polypetide isolated from the Sargasso Sea
MKKYYTRACNFFYGSNSSKKVKKKISLPLNGNNLISFDSIEILSKGQSKILNIKKIKFLNKDLKKKIEKDLREITKKKSFKKLNFSKIPILMGVINLTPDSFSDGGKYNKKKQAYNHAKNLVTEGCKIIDLGGESTRPGAKDVKEEEEWKRIFPSLKRINKLNKYISLDTRKSLIMDKGIKNNVNLINDVSGLSYDSNTLNILKKTKIPFVIHHTKGSPKTMQKNPKYKDVLIEIFDFFENKIKK

SEQ ID NO: 119813 - protein, 156 aa, Unknown
  Bacterial polypetide isolated from the Sargasso Sea
MLRYYTRACNFYFGNQSKILVNKKKSISLHKIKEISFDHVEIITRKKIRRISINQVKKLPNSLKKKINADIKKINSKKKNFSNFNFKKIPNILGILNLTPDSFSDGGKFNKQNKGISHAISLYKSGASIIDVGGESTRPGSKPINEKLEWNRISKI

SEQ ID NO: 119814 - protein, 140 aa, Unknown
  Bacterial polypetide isolated from the Sargasso Sea
MPKLIRRKINSDLKKIKSKKKNFSNLNFKKIPNIMGVLNLTPDSFSDGGKFNSKKKGIDHAISLLNCGANLIDIGGESTRPGSKVIRENLEWQRIEKILKSLIKRKIPISLDTRKSKIMGKGINLGVKLINDVSGLEFDS

SEQ ID NO: 119815 - protein, 257 aa, Unknown
  Bacterial polypetide isolated from the Sargasso Sea
MGILNITPDSFSDGGKFYQKNLAEKQMKYLFKCGADLVDVGGESTRPGSKSISSKEEWNRIKNILKKINKKDVISLDTRKSEIMEKGIKIGVKLINDVSGLSYDKNSINILKKYKTPFILQHSLGNPDVMQNNPKYKNVILDIYDYFDEKIKLLRSKGIKHNNIILDPGIGFGKNLKHNMTIIKNISIYHSLGLPILLGISRKRFIKELSKNNDSSSRIGGTISSSIFAIMQGVQMLRVHDVNEINQSIKVYKYLIE

SEQ ID NO: 119816 - protein, 216 aa, Unknown
  Bacterial polypetide isolated from the Sargasso Sea
MGILNLTPDSFSDGGKFNSYNKAFKQISNMIKSGANIIDVGGESTRPGSKTIDPKIEWERIKYVLNNFKQKYKKICLSVDTRKSDIMIKSVNCGADLINDVSGFSHDPFALIKLRNFNIPKVLHHMQGTPKTMQRNPKYKNVLLDIYDFFEKEISNITDNKKIIIDPGIGFGKTLKHNLTLISNISLFHSLGFPILVGTSRKRFINQISGEYDSKD

SEQ ID NO: 119817 - protein, 194 aa, Unknown
  Bacterial polypetide isolated from the Sargasso Sea
MDRYYTRVCNFFYGNQSKNLVSKKKAIPLHQIKEISFDQIEIISRKSKKRIFINQIKYLPNLIQKKIKLDLNKIKSKKKNFSNLDFKKIPNILGVLNLTPDSFSDGGQFNTTLKAIKHAKHLLNSGADLIDVGGESTRPGSKAIKENLEWKRISKFLELKSKKIPISLDTRKSNVMKKGIELGVRLINDVSGLN

SEQ ID NO: 119818 - protein, 259 aa, Unknown
  Bacterial polypetide isolated from the Sargasso Sea
MGILNITPDSFSDGGKFNKKISAIKQIEKLIIDGANIIDVGGESTRPGSKAILQKEEWLRVNKVMRYFKSKNFIVSLDTRKTFVMKKASKYKLNLVNDVSGLSYDKDTINFLKNSKLPFVLHHMKGSPETMQKNPTYNNVLLDIYDYFEDKLKLIRQKGIKHNHIILDPGIGFGKNMKHNITLINNISIFHSLGLPLMLGTSRKRFIKDISGQNDSNQRIGGTISSSIFSMLQGVQILRVHDVNEVKQGIKVFKKLSYD

SEQ ID NO: 119819 - protein, 259 aa, Unknown
  Bacterial polypetide isolated from the Sargasso Sea
MDGPQIMGIVNVTPDSFSDGGEFASHQTAIRHGRRLVAEGADIVDVGGESTRPGAEPITPEVEIARVLPVIDTLAKDGIRVSVDTSNPEVMEAAVGAGACMVNDIYALRKPGALAAVARLDVPVCLMHMQGTPATMQDAPFYQDIGRDIREFFRSRIHACGRAGVDRGRIVIDPGFGFGKTRQHNHTLLSKVGWLTELGVPVLIGVSRKGFVRSLTQVKSRQALDETSALLALMAVEQGARVVRVHNVEVTRKLLTQVT

SEQ ID NO: 119820 - protein, 106 aa, Unknown
  Bacterial polypetide isolated from the Sargasso Sea
MGVLNLTPDSFSDGGKFNSKKKGIDHAISLLNCGANLIDIGGESTRPGSKRIRENLEWQRIEKILKSLIKKKIPISLDTRKSKIMSKGINLGVKLINDVSGLEFDS

SEQ ID NO: 119821 - protein, 269 aa, Unknown
  Bacterial polypetide isolated from the Sargasso Sea
MISFDKIELITRSSKGTSLKVIGIKNINSIKGAAKKKVKKDIKNITSKRRNFLKNINFSKPSIMGILNLTPDSFSDGGLYNKKSSAEKHIKRLIKSGADIIDVGGESTRPGSKTIPIKTEWRRVEHVIKNFKKKFPKICLSLDTRKSEIIKEGYRYKVNIMNDVSGFEYDPLTLSTLKKMKISKVVHHMQGTPNTMQKNPKYKNVLLDIYDFFEKKINSVDDKMLILDPGIGFGKTLKHNLTLISKISLFHSLGLPILVGSSRKRFISQ

SEQ ID NO: 119822 - protein, 235 aa, Unknown
  Bacterial polypetide isolated from the Sargasso Sea
MRKYYTRACNFYHGSEARKLIQTKKALPLNGKNNIAFDSIEIFSREKRGVKTNLINVNKVLKLNKKIRKIVKEDLSKIVSKRKDFLRHINFQSPSIMGILNLTPDSFSDGGKFNNYNKAFKQISNMIKSGANIIDVGGESTRPGSKTIETKIEWKRIRYVLNNFKKKYKKICLSVDTRKSDIMVKSINCGADLVNDVSGFKYDPFALVKLRDLNIPKVLHHMQGTPKTMQRSPKY

SEQ ID NO: 119823 - protein, 187 aa, Unknown
  Bacterial polypetide isolated from the Sargasso Sea
MGVVNLTPDSFSDGGKYNKRNLGFTHAKKLLEKGCKILDIGGESTRPGSNTVKKEIEWKRINQTLKQLKKLKKFVSIDTRKSWIMKKAVEQKISLINDVSGLTYDKYSIDILKKFQTPFVLHHMKGSPKNMQKYPKYKNVLLDIYDFFENKIKEIRNKGIMHNNIILDPGIGFGKNLKHNITLIRNI

SEQ ID NO: 119824 - protein, 153 aa, Unknown
  Bacterial polypetide isolated from the Sargasso Sea
MLVGILNVTPDSFSDGGQFVDVESAMEHALRLVEEGAGMIDVGGESTRPGATRISEAEQIKRVVPVIECIREQSNIPISVDTTLAKVASAAIYAGANVINDVASGTEDEAIFALASNSGAGLVLMHRRLPPERDIYSHQYDKAPESENIVADI

SEQ ID NO: 119825 - protein, 171 aa, Unknown
  Bacterial polypetide isolated from the Sargasso Sea
MKKYYTRVCNFYYGNLSKRLVKQKKALPLNGNHKLSFDHIEILSRNFEKKIHIEEIKNLSKFLKKKINKDLNLIIKKKKNFCNFNYNHNPNLLGILNLTPDSFSDGGKFNKDHLGYKQALNLFNSGAQVIDIGGESTRPGSKEVKADIEWKRVKKIIKKLSKKITLSLDTR

SEQ ID NO: 119826 - protein, 257 aa, Unknown
  Bacterial polypetide isolated from the Sargasso Sea
WGVLNLTPDSFSDGGKFNKRSKSFKHISNMIQFGANIIDVGGESTRPGSKTIDPKTEWKRIQYVLKNFKKKYKKTCLSIDTRKSDLMVKGIKCGVNLINDVSGFNYDQSSLSKLKRYNISKVIHHMQGTPNTMQKNPKYKNVLLDIYDFFETSINKKFKDKKIILDPGIGFGKTLKHNLTLISKISLFHSLGFPILVGTSRKRFINQISGKHDSKDRTGGTLASVLFLLSQGVQIFRVHNVNEVKQGILVFEKILLD

SEQ ID NO: 119827 - protein, 206 aa, Unknown
  Bacterial polypetide isolated from the Sargasso Sea
MIGILNLTPDSFSDGGQYNQISSALKRVKLLLKAGCKIIDVGGESTRPGSKAIDENTEWKRIENLLKKIRNYKFLLSLDTRKTFVMHKALKYKLNIVNDVSGFSYDTKTIDFLKKTKLPLIINHSKGEPRTMQRRPSYKNVLLEIYDFFEKKIKLLRKAGIKHNNIILDPGIGFGKNLKHNITIMNNISIFHSLGFPVMLGSSRKR

SEQ ID NO: 119828 - protein, 206 aa, Unknown
  Bacterial polypetide isolated from the Sargasso Sea
MQRFYTRACNFYFGNQSKNLVKKKKSIPLHKIKEISFDQVEIITRKKIRIISINQIKKLPNNLKKKINADIKKINSKKKNFSNFNFKKIPNILGVLNLTPDSFSDGGKFNKKNKGIKHAISLYKSGASIIDVGGESTRPGSKPVNEEREWNRINKILKLIVKKIPTSLDTRKSRIMENGIRMGVKLINDVSGLSYDPKTINILKKV

SEQ ID NO: 119829 - protein, 173 aa, Unknown
  Bacterial polypetide isolated from the Sargasso Sea
MGVLNLTPDSFSDGGQFNSKKKGVEHAIFLLNSGADLIDIGGESTRPGSKAIKENLEWSRISKILKLISKKIPLSLDTRKSNIMKKGIKLGVRLINDVSGLKYDKETINVLKKYKTPFVIQHSQGSPENMQKKPSYKNELLDIYDFFEEKIKFLRSMGINHNNIIIDPGIGLE

SEQ ID NO: 119830 - protein, 284 aa, Unknown
  Bacterial polypetide isolated from the Sargasso Sea
MRKYYTRPCNFYYGNYAKNLIKNKKALPLAGNTNISFDQLEIFQRTKKKGVKSSIYSIKSIKTLSNQIKNDLKKITSKRTSICGLRFDSPQIIGVLNVTPDSFSDGGLFFKTSKAYEQANLMIKNGAKIIDIGGESTRPGSKIVQDKEEWNRIKNTISKIKKFFPKIPISLDTRKSFIMKKGIELGVSIINDVSGLNFDKKSFDTINSNKIPFILHHMQGTPDTMQKNPKYNDALLDIYDFFEEKINFCLKKGYKKELIFLDPGIGFGKNLNHNLRILSKISTF

SEQ ID NO: 119831 - protein, 244 aa, Unknown
  Bacterial polypetide isolated from the Sargasso Sea
MEKYYTRACNFFYTSKFSKIKKNHLPLNGNSGIKFRSIELLTRKSEKIINLEEIKKLPVRLQHKIKKDLKNISKKKKFKDLKFDNSPIIMGILNLTPDSFSDGGKFIKFKSAERQINNLINSGAKIIDIGGESTRPGAKEIPVSDEWKRISKKLRLIRKKRVIFSLDTRKSQVMEKSLNYGIKIINDVSGFEYDKKTINFLKKTKVPFVINHMKGSPRTMQNSPKYENVLLDIYDYFETKIKYL

SEQ ID NO: 119832 - protein, 147 aa, Unknown
  Bacterial polypetide isolated from the Sargasso Sea
MKKYYTRACNFYYGVNAKKLIKKKIALPLCGNQNIAFDKIEIIVRKKNKVISKIINLKKIHTLNTSCKNKVKYDLKKIVKKRKNFLNNVNFLEPSIMGILNLTPDSFSDGGKFNNQKKAKSHIYNMIKDGANIIDIGGESTRPGQKQ

SEQ ID NO: 119833 - protein, 299 aa, Unknown
  Bacterial polypetide isolated from the Sargasso Sea
KMIKYYTRACNFYYGKISKQKVNKNKSLPLNGNKLISFDTIELISRKNKKIIKINDIKNLSTKLKKKIYKDLKEITKPKSLQNLKIKSFPVLMGILNATPDSFSDGGKYIKSKSAYKQITKLIKDGADILDIGGESTRPNSNPIDEQIEWNRVKSKLKFAKKNKVFVSLDTRKSLVLKKSLLLKVDLLNDISGLSYDKEIINVLKKTKIPFVINHIQGIPKTMQKNPKYKNAVLDIYDYFEEKLKFIRDNKISHNNIILDPGIGFGKNLKHNITILNQISIYHSLGFPSNVRYIKKKII

SEQ ID NO: 119834 - protein, 222 aa, Unknown
  Bacterial polypetide isolated from the Sargasso Sea
MTRYYTRVCNFYHGSKSKLLIKQKKTLPLNGNVDISFDKVEVITRKSLKKISIHQINILSNKIKKIVKKDIKVITKRKKKFKNLSLKNTPIIMGVLNITPDSFSDGGKYNKNNLAKKQLKYLFKKGADLVDIGGESTRPGSKPISSKVEWNRIKNILKKINKKKVISLDSRKSSIMEKGIKSGVKLINDVSGLNYDKNSIHILKKYKVPFVIHHSLGNPDVM

SEQ ID NO: 119835 - protein, 258 aa, Unknown
  Bacterial polypetide isolated from the Sargasso Sea
MGIVNLTPDSFSDGGKYNKRKLARNHINKLLSSGAKIIDVGGESTRPGANDISSNKEWDRIKTVLKFLKNKKCIVSLDTRKSFVMEKASKIRIDLINDVSGLSYDPETINYLKKTKKPFVIHHMQGTPKNMQIKPTYKNVLLDIYDFFETKLKYLRKKGIKHNNIILDPGIGFGKNLKHNITLLKNISIFHSLGLPVMLGLSRKRFIKDISKENDTKDRIGGTISSCIQAYLQGVQILRVHDVKEINQAFKVFRELQN

SEQ ID NO: 119836 - protein, 149 aa, Unknown
  Bacterial polypetide isolated from the Sargasso Sea
MPKLIRGKINSDIKKIRSKKKNFSNFNFAKIPNIMGVLNLTPDSFSDGGKFNSKKKGINHAISLLNCGANLIDIGGESTRPGSKVIRENLEWQRIEKILKSLIKKKIPISLDTRKSKIMSKGINLGVKLINDVSGLEFDTQTLNILKKI

SEQ ID NO: 119837 - protein, 67 aa, Unknown
  Bacterial polypetide isolated from the Sargasso Sea
MGILNLTPDSFSDGGEFNSKNKSLKHISQMIKSGADIIDVGGESTRPGSQTISPDREWKRIEFVVKN

SEQ ID NO: 119838 - protein, 235 aa, Unknown
  Bacterial polypetide isolated from the Sargasso Sea
MTKYYTRACNFYHGNTSKEKIRYKLSLPLHGNSLISFDTVEIISRKSKRKINIKNIKNLPLKIKNKVLFDLKKICKKKLFSNLNFKDVPILMGVLNITPDSFSDGGRFLSKKKSEKHIENLLKSGAKIIDIGGESTRPGSNDINPLKEWSRIKNKIKYLKKKKCLISLDSRKTFVMKKAYDVGINLVNDVSGLAYDKKTINFLKDSKIPFILHHIKGTPKTMQNKPFYKNVLLDI

SEQ ID NO: 119839 - protein, 127 aa, Unknown
  Bacterial polypetide isolated from the Sargasso Sea
MKNPLKPLIMGIVNTTPDSFSDGGVHSSAGELIDFAYELIDQGADIIDIGGESTRPGAEKVSSEEEIRRISPLVKELSKNCDCAISVDTYKSSTAKFALENGVSIINDISGLTFDPSVASTVSDHNA

SEQ ID NO: 119840 - protein, 195 aa, Unknown
  Bacterial polypetide isolated from the Sargasso Sea
MGVLNLTPDSFSDGGIYLKKNLGEIHAKRLVRDGCDIIDIGGEATNPGSNEVHIKDEWKRIFPTLSKIGNLKSFISLDTRKSEIIKKALKYKINLVNDISGLDYDPYTLEVLKKTKIPFVIHHMRGDPKTMQKNPKYKNVLLDIYDFFEKKINFIRSNGIKHNNIILDPGIGFGKNLKHNITLIRNISIFHSLRF

SEQ ID NO: 119841 - protein, 261 aa, Unknown
  Bacterial polypetide isolated from the Sargasso Sea
MPLHGIKEISFDQIEIITRKSKKIIFIKKINRLPKTLKKKINFDLKKITAKKKSFCNLKFNLIPNFLGVLNLTPDSFSDGGKFNKKDKAIQQAKNLFNSGANLIDIGGESTRPGSKTINEKLEWKRINKILKLLRKKIPISLDTRKSNIMKKGIQLGVKLINDVSGLEYDPETVNVLKLNNTPFVLQHSQGRPEDMQNNPSYKNELLDIYDFFEKKLKFLRSIGINHNKIIIDPGIGFGKNLKQNMNLIKNISIFHSLVFL

SEQ ID NO: 119842 - protein, 245 aa, Unknown
  Bacterial polypetide isolated from the Sargasso Sea
MPLCGNKNISFDTIEIYTRQKNRQITSETIKIKDIKKLKYQKKRKIILDLKKISLKRKNFLEKINFLEPSIMGILNMTPDSFSDGGMYNTKKKSKDHIKNMIKNGANIIDIGGESTRPGSKEVKIADEWKRLEKVIINFKKNFKNILLSIDSRKSEIIEKSSAFGVDIINDVSGFSYDKKTLSLVKSLDKSNIIHHMQGTPNTMQKNPKYFNVLLDIYDFFEKKIEEIKENQKIIIDPGIGFGKN

SEQ ID NO: 119843 - protein, 247 aa, Unknown
  Bacterial polypetide isolated from the Sargasso Sea
MGILNVTPDSFSDGGEFYSQKQAIRHATQLINNGVDILDVGGESSRPGADEVSEKEELNRTIPVIQEIRSISSDILISIDTTKSRVALEAIQSGADIINDISGLSFDPKMADIVKDLRVPVIIMHMQGVPSNMQNNPTYNNLIEDISSFFKRKIKFVLSVGIDKKQIILDPGIGFGKTVDNNFQIIKKLNEFCKLGLPVMIGPSRKSFIGTALDLPVDDRLEGTAATVAAGILNGARIVRVHDVKEI

SEQ ID NO: 119844 - protein, 140 aa, Unknown
  Bacterial polypetide isolated from the Sargasso Sea
MENKNLQKKIKSDLKLITKKKNFDKLKFKNLPILMGILNLTPDSFSDGGKYNDIEKAFLRAKELKKNGCKILDIGGESTRPGSEEVKENIEWERIKETINQLKNSNFFVSLDTRKSRIMKKGLLNNVNLINDVSGLSYDP

SEQ ID NO: 119845 - protein, 157 aa, Unknown
  Bacterial polypetide isolated from the Sargasso Sea
MQRYYTRACNFYFGSHSKILVRKKKSIPLHQISEISFDHIEIITRNSKKKIPIDQIKYLPKNLKKKINLDIKKITSKKKNFSNLNFKKIPNILGVLNITPDSFSDGGKFNSKKKGISHAVKLYKAGADLVDIGGESTRPGSKSVNEKLEWNRINKIL

SEQ ID NO: 119846 - protein, 136 aa, Unknown
  Bacterial polypetide isolated from the Sargasso Sea
KKKKFKKIKFSINPIIMGILNATPDSFSDGGKYLKSMSAKIQIKKLKKEGADIVDIGGESTRPNSDEVESKIEWKRVKSKIKYAKKNKFFVSLDTRKSFVLKKSLPMKINLLNDVSGLNYDNKILNILKQSKLPFV

SEQ ID NO: 119847 - protein, 200 aa, Unknown
  Bacterial polypetide isolated from the Sargasso Sea
MQRYYTRVCNFYYGNQSKILVNKKKTIPLHQIKEISFDHIEIITRKSKRKISISQIKYLPNDLKKKVNLDIKKIKNKKKNFSNLEFKKVPNILGVLNITPDSFSDGGKFNTKKKGINHAIKLYKEGADLIDIGGESTRPGSKEVNKEDEWNRIKDILKSIVKKIPISLDTRKSEIMKNGIKVGVKLINDVSGLSFDPRDQ

SEQ ID NO: 119848 - protein, 168 aa, Unknown
  Bacterial polypetide isolated from the Sargasso Sea
MGVLNLTPDSFSDGGMFNKIKLAKRQINKLIQDGANIIDIGGESTRPGSKEIKQSKEWNRIKDSMQYLKTKKVFVSLDSRKSFIMKKALKYKLNLINDVSGLCYDNNTIDFLKKTKIPFILHHIKGTPKTMQINPSYKNVLLDIYDYFEKKIKQIRKKGIKHNNIILD

SEQ ID NO: 119849 - protein, 165 aa, Unknown
  Bacterial polypetide isolated from the Sargasso Sea
MIKYYTRACNFYYENQAKSLIKQKLALPLCGSTRIAFDSIEIFRREKKKIISKKLNLKKIKFLKSKEQKKIKIDLKKITSKRRNFLSNVRFSHPSIMGILNLTPDSFSDGGKFNSSKESALQISNLIKSGANIIDVGGESTRPGSKDIKSKIEWNRVKNVIKRFK

SEQ ID NO: 119850 - protein, 229 aa, Unknown
  Bacterial polypetide isolated from the Sargasso Sea
MGILNITPDSFSDGGKFNNKISARKQINTLINDGAKIIDVGGESTRPGSKEILQTEEWLRLNKVMKYLKSKTFFVSLDTRKSFVMKKALKYKLDLINDVSGLSYDNETIDFLKTTKLPFVLHHMKGNTETMQKNPSYNNVLLDIYDYFEDKLRLIRKSGIKHNHIILDPGVGFGKNMKHNITLINNISIFHSLGLPVMLGLSRKKFIKDISGNNDSKERIGWNCVLKYL

SEQ ID NO: 119851 - protein, 187 aa, Unknown
  Bacterial polypetide isolated from the Sargasso Sea
MKKIASLLQENRPLIMGVVNVTPDSFSDGGEFLSLAAALEHANYLQECGADIIDIGGESTRPGAKPISSSEELQRVMPVIERLRYASDVPISVDTSKAVVMEKAIECGATLINDVYSLRKPGTLDVVAGSDAYVCLMHMKGSPQNMQDRPNYKDLLLEVRAFLSDRVVDCEKKGISADRLIVDIGFG

SEQ ID NO: 119852 - protein, 194 aa, Unknown
  Bacterial polypetide isolated from the Sargasso Sea
MQKYYTRACNFYYGSFSKEKIKKKQSLPLNGNHLISFDTVEIINRKYKKKIHIKEIENQNNKIKKKIKQDINLIIKKKKFKGLNFLNFPILMGVINLTPDSFSDGGKYNKKNSGFNHAKYLIKKGCKILDIGGESTRPGAKDINKIIEWKRINETLRKIKKLNKFISLDTRKSLIMEKGIKNKVNLINDVSGLE

SEQ ID NO: 119853 - protein, 173 aa, Unknown
  Bacterial polypetide isolated from the Sargasso Sea
MTRYYTRVCNFYYGKKSKSLLIKKKTIPLNQNKEISFDQIEIISRKTRKKISIKQIRNLSKLLRKKINSDLKKIKSRKKNFSNLDFKKIPNLIGVLNLTPDSFSDGGKFNSTKKGILHSNNLIKSGAKLIDIGGESTRPGSNSVKENLEWKRISKVLKLIGKKIPISLDTRKS

SEQ ID NO: 119854 - protein, 238 aa, Unknown
  Bacterial polypetide isolated from the Sargasso Sea
MEIFYRKKRGITKSNIYSINEVKNLNKKLKYIINEDLKRITLKRKSICGLKFNNPQIMGVLNVTPDSFSDGGLFLNKSKAYNQTKSMINNGATIIDVGGESTRPGAKTVNEKKELNRIKNIIIKIKKQFPKIPLSLDTRKSYVMKKGIELGVNIINDVSGLNFDKKSFNIINLKKVPFVLHHMQGTPNTMQKNPNYDDAILDIFDFFEEKINFCLKKNYKRELILLDPGIGFGKNLDH

SEQ ID NO: 119855 - protein, 227 aa, Unknown
  Bacterial polypetide isolated from the Sargasso Sea
AHIIDIGGESTRPGSMPICENVECERVLPVIESIKKINGKITISVDTYKASVAKKAIEVGADIVNDISGLTFDSDMLPLLSGKDIPIIIMHINGKPKTMQKNPAYGDLVKDVKNFLHQQSKIAEEGGIKNNHIILDPGIGFGKTFDHNFTLLRRLDEICSLGYPVMIGPSRKAFIGDVLGLPPDDRLEGTLATVVSGIMNGAKIVRVHDVKEVSRVVKITEKIIASA

SEQ ID NO: 119856 - protein, 243 aa, Unknown
  Bacterial polypetide isolated from the Sargasso Sea
MGVLNLTPDSFSDGGKYNKKISGYKRAINLFNSGSDIVDIGGESTRPGANPVNEKKEWSRISPVIKKLKKKIPLSLDTRKSVIMENGIKTGVKLINDISGLKFDKNSVNIIRKYNIPFVINHIQSDPSIMQKNPKYKNVLFDIYDYFEERIKYVRFKGIKHNNIIIDPGIGFGKNLKHNITLISKISLFHSLGFPILIGASRKRFIKYISGKNDSKQRLGGTIGSILFALMQGVQVLRVHDVN

SEQ ID NO: 119857 - protein, 169 aa, Unknown
  Bacterial polypetide isolated from the Sargasso Sea
MENKNLQKKIKSDLKLITKKKKFYKLKFKNIPILMGILNLTPDSFSDGGKYNDREKAFLRAKELKKSGCKILDIGGESTRPGSEEVKESIEWERIKGTINQIKSSNFFVSLDTRKSQIMKKGLLNNVNLINDVSGLSYDPKTLNILKKTGVPFVLHHMKGNPKTMQKNP

SEQ ID NO: 119858 - protein, 142 aa, Unknown
  Bacterial polypetide isolated from the Sargasso Sea
MSRYYTRVCNFYYGNHSKKLVNKKKSIPLNGIEEISFDQIEIITRNSKKKIFINQINYLPKLLKAKVNLDLKKIKSKKKNFSNLNFKKIPNILGVLNLTPDSFSDGGKFNSKKKGINHAINLLNSGANLIDVGGESTRPGSK

SEQ ID NO: 119859 - protein, 243 aa, Unknown
  Bacterial polypetide isolated from the Sargasso Sea
MKGHYTRACNFYFGKQSKILVHKKKSIPLHHIKEISFDHIEIITRKSKKKISLNQIKYLPTNLKKKINLDIKKIKSKKKNFSNFNFKKIPNILGVLNLTPDSFSDGGKFNTKKSGVSHAINLYNKGADLIDVGGESTRPGSKSVDEKKEWKRINKILKIIIKNLPISLDTRKSNVMKNGIELGVKLINDVSGLNYDPKTITILKKYKIPFVIQHCISTPENMQKNTKYKNELLDIYDFFQEKI

SEQ ID NO: 119860 - protein, 193 aa, Unknown
  Bacterial polypetide isolated from the Sargasso Sea
MEKYYTRACNFFYGSHSKKLVKNKVALPLCGESSISFNQIEIFSKNKKKVNSKIIKVKHINKLPQKIKKKVFEDIKKITAKREFLKKKSHILMGVLNLTPDSFSDGGKFNTLKKSSKRIENMINSGAEIIDIGGESTRPGSKIVSQKNELFRVKQAIKNFKKKYPKTLLSIDTRKSLVMNFSIKHNVDIVNDV

SEQ ID NO: 119861 - protein, 142 aa, Unknown
  Bacterial polypetide isolated from the Sargasso Sea
MCNFYYGSSSKKLVKRNKAVPLNGIKEISFDQIEILTRNSKKKIFVNQIKYLPKLIRKKINSDLKKIKSKKKNFSNLNFAKIPNIMGVLNLTPDSFSDGGKFTSKKKGINHAINLLNCGANLIDIGGESTRPGSKVIRENLE

SEQ ID NO: 119862 - protein, 287 aa, Unknown
  Bacterial polypetide isolated from the Sargasso Sea
AGGWSRFDELDVVQRDSGGAYSVARMTPDQLLATAEDPDLAAAALHRITDTRADFAGLSMDHPRIMGILNVTPDSFSDGGRHNAPARAVAAGRAMGDNGADIIDIGGESTRPGAAPVTRNQELARVLPPIAGLKSCDAVLSIDTRHAEVMTRACDAGAGIINDVSGLRGDGAVAAAAAAGVPVIIMHMKGTPETMQQDPVYGFAPVEIYEYLEERIAVAEAAGIPRRMLAVDPGFGFGKTVAHNMELMGWAALFHGLGVPVLIGASRKSSIARISNGEDADHRLPGS

SEQ ID NO: 119863 - protein, 170 aa, Unknown
  Bacterial polypetide isolated from the Sargasso Sea
AKINLDLKKIKLKKRNFSNLNFKTIPNILGVLNLTPDSFSDGGKFNSKKKGINHAIELLNSGANLIDIGGESTRPGSKPIKENLEWQRINKILKLLLKKKIPISLDTRKSKIMEKGINLGINLINDVSGLDFDTETLNVLKKYKVPFVIQHSLGAPENMQKNPKYRNELL

SEQ ID NO: 119864 - protein, 278 aa, Unknown
  Bacterial polypetide isolated from the Sargasso Sea
LKKRSDILGMEFGFPKLMGILNVTPDSFSDGGNYVKLDAALNKAKFMEENGVDIIDIGGESTRPGALTLPISEEIKRIEPVINGISARSRIPISVDTRKADVASAARKAGASMVNDVSGFTFDPNLLTYCSKYKLPVCVMHMKGSPENMQNNPKYENILIEVFDFLENQIGTLVQAGISRDQIIADVGIGFGKNIGHNLALIKNISLFHGLGVPLLLGVSRKSIISNVAKVEKPHDRMHGSISLAISALGQGVQVFRVHDVAETRQAFDLWVAVNFGE

SEQ ID NO: 119865 - protein, 297 aa, Unknown
  Bacterial polypetide isolated from the Sargasso Sea
AIKLIKPKRALPLNGKNNIAFDSIEIFSREKRGVKTNLININKVFKLNKKIRKIVKEDLSKIVSKRKDFLKHINFKSPSIMGILNLTPDSFSDGGKFNNYSKAFKQISKMVKSGANIIDVGGESTRPGSKTIDPKIEWERIKYVLNNFKKKYKKICLSVDTRKSDIMVKSVTCGADLINDVSGFNHDPFALIKLRDFNIPKVLHHMQGTPKTMQKNPKYKNVLLDIYDFFEKEISNITDNKKIIIDPGIGFGKTLKHNLSLISNISLFHSLGFPILVGTSRKRFINQISGEYDSKDR

SEQ ID NO: 119866 - protein, 162 aa, Unknown
  Bacterial polypetide isolated from the Sargasso Sea
MHGNKELSFDKIEILSRKKKRKININIINSLSFDLKKKIKEDLKKITKKKSFCKISLKEPLLIGILNLTPDSFSDGGQYNQIGSALKRVKSLLKAGCKIIDTGGESTRPGSKDIDENIEWTRIKNLLKKVRNYKFLLSLDTRKTFVMHKALRYKLNIVNDVS

SEQ ID NO: 119867 - protein, 223 aa, Unknown
  Bacterial polypetide isolated from the Sargasso Sea
MNKYYTRACNFYYGTTSKTYIKKKKSVPLNGNNQISFDKIEIINRKKKKIINFKDISKLSTKLKNKVNKDLKNIKKKKTFKNLNLSHIPILMGVVNLTPDSFSDGGKYNKKNLAIKHVDNLISGGAKIIDVGGESTRPGANDIHPRKEWDRIKFIIKILKNKKSFISLDTRKSFVMEKASKIKIDLINDVSGLNYDPETINYLKKTKKPFVIHHMKGLPKNMQ

SEQ ID NO: 119868 - protein, 184 aa, Unknown
  Bacterial polypetide isolated from the Sargasso Sea
MNKYYTRACNFYYGTASKINIKKSKSIPLNGHNDISFDKIEILHRKKSKIINLKDISKLTNKLRSKVNKDLKNIKKKKFFKKLTLSNTPILMGIINLTPDSFSDGGRYNKKSLAEKRVKKLLSSGAKIIDVGGESTRPGANDIHPRKEWDRIKFIFKILKNKKSLVSLDTRKSFVMEKASKIKI

SEQ ID NO: 119869 - protein, 273 aa, Unknown
  Bacterial polypetide isolated from the Sargasso Sea
MKNITSTRKNFIKNINFSKPIIMGILNMTPDSFSDGGKFNNKKDSLNHIEYMIESGADIIDVGGESTRPGSKTIEPSIEWNRVKYVIKNFKKKFKKTCLSIDTRKSDVMINSLKFGTDLINDISGFSFDKNSLKKIRLYNIPKVLHHIQGNPSNMQKNPKYKNVLLDIYDFFEKNINIIKDKKIILDPGIGFGKNLKHNLTLISKISLFHSLGFPILVGTSRKRFINQISEKYDSKDRTGGTLASVIYLLSQGVQIFRIHNVNEIKQGILVTK

SEQ ID NO: 119870 - protein, 47 aa, Unknown
  Bacterial polypetide isolated from the Sargasso Sea
MGILNLTPDSFSDGGKFNNKISARKQVSKLIVDGAKIIDVGGESTRP

SEQ ID NO: 119871 - protein, 263 aa, Unknown
  Bacterial polypetide isolated from the Sargasso Sea
DLKKITAKRKSISKLKFNTAKIMGILNVTPDSFSDGGLFFDESSALSQAKLMIDSGAAVIDVGGESTRPGSKVVNEVEEWKRIEKIIIKLKKNYPKIILSLDTRKSYVMKKGIINGVNIINDVSGMNFDKKSFNLINSKKIPFILHHMQGTPDTMQKNPKYNDVLLDIFDFFEKKIKFCLKRNFKQENIIVDPGIGFGKNLNHNLRLISKISTFHSLGCPILIGTSRKRFIEHIVTKFDTKDRTGGTLASVLYGLSQGVQLFR

SEQ ID NO: 119872 - protein, 157 aa, Unknown
  Bacterial polypetide isolated from the Sargasso Sea
MEKYYTRACNFYYGNQSKQKVKNKLALPLNGCSHISFDNIEIITRKDKKKIHIKDISHQNKKLKKKIRKDLKLITKRKKIKKLNLNNSPLLMGVLNLTPDSFSDGGKYIKKGKGYEYAKYLIKKGCAILDIGGESTRPGSSEIKKEVEWNRIVKTLK

SEQ ID NO: 119873 - protein, 177 aa, Unknown
  Bacterial polypetide isolated from the Sargasso Sea
MGIINTTPDSFSDGGMLNSVSKEIDYAYKLLSQGADIIDIGGESTRPGSQKITSTEEIQRISPLIKELSNNCDCAISVDTYKSPTVKFALDNGVDIINDISGLTFDPSMANLIAKYDASLVLMHIKGRPETMQQDTKYDNLINNICTFLRNQIEFAINMGIDKEKIIVDPGIGFVRL

SEQ ID NO: 119874 - protein, 274 aa, Unknown
  Bacterial polypetide isolated from the Sargasso Sea
AKKLIKGKKALPLAGNLNIAFDQLEIFYRKKKGSIRSKVYSIAEIKDLDKKILSLVKIDLKKIVSKRKSICGIKFSNPQIMGVLNITPDSFSDGGLYFGESEAYDQVNLMLNDGAKIIDVGGESTRPGSKTVRDKDEWDRIKNTIIKLKKNFSNKILSLDTRKSYVMKRGIECGVDIINDVSGLNFDKKSINIIKSKNTPFILHHMQGTPNTMQNNPKYDDALLDIYDFFEKKINFFIKKKIKKESIIIDPGIGFGKNLKHNLRIMSKISTSIV

SEQ ID NO: 119875 - protein, 120 aa, Unknown
  Bacterial polypetide isolated from the Sargasso Sea
MKKRKFKKLNFLNLPILMGVVNLTPDSFSDGGKYNKKNLGYFHAKSLVKMGCKILDIGGESTRPGAIDIREKIEWKRINPTLKKLKKFKFFISLDTRKSQIMEKGIKYKINLINDVSGLT

SEQ ID NO: 119876 - protein, 115 aa, Unknown
  Bacterial polypetide isolated from the Sargasso Sea
MGVLNITPDSFSDGGEFIKIHSAKKQIEKLITDGAKIIDVGGESTRPGSKEILQSKEWDRIKNVIKFLKLKKIFVSLDSRKSFVMKKATTFKINLINDVSGLNYDKNTITFLKKK

SEQ ID NO: 119877 - protein, 217 aa, Unknown
  Bacterial polypetide isolated from the Sargasso Sea
MGVLNITPDSFSDGGKFNEKSSAKKQINKLIVDGAKIIDVGGESTRPGSKEILQTKEWLRVNKVMSYLKSKKLFVSLDTRKSFVMKKALKYKLDLINDISGLSYDKETINFLKKTKLPFVLHHMKGSTETMQKNPRYNNVLLDIYDYFENKLRLIRKSGIKHNHIILDPGVGFGKNMKHNITLINNVSIFHSFGLPVMLGISRKKFIKDISEIMIVK

SEQ ID NO: 119878 - protein, 232 aa, Unknown
  Bacterial polypetide isolated from the Sargasso Sea
MGVLNLTPDSFSDGGKFNNKSKAVNHAIQMFEAGANIIDVGGESTRPGSKAVSVKLEWKRLNKILKYISKRVSVSLDTRKAEIMEKGIKQGVKIINDVSGLTYDKESIRILKKYKIPFVIQHSKGIPENMQNKPTYKNELLDIYDFFEDKIKLLRSIGIKHNNIIIDPGIGFGKNLKHNMNLISNISIFHTLGLPVLVGNSRKRFIKELSGKNDSKKRIGGTVASSIYLMMQ

SEQ ID NO: 119879 - protein, 273 aa, Unknown
  Bacterial polypetide isolated from the Sargasso Sea
ICGLKFEKPQIMGVLNVTPDSFSDGGLFLDHSKALEQVNLMIKGGASLIDIGGESTRPGSKIVNDRKEWKRIEKIILKIKKNFPKMLLSLDTRKSYVMQNGISLGIDIINDVSGLNFDKKSFDTICSNNIPFILHHMQGTPDTMQKNPKYEDALLDIYDFFEEKINFFLKKKYKTENIFLDPGIGFGKNLDHNLRIMSKISTFHSLGCPILIGTSRKRFIEHIVTKFDTPDRTGGTLASVLYGLLQGVQLFRVHNVKEIYQGILVFNKILKTN

SEQ ID NO: 119880 - protein, 133 aa, Unknown
  Bacterial polypetide isolated from the Sargasso Sea
MNGKKDIAFDKIEIFTRGKTKITSNLIHIKDIKNAKKNIKKIIQKDLKKIISKRKNFLKNINFSEASIMGILNLTPDSFSDGGKFNSKKKSFKRISSLIHSGADIIDIGGESTRPGSKTIDPKIEWKRVEYVL

SEQ ID NO: 119881 - protein, 188 aa, Unknown
  Bacterial polypetide isolated from the Sargasso Sea
MFNNLNYKNKILKKLVFKNKKISIFGILNVTPDSFSDGGTNLNLSAAVLNAQKMVNDGASFIDVGGESTRPGAKPVTAHEEISRVIPVVQRLNFKKIDLSLDTRNSSTMEFGIASGVKIINDVSGLTNDSKSLDVVKKYSTPVVVMHMPGTPQTMMKKNKYHDVILDVYDFLKDRIQCLTPIWIKKKN

SEQ ID NO: 119882 - protein, 274 aa, Unknown
  Bacterial polypetide isolated from the Sargasso Sea
MRVKISKQIRNIEISRKKIAGLSFKKPLIMGILNVTPDSFSDGGMYTSKRTAMEHVKKMIKSGADLIDIGGESTRPGSEKVKIEEELKRIMPVLNNISDLKNKVPISLDTRKPEVMKKGLKKGVDIINDVSGLRYSNDTIPLLKKTKSPIIIMHSISTPKLMQKKINYKNVLIDIYDFLEKKINQCEKNNIDRSRIIIDPGIGFGKNLKQNLNLIKNISFFHSLGVSILLGASRKTFISKISKNVLENERLGGSISSVIFALNQGVQVFRVHDV

SEQ ID NO: 119883 - protein, 195 aa, Unknown
  Bacterial polypetide isolated from the Sargasso Sea
MGVINLTPDSFSDGGRYIKRNSGFNHAKHLVKKGCKILDVGGESTRPGAIDVNEIIEWKRINKTLKKLKKLNTFISLDTRKSWVMEKGIKNKVNLINDVSGLKYDSNTLNVLKKYKIPFVIHHMQGTPKNMQKKPIYKNVVLDIYDFFENKIKKIRSLGIKHNNIILDPGIGFGKNLKHNMTLINNISIFHSLGF

SEQ ID NO: 119884 - protein, 260 aa, Unknown
  Bacterial polypetide isolated from the Sargasso Sea
MGIINITPDSFSDGGKFNKKVSAIKQIKKLIVDGAKIIDVGGESTRPGSQEILETEEWLRVSKVMNYFKSKKIFVSLDTRKSFVMKKAFKYKLDLINDVSGLCYDKETINFLKNSKLPFVIHHMKGTPKIMQKNPSYKNVILDIYDYFEDKLKLIRKKGIKHNHIILDPGIGFGKNMKHNITLINNISIFHSLGLPVMLGISRKRFIKDISGQNDSIERIGGTVSSSIFSMLQGVQILRIHDVNEINQGIKVFKKINFKQ

SEQ ID NO: 119885 - protein, 257 aa, Unknown
  Bacterial polypetide isolated from the Sargasso Sea
MRKYYTRACNFYHGRAARVLIKSNKAFPLNGKKDIAFDKIEIITRNKKGISSNYIHIKDIKKLTKNIKKIVNQDLKKITSKKKNFLKNINFLETSIMGILNLTPDSFSDGGKFNKKNKSFKHISKMIYSGANIIDIGGESTRPGSKTVDTKNEWKRIEYVLKRFKKRYKKICLSIDTRKSEIMIKSIKYGADLINDVSGFEYDQMALSKLEDYKVSKVLHHMQGTPNTMQINPKYKNVLLDIYDFFERKIESQLKDK

SEQ ID NO: 119886 - protein, 263 aa, Unknown
  Bacterial polypetide isolated from the Sargasso Sea
LKKKVILDLKKIKIKKKNFSNLEFKKIPNILGVLNLTPDSFSDGGKFNTKQRGISHAFKLYNDGADLIDVGGESTRPGSKTVNKKDEWKRINQILKSIVKKIPISLDTRKSEIMKNGIKLGVKLINDVSGLSFDSETINVLKTYKVPFVIQHKLGTPENMQKNPKYNNELLDIYDFFEEKIKFLRSKGIKHNNIILDPGIGFGKKLKHNMNLIRSVSIFHSLGFPILVGNSRKKFIKDISKKNDSFTRIGGTISSSLYLMSPR

SEQ ID NO: 119887 - protein, 274 aa, Unknown
  Bacterial polypetide isolated from the Sargasso Sea
MPLCGDKNIAFDKVEIITRKKNKVLSKIIELKKIDNLNTSCRKKIKQDLKKIVLKRKNFLKNINFLKPSIMGILNLTPDSFSDGGKFNNQKKATKHIHEMIKSGANIIDVGGESTRPGSKTVSSNMEWKRIEKIIKAFKKKHKKTCLSIDTRKSEVMIKAIKYRADLINDVSGFNYDSLSLSKLNNYNIAKVLHHMQGTPNTMQKNPKYKNVLLDIYDFFEKGIKKIDDKKIIIDPGIGFGKNLKHNLTLISKISLFHSLGFPILIGTSRKRFI

SEQ ID NO: 119888 - protein, 258 aa, Unknown
  Bacterial polypetide isolated from the Sargasso Sea
MGVLNLTPDSFSDGGKFNKKNKGVRHAINLYKTGASLVDVGGESTRPGSKEVNEKLEWFRIYKILKLIVKKIPISLDTRKSGIMKNGISMGVKLINDVSGLSYDPETINVLKKYKTPFVIQHSLGTPENMQKNPKYKNELLDIYDYFEEKIKLIRSKGIKHNNIILDPGIGFGKNLKHNMNLIRGVSIFHSLGFPILVGNSRKRFIKDISKKNDSETRIGGTMASSIYLMMQGIQILRIHDVNDVIQGIKVFNQIIKN

SEQ ID NO: 119889 - protein, 289 aa, Unknown
  Bacterial polypetide isolated from the Sargasso Sea
KKKISLPISGNKSFSFDTIEIITRTNKKKINIKNIEFLPLKIKKKVLINIDNISKAKKIPKLKFDNLPIFMGILNITPDSFSDGGKFNNKISAKKQINKLITDGAKIIDVGGESTRPGSKEIPQTEEWLRINKVMNYLKSKSFLVSLDTRKSFVMKKASKYKLDLINDVSGLSYDKKTIGFLKKTKLPFVLHHMKGNTETMQKNPSYNNVLLDIYDYFESKLRLIRKSGIKHNHIILDPGVGFGKNMKHNITLIKNVSIFHSLGLPVMLGISRKRFIKDISGNNDSKER

SEQ ID NO: 119890 - protein, 220 aa, Unknown
  Bacterial polypetide isolated from the Sargasso Sea
MGVLNITPDSFSDGGKFIKKVSAIKQIDKLIFDGAKIIDIGGESTRPGSKEILQTEEWLRVNKIMGYLKSKKFFVSLDTRKSFVMKKALKYKLDLINDVSGLSYDKETINFLKISQLPFVLHHMKGTTETMQKNPSYRNVLLDIYDFFEDKLKMIRDKGIKHNHIILDPGIGFGKNMKHNITLINNVSIFHSLGLPVMLGISRKRFIKDISGQNDSKLRI

SEQ ID NO: 119891 - protein, 250 aa, Unknown
  Bacterial polypetide isolated from the Sargasso Sea
MTRRSKRRVFINQIKNLSKSLRKKINFDLKKIKLKKKNFSNFNFNKFPNLLGVLNLTPDSFSDGGKFNTEKRGVIHAINLINYGADLIDVGGESTKPGSKAISESLEWKRINKILKLLIKKKIPLSLDTRKSKIMEKGINQGVQLINDVSGLEFDVNSVKILKKYKTPFVIQHTQGLPENMQKKPSYKNELLDIYDFFEEKIKLIRSKGIKHNNIILDPGIGFGKNLKHNMNLIQNISIFHSLGFPLLVG

SEQ ID NO: 119892 - protein, 137 aa, Unknown
  Bacterial polypetide isolated from the Sargasso Sea
MHGNKELSFDTVEILSRKKKRKININIINSLSFDLKKKIKKDLKKITKKKSFCKINLKEPLLIGILNLTPDSFSDGGQYNQIGTALKRVKSLLKAGCKIVDVGGESTRPGSKDIDENIEWKRIKNLLKRIRNYNFFV

SEQ ID NO: 119893 - protein, 186 aa, Unknown
  Bacterial polypetide isolated from the Sargasso Sea
MQKHYTRACNFYYNNTSKEYVKKKISLPISGNKSFSFDTIEIITRTNKKKINIKSINKLPLKIKKKVLIDINNISKPKKIPKLKLNNLPILMGVLNITPDSFSDGGKFNNKNAARKQINKLIVDGAKIIDIGGESTRPGSKEIKHKEEWQRVNKVMGYIKSKKVFVSLDTRKSFVMKKAAKYKLNL

SEQ ID NO: 119894 - protein, 231 aa, Unknown
  Bacterial polypetide isolated from the Sargasso Sea
MGVLNITPDSFSDGGIFFDKTKAFDHANSMRKSGAAIIDVGGESTRPDSKIIKEEEEWNRIKETIINLKKRHPKIILSLDTRKSQIMRKGIENGINIINDVSGLEFDKKSFDLINLKKIPFILHHMQGTPETMQKDPKYNDALLDIYDFFEKKINFCLKKKYKKEFIILDPGIGFGKNLDHNLRIMSKISTFHSLGCPMLIGTSRKRFIEHIVTKFDTSDRIGGTLSSVLY

SEQ ID NO: 119895 - protein, 310 aa, Unknown
  Bacterial polypetide isolated from the Sargasso Sea
AGNPNIAFDQLEIFQRKKKRITKSDFYSINEIETLNKSILPTVKSDLKKIIKKRKSFLGLNFNIPQIIGVLNITPDSFSDGGLFFDEFNAYKQADLMLKNGANIIDVGGESTRPGSNTINYKEEWNRVKNTIIKLKKKFPKIILSLDTRKSYVMKKGIEKKIDIINDVSGLKFDKRAFDTINKKKIPFILHHMQGTPKTMQKNPRYDDALLDIFDFFEKKINFCLKKKYNKKFIVIDPGIGFGKNLEHNLRIMSKISTFHSLGCPILIGTSRKRFIEHIVTKFDTPDRTGGTLASVLYGLSLRSSAIQSS

SEQ ID NO: 119896 - protein, 140 aa, Unknown
  Bacterial polypetide isolated from the Sargasso Sea
MGILNVTPDSFSDGGKFYKLDKAIEYSLELINQGVDIIDVGGESTRPGSNPISVDDEIDRVIPVIKGIRSVSSIPISIDTYKSEVAKEALKSGANIVNDISGLTFDLKMIDIVKEFNVPIIIMHIKGTPKNMQQNPQYDN

SEQ ID NO: 119897 - protein, 182 aa, Unknown
  Bacterial polypetide isolated from the Sargasso Sea
MRKYYTRACNFYHGKIAENLIKSKKALPINGKKNIAFDNIEIFIRGNKKIKTKLIHIKDLKKLSRNIKWTIYKDLKKITSKRTNFLKNVNFSKTNIMGILNLTPDSFSDGGQFNTKNKSLKHISKMIDSGANIIDIGGESTRPGSKTVSNKKEWKRIEYVVKNFKKKYKKICFSLDTRKSYL

SEQ ID NO: 119898 - protein, 258 aa, Unknown
  Bacterial polypetide isolated from the Sargasso Sea
ACNFNYGFSSRQLIKKKKALPLCGNKDISFSKIEVFTRNKNKVLSKRISLKEISSLSTKQRKKIKKDLKKITSKRKNFLKNVNFSSPSVMGILNLTPDSFSDGGKYNKKSKSFKHISSMIDQGADIIDVGGESTRPGSKTINPKNEWKRVKYVLKNFKKKFKNNCLSLDTRKSEVMLKGIKYNIDLINDVSGFKYDVNSLSKIKKYNISKVLHHMQGTPNSMQNNPKYKNVLLDVYDFFEKNIKKMNNNKIILDPGIG

SEQ ID NO: 119899 - protein, 92 aa, Unknown
  Bacterial polypetide isolated from the Sargasso Sea
MFYVIDRYVPKVEIPSLPIPEPLQCGRFKLTFERPLVMGILNVTPDSFSDGGQYAMRGEALRQAERMLLAGADIVDIGGESTRPGAPPGRSR

SEQ ID NO: 119900 - protein, 228 aa, Unknown
  Bacterial polypetide isolated from the Sargasso Sea
MGVLNLTPDSFSDGGRFNKISKGIKHALEMTSAGANLIDVGGESTRPGSKTVNPKNEWNRIYRILRLVCKKVPVSLDTRKSEIMEKGIKLGVKIINDVSGLNYDKKTLDILKKYQIPFVIQHSKGTPENMQIKPTYKNELLEIYDFFEKKIKTLRSIGIKHSNIILDPGIGFGKNLKHNMNLISKISIFHSLGFPILVGNSRKRFIKEVSKNNDSKKRIGGTVVLLYT

SEQ ID NO: 119901 - protein, 82 aa, Unknown
  Bacterial polypetide isolated from the Sargasso Sea
MGVLNITPDSFSDGGKYYKNKLAYKHAKNLIKSGSSIIDVGGESTRPGAKEIDLKKEWKRISKILKKLKNNKCLISLDTRKS

SEQ ID NO: 119902 - protein, 55 aa, Unknown
  Bacterial polypetide isolated from the Sargasso Sea
MGVLNITPDSFSDGGKFNEKSSAKKQINKLILDGAKIIDVGGESTRPGSKEIHQT

SEQ ID NO: 119903 - protein, 250 aa, Unknown
  Bacterial polypetide isolated from the Sargasso Sea
SDSFSDGGKFNSNKKALKQISHMVKSGAKIIDIGGESTRPGSKTVKPRAEWKRIEHVVKKFKKKHKKICLSIDTRKSDIMIESIKFGADLINDVSGFNYDPNMILKLKDYNIPKVLHHMQGTPNTMQKNPRYQNVLLDIYDFFEKKITNISNNKKIILDPGIGFGKTLKHNLTLISKISLFHSLGFPILVGTSRKRFINQISGEYDSKDRTGGTLASVLFLLSQGVQIFRVHNVREIKQGILVFEKINEK

SEQ ID NO: 119904 - protein, 202 aa, Unknown
  Bacterial polypetide isolated from the Sargasso Sea
MRKYYTRACNFYHGSEAIRLIQTKKALPLNGKKNIAFDSIEIFSREKGGVKLNLININKVFKLNKKIRKIVKEDLIKIISKRKDFLKHINFQSPSIMGILNLTPDSFSDGGKFNNYNKAFKQVSNMIKSGANIIDVGGESTRPGSKTIDPKIEWARIKYVLNNFKKKYNKTCLSVDTRKSDIMVKSIACGADLINDVSGFNH

SEQ ID NO: 119905 - protein, 224 aa, Unknown
  Bacterial polypetide isolated from the Sargasso Sea
MGVLNATPDSFSDGGKYLNSKNANTQIKKLINDGASIIDIGGESTRPNSNTVNSKVEWERVKSKIKYAKKNKIFVSLDTRKSYVLEKSLPLKIDILNDVSGLEYDYKIIKILKKSKIPFVLHHMLGTPKTMQKNPKYNNVLLDIYDFFEKKLKFLKANKINHKNIILDPGIGFGKNLKHNITLINKISIFHTLGFPVMLGISKKRFIKDISVNNDSKERIGGTT

SEQ ID NO: 119906 - protein, 99 aa, Unknown
  Bacterial polypetide isolated from the Sargasso Sea
MNIKQFNDWLLSDNKQSLIMGILNVTPDSFSDGGQYLDKNVAVEHALAMIRNGANIIDIGGESTRPFSDPVSLDEEISRVIPVIKGIREKSDVCISIDT

SEQ ID NO: 119907 - protein, 254 aa, Unknown
  Bacterial polypetide isolated from the Sargasso Sea
MGVLNLTPDSFSDGGKYNKDLKAKKQINKLINDGAKIIDVGGESTRPGSQEIKQLKEWNRIKNSMKYLMKNKFFVSVDTRKSLVMKKALNYKLDLVNDISGLSYDKDTIEFLKKTRLPFVLHHIKGTPKNMQINPNYKNILLDIYDYFEEKLRQIRKKGIKHNNIILDPGIGFGKNLKHNITLINKISIFHSLGLPIMLGVSRKKFIKDISGLNDSKERVGGTVASCIYSMSQGVQILRVHDVNEINQGIKVLK

SEQ ID NO: 119908 - protein, 140 aa, Unknown
  Bacterial polypetide isolated from the Sargasso Sea
MTEYFRPILNTDLSIPDNAQVMRGTHFWFTHAEKLARNTEPQIVMAKNIPDNILQNITNERVNICRLSFDVPRVMGILNVTPDSFSDGGKYSSVETAEVHLKSMISDGADIIDIGGESTRPGAVEVEISEEISRVIPIID

SEQ ID NO: 119909 - protein, 286 aa, Unknown
  Bacterial polypetide isolated from the Sargasso Sea
MRKYYTRPCNFYYGNYAKKLIKKKKALSLAGNQNIAFDQLEIFKRKKRKIIQSNIYSISSIKTLPKEIQLIIKNDIKKITSKRKNISGVKFDAPSIMGVLNITPDSFSDGGLFFDESKAYDQANLMISHGATIIDIGGESTRPGSKIINEKDEWDRIKNTIIKFKKNFSNIPLSLDTRKSYIMKKGLECGVNIINDVSGLNFDKKSFDVIKSKNIPFVLHHMQGTPDIMQKNPKYEDALLDIFDFFEEKINFCVKKNFKKEFIIIDPGIGFGKNLEHNLRISLKFL

SEQ ID NO: 119910 - protein, 131 aa, Unknown
  Bacterial polypetide isolated from the Sargasso Sea
MGILNVTPDSFSDGGKFNKIHLAKKQIKNLIKNGANIIDVGGESTRPGSEEVMEFKEWNRIKNIMKYLNSKKFFVSLDTRKSFVMKKAIKYKLNLINDVSGFNHNKDTIEILKKTKLPFVLHHMKGTTKSM

SEQ ID NO: 119911 - protein, 268 aa, Unknown
  Bacterial polypetide isolated from the Sargasso Sea
MGILNTTPDSFSDGGKYDDLQLAYIRATLMIEQGADIIDVGGESTRPGAESVPEIEEIRRTKDVIAEIKNNFPNQLISIDTTKSRVAKEAIDAGANIINDVSALQNDPDMGKIAAKFETGVVLMHKQGSPKNMQINPNYKNVTQDVHDYLNQRLSAAANFGIKKHACVIDPGIGFGKTLSHNLQLLKHLSVFGDAAPILIGASRKKFIGEIYDKPDPADRLQGSLAAAAYALSQGAHILRAHDVLETCELARMFDTINGSYDTTNGTI

SEQ ID NO: 119912 - protein, 220 aa, Unknown
  Bacterial polypetide isolated from the Sargasso Sea
MGILNLTPDSFSDGGKFNKNNKSIKHISKMIMSGADIIDVGGESTRPGSKTINPNVEWKRVKFVLKKFKKKFKNTCLSIDTRKSELMIKSVKYGVDLINDVSGFKYDQDSLPKLKKYNIAKILHHMQGTPKIMQKNPKYKNVLLDIYDFFEKNINSNLDNKKIILDPGIGFGKNLKHNLTLISNISLFHSLGFPLLIGTSRKRFINQISGKYDSNDRTGG

SEQ ID NO: 119913 - protein, 257 aa, Unknown
  Bacterial polypetide isolated from the Sargasso Sea
MGVLNMTPDSFSDGGKYNRDYSAKKRLNYLFDSGANIVDIGGESTRPGSKPVNSKIEWNRIKYILNKFNKKNFLSLDTRKSEIMKKGINLGVSLINDVSGLNYDKNSINVLKKYKTPFVLQHSLGNPDIMQNNPKYKNVLLDIYDFFEKKIKHLRINGINHNNIILDPGIGFGKNLKHNLKLIKDISIYHSLGLPILLGISRKKFIKELSEKNDSSSRVGGTISSSIYAMMQGVQLLRIHDVNEINQSLKVFKELIK

SEQ ID NO: 119914 - protein, 60 aa, Unknown
  Bacterial polypetide isolated from the Sargasso Sea
MGILNLTPDSFSDGGKFNTRDKSFKQISRMLKSGADIIDVGGESTRPGSKEVHPKNEWKR

SEQ ID NO: 119915 - protein, 214 aa, Unknown
  Bacterial polypetide isolated from the Sargasso Sea
MRKYYTRPCNFYYGNYARKLITKKIALPLAGNKNIAFDKLEIIHRKNKRNIVSEYCSINNIKKFNKILLSSIKKDLKNIVAKRKSICGLKFNKPEIMGVLNITPDSFSDGGLFFKQSKAYDQAKLMIKNGASIIDVGGESTRPGSKTINQKEEWERIKKVIIKFKKEFSRIPLSLDSRKSYVMSKGIENGINIINDVSGLNFDNKSICSYKLKK

SEQ ID NO: 119916 - protein, 209 aa, Unknown
  Bacterial polypetide isolated from the Sargasso Sea
MTSYFRPIVRTGSPRSKNSIFLAETNYWVSEAEKINLGKKKKLVSINDVPDWWKKRWLKKRSDILGMEFGFPKLMGILNVTPDSFSDGGNHVKLYAALNQAKFMEESGVDIIDIGGESTRPGALIVPILEEISRIEPVINGISARSKIPISVDTRKADVASAARKAGASMVNDVSGFTFDPNLLPYCSKYKLPVCVMHMKGSPENMQNN

SEQ ID NO: 119917 - protein, 165 aa, Unknown
  Bacterial polypetide isolated from the Sargasso Sea
MGIMNTTPDSFSDGGKYNSANKAIDRAYDLLDNGADIIDIGGESTRPGAKPVSPAEEIKRISPLLIELAKNTDSTISIDTYKSSTAIYALDNGAHLINDISGMTHDKKMVNIVSRYKVPIVIMHMKGTPKTMQQNPTYDNIINEISDFLVKQANIVHSAGVSSDK

SEQ ID NO: 119918 - protein, 315 aa, Unknown
  Bacterial polypetide isolated from the Sargasso Sea
MSFSHGSDAYNLIKIKKALPICGNKKLAFSSIEIIYRAKKNKKKNIYITQIKKLPPKVKKSVLKKIKNITSKRKKISGLDFDKFNIFGVLNMTPDSFSDGGKFNKLKLAKIYSKKMINDGANFIDIGGESTRPGAKLIPSEKEKQRVLPIISKIKKYNISIDTRKSDVMIAAIKKGANIINDVSALDFDQNSLNVVSKLQKPVILSHSQGTPDIMQNNPKYQNVLLDIYDYFENKINQLTKRKFLRKNIILDPGIGFGKNLNHNLNLISNIGLFHSLGCSIMLGPSRKSFIGKVMKRKDSKYRLGGTLSSVITGY

SEQ ID NO: 119919 - protein, 212 aa, Unknown
  Bacterial polypetide isolated from the Sargasso Sea
MGVVNLTPDSFSDGGKYNKKNLAMKYINKMLLDGAKIIDIGGESTRPGANDISSTKEWNRIKLVLKMLKNKKCFISLDTRKSLVMKKASRIKVDLINDVSGLTYDPQTVSYLKKTKKPFVIHHIKGTPKNMQIKPSYKNVLLDIYDFFEAKLKFVRKQGIKHNNILLDPGIGFGKNLKHNITLLKNISIFHSLGLPVMLGLSRKRFIKDIQK

SEQ ID NO: 119920 - protein, 173 aa, Unknown
  Bacterial polypetide isolated from the Sargasso Sea
MGILNLTPDSFSDGGKFNNEKKSYLHISNMIKAGANIIDVGGESTRPGSKTVPVKSEWKRIEKVIKNFKKKHKNICLSLDTRKSEIMLKGIKSGVNLINDVSGFNYDETSLIKLKKFNIAKVIHHMQGTPNNMQKNPKYKNVLLDIYDFFEKVIKKINNKKIVLDPGIGFGQD

SEQ ID NO: 119921 - protein, 128 aa, Unknown
  Bacterial polypetide isolated from the Sargasso Sea
MQRYYTRACNFYFGNQSKILVNKKKSIPLHNIKEISFDHIEIITRKSKKIISINQIKQLPKKLKKKIKADIKKIKSKKFNFSNFNFKKIPNVLGVLNLTPDSFSDGGNLIKKIKVLAMLLIFIKMVHL

SEQ ID NO: 119922 - protein, 350 aa, Unknown
  Bacterial polypetide isolated from the Sargasso Sea
MIKYYTRACNFYYGSISKEKIKKKLSLPLNGNDSISFDNIEIITRKFKKKIHIKEISNQKINIKNKIKKDIKLIISKKKFKGLNFLNFPLLMGVINLTPDSFSDGGKYNKKSSTFKHINYLIKKGCSIIDIGGESTRPGAKDISTLVEWKRIKKTLEKTKKLNKFISLDTRKSWIMEKGIKNKVNLINDVSGLEYDPKTKNVLKKYKTSFVVHHMQGNPKNMQKNPKYKNILLDIYDFFEKKIEKIRSLGIKHNNIILDPGIGFGKNLKHNMTLINNISIFHSLGFPVMLGISRKRFIRDLSGKNDSKERLGGTISSSLYAMTQGVQVLRIHDVNEVNQSIKVFKSLIFK

SEQ ID NO: 119923 - protein, 163 aa, Unknown
  Bacterial polypetide isolated from the Sargasso Sea
MGDTIACGARTLDLSRPRIMGVLNVTPDSFSDGGQLYRDGRVDTDALLTRAEQMLVEGADILDVGGESTRPGAAAVSEAEELDRVVTAVEALARHCDTIISVDTSTPSVMRASARCGAGLLNDVRGFQRPQALQAAADTGLALCVMHMQGEPDTMQTAPTYSD

SEQ ID NO: 119924 - protein, 235 aa, Unknown
  Bacterial polypetide isolated from the Sargasso Sea
IKLLSDGAKIIDIGGESTRPGAQTVSLDDELERVVPIIKAIRAQSDCVISVDTSKAEVMRQAILAGADMVNDVRALQEPDALNVVAQFENIAICLMHMQGQPRSMQTSPQYNDLMGDINEFFKSRINACETMGIKAQQLILDPGFGFGKTLSHNYEILTKFNDFNKLGLPLLAGLSRKSMIGNLLNRDTSERMAGSLAGALIAAQNGAKIIRVHDVKETADVLGVYQACIKGIIE

SEQ ID NO: 119925 - protein, 339 aa, Unknown
  Bacterial polypetide isolated from the Sargasso Sea
RANQLIREKRALPLCGNKYIAFSGIEVFERKNEKIKKKFLDIKKIKKLNKIEKKKVLKDIRKISEKRKNFLKNVNFTNPSIMGILNLTPDSFSDGGKFNKFDKSIGQIAQMIQSGANIIDLGGESTRPGSKTIDPKTEWRRLEKVLKIFKIKFKQTCLSIDTRKSMIMDKSIKFGADVINDVSGFDYDSDSLSKLKDKNISKVLHHMQGTPNTMQNNPKYQNVLLDIYDYFENGINNKFKDKKIILDPGIGFGKTLKHNLTLISNISLFHSLGLPIMIGTSRKRFISQISGKNDSVERIGGTLASILFLLSQGIQIFRVHNVNEVKQGILVFEKILMNK

SEQ ID NO: 119926 - protein, 259 aa, Unknown
  Bacterial polypetide isolated from the Sargasso Sea
MGILNVTPDSFSDGGEFLSVNDAFSQYKKLKKEGAAIVDVGGESTRPGSKTVPAKKELQRIMPVIAQIKSNSKNSLVSVDTRKSTVMKAVMKYNIDFINDVSGLRYDSETISFLSNYKIPFIIMHSISNPTKMQKSIKYNDVLLDVYDFLENQIRKCKLKGISENKIIIDPGIGFGKTLKQNLTLIKKISLLHSLGLPVMLGSSRKSFIGKIQKNELYDDRKGGSIASVLYGLSQGIQIFRVHDVYETNQAIKVYTKLI

SEQ ID NO: 119927 - protein, 258 aa, Unknown
  Bacterial polypetide isolated from the Sargasso Sea
MGIINLTPDSFSDGGKYKNTNSAYEHSKFLIQKGCKIIDVGGESTRPGSSDINVDLEWKRIQNFFKKSRGLKSLISVDTRKSKIMYKANKYKLNLVNDISGLSYDANTLEFLKKTNKPFVLNHIKGEPVNMQKNPKYNNVVLDIYDFFEEKLKIIRNKGIKHNNIILDPGIGFGKNLKHNITILKDISIFHSLGFPLLLGISRKRFIKDLSDMNDSKERIGGTISASLWSMMLGVQLLRVHDVNEVNQAIKVFKKLNF

SEQ ID NO: 119928 - protein, 348 aa, Unknown
  Bacterial polypetide isolated from the Sargasso Sea
MPKYYTRVCNFYFGKSSLKKIKEKKSLPLNGNPLISFDSFELITKTKKKIVQLDQINRLRHDIKKKVKKDLELVIKKKKFKKLNLNNQPIIMGVLNLTPDSFSDGGQYNNKSSGYTRAIYLFNKGCDILDIGGESTRPGSKEVKIDIEWKRIKAILKKLSKLNKFISVDTRKSEIMSKSLNYKISLINDVSGLSHDPDTIDLLRRSNSPFVIHHMKGVPENMQKKPKYKNVVLEIYDFFERKIKQLRENGIKHNNIILDPGIGFGKDLKHNITILNNISIFHTLGFPVMLGVSRKRFIKDISGNNDSKERLGGTISACLSSMMQGVQILRVHDVNEVNQAIKVFKSLN

SEQ ID NO: 119929 - protein, 264 aa, Unknown
  Bacterial polypetide isolated from the Sargasso Sea
MGILNVTPDSFSDGGKYFKKNTAIEHALELVKNGADIIDIGGESTRPFSDPVSLDEEISRVIPVIEGIRKKSDVCISIDTTKSIVASKALDVGASIINDISAMEIDPLMADVAVKFDCPLIIMHMKGTPKNMQDNPQYESLIPDIKDYLVDRIDFAISKGVNRKKIIIDPGIGFGKTVENNFEIINNLNHFVELNFPVLLGASRKSFIGISLNLPENDRLEGSLAANVIGLQQGVKIFRVHDVSETNKALFIANKIFNSNHLIS

SEQ ID NO: 119930 - protein, 283 aa, Unknown
  Bacterial polypetide isolated from the Sargasso Sea
MSQAQHLSRLPCGSRLLDLSRPQVMGILNVTPDSFSDGGRFTARDAALRHAEQMVAAGATLIDIGGESTRPGARAVSPTEELERVAPVVEAIARQLDVIISVDTSTPAVMRESARLGAGLINDVRSLQRDGALDAAADTGLPVCLMHMRGEPGNMQDDPQYPDIVAEVRDFLAERMAVCTTAGIPAERILLDPGFGFAKTLEHNLALFKRMSELSALGRPLLVGVSRKSMIGKVLGHEVGGRLYGSLALAALALTKGAHILRVHDVAETVDVVRMIAAVEAAQ

SEQ ID NO: 119931 - protein, 262 aa, Unknown
  Bacterial polypetide isolated from the Sargasso Sea
MIMGIINMTPDSFSDGGKFNSINSAIDYAYKLLDTGADILDIGGESSRPGADPVSNSEEIDRISPLIKELGKNANCLISVDTYKSSTAKFGLDNGATIINDISGLTYDSKMASVISNFNAPVVVMHMKGTPKTMQKNPNYFDLIKEIKSFFSKQIEFAIKNGINRKNIILDPGIGFGKGLNDNFEIIGKLDQICDMGYPVLVGPSRKSFIGEVLNLSVNERLEGSLAAANACLMNGAKMIRVHDVNETKKSLSIIEKIIGSA

SEQ ID NO: 119932 - protein, 257 aa, Unknown
  Bacterial polypetide isolated from the Sargasso Sea
MGILNLTPDSFSDGGKYNKKNKSFKHISKMIYSGAEIIDVGGESTRPGSKTIHPKIEWKRIDNVIKKFKKKYKTTCLSLDTRKSEIMVNGIKHGVNLINDVSGFNYDKNSLLKLKKYKISKVLHHMQGSPNNMQKNPKYKNVLLDIYDFFEKSINHKFKDKKIILDPGIGFGKTLKHNLTLISKISLFHSLGLPILVGTSRKRFINQISGKYDSNDRIGGTLASIIFLLSQGVQIFRVHNVNEVKQGILVFDKILLN

SEQ ID NO: 119933 - protein, 254 aa, Unknown
  Bacterial polypetide isolated from the Sargasso Sea
TPDSFSDGGDYNTFKKANQRIKKLIKSGADIIDIGGESTRPGSKVINPKNELERVKKVIKKFKNSFSKTLLSVDTRKSQVIDYAIKVKADIINDVSCFKFDQNSHKSVRNKNIWKIIHHMQGTPQTMQKNPKYHHVLLDIYDFFEKEISNFKNDKYKRKLILDPGIGFGKKLKHNLMILNKISIFHSLGFPILIGTSRKRFINQISGKYDTKERIGGTLSSIMYSLSQGVKIFRVHNVEEVKQGILVFEKLLNK

SEQ ID NO: 119934 - protein, 261 aa, Unknown
  Bacterial polypetide isolated from the Sargasso Sea
MGILNVTPDSFSDAGKYFNLDKAVEYSLDLINQGADIIDIGGESTRPGADEISINDELKRVIPVIEGIRSNSSIPISIDTYKSEVAKEALNSGANMVNDISGLNFDSKMIDVVKDYNIPIVIMHIKGTPKNMQINPTYDNIIKEIITYFKTQINLCLDYGIPKSNIILDPGIGFGKLKNDNFLLIKELKTFANLGYPILIGPSRKSFIGLTLDLPVEERLEGTAAAITASIINGARIVRVHDVLQMKRVQIISDKIKGATA

SEQ ID NO: 119935 - protein, 209 aa, Unknown
  Bacterial polypetide isolated from the Sargasso Sea
MGILNVTPDSFSDGGRFTRTNIAVDHAFKMIDEGANIIDIGGESTRPGSVPVSEDEECKRILPVIESIKKINSKITISIDTYKASVAKKAIEAGADIVNDISGLTFDPNMLPLLSGKDIFVIIMHINGKPKTMQKNPVYANLIEDIKSFLIHQSKVAEKSGIKKDHIILDPGIGFGKTFDHNFTLLRRLDEICSLGYPVMIGPSRKAFI

SEQ ID NO: 119936 - protein, 260 aa, Unknown
  Bacterial polypetide isolated from the Sargasso Sea
MGILNTTPDSFSDGGKYLNNHYAKNQINKFINEGASIIDVGGESTRPGSDDINYKIELKRVEPKLKYLMKKKCFISIDTRKSEIMKKSIKYNVNLINDVSGLSYDNNTINILKKFNIPFVIHHMQGTPKTMQANPKYKNILLDVYDFFEKKINFIRSNNIKHNNIILDPGIGFGKNLKHNITLIRNISIFHSLGFPVMLGISRKKFIKDLSKNNDSKERIGGTLATSIYCASQGIQILRVHDVNEIYQGLKVFEKLKFLR

SEQ ID NO: 119937 - protein, 205 aa, Unknown
  Bacterial polypetide isolated from the Sargasso Sea
MEKYYTRACNFYFGKTSKEKVKKKISLPVGGNTLISFDSVEIITRNSKKKINIKKINQLPLKIKKKISIDIKNICKNKKILGLKFKNLPLLMGILNITPDSFSDGGKFKNLKSAKKQINKLINDGANIIDVGGESTRPGSTKVLQSIEWNRIKKSLKYLKTRNFFTSLDTRKNYVMKKALNFNINLINDVSGLTYDKDTIDFLNK

SEQ ID NO: 119938 - protein, 193 aa, Unknown
  Bacterial polypetide isolated from the Sargasso Sea
MTGTRKLVKYYVRPILNNSKNKDSLKLGSSKLYFDRIELIKRNGKKISSKYLCLKEVNGLSRDISKTINIQLKKITKTRKKIKNLNFNKPLIMGILNVTPDSFSDGGEFLSVNDAFAQYKKLEKEGAAIVDVGGESTRPGSKTVPAKKELQRIMPVIDQIKSNSKNSLISVDTRKSTVMKAVMKLYVDFYHDV

SEQ ID NO: 119939 - protein, 264 aa, Unknown
  Bacterial polypetide isolated from the Sargasso Sea
MGILNITPDSFSDGGDFFEKNIAIERALEMVEQGADIIDIGGESTRPFSDSVSLKEEISRVIPVIEGICKESDVCISIDTTKSKVASEALEAGASVINDISAMEIDSLMVDVALKFNCPIVLMHMKGIPKNMQDNPQYQSLISDIKEYLLARIDFVVSKGIDRNKIIIDPGIGFGKTVENNFEIINNLDQFVKMNFPVLLGASRKSFIGVSLNLPENDRLEGSIAANIIGLQKGAKIFRVHDVVETSRAMVIANKIFNSNNIIS

SEQ ID NO: 119940 - protein, 323 aa, Unknown
  Bacterial polypetide isolated from the Sargasso Sea
MIKYYTRACNFIYGHRANQLIKEKRALPLCGNKYIAFSSIEVFERKKNKIKKKFLEIKKIKKLNKIEKNKVSKDIKKISAKRKNFLNNVNFSNPSIMGILNLTPDSFSDGGKFNKFNKSIAQISRMIESGANIIDLGGESTRPGSKTIDPKTEWRRLEKVLKIFKKKYKQTCLSIDTRKSIIMIKSIKLGADLINDVSGFNYDSNSLLKVNNKNISKVLHHMQGTPNTMQNNPKYQNVLLDIYDYFENGINTKFKDKKIILDPGIGFGKTLKHNLTLISNISLFHSLGLPIMIGTSRKRFIGQISGKNDSVERIGGSLASILF

SEQ ID NO: 119941 - protein, 299 aa, Unknown
  Bacterial polypetide isolated from the Sargasso Sea
MLVSDSAVSPFIPAPLQCGRFELTFERPLVMGILNATPDSFSDGGRFLARDDALRQAERMIAEGVDLLDIGGESTRPGAPPVPLDEELARVIPLVEALRPLNVPLSIDTYKPAVMRAALAAGADLINDIWGFRQPGAIDAVRDGNCGLCAMHMLGEPQTMQVGEPDYGDVVTDVRDFLAERAQALRDAGVAPERICVDPGFGFGKAVVDDNYALLAALPDTAPVRPDGLAYPILAGMSRKSMLGAVIGGKPPMERVAASVAAAVCAVERGAAIVRVHDVAATVDALKIWNAVREAARQR

SEQ ID NO: 119942 - protein, 319 aa, Unknown
  Bacterial polypetide isolated from the Sargasso Sea
IKEISFDHLEIITRKKIKRISINQVNKLPNNLKKKINADIKKINSKKKNFSNFNFKKIPNILGVLNLTPDSFSDGGKFNKKNKGITHAISLYKSGASIIDVGGESTRPGSKPVNEKQEWNRINKILKLIVKKIPISLDTRKSRIMENGIRMGVKLINDVSGLSYDPKTINILKKYKIPFVIQHSVGIPENMQKKAKYKNELLDIYDYFEDKIKLIRSKGIKHNNIILDPGIGFGKNLKHNMNLIRGVSIFHSLGFPILVGNSRKRFIKDISKKNDSKTRIGGTLASSIYLMMQGIQILRIHDVNEVKQGIKVFNEIVKN

SEQ ID NO: 119943 - protein, 285 aa, Unknown
  Bacterial polypetide isolated from the Sargasso Sea
MRKYYTRACNFYHGKAATSLIKSNKAFPLNGKKDIAFDKIEIFTRGKKKITSNVIHIKDIKNIKKNIKKVIKKDLKKIISKRKNFLNNINFSETSIMGILNLTPDSFSDGGKFNAKNKSFKRISSLIQSGANIIDIGGESTRPGSKTIDPKIEWKRVKQVLTKFKKKYKKTCLSLDTRKSDLMIKGIKGGVDLINDVSGFEFDPNTLIILKNYNISKILHHMQGTPNTMQKNPKYRNVLLDIYDFFEGKIENKLKDKKIILDPGIGFGKTLKHNLTLISKNIFVS

SEQ ID NO: 119944 - protein, 353 aa, Unknown
  Bacterial polypetide isolated from the Sargasso Sea
MRKYYTRACNFYHGSDATKLIRLNKALPLNGKKNIAFDRIEIYSREKNGVRINLIHINNINKLSKNIKKVIKRDLKNIVSKRKNFLKNINFNNPTIMGILNLTPDSFSDGGKFNSKSKALKQIYNMINDGAKIIDVGGESTRPGSKTIDPKIEWRRVEYVISNFKKKYKKICLSIDTRKSDVMTKSIRHGVDLINDVSGFNHDPYALFKLKNYNISKVLHHMQGTPNTMQKNPKYKNVLLDVYDFFESRISNISNDKKIILDPGIGFGKNLKHNLTLISKISLFHSLGFPILIGTSRKRFINQISGEYDSKDRTGGTLASVLYLLSQGVQIFRVHNVREVNQGIMVYKKINEK

SEQ ID NO: 119945 - protein, 329 aa, Unknown
  Bacterial polypetide isolated from the Sargasso Sea
MIKYYTRACNFYYGSTSKEKIKKKLALPLNGNNLVSFDSIEIITRKYKKKIHIRDIKKQSNKIKEKIKKDIKLIIQKKKFKGLNFLNFPILMGVVNLTPDSFSDGGKYNKNNKGFNHSKYLIKKGSEILDIGGESTRPGAKDINKIVEWKRINKTLKKIKKLKKFVSLDTRKSWVMERGIKNNVNLINDVSGLSYDNKTIFILKKYKIPFVIHHMQGNPKTMQKDPKYKSVVLDIYDFFEKKLKKLRSAGIKHNNIILDPGIGFGKNLKHNITLLNNISIFHSLGFPIMLGISRKKFIKDLSGNNDSKERIGGTISSSLYAMTQGVQIL

SEQ ID NO: 119946 - protein, 220 aa, Unknown
  Bacterial polypetide isolated from the Sargasso Sea
MEKYYTRACNFYYGQNSVAKIKTKTALPLNGNKFISFDSLEIINKSGSKIYHFKSIKKLNKKLKKKINFDLKKITKKKFLKKISFLESPILMGVINMTPDSFSDGGKYKKKLAFEHAKYLVSRGCKIIDIGGESTRPGAKDVKANIEWQRISGALKKIKKLNKPISIDTRKGFVMERAIKNKINIINDVSGLRYDAKTIQILKKTKIPFVIHHMQGTPLT

SEQ ID NO: 119947 - protein, 246 aa, Unknown
  Bacterial polypetide isolated from the Sargasso Sea
MQKYYTRACNFYYNTTSREKVKKKISLPIGNNKSLSFDTIEIISRTNKKKINIRSIKNLPSKIKKKVLNDINNILRARKIPKLKFNNLPILMGILNITPDSFSDGGKFNKKNSAIEQINKLIIDGAKIIDVGGESTRPGSKEIPKTQEWLRVNKVMSYLKSKNFFVSLDTRKSFVMKKASKYKLGLINDVSGLSYDKDTINFLKKTKLPFVLHHMKGITETMQKNPSYNNVLLDIYDYFEDKLRLI

SEQ ID NO: 119948 - protein, 348 aa, Unknown
  Bacterial polypetide isolated from the Sargasso Sea
MQKYYTRACNFYFNKISKEKIKKKLSFTIGGNSSISFDSIELISRKSKKIINIKKINKLPLRIKKKILIDIKNISKNKKIPGLKLSELPILMGVLNLTPDSFSDGGKFNKTNLAKKQINKLIRDGANIIDIGGESSRPGSKEISQSKEWNRIKNSLKYLKNKNFFISLDSKKSFIMRKAFDYKLDLINDVSGLSYDKNTINFLKRTKLPFVLHHMKGTPDNMQINPSYKNVLLDIYDFFEEKLKEIRKYGIKHNNIILDPGIGFGKNLKHNITLINNISIFHSLGLPIMLGLSRKRFIKDISGLNDSKKRIGGTISSCIFSILQGVQILRVHDVNEVKQGIKVFKKLY

SEQ ID NO: 119949 - protein, 351 aa, Unknown
  Bacterial polypetide isolated from the Sargasso Sea
MLRYYTRVCNFYYGNHSKKLVDQKKAIPLNGIKEISFDQIEIITRNSKKKFFINQIKYLPQLIRKKINFDLKKIKPKKKNFSNLDFKKIPNILGVLNLTPDSFSDGGKFNSKKKGINHAIHLVNSGANLIDVGGESTRPGSKMIRENLEWQRINKILKLLLKKKIPISLDTRKSRIMSKGINLGVKLINDVSGLDFDSETLNVLKKYKIPFVIQHSQGVPENMQKNPKYKNELLDIYDFFEKKIKLLRSKGIKHDKIILDPGIGFGKNLKHNMSLIRNISIFHSLGFPILVGNSRKKFIKELSGKNDSELRNGGTIASSIYLMTQGVQILRIHDVNETIQGIKIFKNIIDN

SEQ ID NO: 119950 - protein, 351 aa, Unknown
  Bacterial polypetide isolated from the Sargasso Sea
MIKYYTRACNFYYGSISEYKVKKKFSLPLNGNKLISFDTIELISRKTKKKIKIKNIKKLPVKLKKKVINDLNKITKVKRISKIKFKSFPLLMGILNATPDSFSDGGKYLKSSLAFKQIKKLHKDGAEIIDIGGESTRPNSDTIDSVTEWNRIASKLKYAKKNNIIVSLDTRKSFVLKKSLPLKINLLNDVSGLKHDSKMINILKTSKIPFVLHHMQGTPKTMQKNPKYKNVILDIYDFFEKKLEFLKINKINHKNIILDPGIGFGKNLKHNITILNQISIFHSLGFPVMLGLSKKRFIKELSGSNDSEQRIGGTTSSCIYAILQGVQILRVHDVNEIKQAMKVFNKLIFNK

SEQ ID NO: 119951 - protein, 137 aa, Unknown
  Bacterial polypetide isolated from the Sargasso Sea
MSKYYTRACNFYYGKSSLEMLKKKKALSLHGNKELSFDTVEILFRKKKRKININNINSLSFGLKKKIKEDLKKITKKKTFCKISLKEPLLIGILNLTPDSFSDGGRYNQIGSALKRVNSLLKAGCKIIDVGGESTRP

SEQ ID NO: 119952 - protein, 318 aa, Unknown
  Bacterial polypetide isolated from the Sargasso Sea
NNSISFDSIEIISRASKKKISVKNINTLPLKIKRKVLFDLKNICKNKKILSLKLKDLPILMGVLNLTPDSFSDGGKYNKNLLAKRQINKLIKDGSKIIDVGGESTRPGSNEVMKLKEWNRIKNSMKYLKKKKIFVSLDTRKSFVIKNALNYKLDLINDVSGLSHDKDTIKILKKTKKPFVLHHMKGTPKSMQINPSYKNVLLDIYDYFEEKLKQIRKIGIKHNNIILDPGIGFGKNLKHNITLINNISIFHSLGLPIMLGLSRKRFIKDISGVNDSKERIGGTVSSCIYGMLQGVQILRVHDVNEINQGITIFKKLYY

SEQ ID NO: 119953 - protein, 348 aa, Unknown
  Bacterial polypetide isolated from the Sargasso Sea
MSRYYTRVCNFYYGSKSKALIKKAKSLPLNGNNLISFDEIEIISRKSIKKLSIKKINDLPHLLKKIVKKDINLITKKKKFKNLNFKTLPKIMGVLNMTPDSFSDGGKYNKNYLAKKRLNYLFNSGANIVDIGGESTRPGSKPISSKIEWNRIKYILNNFNKKNFLSLDTRKSHIMEKGINLGVNLINDVSGLNYDKNSIKVLKKYKIPFVLQHSLGNPDVMQNSPKYKNVLLDIYDFFEKKIDYLRMKGIDHNNIILDPGIGFGKNLKHNLKLIKNISIYHSLGLPILLGISRKKFIRELSGKNDSSSRVGGTISSSIYAMMQGVQLLRIHDVNEIHQSLKVFKELIK

SEQ ID NO: 119954 - protein, 312 aa, Unknown
  Bacterial polypetide isolated from the Sargasso Sea
MNNYYTRACNFYFGKISKEKVKLKSSLPLNGDPLISFDCIEIISRNKKKKINIKKINKLPKILKKKVYNDLKNITKKKIFLNLNFKNSPIIMGVLNVTPDSFSDGAKFNKKKLAKAHIKKLLNNGAEIIDIGGESTKPGAKDISTKVEWNRLRSIIKYLSKQNCFVSLDTRKSLIMKKSLSYKINLINDVSGLNYDENTINFLKNSKTPFVLHHMKGTPKTMQVRPNYKNVLLDIYDFFEEKLHLIRKMGIKHNNIILDPGIGFGKNLKHNITLISQISIFHSLGFPIMLGLSRKKFIRDMSRSNDSKTRIG

SEQ ID NO: 119955 - protein, 336 aa, Unknown
  Bacterial polypetide isolated from the Sargasso Sea
MPRYYTRACNFYFGKQSKILVNKKQSIPLHQIKEISFDHVEIITRKKIRKISINKIRNLPKKLKTKINLDLKKIRSKKTNFSNLNFKKIPNILGVLNLTPDSFSDGGKFNKKNKGVSHAFNLYKTGASLVDVGGESTRPGSKEVNENREWYRINKTLKLIVKKIPISLDTRKSAIMENGIRMGVKLINDVSGLSHDPKTINVLKKYKIPFVIQHSVGTPENMQKNPIYKNELLDIYDYFEDKIKLIRSKGIKHNNIILDPGIGFGKNLKHNMNLIRGISIFHSLGFPILVGNSRKRFIKDISKKNDSETRIGGTMASSIYLMMQGIQILRIHDVNE

SEQ ID NO: 119956 - protein, 349 aa, Unknown
  Bacterial polypetide isolated from the Sargasso Sea
MPKYYTRACNFYFGQISKEKVKKKNSLPLNGDSSISFDMIELITRKSSRKLRISEIKKIKGKIKNKILSDLKKISKKKKIKNLNFKKLPILMGVLNLTPDSFSDGGKYIKNKNGLLHAKKLINDGCRILDVGGESTRPGSNEISLSEEWKRLHPTLSKIKKFKKFISLDTRKSYIMEKGIKNKINLINDISGLEHDAKTLELLKKTKIPFVIHHIQGNPATMQKNPKYKNVILDIYDFFENKIKYLRSMGIKHNNIILDPGIGFGKNLKHNITLLRKISIFHSIGFPVMLGTSRKRFIKDLSGVNDSKERLGGTIASNLFVIMQGVQILRVHDVNEVNQSIKVFKSLKF

SEQ ID NO: 119957 - protein, 353 aa, Unknown
  Bacterial polypetide isolated from the Sargasso Sea
MRNYYTRACNFYHGKVARRLVKLNKAFPLNGKKNIAFDQLEIFSREKRKVKTRFIHIKEINTLNKNIKKIVKYDLKKIISKRRNFLKNINFNHTTVMGILNLTPDSFSDGGKFNNNKKALRQISYMIESGAKIIDIGGESTRPGSKTIDPSKEWKRVKYIVENFKKKYKKVCLSIDTRKSDIMIKSIKNGADIINDVSGFNYDPYAILKLKNCNIPKVLHHMQGTPNTMQKNPRYQNVLLDIYDFFEKKISNIKNNKKIILDPGIGFGKTLKHNLTLISKISLFHSLGLPILIGTSRKRFINQISGEYDTVDRTGGTLASILFLLSQGVQIFRVHNVKEIKQGILVFEKINEK

SEQ ID NO: 119958 - protein, 353 aa, Unknown
  Bacterial polypetide isolated from the Sargasso Sea
MRKYYTRACNFYHGRAARSLIKTNKAFPLNGKKNIAFDKLEIFSREKGKVKTRLINIKDIHTLNKNIKKIIKHDLTKIVSRRKNFLKNVNFNHTTIMGVLNLTPDSFSDGGKFNNNNKALKQISNMIESGAKIIDVGGESTRPGSKTINPSIEWKRVKYIVENFKKKYKKICLSIDTRKSDIMIKSIKNGADLINDVSGFSYDPYTILKLKNYDIPKVLHHMQGTPNSMQKNPRYQDVLLDIYDFFEKEITNISNNKKIILDPGIGFGKTLKHNLTLISKISLFHSLGFPILIGTSRKRFINQISGEYDTDDRTGGTLASVLFLLSQGVQIFRIHNVKEIKQGILVFEKINEK

SEQ ID NO: 119959 - protein, 350 aa, Unknown
  Bacterial polypetide isolated from the Sargasso Sea
MQRYYTRACNFYIGIQSKILVNKKKAIPLHQIKEISFDHIEIITRKSKKKISINQIKYLPNDLKKKIYLDIKKIKSKKKNFSNLEFKKIPNILGVLNLTPDSFSDGGKFNTKKKGINHAIKLYKEGADLIDVGGESTRPGSKEVNKEDEWNRINDILKSIVKKIPISLDTRKSEIMKNGIKVGVKLINDVSGLSFDPETINILKKYKIPFVIQHTLGTPENMQKNPKYKNELLDIYDFFEEKIKLLRSKGIKHNNIILDPGIGFGKKLKHNMNLIRGVSIFHSLGFPILVGNSRKRFIKDISKKNDSYTRIGGTISSSLYLMMQGVQILRIHDVNEVVQAIKVFKEVINK

SEQ ID NO: 119960 - protein, 305 aa, Unknown
  Bacterial polypetide isolated from the Sargasso Sea
MPRYYTRACNFYFGKQSKILVKKKQSIPLHQIKEISFDHVEIITRKKIRKISINKIRNLPKKLKTKINSDLKKIRSKKSNFSNLNFKKIPNILGVLNLTPDSFSDGGKFNKKNKGVSHAINLYKTGASLVDVGGESTRPGSKEVNKNREWYRINKTLKLIVKKIPISLDTRKSAIMENGIRMGVKLINDVSGLSHDPKTINVLKKYKIPFVIQHSVGTPENMQKNPIYKNELLDIYDYFEDKIKLIRSKGIKHNNIILDPGIGFGKNLKHNMNLIRGVSIFHSLGFPILVGNSRKRFIKDISKKK

SEQ ID NO: 119961 - protein, 349 aa, Unknown
  Bacterial polypetide isolated from the Sargasso Sea
MEKYYTRACNFYYGEQSVKKVRNKTALPLNNNKFISFDTVEVITRNYKKKIYFKDINLQSKNLKKKIKSDLKLIIKKKYFKKLNLENPPLLMGIINLTPDSFSDGGKYNKKNKGFIYAKNLIKNGCSILDIGGESSRPGSSEVLKNIEWKRIHKTIKKIKKLNSFVSLDTRKSWIMEKAIDYKVDLINDVSGLNYDSNTINILKKTNIPFIINHSKGTPKNMQKNPKYNNVILDIYDFFEKKINLIRSEGIKHNNIILDPGIGFGKNLKHNITLINNISIFHSLGFPIMLGASRKKFIKDLSGNSDSKERLGGTVASNLYAMMQGVQILRVHDVNEVNQSIKVFKSLNY

SEQ ID NO: 119962 - protein, 349 aa, Unknown
  Bacterial polypetide isolated from the Sargasso Sea
MLKYYTRACNFYYGDHSTLMVNKKLALPLNGNDKISFDTIELITRKKKKKIHISKLNFLSKILKKKVKLDIKNITKKKNFSKLKFKSLPLIMGVVNLTPDSFSDGGKYNNHKDALKRIKHFIEKGSSIIDIGGESTRPGSNDVNEKIEWKRIKEVLKKTKKLKNVISIDTRKSAIMEKSLKYGAHIINDVSGLNYDPNTLKILRNKKTPFIIHHMQGNPKTMQIKPSYKNVLLDIYDFFQNKILELEANGINHKNIILDPGIGFGKRLKHNITLLRNISIFHSLGFPIMLGTSRKRFIKDISGINDSKERLGGTISSSLCAMMQGIQILRVHDVNEVNQSIKVFKSLKF

SEQ ID NO: 119963 - protein, 350 aa, Unknown
  Bacterial polypetide isolated from the Sargasso Sea
MIKYYTRACNFYYGSISKEKIKKKLSLPLNGNSFVSFDNIEIITRKYKRKIHIKEIKNQSNKIKKKIKKDIKLITQKKKFSKLNFLNFPILMGIINLTPDSFSDGGKYNKKNSGLNHAKYLIKKGSEILDIGGESTRPGAKDINKKIEWKRINKTLKKIKKLNTFISLDTRKSWIMERGIKNKVNLINDVSGFNYDSKTIFILKKYKIPFVIHHMQGTPKIMQKKPSYKNILLDIYDFFEKKIKKMRHIGIKHNNIILDPGIGFGKNLKHNITLLNNISIFHSLGFPIMLGTSRKKFIKDLSRNNDSKERIGGTISSSLYAMMQGVQILRVHDVNEVKQSIKVFKSLNFK

SEQ ID NO: 119964 - protein, 350 aa, Unknown
  Bacterial polypetide isolated from the Sargasso Sea
MSRYYTRVCNFYYGTKSKLLVKKKKTLPLHNNPEISFDKIEIITRNSKKLISLNEVKKLHVNLKTKVKKDLRLITKKKRNIKNLNFQNIPQIMGILNITPDSFSDGGKFFNYASAKKQLNFLLNSGANLVDIGAESTKPGSKAIKSKIEWNRLKNILKLIDKKNFISLDTRKSEIMEKGIKLGVKLINDVSGLNFDKNSIKILKKYNIPFVLQHSLGNPDVMQKNPKYKNVLLDIYDFFEKKLNNLRQNGIYHNNIILDPGIGFGKNLKHNMTIIKNISIYHSLGLPILLGISRKRFIKDLSGNNDSSLRIGGTISSSIFAMLQGVQMLRVHDVNEVNQAIKVFKALINN

SEQ ID NO: 119965 - protein, 299 aa, Unknown
  Bacterial polypetide isolated from the Sargasso Sea
INIRSIKNLPSKIKKKVLIDINNISKPKKIPKLKFDNLPIFMGVLNITPDSFSDGGKFNEKSSAKKHINKLIVDGAKIIDVGGESTRPGSKEILQTKEWLRLNKVMSYLKSKNFFVSLDTRKSFVMKKALKYKLDLINDVSGLSYDKETINFLKKTKLAFVLHHMKGNTETMQKNPRYNNVLLDIYDYFENKLRLIRKSGIKHNHIILDPGIGFGKNMKHNITLINNVSIFHSLGLPVMLGISRKRLIQDISGNNDSKERIGGTVSLSIFSMLQGVQILRIHDVNEVNQGIKVFKKTKF

SEQ ID NO: 119966 - protein, 349 aa, Unknown
  Bacterial polypetide isolated from the Sargasso Sea
MNKYYTRACNFYYGTTSKTYIKKKKSIPLNGCNHISFDKLEIIDRKKNKIINIKDISKLSTKLKKKVNRDLKNIKKKKIFKQINLSDNPILMGIVNLTPDSFSDGGKYNKKNLALKHINNLLSNGAKIIDVGGESTRPGAKDINPRKEWDRIKFILKILKNKKSFVSLDTRKSFVMKNASKIKVDLINDVSGLSYDPETINYLKKTKKPFVIHHMKGTPKNMQLKPSYNNVLLDIYDFFENKLKYLRNEGIKHNNIILDPGIGFGKNLKHNITLLKNISIFHSLGLPVMLGLSRKRFIKDISRENDTKERIGGTVSSCIRAYLQGVQILRVHDVKEINQAFKVFKELQN

SEQ ID NO: 119967 - protein, 350 aa, Unknown
  Bacterial polypetide isolated from the Sargasso Sea
MKRYYTRVCNFYYGAKSKNLVEKNKSLPLHGIKEISFDQIEIITRKSKKIVFINQINKLSNSLKKKINTDLKNITSKKKNFSNLKFNLIPNLLGVLNLTPDSFSDGGKFNKKDKAVKQAINLFNSGANLIDIGGESTRPGSKPINEKLEWSRINKILKLLSKKIPISLDTRKSNIMKKGIQLGVKLINDVSGLEYDPETTNVLKLNNTPFVLQHSQGRPEDMQNNPSYKNELLDIYDFFEKKLNFLRSIGINHNKIIIDPGIGFGKNLKHNMNLIKNISIFHSLGFPILVGNSRKRFIKEISKNNDSKLRIGGTVASSIYMMTQGVQILRVHDVNEIMQGIKVYKEIFKN

SEQ ID NO: 119968 - protein, 265 aa, Unknown
  Bacterial polypetide isolated from the Sargasso Sea
MSQPQVMGILNVTPDSFSDGGKHTNVSQALDHALRMIEEGATFIDIGGESTRPGAPDVSLQEELDRTIPIIEAVAKNTPCVISIDTSKADVMREAVKAGAGLINDVRALQEPGALQVAAEAQVPVCLMHMQGQPRTMQQSPEYDDVVNDVGQFLLARTKVCEEAGIAKDKILFDPGYGFGKSLEHNYTLVKHLPSLMKLGYPVLVGMSRKSMIGNLLNRKVDERLAGSISLATIVAQMGAQIIRVHDVKETADAVNIVKMLNSVK

SEQ ID NO: 119969 - protein, 290 aa, Unknown
  Bacterial polypetide isolated from the Sargasso Sea
MDQALTVKSFYDWCQDPNRETLVMGILNVTPDSFSDGGLFYNTDEAVSHAFQLIENGIDIIDIGGESTRPGAKKISEEEEIQRIIPVVKQIRELSPEIIISIDTTKSMVAQKAIQSGANIINDISGFSFDNRMIDVVRESKVPVIIMHMQGDPSNMQNKPFYDDLIIDISSFFKSKIKLATDAGIKKKQIILDPGIGFGKTVGDNFQLINQLNEFCKLGFPVMIGPSRKSFIGTTLNLPVDDRLEGTAAAVAVGVMNGARIVRVHDVKEIKRVVTIVKRLGLQHDTFQAR

SEQ ID NO: 119970 - protein, 281 aa, Unknown
  Bacterial polypetide isolated from the Sargasso Sea
MQLTSKGLSLSLERPHVMGILNVTPDSFSDGGHFNQLERAMTHARQMVAEGATLIDIGGESTRPGAPDVSEQEELDRVIPVVERMVAELEVMISLDTSKAAVMREGCAAGAHLINDVRALLEPGALAAAAVADVPVCLMHMQGQPRTMQAEPHYDDLLGEVRAFFDERIAACLAAGIRREQLLLDPGYGFGKTLAHNYQLLAQQEKLLDYQLPLLVGMSRKSMIGNLLGCPVDERLAGSLACALIGMQRGARIIRVHDVRATMDALRTGWMVMTGQDFISK

SEQ ID NO: 119971 - protein, 218 aa, Unknown
  Bacterial polypetide isolated from the Sargasso Sea
MSGDNKWFTEIFAASGSAFGLAITKKLDEVQSPFQHIEMFETTHFGNLMVIDGVIMLSSRDNFLYHEMLSHPVLFTHPAPQQVVIIGGGDCGTLREVLKHPDIEQVTQIDIDEQVTRMAEKYFPELCASNNDPRATLKFADGIQFMRDAEPESLDVVIVDSTDPIGPGEGLFNRAFYESCLKALRPGGILVQQSESPLIHMPLLKAMRDAMTDAGFAD

SEQ ID NO: 119972 - protein, 235 aa, Unknown
  Bacterial polypetide isolated from the Sargasso Sea
MLILDGAVQTTERDEFIYHEMLVHVPMLSHPDPRKILVIGGGDGGCVREILKHKSVEKLTMVEIDKLVVDCSKKYLPGISSKLNHPKLDLCIEDAVEFVKGRSSNFDVIIVDSTDPVGFASPLTTESFFRSAKKILKENGIYAAQTQGPFFESKSMSVISKRLKKIFPLTSFYLANTPTYPGGIWSFALSYKNSKNDFKITPRILKRKDLKYYSQEIHNASFALPPYVKKILGEK

SEQ ID NO: 119973 - protein, 136 aa, Unknown
  Bacterial polypetide isolated from the Sargasso Sea
GYDVIIVDSSDPVGPAETLFAPAFYDSMKAALAPNGIVCTQGECLWLHLPLIAKVVTACRATFPSVEYAYTTVPTYPSGQIGFVLCSLDDGERALIRPTRAPTTALQKLLRYYNPDVHAASFILPEFAARELRKSR

SEQ ID NO: 119974 - protein, 223 aa, Unknown
  Bacterial polypetide isolated from the Sargasso Sea
MGLQLSADSESELLLDQKSDFQHVQVFESRNWGKVLLLDGVIQVTERDECSYQEMLTHIPMFSADSAPRRVLIVGGGDGGVLREVCRHRSVERVVQCEIDGLVIAAAKKWFPKLSCKYPRKIEGEKELAQCKVLNLSEESQTEKINDSETVPDDPRVEIRVADAFHFIKTAADNSFDVVIVDSSDPVGPAEKLFTEEFYQDLARVVAPGGVVGTQGESLWLHQ

SEQ ID NO: 119975 - protein, 264 aa, Unknown
  Bacterial polypetide isolated from the Sargasso Sea
YHEKTDHQDLIIFENAAFGRVMALDGVVQTTERDEFIYHEMMTHVPLMAHGQAKHVLIIGGGDGAMLREVSRHRTIETITMVEIDAGVVSFCRQYLPNHNAGAYDDPRFTLVIDDGVNFVNQTTQTFDVIISDCTDPIGPGESLFTSAFYEGCKRCLNPGGIFVAQNGVCFLQQDEAIDSHRKLGHYFSDVSFYQAAIPTYYGGIMTFAWATDNDALRDLSNEIIQARFHKANLKCRYYNPAIHKAAFALPQYLQDALSASDLQ

SEQ ID NO: 119976 - protein, 242 aa, Unknown
  Bacterial polypetide isolated from the Sargasso Sea
MTYTVAVRELCEFTAKQGDLDLRFTPAPTALEGIAGHAVAASRRGSGYCAEVALSGSYQSLRVRGRADGYDPAQQRIDEVKTFKGRLDRQPASHRHLHWAQAKVYGWLLCEQEQLRHIDVALVYLDVGTQQETVFTERCSADDLRQHFEAQCQRFIAWAEQQVAHRTARDAALNTLAFPFGGFRTGQRPLAEAVYKAAVAGRCLLAQAPTGIGKTMGTLFPLLKASPAQRIDKVFFLAAKTS

SEQ ID NO: 119977 - protein, 184 aa, Unknown
  Bacterial polypetide isolated from the Sargasso Sea
MLKQNIEAIKIDLKNGDQNKPEFLKINPKGRVPALVTKKGILTENPAIMYYICQLFPEKKLAPSDPYELAKAQAFNMYLSSTVHVGHAHKHRGHRWTNDESALDSLTANVKKNMTDYAEYIENNLISGPWVLGDNYSICDPYLALVTRWFRDDGVDLAPFQKIKDHNIKFHERANVKKVMELHQ

SEQ ID NO: 119978 - protein, 232 aa, Unknown
  Bacterial polypetide isolated from the Sargasso Sea
GLCEPLRCILAAAGVEFMDVFLTAETGRDELARLRSAGKLQFDQLPLVEIDGLNLVQTRATANYLGARFGLLPGSPRQAYLVECVYGSSQDARGPMVGLPFAQYPKAPTDADFEKRLSDMRGNTGLLGRHAPKWEAMLTDAGPFLLGARASIADVGIFECVDLFLSIFGSEEFDASFAPFPRVRALVAATRSLGRLAEHCDVSRKKHATWDAATGKQSNLVKYATAVRSTLA

SEQ ID NO: 119979 - protein, 336 aa, Unknown
  Bacterial polypetide isolated from the Sargasso Sea
VQWRDIVLAKAAENPQLQMLDHDYKETVPQVLVEINSERAADLGISVGAVGQALEAMLGGRRVTTFLDRGKEYDVILEGADKDFAKPGSISNVYVRAKESGKLIPLDNLVVLKEEATTSSLNRYNRMRSITITANLAPGYSLGEALEFLEQTVKDNIEGTVGIDYKGESLLFKESGESTVLIFALALLITFLVLAAQFESFVHPFVIMLTVPLGLVGALAGLYLAGMTLNIYSQIGLVMLIGLVAKNGILIVEFANQLRDAGVEFEEAIKRASALRLRPIVMTAFTTVFSAIPLIITTGPGSESRMVIGMVIFAGVGVATLLTIYVVPVAYMVLGP

SEQ ID NO: 119980 - protein, 110 aa, Unknown
  Bacterial polypetide isolated from the Sargasso Sea
MKFYYAPMSCAFATHVVLEDAEAKYEAIKIDLKNGDQNKPEFLKINPKGRVPALVTEKGILTENPAIMYYICQLFPEKKLAPTDPYELAKEQAFNMYLSSTVHVGHAHKH

SEQ ID NO: 119981 - protein, 528 aa, Unknown
  Bacterial polypetide isolated from the Sargasso Sea
TESGYRNQLNAVMNYRWPTLAVLVLSFVATVMLLKLIPSELAPQEDRGTFFVNMSGAEGASYGNNSRNMRLIEDLLMPYYEKGEFNRLLIRVPGWGNSGGVAIVGTENWNNGKRRTSELMQEVSTKLNELPDVKAFTFMRSGLGGGRGGGRPVQFVIQGNTYQELVQWRDIVLAKAAENPSLQMLDHDYKETVPQVLVEINSDRAADLGISVGAVGQALEAMLGGRRVTTFLDRGKEYDVILEGEDKDFARPGSISNVYVRSKESGRLVPLDNLVTLKEEATTSSLNRYNRMRSITITANLAPGYSLGEALEFLESTVRENIEAPVGIDYKGESLLFKESGESTALIFALALLITFLVLAAQFESFVHPFVIMLTVPLGLVGALAGLYLSGMTLNIYSQIGLVMLIGLVAKNGILIVEFANQLRDAGVEFEEAIKRASALRLRPIVMTAFTTVFSAIPLIVTTGPGSESRMVIGMVIFAGVGVATLLTIYVVPVAYMVLARNTGSPLAISKQLEQLDKDNPEKSEEPH

SEQ ID NO: 119982 - protein, 95 aa, Unknown
  Bacterial polypetide isolated from the Sargasso Sea
IKESNRLAAICDGFDAIGIKYFSDRKSSIKLYGNQNEDINGAEIDSYGDHRIAMSFLIAGMRSKNGITVKNCKNIETSFPNFKDIMNSLGMNINE

SEQ ID NO: 119983 - protein, 312 aa, Unknown
  Bacterial polypetide isolated from the Sargasso Sea
YTSGTTGNPKGVVYHHRGAYLMSTGSSVAWNMPNQLNFLTIVPMFHCNGWCYPWTIPMLNGRTVCLRNIDVKKIFELIDKYDVTHFGGAPIVLNMITGAPEADRKKLKHKVHVLTAGAPPPSIIFKKMKALGFEVMHVYGLTETYGHVTQCAWNDEWNDFDEDKQNEIKARQGVRYPNTEGVTILDPETMKEVPKDGKTIGEIMIRGNVVMKGYFKDKEATDKAMKGGWFHTGDLAVMHPDGYVKIQDRSKDIIISGGENISSIEIENTLSKHPSVSIAAVVAKPDEKWGEVPCAFIEMIKDKPTSEKELID

SEQ ID NO: 119984 - protein, 70 aa, Unknown
  Bacterial polypetide isolated from the Sargasso Sea
PDGIIIDGGSYGGGEVWSHGDHRIAMSFSVASLRAGAPIRIHDCANVATSFPNFLGLASGAGIRVAEEKN

SEQ ID NO: 119985 - protein, 268 aa, Unknown
  Bacterial polypetide isolated from the Sargasso Sea
LRPNYVTLERNRVNARSNLNQPVETYRGLPPVDALPSDIVLDPGWRWRKAWKAPTFVQHAFTRYPIIEGEHKLQPSPWFLWCQLRGSWRFWLYRWRERPLKRRLLEHASYFLAVLQVSSDSQIQMGSPYRGMHDFIEDVIRSFAAHAHASDRLAFKHHPRDRGYNNYESLIDLLARRYGVSGRVHYFHDGALSRFLRTCRGVITVNSTVGLQALFHAVPTKTMGNTFYNLPGLTDQKPLDEFWRDPQPSERPLFYRFYNHLVKTTQGT

SEQ ID NO: 119986 - protein, 63 aa, Unknown
  Bacterial polypetide isolated from the Sargasso Sea
KEKIDSEEKINSFDDHRIAMSFLIAGIRSKKGISVENCKNIETSFPNFRNIMNSLGMKIDEKN

SEQ ID NO: 119987 - protein, 79 aa, Unknown
  Bacterial polypetide isolated from the Sargasso Sea
LNTPGLTIINAKKSRNHTELMLDSFKYPIKIFKTRKFDKILIQGHNQYKSFNYSIPGDISSAAFFIVLTHSIKKFRNKN

SEQ ID NO: 119988 - protein, 211 aa, Unknown
  Bacterial polypetide isolated from the Sargasso Sea
SIPSDPSSAAFFSTLCLLTKNSKIIIKNVCLNQKRLGFYNLLKKSGARIKMVNVKKKNNELVGDILVRSSKIRPIKSGSKHYLSATDEYPIMFIIAALTKGISKFTGIKELANKESNRILEMKKILKKIGVKCKSNKDSMTISGNVISNKKKHIIKVNSMHDHRIAMSCAVLALITGIKFSIKGFETVDTSFPSFLKIVKNLGGKYEIKKK

SEQ ID NO: 119989 - protein, 272 aa, Unknown
  Bacterial polypetide isolated from the Sargasso Sea
GFLHGEDPLSTMNALNQIGAGISIDEDGRVHLRKRNQSFHNCEKALNFGNSGTGLRLMLGLTSGIGLKASFCGDESLSSRPMDRVINPLTQMGANIESNKGKLPISILPTKFKKQYKYELPVASAQVKSSILLAGLTAGTDIEIIEPIQTRDHTERMLKNFGANIETTLLDGKNIIKLASTNILHAKNYTVVGDISSAAFLIVAALISNSPGLEITNVGMNPSRTGVLEALQQMGANIEVKNQRLESGEPCADLIVKKSKLKGVKLSGKIIP

SEQ ID NO: 119990 - protein, 288 aa, Unknown
  Bacterial polypetide isolated from the Sargasso Sea
MKQRPIAILVDALKDLGCDIEYIEKSGFPPLKINGKNILTNSVTLPANVSSQYISSLMMLGVSLENGLKIKLSSEITSLPYILMTKKIIERIGGTSKIHHREITIEPLTEKVIPEQFVESDWSSASYFFSIAALSKSARLTLSTFFKDSLQGDSTLVDIYKILGIETIFEKDHIILSKNKIDLPKSINLNLKDSPDLAQTIIVTCLGLGVDCTLEGLHTLKIKETDRLIALKNEIEKFNVDKVEITENSITLENNSNLKHEVVIDTYNDHRMAMSFALLSLIVPIKIN

SEQ ID NO: 119991 - protein, 267 aa, Unknown
  Bacterial polypetide isolated from the Sargasso Sea
FGVKFKGNNGKLPISIKGSNLTKPINYNENLGSAQCKSAIMIAALKTSGITKIKSLPSRNHTEILFKNVLNVPIKVYKKKKYDFIEIKGKNEIRPFEYKIPGDISSAAFFIVLTILSKNSQLILKNININPSRVGVIKILKRMGANIKFLNKKNYKGEINGDIFVRSTQKLKAIKLDPLLNTSAIDEFLLIFLVASRCKGVSKFVNLSELNKKESKRLDWGIKILKMMNVKVVKIKNHGIKIWGNKNFPTKKNYIIKNFLKDHRVFM

SEQ ID NO: 119992 - protein, 214 aa, Unknown
  Bacterial polypetide isolated from the Sargasso Sea
FRSFKYNVPGDISSAAFFIVLTLLSKKSNILIENVNVNPSRAGIINILNNMGANIKLRNTKIYNGEKISNISVRSNQKLKSVNCSPLHNTSAIDEFLIIFLVAAKAKGVSKFKNLGEMNKKESKRLDIAVKFLKLIGIKVKRFNDDISIYGNPSLELSSSFEIKNFLKDHRIFFLSTIAALTLGGKWKIHDKDSINTSFPSFLDKLKSIGAKIN

SEQ ID NO: 119993 - protein, 138 aa, Unknown
  Bacterial polypetide isolated from the Sargasso Sea
MGQNAVTPIEVSSNNNLCGVLSGSGDKSISHRALIIAALSAGCSRLTGLLVSDDVRCTIEALRQLGIRISESNGNSVLVHGVGIGGLTDPVGPLNLGNSGTAARLLMGVVAGNPITAVFIGDESLSGRPMDRVVKPLS

SEQ ID NO: 119994 - protein, 195 aa, Unknown
  Bacterial polypetide isolated from the Sargasso Sea
MFFIVAALISKNSQITIKNVCLNKYRTGAIEILKCMGGKIFIENIKSSSFETTGDITAKSSSLVGIEIPNNRISDAIDEFPIIFIAAANAKGVTTLKDAQELRVKESDRLLAMSNGLNNCGIQNKLFKDGISIRGGEFKGGEVNAYGDHRIAMSFVISSLISKDTIKIIDTKNIDTSFPNFIELAKQCGFIIHEY

SEQ ID NO: 119995 - protein, 251 aa, Unknown
  Bacterial polypetide isolated from the Sargasso Sea
MAVKSYSVLINNKINEFNKVINVDPDKSISIRAFLIGSISQGVSKISDALLSEDVFSTINCLRKLNCKIIKKSKNEYEVFGKGLGSYYAKKNTLLNLGNSGTGLRLISSIISTTPDLEVNLTGDSSLKKRNMSKLISLLSEFGAEIFPKNKINLPFKLRSSNFPVAIKYVAGNSAQLKSAAILGALNSYGTSTVHESFKTRDHTENLLTKNSKNISFKDKKNVIKICGKQPLNSFNIKVPSDPSSAAFFAA

SEQ ID NO: 119996 - protein, 101 aa, Unknown
  Bacterial polypetide isolated from the Sargasso Sea
MQLLTKKSHKPILGEIKISSDKSISHRSLIFLALANGEAEIENLLESEDVLRTASALEKMGVKIKKKKNGKYLVVGSGICGLQEPNSQIDCGNSGTSARLL

SEQ ID NO: 119997 - protein, 248 aa, Unknown
  Bacterial polypetide isolated from the Sargasso Sea
GLVIELKGELISKPYIEMSLHLLNNLGIKTSFKSNLINVGYLEKIQDTSITVESDWSSASYWYSIVALCEKAEVKLNNFYENSIQGDSILIKYYKALGVETKFIENKIVLTKIKDFSCPKNLNLNLVDSPDLAQTIAVTCFGLGISCFLYGLQTLNIKETKRLVALKNELTKLGANLDVTETSLKLYKTREIQKNITINTYQDHRMAMSFAPLSLKIPILIENPYVVVKSYPIFWDDLKTAGFIIEPI

SEQ ID NO: 119998 - protein, 280 aa, Unknown
  Bacterial polypetide isolated from the Sargasso Sea
YWIYLIGVKYEAGVSAQLKSAAILAGMNSYGNTIIIEKDKSRDHTENMLLKNYHLIRINNGKRRLIKIFGNKYINSLHTKIPGDPSSAAFFTALTVLRENSSIKIKNVGLNETRTGFYRLLKKSGAKIYFKNVKKKNNEIFGDIVVKSCKLKPIKASKEYYVNSTDEYPILFVLASLIKGTSIFKGISDLANKESNRIKEMQNILKQIGVKSKSTKDEIKIFGRGIFDAKNKKILVPNLGDHRICMSSFILALITGANTFIKNFETVYTSAPSFLKIIKV

SEQ ID NO: 119999 - protein, 129 aa, Unknown
  Bacterial polypetide isolated from the Sargasso Sea
SRSSLNGIDVDMNMMPDAAMTLAVTALFASGQTAIHNIHNWRVKETERLKAVSTELRKLGAEVEEGEDYLVIIPPKKIQNAEIDTYEDHRMAMAFSLAACGDASVTINDPGCVSKTFPRYFDVFSGLCS

SEQ ID NO: 120000 - protein, 137 aa, Unknown
  Bacterial polypetide isolated from the Sargasso Sea
RIIKSLPKNIHLNLIDNPDIAQTILITCLGLGIDCTLIGLHTLKIKETDRLVALKNEIEKFEVDKIEITGDSITLENNSDLKHDVTIDTYNDHRMAMSFAPLSLLVPINIKNPEVVTKSYFNFWNDLESLGFNILKK

SEQ ID NO: 120001 - protein, 220 aa, Unknown
  Bacterial polypetide isolated from the Sargasso Sea
MQRRKIIQNLLAIAAVSLTATFAHADDKQLKVGTMSGPDAQIWSVVTRVAAREGLNVKVIEFNDYVQPNAALDAGDLDANGFQHQPFLDSQIRQRGYKIVNVGLTYVSPMGFYSKKLKSLKDLPEGAKVGIQNDPSNGNRALLLLQKYGVIKLKPGVGTNGVNATPLDVAENPKKIKLIELDAAQLPRSLDDLDAASINTDYAVKAGLQPTRDAIAIEDL

SEQ ID NO: 120002 - protein, 227 aa, Unknown
  Bacterial polypetide isolated from the Sargasso Sea
MIKIKGQTNFKSFNYKIPGDPSSAAFFVMLTILSKKSSILIKNCLINKNRIGFYILAKKMGAKISFRNKKNYKGEKIADIYCESSKNLKSINLPKNFNNSSAIDEFISIFIIASFSKGISTFKGLEELNKKESPRLDWSFKILNMIGIKTKKIGNHGIKIYGNPNLKLNKKYIIKNYLKDHRIAMNSIILALARGGVWRINDTDSIKTSFPTFLKIIKFLGGKYEVV

SEQ ID NO: 120003 - protein, 133 aa, Unknown
  Bacterial polypetide isolated from the Sargasso Sea
LNGCELDSNIAKLMIDEYPILSIAATFASSPSVFRGLKELRVKESDRLELIKTNLLKCGVKCEVRDDDLFIYPSSKYKINNEKITTNYDHRIAMAFAVLGSKIGPLNICDSESIKTSFPTFVSEFNGIGGKIF

SEQ ID NO: 120004 - protein, 53 aa, Unknown
  Bacterial polypetide isolated from the Sargasso Sea
MSTSLNGSIKIAGDKSISHRSIILGALSIGETTVEGLLESPRYFSYYFSYAGL

SEQ ID NO: 120005 - protein, 138 aa, Unknown
  Bacterial polypetide isolated from the Sargasso Sea
EWQPNSVTVHGKSLKGVDLDLNRMPDAAMTLAVAALFAEGPTRIRNVYNWRLKETERMKAVTTELRKLGATVEEGKDYLVVDPPQKIIPCEIETYDDHRMAMAFSLAACGPEPITILDPGCVSKTFPNYFEVLESVSE

SEQ ID NO: 120006 - protein, 221 aa, Unknown
  Bacterial polypetide isolated from the Sargasso Sea
NLDTIELKNDRELKPIKYKVPGDPSSAAFLITGACLLPGSKLLVKNILFNNTRIGFIETLKSMGGGIKVIKKVKINNETVADLYIDQKKKLKSTTIKSANVPLQVDEVPILSIAAAFSEGISIFKGLKELTVKESNRLDLIHQNLLKIGVKSEIKGFDLYIYGNYKLKKGNAEIIHNHDHRIIMAFYIANLICEKDNIFKDKSCVNTSYPTFFKDVTKFLN

SEQ ID NO: 120007 - protein, 255 aa, Unknown
  Bacterial polypetide isolated from the Sargasso Sea
MPKAKYSVISNNKIGSFDKTIEVDSDKSISIRAFLISSISQGISEIKNSLESEDVFSTINCLKKLGVKINKINKNKYIVYGKGLGSFYAKKNLTLDCGNSGTLARLMIGILSTTPNINLKITGDESLKKRKMSKLIFLMNKFGASFEKNKSYFPMKIISSSMPIGINYISGVSAQLKSAVILAGLNSYGFTTIKESKDNMSRNHTENLLSNNKSVIKIKRNKIDILGKGTLNPFKLIIPGDPSSAAFFCAVTIFS

SEQ ID NO: 120008 - protein, 195 aa, Unknown
  Bacterial polypetide isolated from the Sargasso Sea
DEWNDFNEDKQNEIKARQGVRYPNTEGVTILDPETMKEVPKDGKTIGEIMIRGNVVMKGYFKDKEATDKAMKGGWFHTGDLAVMHPDGYVKIQDRSKDIIISGGENISSIEIENTLSKHPSVSIAAVVAKPDEKWGEVPCAFIEMIKDKPTSEKELIDFCKETLAGFKVPKKVIFCELPKTSTGKIQKFELRKQF

SEQ ID NO: 120009 - protein, 168 aa, Unknown
  Bacterial polypetide isolated from the Sargasso Sea
MTKQKIKKLSGTLKILGDKSISHRALILASISVGKSQITNLLESEDTMNTINILKDLGIKIVKHANKWIVYGNGTNGFSQPKKALDCGNSGTTARLMLGAVSTNPIFCTFIGDNSLSRRPMRRITNYLEKIGCKVNLTNKENLPLTIKGSQLNLPLTHEISKPSAQIK

SEQ ID NO: 120010 - protein, 109 aa, Unknown
  Bacterial polypetide isolated from the Sargasso Sea
MPNKIILKKKISDFNKKILIPGDKSISIRWVLISSIADGVSKAKNLLMSEDVLAAINAVRKLGVRVVINKNICKIHGVGIKGLKYKKNLVINAKNSGTLGRLITGILID

SEQ ID NO: 120011 - protein, 116 aa, Unknown
  Bacterial polypetide isolated from the Sargasso Sea
MTECFQTILSKRSSGLKGQIYIPSDKSISHRALIMGSLAIGKTSIFRLLESDDIFKTVNGLKALGVDIYKESDKWCVHGVGVGGFCEPENIIDCGNSGTSVRLLMGLVSTCPIKVT

SEQ ID NO: 120012 - protein, 142 aa, Unknown
  Bacterial polypetide isolated from the Sargasso Sea
MNLTTSTDSQILGSVKCPGDKSISQRVLILGAFMNQDMAIDGFLHGEDPLSTMSALNQIGADISVNENDRVLLCKRRQSFHNSDNALNLGNSGTGLRLMLGLSSGIGLKVSFCGDESLSSRPMGRVINPLSEMGANIESSRG

SEQ ID NO: 120013 - protein, 98 aa, Unknown
  Bacterial polypetide isolated from the Sargasso Sea
KELRVKESDRISAMAKGLAKNGVMVEEGDDYLKIVGMGSNGVPGGATVKTFFDHRIAMSFLCLGLASENSITVDDVRSIDTSFPNFFELMENLGADIC

SEQ ID NO: 120014 - protein, 280 aa, Unknown
  Bacterial polypetide isolated from the Sargasso Sea
MLNGRTVCLRNIDVKKIFELIDKYDVTHFGGAPIVLNMITGAPEADRKKLKHKVHVLTAGAPPPSIIFKKMKALGFEVMHVYGLTETYGHVTQCAWNDEWNDFDEDKQNEIKARQGVRYPNTEGVTILDPETMKEVPKDGKTIGEIMIRGNVVMKGYFKDKEATDKAMQGGWFHTGDLAVMHPDGYVKIQDRSKDIIISGGENISSIEIENTLSKHPSVSIAAVVAKPDEKWGEVPCAFIEMVKDKPTNEKELIDFCKETLAGFKVPKKVIFCELPKTST

SEQ ID NO: 120015 - protein, 220 aa, Unknown
  Bacterial polypetide isolated from the Sargasso Sea
MKNGLKIKLSSEITSYPYILMTKKIIERIGGTSKIHDREITIEPLTEKVIPEQFVESDWSSASYFFSIAALSKSARLTLSTFFKDSLQGDSTLVDIYKIFGIETIFEEDHIILSKNRIDLPKTINLNLKDSPDLAQTLIVTCLGLGVDCTLEGLHTLKIKETDRLIALKNEIEKFNVDKVEITENSITLENNSNLKHEVIIDTYNDHRMAMSFAPLSLIV

SEQ ID NO: 120016 - protein, 71 aa, Unknown
  Bacterial polypetide isolated from the Sargasso Sea
MIELFSSKKFSGSITIPSDKSISHRSAILNSVAFGEARINNFSNGNDCLSTLNVLSNLGVNIDIENKNEFI

SEQ ID NO: 120017 - protein, 116 aa, Unknown
  Bacterial polypetide isolated from the Sargasso Sea
MKKQTKYKLKGSLQISGDKSISHRSLILSSMALGEAKITNLLESEDTLSTIKILKALSIQIKKVKEDWIVIGNGTNGYIQPSEALDCGNSGTTARLMLGAVSTSPIFCTFIGDKSL

SEQ ID NO: 120018 - protein, 275 aa, Unknown
  Bacterial polypetide isolated from the Sargasso Sea
MSNHILITEKIKSFKKKINVASDKSISIRSILLASQAVGISKISNLLESDDVLNTLKAIKKLGINYKKKSGNYHIEGFGLNNFSFKNKITINAGNSGTLARLILGLLVKSKYRVRLTGDKSLSKRDFSRVIKPLRLFGVNIHSRKNSLPIEILGSDYLRPISYNEKIGSAQVKSCIIFCALNTPGITKIKAKKSRNHTEQLLRSLNYPIKVNKINNIDKISISGLSQFKSFKHIIPGDISSAAFFIVLTTLSNNSEMIIKNVNINESRIGIIKIL

SEQ ID NO: 120019 - protein, 285 aa, Unknown
  Bacterial polypetide isolated from the Sargasso Sea
NIYPPIKIKGVGNAVPLKYEISIPSAQIKSAIMLSALNTNGIVRITEFKSTRDHTENMLKSMGYNIQIKESIKKRFIKMKNNKALQNINYNVPGDPSSAAFLITAACLKPGSKLIVNNVLFNKTRIGFIKTLKKMGGNIKVERRRKINNELIVDLKIEQKKSLISTTIPSIEIPLQIDEIPILSIAASFADGLSIFRGLKELTVKESNRLLLIHKNLENIGVKSKIKNYDLYIYGNYHLKKGAAKIIHENDHRILMSFFIANLICKKNNIIKDKSCVKTSYPRFF

SEQ ID NO: 120020 - protein, 143 aa, Unknown
  Bacterial polypetide isolated from the Sargasso Sea
HIRSSELRGIDVPDNIIQNIIDEIPILSVAACFAEGQTVIKNAAELRVKESDRLHAISEGLIKLKIKHDIFEDGISITGSSKELNCDESINSFDDHRIAMSFLVAGIRSYKFIRVTNCKNIETSFPNFKRIMNTIGMKINEED

SEQ ID NO: 120021 - protein, 142 aa, Unknown
  Bacterial polypetide isolated from the Sargasso Sea
MRLIAEPCNKVSGEVLCPGDKSISQRIVMLGALLDHDLKVENFLSAADPISTMSALEKVGFRYQHLHDLNTVNILNSKKRVTDPDSTLDLGNSGTGLRLILGFLGGLNIKADYIGDNSLSARPMARVLDPLSQMGIKYNSNT

SEQ ID NO: 120022 - protein, 274 aa, Unknown
  Bacterial polypetide isolated from the Sargasso Sea
MQTLIKQMERFGAEFLPRNKFYFPLKIVSSEIPIGIKYTSGKSAQIKSAVILAALNSFGTTLIEEEHKSRDHTENILSKNQKCMTIKKGKKNIIQVYGKRQLSPLNIDIPGDPSSAAFFISLCLLTKKSELVLRNIQLNPTRSGFLRIMKNHGAKISILNKKIKNNETIGDIRVKSSKLKKLRVGKNYYVNATDEYPIMFVVAALIEGTSSFKGIGELKNKESDRIKVMQSLLRQAGVKSIFKNDELKIFGKTKLRNTRKRKIEISNILDHRIC

SEQ ID NO: 120023 - protein, 252 aa, Unknown
  Bacterial polypetide isolated from the Sargasso Sea
KNTLNCLRKLGILILKKGTQFEVFGQGGVFEDPKRELFLGNSGTGLRLLIGLLSTRNVNVSFKGDESLSSRPMMRIIEPLKKMNVSLIHNNGYLPIKILKNDDFSLPLKYSLEIGSAQVKSAILLAALNLSGTTIVKERFPSRDHTEILLKYLGADIKKKKNIITLKSPNFLKPKDIFVPGDFSSAAFLIVAALITKKSKIIIENVGLNFFRTGLLEVLKKMNAKINVSNKNIINGEPVGDITVESSNLVST

SEQ ID NO: 120024 - protein, 118 aa, Unknown
  Bacterial polypetide isolated from the Sargasso Sea
MGVQTTARDGDRMPLSLTGTADLLPIEYVLPIASAQVKSAILLAGLHAPGRTSVVEPAATRDHTERMLAHMGAKLEIADTPEGRRVTVTGQPELHPTDIEIPADPSSAAFPVVAAAIV

SEQ ID NO: 120025 - protein, 197 aa, Unknown
  Bacterial polypetide isolated from the Sargasso Sea
LIVAALISNSPGLEITNVGMNPSRTGLLQVLKNMGADIEARNQRLESGEPCADLIIKKSMLRGVELSGNIIPNIIDEIPILSIAAAFAEGETIIRDAEELRVKESDRLKAVSDGFTRLGVAHKNFEDGMSIMGSPNALLIEQPISIESNEDHRIAMSFLIAGLKCSKPIIVKDCKNIFTSFPNFIELISSIGYKLEK

SEQ ID NO: 120026 - protein, 200 aa, Unknown
  Bacterial polypetide isolated from the Sargasso Sea
PADISSAAFWIVAGLCHKQGKITLKNVGINPSRSGILDVMSSMGGNITIKNSTIVAGEEVGDIVVESSELVGVEIGGDIIPRLIDEIPIIALAACFAKGKTIIRDASDARNKESDRLSITASELTKFGADIEELDDGIIVNGVGSLNGTTCESFDDHRIAMMEAIAAILSKGQTTIKNSDCVAISYPMFWDDLSILTGDQ

SEQ ID NO: 120027 - protein, 48 aa, Unknown
  Bacterial polypetide isolated from the Sargasso Sea
MKGQIYVPSDKSISHRALILGSLAIGKTIIIDLLESEDVFKTANGLKA

SEQ ID NO: 120028 - protein, 154 aa, Unknown
  Bacterial polypetide isolated from the Sargasso Sea
MRDFIKIKSKIKTFKKTIQVPGDKSISIRWVMLASLAVGMSKSKNLLESDDVKSAINAMKKLGIKILKKKNHHYVYGKGLNGLKIKNNLVVDAGNSGTFSRLFCGLISGYEKEITLKGDKSLSRRDFSRVIKPLKLFGVNFKSRNNKLPLKIYG

SEQ ID NO: 120029 - protein, 299 aa, Unknown
  Bacterial polypetide isolated from the Sargasso Sea
NNLPIKIKGRKIPLPIEYHSPVSSAQVKSSILLAGLSSLGTTTIVEPSLSRDHTERMLKFFGANITTYQLDDLSWKITLDGIPELKPLDLDIPADPSSASFPIVSAIITPNSKVKVMNVCINELRIGLYKTLIEMGANIEFTNKRKMNGELIADITACSSDLKGITVPKSRAASMIDEYPILSMAATRASGETVMEGVEELRYKETDRIKNICNGLQKLGIDTYETNDSMIVKGKGPNGTIIGNIEINSNLDHRIAMSFLCLGLVTEKSIIVRDTETINSSFPFFMGKMNDIGAKLNLI

SEQ ID NO: 120030 - protein, 236 aa, Unknown
  Bacterial polypetide isolated from the Sargasso Sea
FGCKIEVHDSSEGRKIMLSGQLDSKVVDYDVPGDFSSAAFLIISALITEDSDLLIKNVGINKTRSGLLDVLLEMGADIQLTNHQNIMNEPRADIRIKSSELHGINIGGSIIANLIDEIPILCIAASFASGQTKIEGAEELRVKESDRLNAVARGLERLEINFVELDDGIIIDGGNNVSVKNIKINSYHDHRIAMSFLIASLKSTEAITVDDCSNIETSFPSFMHVMNEIGLNIYET

SEQ ID NO: 120031 - protein, 199 aa, Unknown
  Bacterial polypetide isolated from the Sargasso Sea
CSSAMFFIVAALISKDSQNTIKNVCLNKYRTGAIEILRRMGGKIFIDNIKTSGFETTGDITAKSSSLAGIEIPNNKISDAIDEFPIIFIAAANAKGVTTLKDAQELRVKESDRLLAMSIGLNNCGIQNKLFKDGISIQGGKFKGGEVNACGDHRIAMSFVISSLISKDSIRIIDTKNIDTSFPNFIELAKQCGFIIHEY

SEQ ID NO: 120032 - protein, 157 aa, Unknown
  Bacterial polypetide isolated from the Sargasso Sea
MKNFVRIDSELNNFNSVVNIPGDKSISIRWILLASQALGTSRAYNLLESDDIKNTINSIKKIGVQIKKKKNFYEIEGVGLNGFYIKDKQKIYAGNSGTFARLFCGLIVKTENKIQILGDKSLSKRDFSRIIVPLSLFGVFFKSKKGKLPLNIIGTKH

SEQ ID NO: 120033 - protein, 204 aa, Unknown
  Bacterial polypetide isolated from the Sargasso Sea
SENIIPGDISSASFWMIAASIVPNSEVLIKNVGLNPTRTGILNVMDSMGCNYEILDKATVAGEPIGSIKVKTANNLRSFTIEGDILPKLIDEIPILTVAACFCSGVSEIRDAQELRVKETDRLKVMARQLHKFGAEITEKEDGLIINGPSKFHSADVDSETDHRVAMSLAIASLLAKGSSKIMRADASNVSYPAFWEDLAQLNN

SEQ ID NO: 120034 - protein, 40 aa, Unknown
  Bacterial polypetide isolated from the Sargasso Sea
MSRGSLTLSPIKHISGKVDLPGSKSLSNRVLLLSMLAEGR

SEQ ID NO: 120035 - protein, 164 aa, Unknown
  Bacterial polypetide isolated from the Sargasso Sea
IKVLKLKGSITISGDKSISHRALIFASLSTGKVKISNLLESDDVMRTLKILKELGIKIIKKKAQWIVYGNGTGGYIQPAQVLDCGNSGTTSRLMMGAVSSNPISCTFIGDNSLSKRSMSRLSIFLEKMGAEIKLTKKDFLPLHIKGDINLIPMEHVMQISICSS

SEQ ID NO: 120036 - protein, 289 aa, Unknown
  Bacterial polypetide isolated from the Sargasso Sea
INKNEVEIHGVGLHGLKQPKDPIDAANSGTTARLLIGLLSKQNFRSELTGSSQLIKRPMKRIVKPLNEKGAAIKDSNGKLPINFEPKDYKFESIHSEKPSAQVKSGFLLASLYHDKFPTTVTEEMPTRDHTERMINLMGVNTVRLGNSITIEPIQSLRNINYTVPGDPSSAAFLIALGLMKSKKLIIKDVLLNERRIGFLKILKRMNAKISIENLEVQNNESVGDIHVSKSNLSAVKISKEDVSDMVDEFPIFTLLATQAKGTTTVSGAGELRLKESDRIESMEKFIQT

SEQ ID NO: 120037 - protein, 158 aa, Unknown
  Bacterial polypetide isolated from the Sargasso Sea
MNRALLLLVGCSATLLVFGLWIPFKALVAQEMLELAWAESQARQSEARPWPWADTWPVAKLDIPAQGVSMIVLEGVHGESLAFGPGRVPGSEGPGAPVVLAGHRDTHFRHLQHLEPGDAVRLQGMDRQWRRYQVTATRVVDSSRESLDTRSLAPGYSG

SEQ ID NO: 120038 - protein, 294 aa, Unknown
  Bacterial polypetide isolated from the Sargasso Sea
SIEISGTKFLRPLTYDENIGSAQVKSCIILGALNTPGITVLNAKYSRNHTELMLKFLNYPIKIKRKKKYERISIQGLKQFNSFNYKIPGDISSASFFIVLTLLSQKSQMTIKNVNVNKSRIGVLNILNKMGASIKLKNKKTYNGEKIADIFIKSKKNLNSIICPPKINSTAIDEFLIIFLVAAKAKGISRFKDLGEMNKKESKRLDLATKFLKLIGVKVERSKNNINIYGNPSLILKDSYEIKNFLKDHRIFFLSCIAALTLGGKWKIHDKDSINTSFPKFLKSLEIVGAKIRC

SEQ ID NO: 120039 - protein, 265 aa, Unknown
  Bacterial polypetide isolated from the Sargasso Sea
EDGWIVYGNGTGGFIEPKKSLNCGNSGTTARLMIGAVSSNPINCTFIGDDSLSKRSMSRVTKHLEKIGAVVHLTKEDYLPLIINGSEELLPFKHDIQKPSAQIKSALIISALNIHGKTKIIENIPTRDHTERLLKFLNIKIKIKKKENRTTQIELNGPYEFKAKSIDVVGDPSSAAFFIVGALILPESKVTLKNIMLNSSRIAFIKILKKMGGKIKVKKIKQICGENVGNITAEYSKLKGITIPASQSAYLIDEYPNYIRWLPLK

SEQ ID NO: 120040 - protein, 250 aa, Unknown
  Bacterial polypetide isolated from the Sargasso Sea
KSRNHTELMFSGLNIPINIKSRKNIDIIKTSSPNNLNGFNLNIPGDISSAAFFIALTLLSKDSKLILRNINLNPTRLGVLKILNKMGANIKVKNIKSRKGENCGDIIVKSKDKLKAINCPTSLNSSAIDEFLIIFLIAAKSKGVSNFKDLSELNKKESPRLKLGSKILNMIGVKTKLTSSSLKIYGNPNISLNKNYEIKNYLKDHRIMAMCTIAALTMGGKWKIYDPDSINTSFPSFVKILKNKFGAKFL

SEQ ID NO: 120041 - protein, 282 aa, Unknown
  Bacterial polypetide isolated from the Sargasso Sea
MAKENFSVIFNEKIKKFSKSIKVDSDKSISQRSFIIASISEGISRVKNALESEDIFSTINCLRKLNCKIKRINKGEYQIYGKGLGSLSCKKNTKLDFGNSGTAVRLLGFGACGTSPNIQIRITGDKSLRKRNMFKIIKVMEKFGAKFLPENKFYLPLTLISSEMPIGFKFNAGISSQIKSAVILASTNSYGKTLVSEKIKSRNHTENMLEHNTQAIKIKRGKENTIEIKGKKNLKPFNVLVPGDPSSGSFYAGLCLLSKNSKIILRGTHVNPTRIGFFNIIK

SEQ ID NO: 120042 - protein, 205 aa, Unknown
  Bacterial polypetide isolated from the Sargasso Sea
GQNILIPGDISSAAFWMIAASIVPESEIVIKNVGLNPTRTGILNVMDEMGCNYKIVEKSTIAGEPIGSINVKYVSNLKPFKIEGDILPKLIDEIPILTVAACFCSGVSEIKDAKELRVKETDRLKVMTSQLEKFGANILEKEDGLIINGDSKFHSAEVDSETDHRISMSLAIASLLAKGSSKIARAEASSVSYPTFWDDLEKLIN

SEQ ID NO: 120043 - protein, 198 aa, Unknown
  Bacterial polypetide isolated from the Sargasso Sea
SAAFLVIAAVICPESKIELHNVMINKGRDGLFKTLKEMGAKINIFNERNMGGEKTASIIAEYSQLKGVSVPSKRAPSMIDEYPILSIAATCAYGKTIMNGISELRVKESDRIKIISNGLLKAGVKTLEQHESLTIYGSEVAGGCSIDSELDHRIAMSFLILGLISKKPIKVLRASTIETSFPNFYKTMTEIGAKFIKA

SEQ ID NO: 120044 - protein, 299 aa, Unknown
  Bacterial polypetide isolated from the Sargasso Sea
MFHCNGWCYPWTIPMLNGRTVCLRNIDVKKIFELIDKYDVTHFGGAPIVLNMITGAPEADRKKLKHKVHVLTAGAPPPSIIFKKMKALGFEVMHVYGLTETYGHVTQCAWNDEWNDFDEDKQNEIKARQGVRYPNTEGVTILDPETMKEVPKDGKTIGEIMIRGNVVMKGYFKDKEATDKAMKGGWFHTGDLAVMHPDGYVKIQDRSKDIIISGGENISSIEIENTLSKHPSVSIAAVVAKPDEKWGEVPCAFIEMIKDKPTSEKELIDFCKETLAGFKVPKKVIFCELPKTSTGKIQK

SEQ ID NO: 120045 - protein, 284 aa, Unknown
  Bacterial polypetide isolated from the Sargasso Sea
MASSIKSFNININNKIASFKKKIIVDSDKSISIRSFLIGAISHNISSVSNVLESEDVFSTIECLKKLGVKIIKKDSGKYLIYGKGLGSLQAKRHTELNFGNSGTLARLLTGILTTTPNIDVKIRGDHSLNKRSMKKLIELMSEFGAFFFPKNKIKFPLRLISTSMPIGIKYKAGVSAQLKSAVILAGLNSYGTTEILETERSRDHTENILQSNNDVVQISNDREKIIKVFGKKYLEPLKINVSGDPSAAAFFTALTLLNNRSSLEIKNVGLNPTRIGFFNILRR

SEQ ID NO: 120046 - protein, 217 aa, Unknown
  Bacterial polypetide isolated from the Sargasso Sea
MQRRKIIQNLLAIAAVSLTATFAHADDKQLKVGTMSGPDAQIWSVVTRVAAREGLNVKVIEFNDYVQPNAALDAGDLDANGFQHQPFLDSQIRQRGYKIVNVGLTYVSPMGFYSKKLKSLKDLPEGAKVGIQNDPSNGNRALLLLQKYGVIKLKPGVGTNGVNATPLDVAENPKKIKLIELDAAQLPRSLDDLDAASINTDYAVKAGLQPTRDAIAI

SEQ ID NO: 120047 - protein, 94 aa, Unknown
  Bacterial polypetide isolated from the Sargasso Sea
ESDRLQVMSEALNSFGVKFRLEKDGIVINGLGKEGTFKGAEIDSHGDHRIAMASSIGSLRSDSATIILDCLNVDTSFPNFIEVCKEVGIEIESI

SEQ ID NO: 120048 - protein, 149 aa, Unknown
  Bacterial polypetide isolated from the Sargasso Sea
KADLKVQYSELQSINISPEDVPVIIDEIPILLIAAIFAKGKTTINGAEELRVKESDRLAAMEAGLKALGVQVSSSHDSIDVEGNPNFDLESLTIIDSFGDHRIAMSFLVLGQRVAGDILVKDCNNIQTSYPDFMRDMIKLGGSLEEYAK

SEQ ID NO: 120049 - protein, 54 aa, Unknown
  Bacterial polypetide isolated from the Sargasso Sea
VTIDTYNDHRMAMSFAPLSLLIPININNPQVVTKFYLNFWNDLESLGFDISKNK

SEQ ID NO: 120050 - protein, 291 aa, Unknown
  Bacterial polypetide isolated from the Sargasso Sea
DESLSQRPMSRVVDPLITMGKEIFTNNGKTPIKILGGSICDDFEYSMPIASAQVKSSLILASLSSRKTIKIEEKKVTRDHTERMIEHCGGKIDVKKTSKGKVITLHKQKLSEISSYEVVGDFSSAAFIIVAALISKKSKVFIKNVGLNETRIGLLKVLLKMNANIDIINERNICNEICGDLIVQSSDLVGINVPDHIIPNIIDEIPILCVAACFAKGETSIKNASELKIKESDRLKATSEGLNAMNVQHDLLDDGLIIKGSNEEIMPLKEIDSFGDHRIAMSFLVAGLRTK

SEQ ID NO: 120051 - protein, 271 aa, Unknown
  Bacterial polypetide isolated from the Sargasso Sea
SDLNYELPVASAQLKSALILAGLRSNGKVIIKEKDVSRDHTERLLMGMGANINKTGLQIEISPSELQSNDLVIPGDISSAAFWMVAASIHSDAELNILNVGINETRAGIISVLERMGANLEFNNKVQYSGEPACDIAVKSSKLKGTTISGKEIPLLIDEIPIIALAAVFAEGETRITDAKELRYKESDRISLTVDWMRKAGADIEELDDGMIINGTYNINGGYFSSHGDHRLAMTLGIASLVSEKTIKIKNPEAANVSYPNFWETLNTIGN

SEQ ID NO: 120052 - protein, 299 aa, Unknown
  Bacterial polypetide isolated from the Sargasso Sea
NANLTFNKLSNTVKTVKRKMPFQDPTESLDLGNSGTGARLLTGFLSGLGINATITGDKSLSSRPMKRIVEPLTKMGFKLNSNNHRLPIEITQSTGSSFFEYNSPISSAQVKSSILLAALTGSIETKITEPIGSRDHTERMLKYFGADIHSEIKNEKNIIHFSPSDLSIQDENYYVVGDFSSAAFLIVAALISEDSEIIIRDVGINPTRAALINVLKEMGGNIEFTKVKQVSNEEVCNILVKNSQLKGADIGGDIIPSLIDEIPILSIAASFADGKSKISDIGELRVKESDRLNAISKRP

SEQ ID NO: 120053 - protein, 163 aa, Unknown
  Bacterial polypetide isolated from the Sargasso Sea
LKKMGANIKILNQKTMAGEVVADINVKSSDLNGCELNKEMAKLMIDEFPILSVAASQANSPSHFIGLDELRVKESDRLELINHNLNNCGCHSIIKDNNLFIDPSKNKEIVNTEIRTDFDHRIAMSFAVLGSKIGKLHINESDSISTSFPTFKSEFNKVGGNLA

SEQ ID NO: 120054 - protein, 61 aa, Unknown
  Bacterial polypetide isolated from the Sargasso Sea
MKALASHRARPLTGTTQVSGDKSISHRALILGALAIGETKITGISRGEDVAATESALRQLG

SEQ ID NO: 120055 - protein, 115 aa, Unknown
  Bacterial polypetide isolated from the Sargasso Sea
MEISGDKSISHRALILSAMSTGKTKITNLLESEDVMSTLKILKKLGVKIKKKEKTWLVYGNGTNGFIEPDNSLNCGNSGTTARLMLGAVSSNPINCTFVGDASLSKRSMSRVTEH

SEQ ID NO: 120056 - protein, 265 aa, Unknown
  Bacterial polypetide isolated from the Sargasso Sea
LTGDNSLSSRPMKRITNPLSEMGAEIKTQHGKLPLHIKGKILNNCKIKIDIPSAQIKSGLILAALNTEGTSYINEQHITRDHTEIMLETFGADIKTKKIGNSSEIIINGKKNLIPINIDVPADLSSSSFFIVAALINKDSNITLENININPTRNGLLIALERMGANIKVFNQKNRAGEIVADINVKSSELNGCELDEQMAKLMIDEFPILSVAASQANSPSHFKGLDELRVKESDRLELICENLNRCGCYSEIKNNDLLINPKKN

SEQ ID NO: 120057 - protein, 266 aa, Unknown
  Bacterial polypetide isolated from the Sargasso Sea
SALILASLNIHGKTRIIEKTLTRDHTERMMKYLNINFKIRKLNDGIRLIELNGPYEINSKDIEVVSDPSSASFFIVGALITPGSKIILKNIMINPTRVTFLKVLKNMGGKIQIKKTKNLCGEEVGIITAEYSKLKGINIPSKLSALLIDEYPILSIAASQATGKTIMKGLDELRHKESDRINSIVINFRKIGFKVINKKNDLIIYGKKIKISKKINIKSYDDHRIAMSFSILNIIYDNYLKIDNKDCISISYPKFQKHLNSLTVKY

SEQ ID NO: 120058 - protein, 111 aa, Unknown
  Bacterial polypetide isolated from the Sargasso Sea
MITVYRSKKLTGDLSISGDKSISHRAIIFGSLCVGKTIIRGLLESEDVFKTIEAVKQFGAKVKKNNGNWEVDGFGVGGFSSPSNVINCGNSGTTCRLLIGAISTTPIISTF

SEQ ID NO: 120059 - protein, 133 aa, Unknown
  Bacterial polypetide isolated from the Sargasso Sea
MKKKISVLLNNKIKKFNRKIFVEADKSISHRSLLIASQCIGVSKIKNILESEDVKNTIICLTKLGVKIVKKKNEFFVYGNGLGSFRKPKNNSLYAGNSGTLARMLLGLLATQPNLKIKILGDDSLNKRDMKRI

SEQ ID NO: 120060 - protein, 120 aa, Unknown
  Bacterial polypetide isolated from the Sargasso Sea
MIDEFPILSIAASQANSPSHFKGLNELRVKESDRLDLINRNLNNCGCYSKINDNDLFIDPTRNKQILNPEIRTDFDHRIAMSFAVLGSKIGKLHINESDSISTSFPSFKEQFNKAGGRLS

SEQ ID NO: 120061 - protein, 240 aa, Unknown
  Bacterial polypetide isolated from the Sargasso Sea
MSIFGGIISYGDASKIGNVELNYCELQPKSNYKVVGDFSSASFIIVAALISNDSEVLIKNVGLNETRSGLLSVLQMMGADIQIIQSKEVCNEKVGDILIKSSSLVGIEVPNSIIPNIIDEIPILSIAAIFADGETIIKNASELKVKESDRLSAISNGLDKLNISHELFDDGLSIHGNNNMLESSEAINSYGDHRIAMSFLIAGARSKNGLVVKNCENIKTSFPSFKDIMNSIGMKIDEKN

SEQ ID NO: 120062 - protein, 290 aa, Unknown
  Bacterial polypetide isolated from the Sargasso Sea
KRDMKRIVEPLKEFGALFKTKKNTLPFLIKGTKFIRPINYKEMRGSAQCKSAVMLAALFAPGKTNLKCVKSRNHTELFFKNAIKVPIKVNKSNKFDLIQVEGGKNFKGFSYHIPGDISSAAFFIVLTILNKKSSLIIKNININPSRIGMIKILNLMGSKISFHNKKKYKGEVVGDIHVKSVKKFKSINCPKKFNSSAIDEMLLLFLVSSIAKGTSTFRGLEELNKKESKRLDWGIKILKMIGVKTKRISNHGIKIYGNPNLQLKKTYRIRSYLKDHRIYMLSVIAGLTLG

SEQ ID NO: 120063 - protein, 192 aa, Unknown
  Bacterial polypetide isolated from the Sargasso Sea
EVKGDPSQAAFWVVGATILHGSEVSIKNIYRGQERTGFIDVLVRMGAKITHDPVTNDLQVSSSELVGTVVEETEIPGLIDEVPILAVAAACADGETHFKGLGELRVKESNRLETIVSEIGSMGMKAEISGDDLVVKGGKLTGGKVDSHGDHRIAMSCAIAALVSTSPTEIFGWEAVSTSYPDFIADLDALRK

SEQ ID NO: 120064 - protein, 304 aa, Unknown
  Bacterial polypetide isolated from the Sargasso Sea
MHLILFGSSISINENKVTLRKREVMFKDPQQELNLGNSGTGARLLLGLISGLGLRLTIRGDSSLEKRPMSRVIKPLEMMGAKLSSDSGTLPIRTLGSKIINNFEYKMPIASAQVKSCLLLAALSSQKNITITEPKITRDHTERMIEFFGGEILYENNQNSKTIHLNYSELEPKNSFDVPGDFSSAAFIIVATIISKGSEVVIKNVGLNESRKGLLDVLLLMGANLEIKNKKKASNEIVGDIYISSSELRGINVPDNIIPNIIDEIPILSVAACFAERQTVIKNATELRVKESDRLHAISEGLIK

SEQ ID NO: 120065 - protein, 243 aa, Unknown
  Bacterial polypetide isolated from the Sargasso Sea
FKSRDHTERLFNAAKTMDMKIPFTIEEILTAKNELLKSNNLLDAYVRPIVWRGSEMMAVSAQTTKINFAIAAWDWPSYFDPDQKMKGIKLDIARWRRPDPKTAPVHVKAAGLYMICTLSKHEAEAKGYSDALMLDWRGQVAEATGANIFFKMPDGNLHTPIPDCFLDGITRRTVIKLADELGVKTIERVIMPNEMKEAEECFLTGTAAEVTPVSKIGNDYNFTPSEVSFKLIEAYTKLVNIKN

SEQ ID NO: 120066 - protein, 135 aa, Unknown
  Bacterial polypetide isolated from the Sargasso Sea
KIKKNISLDLTNNPDLAQTIAVTCLGLGIDCDLFGLHTLKIKETDRLEALKSEIEKFGVDSIHVTENSLHLKNNSVLKSNVEIDTYHDHRMAMSFTPLSVLMPIKINDPQVVSKSYVCFWDDLEKLGFEISKINR

SEQ ID NO: 120067 - protein, 282 aa, Unknown
  Bacterial polypetide isolated from the Sargasso Sea
MESEDVINTLNAIKKLGINFKKKGNVYSIYGYGINGYNIKRNTTINAGNSGTLARLIIGLLVKSKFTVKLIGDKSLSKRDFSRVIKPLKLFGVNISSNNNLLPIKILGTNFLRPINFDENIGSAQVKSCVIFAAINTPGITKINTKRSRNHTELMLKFLNYPIKINQTKEYDKISVMGLNQFNAFKYDVPGDISSASFFIVLTLLSKGSVVVIQNVNVNQSRNGILTILNKMGANIKLKNRKSYNGEKIADIFVKSKKKLRSINCPPRLNSAAIDEFLIIFL

SEQ ID NO: 120068 - protein, 219 aa, Unknown
  Bacterial polypetide isolated from the Sargasso Sea
MIPKIEQPFNVDLELPGSKSIALRQLAMSALTKGTTILEGVPVCDDTAAMLECLERLGLSISQSNTTVTIVGPMNLVDDVVINSRMSGASTRLLIALAALRSGETSIDGHESLRARTNLPLVNALQKLGCQIDSSDGHLPLAVHRPIQQTGAVSIDGSLSSQYITALLLISCGVAGDKAFFEKITIEGELVSKPYIDITITEMSKRGVSARWEGTRSIS

SEQ ID NO: 120069 - protein, 107 aa, Unknown
  Bacterial polypetide isolated from the Sargasso Sea
SYELPIASAQVKSCLMFAGLYTDGPVVIKEKIQTRDHTELMFKKFGIHVSIEELEGLKEIHVLPPKSIDATNINIPGDFSSAAFFILGALITPGSDLTLMNIGINKT

SEQ ID NO: 120070 - protein, 125 aa, Unknown
  Bacterial polypetide isolated from the Sargasso Sea
EYPILAVAAAFASGKTTMLGLQELRVKESDRLSAMANGLKSCGVKVEESSDTLTVHGTGGDIKGGTLIRTELDHRIAMSFLIMGLATRNPITIDNGATIDTSFPDFFEIMRSLGANLSLSDKTKD

SEQ ID NO: 120071 - protein, 284 aa, Unknown
  Bacterial polypetide isolated from the Sargasso Sea
KEFLYEMPIASAQLKSCLLLAAISSNMKLTLHESKVSRDHTERMLKYFGANITTKKYEGGQDIILDTNNKLEAKDYSVVGDFSSASFLIVAALITKDSSITIKNVGINETRFTLLEILKKMGSDINIKNHSICCGEEVADIEVSSSALSGISIDEKSIPKIIDEIPILSIAASFAEGETSITGAGELRFKESDRLMAIEEGLNKLGVSYKSSDDSIVIMGNRDLNISKEVNIDSFGDHRIAMSFLIAGLRFDSEVHVNDCKNIDTSFPSFFETFSSLGADIKTT

SEQ ID NO: 120072 - protein, 276 aa, Unknown
  Bacterial polypetide isolated from the Sargasso Sea
MGDKSLSKRDFKRVSDPLSRFGAKFKLKNNKNLPLEIIGSKNLNKITYEEKRGSAQCKSAVIFAGMRSNGATTIKAKKSRNHTELLCKYLNLPIKIKNKKKYDEIIIKKINKIKPLNYKIPSDISSAAFFIVLTALSKNSELLIKNVNINPSRTGIITILKKMGVKIVYKNIKTYKGERNADLLIKYSKSLKGINCPKKFNSGAIDEFLVIFLVAAKAKGVSYFKDLSELNQKESPRLEWGKYILNQMGIKTICTNSSIKIFGNPNLNIKKKINIK

SEQ ID NO: 120073 - protein, 135 aa, Unknown
  Bacterial polypetide isolated from the Sargasso Sea
KGIDIPEDLVPLAIDEFPVLFVAAACAEGRTVLRGAEELRVKESDRIQVMADGLVALGVKAEPTPDGIVIEGGAIGGGEVWAHGDHRIAMSFSVASLRASAPIRIHDCANVATSFPNFLALAAEVGINVAEEGKA

SEQ ID NO: 120074 - protein, 172 aa, Unknown
  Bacterial polypetide isolated from the Sargasso Sea
PTRDGILLALKKMGANITYKNKRKINSEEVCDIDVESTNLNGCELDSNFSELMIDEYPILAVAASFANSPSVFRGLNELRVKESDRLELINENLQRCGVNSLINENDLIINPSKNYKIKNDQIKTNFDHRIAMSFAIMGSKIGNLEIEESDSINTSFPTFKSEFNKVGGNIT

SEQ ID NO: 120075 - protein, 255 aa, Unknown
  Bacterial polypetide isolated from the Sargasso Sea
AAFETAMKTVCHDYFPENEFSIYVHGHSTGGPFVHMLTQRVENICGVIGIENSPFGYMFQKMVGYEWEGPFNDLLIRTWRDIARYRGAEVRSEEGEQGLMRLPWIMEDVLEDWEKTLTQPQFKAEYPLHYAADHALEAAARASASRLKMDKAETESLVKQYIGYGYELSGPNVKPVPPILLSICKHSRDHTEKVYDEIVIPMFAAMNPAPRVRLTKLGTGSHHYEYPEEGLPEGLVGPITGIWHDAIMKGYYLVN

SEQ ID NO: 120076 - protein, 277 aa, Unknown
  Bacterial polypetide isolated from the Sargasso Sea
TIPVPSAQVKSGLILAALNTEGVSKFIEKDITRDHTEIMLESFGANIDIKEENKYKHIYVSGKKELTAKNINVPSDLSSSAFFIVACLINKNSKLTLKNININPSRNGILIALKKMRAKIDIKNKRFLNNEIVADLNIEYSKLEGVDLDKEMAKLMIDEYPILSIAASFAETPSIFRGLKELKIKESNRLELIYQNLIRCGVKSEVKDDDLYIYPNKEYSIKDSNIITKFDHRIAMAFSVMGTRLNENLTILESECINTSFPNFFKSFNSVGGNLIE

SEQ ID NO: 120077 - protein, 271 aa, Unknown
  Bacterial polypetide isolated from the Sargasso Sea
MKRRSLLKVFSVLATGAALTLSAGAHAEDKVIKVGTVAGPDAEVWQLVQKVAKEKEGLNVKVIEFNDYVQPNAALDSGDLDANSFQHQPYLDSQVKQRGYKLVTAGLTYISPIGVYSKKFKSLKDLPQGAKLAVPNDPSNENRALLLLQTQGVIKLKAGAGTGGNNATVLDIAENPKKLKISELDAAQLPRVLSDVDAAVINTNYALAANLQPTKDAIALESLTSPYANVIAVRAKDKDQPWVKKLVKAYQSPEVREFIKKQFKGSMVASF

SEQ ID NO: 120078 - protein, 433 aa, Unknown
  Bacterial polypetide isolated from the Sargasso Sea
MTSNLIINGSEKFNVEIIVPGDKSITHRALMIAALSNGICKISNYLQSDDCINTISILKNLGVSIDMHEDNSLTINAKGLKSLKKPKKDLEAGNSGTLIRLLSGILSMQDFTSIITGDTSLQSRPMARIIEPLTKMGAVIQSRENKPPLEFSKPVERRCCNEEILIASAQVKSCLILASLFVEGESIIIENIKTRDHTERLLQYFNYDIKIDDNRIKLYGKKDIFAKDIEVPNDFSSASFFIVAALLKKGSQVLIKDVCVNEYRIGLTNILKKMGGQIEFKNLRTNCNEDIADISVSYSKLKAINISGEIISSLIDELPILFIACACASGKSVISDIEELRYKESDRILSMEKGLRELGIDVLSTESSISIIGGQINGGIVDSFDDHRVAMSFAISGIISSKPITILKTKNISTSFPNFVDTLRQINVEVYEI

SEQ ID NO: 120079 - protein, 379 aa, Unknown
  Bacterial polypetide isolated from the Sargasso Sea
MALAGCGKGDKDAAPEAAKQATVVTVRPTAVPMTVELPGRLDAYRQAEVRARVAGIVTARTYEEGQEVKQGAVLFRIDPAPLKAARDAAQGALAKAQAAALAATDKRRRYDDLVRDRAVSERDHTEAVAADTQAKAEVASAKAELARAQLQLDYATVTAPIAGRARRALVTEGALVGQSEATPLTTVEQLDPIYVNFSQPAADVDALRRAVKSGRATGIAQHDIAVTLLRADGTAYPLKGKLLFSDLAVDPTTDTVAMRALFPNPERELLPGAYVRIALDTAVDQRAILVPRDALLRTTDRMSVRVVGTNGKVKDVEVTADQMSGHDWRITRGLAGGERVIVDNAAQFAPDTAVKPVEKAPPSKAAPAAAASQAAARQT

SEQ ID NO: 120080 - protein, 341 aa, Unknown
  Bacterial polypetide isolated from the Sargasso Sea
MFLKNCWYVAGWSDNYKNELKAQKILGEDIVFYRQRNGQAVALEDACPHRKLPLSLGQLNEDKVICGYHGLTFDGSGSCVAAPTQQKNIPKRAVVKSYPVIDRYRLLWIWMGDPDKANPNDIFNIENFDNPDWGYTDGGMLPIECNYLWVVDNLLDPSHVAWVHVTSFAGGGTDDQPLDLEKTDDGVIVSRWIYDQPPSPYYKDLLKFEGNCDRKQHYEMCIPGIALNKSVYTPPGTGGPDKPEVDKTYVNISYNFMTPVDEYNTQYIWFQHRNTDPGDKSISEKMNAGARMAFLEDKTILEAVQKGMAEMETPNIDLGLDAGAKLFRLKLQRLIDEENSN

SEQ ID NO: 120081 - protein, 246 aa, Unknown
  Bacterial polypetide isolated from the Sargasso Sea
KLKLIDKITSLPYLQMTISLLKKIGVKVKFEKNIIYVSELKKNVMTDILVESDWSSASYFYSCAALSNDAEIKIKSFSKKSLQGDSIVSKIYKKLGVSTIYDSEKIVLKKKKNFKLPNSLEYNLIDSPDLAQTIAVTCFGLGIKCDLYGLHTLKIKETDRLNALKLELKKLGSNVLITNDSIHINKSKIDFSNIKIKTYNDHRMAMSFAPLGILKPIIIESPNVVSKSFPDFWDKIIDIGFKINKV

SEQ ID NO: 120082 - protein, 280 aa, Unknown
  Bacterial polypetide isolated from the Sargasso Sea
VHRPIQQTGTVSIDGSLSSQYITALLLISCGVAGDQAFFEKITIEGQLVSKPYIDITITEMDKRGVSARWEGTRSISIDTTRSYEAGHITIEGDATAASYAASLACIHRGHVKFTNLGSNTQQGDYRFFNVLERLGAVVTRDQTSTLISGPSQLAHFNSIDMQDMPDVALTLIALAPLLNEELSISGLSSLHHKECDRLECPADELLKMGINVTTTSDSIRIQPISIENLSPHLLTTYHDHRMAMAFSLLGSKTGKVTVDDKFVVNKTYPNYWLDYEKLI

SEQ ID NO: 120083 - protein, 89 aa, Unknown
  Bacterial polypetide isolated from the Sargasso Sea
DKILSMVKMMERFGISIDEFNDGMDIYGSDIKGNRVNSYGDHRIAMTALLASLVSDGDIIVEDAVNINTSFPEFTEIANNIGMNIKVYD

SEQ ID NO: 120084 - protein, 103 aa, Unknown
  Bacterial polypetide isolated from the Sargasso Sea
MNLISNPIQEISGDVICPGDKSISQRILIIGSLLNCDIKIKGFLNAQDPLSTMAALNQIGALIIKDGELVEIKNSSRFFKSSDSPIDLGNSGTGIRLLTGLFR

SEQ ID NO: 120085 - protein, 248 aa, Unknown
  Bacterial polypetide isolated from the Sargasso Sea
GSNKKYKTDIGPVPGKVKFCKFNDVSHLKKLVNKKTIAIIIEFIQGDGGINICSKTFAKAIKDICKNKKILLIGDEIQGGIGRTGKIFAYKHYGVNPDIITSAKGLGSGIPIGATIVKKYISKIISTGFHGSTFGGGMLQTRVSYNVLKSINTKAFLNKILINGKYLSKLLKKMHNDHKDKIVDTRCLGLMAGIEFKTNEIASKTYSKMSKNGLITTLIQGNIIRITPPLIIKKKELKNGLDIILKSL

SEQ ID NO: 120086 - protein, 211 aa, Unknown
  Bacterial polypetide isolated from the Sargasso Sea
INSLSNKKIPSQLVESDWSSASYFYSIVALSDSSDLTLNTYYKDSIQGDSDLVKIYKNFGVKTRYINNGINLSKSDDKIEKKISLDLSNNPDLAQTIVVTCLGLEIDCDLYGLQTLKIKETDRLRALKSEIEKFGVDKIEITEDSLHLENNSQLKSHISIDTYNDHRMAMSFAPLSLLNPILINDPMVVTKSYVSFWDHLKKLGFEISKNK

SEQ ID NO: 120087 - protein, 186 aa, Unknown
  Bacterial polypetide isolated from the Sargasso Sea
MSEKNINLIASSNNIIKGCIEIPGDKSITHRAIIISSIADGKTKINRYLDSEDTNATIDACRHIGAEIEKDNETLIIKGNNLERIQGENIEINFGNSGTSMRLMMGILSAQKFSSTLFGDQSLNQRPMNRISNPLKMMNGDIKTTNGIPPVRISPVDKIRNTDHIITIASAQIKSAIMLAGLYGQE

SEQ ID NO: 120088 - protein, 25 aa, Unknown
  Bacterial polypetide isolated from the Sargasso Sea
MNLISSQIKSLNGEIVCPGDKSISQ

SEQ ID NO: 120089 - protein, 368 aa, Unknown
  Bacterial polypetide isolated from the Sargasso Sea
LARYYRSLLNTKIIGITGSVGKTGTKDAISFILKEHKNIFCSRRSYNNKYGMPLEILNMPRKTKFGFFELGMNHSGEIKRLVKILKPNISIILNIENVHLGNFKSLKEIAIAKSEIFTSSENIDSLILNKESNHYNLLYRYYKNTKIKNIYNYSKKNNANIYIKESKLAKKIIQLKVSLPGDKSISFGVRFDQENLIDNCLAILTCLHALNINYSFIKKFKNVPFTSGRGNIIKCKYNSHKLKLYDHSYNASPISMKQTIDIFDSFKEKNIVYLIGDMNELGQKASYYHSNLVKFLDKKKFEKCLFIGKHFKKLENKIRNNKISFFKDINQVIDNLDEIIESNYTIFAKGSNSINIRKFISHLKQENL

SEQ ID NO: 120090 - protein, 268 aa, Unknown
  Bacterial polypetide isolated from the Sargasso Sea
MQRRKIIQNLLAIAAVSLTATFAHADDKQLKVGTMSGPDAQIWSVVTRVAAREGLNVKVIEFNDYVQPNAALDAGDLDANGFQHQPFLDSQIRQRGYKIVNVGLTYVSPMGFYSKKLKSLKDLPEGAKVGIQNDPSNGNRALLLLQKYGVIKLKPGVGTNGVNATPLDVAENPKKIKLIELDAAQLPRSLDDLDAASINTDYAVKAGLQPTRDAIAIEDLKGPYANLIAVRAQDRDKPWVKKLVAAYESDEVRKYIDTQFKGAIIPAF

SEQ ID NO: 120091 - protein, 174 aa, Unknown
  Bacterial polypetide isolated from the Sargasso Sea
TRKAFLDCLLDMNANIDLTNIRQLGKEEVADLVIKSSDLLPAKIIEDIVPNLIDELPLFFLIASLIDGESEFNGLSELKHKESDRLSIMINNLQKLDVEVQLNEDSLKIIGKKDRIFSNEEFDSHGDHRIAMTMLVAGLRSSEGLIVNNVDCINTSFPEFIDQAKSLGFNFKNG

SEQ ID NO: 120092 - protein, 132 aa, Unknown
  Bacterial polypetide isolated from the Sargasso Sea
MISQKILFPNIIDEIPILCIAAAFAEGTTNIKNAAELRVKESDRINAMAEGLKKLNINYEVFDDGLSIIGTNSFVDINEEINSYDDHRIAMSFLIAGIRSKNGIRVKNCKNIETSFPHFKDIMNSLGMKINE

SEQ ID NO: 120093 - protein, 111 aa, Unknown
  Bacterial polypetide isolated from the Sargasso Sea
MNLTTSTNSQIFGKVKCPGDKSISQRALMIGALMNQEMTIDGFLHGEDPFSTMNALNQIGAGITVDESGLVHLCKKNYIFQNCDEPLNLGNSGTGLRLMLGLTCGAGLNLS

SEQ ID NO: 120094 - protein, 243 aa, Unknown
  Bacterial polypetide isolated from the Sargasso Sea
MPDYISITNQIKSYNKKINVSSDKSISIRSVLLASQAVGISKITNLLESEDVLNTLKTIKKLGIKYSKIGKTYKIEGFGLSGFNIKKKTSIDAGNSGTLARLILGLLVKSKFPVKLVGDKSLSKRDFSRVIKPLKLFGANIKSKKNLIPIEITGTDFLRPITYFEKIGSAQVKSCIILAALNTPGKTIINSKKSRDHTEIMLKYLKYPIKVQRKKKYDRIYVQGLNQFKSFNYNVPGDISSAA

SEQ ID NO: 120095 - protein, 288 aa, Unknown
  Bacterial polypetide isolated from the Sargasso Sea
MPNVSVIIPTYNRAHLIKESVSSVLSQTFKPKEVIVVDDGSSDKTWDILKNLGFSLSESRKNTLRYIYKENGGVSSARNIGIELSSSEYVALLDSDDQWKPSKLEAQLSSLKKESFSCRVSHTNEIWIRNGIRVNQHKKHSKNGGDLFEKCLKMCCISPSSALIHRTVFNDLGGFDESLKACEDYDFWLRYCAFEETHFLNEQLTIKNGGHSDQLSQKYWGMDRFRIYSLEKLLKNKNLSRSKYELALTELILKLKILMNGSMKRGKKDFTDKLNKKIIHFESLLGNE

SEQ ID NO: 120096 - protein, 100 aa, Unknown
  Bacterial polypetide isolated from the Sargasso Sea
ELRTKESDRLQAMADSLNAFGIKNELSKDGIVIHGIGSEGTLNSAEIDSYGDHRIAMASAIGSLRSEGVVKILDCVNVNTSFPNFIDVCREVGIDISNHE

SEQ ID NO: 120097 - protein, 268 aa, Unknown
  Bacterial polypetide isolated from the Sargasso Sea
MRRSFLTGLGALAAALAFAAPCAHADSQTLKIGTMSGPDAQIWTEVTKVAAREGLAIKVIEFNDYVQPNAALDAGDLDANGFQHQPFLDSQIKQRGYKIVNVGLTYTAPMGFYSKKLKSLKDLPVGAKVGIQNDPSNGNRALLLLQKYGVIKLKPGVGANGVNATPLDIAENPKKIKIVELDSAQLPRALPDVDAASINTDYAVKAGLTPVKDAIAIEDLRGPYANLIAVRAQDKDKPWVKKLVAAYESDDVRKFIDQKFGGAIVPAF

SEQ ID NO: 120098 - protein, 191 aa, Unknown
  Bacterial polypetide isolated from the Sargasso Sea
MSENSKLLIKNVLTNPTRTGIIKILKKMGAKIILKNKRLYKGEEISDIFIKSTKSLKSINCPENYNASAIDEFLIIFLVAAKAKGYSYFKNLSELNKKESPRLEMATKILKMMGVKIFRNKDSIKILGNPKLNLNKTYKIKNFYNDHRVFMMSVIAGLCFGGKWKIHNKNSIKTSFPEFLNLTKLLGAKYN

SEQ ID NO: 120099 - protein, 105 aa, Unknown
  Bacterial polypetide isolated from the Sargasso Sea
VIKNAAELRVKESDRLYAISEGLIKLKIEHDIFEDGISIKGTSKELKCDESIDSFDDHRIAMSFLIAGIRSDNFIRVTNCKNIETSFPNFKRIMNAIGMKINEED

SEQ ID NO: 120100 - protein, 68 aa, Unknown
  Bacterial polypetide isolated from the Sargasso Sea
MINGLGKEGAFIGAEIDSHGDHRIAMASSIGSLRSDSETIILDCLNVDTSFPNFVEVCKDVGIEIESI

SEQ ID NO: 120101 - protein, 137 aa, Unknown
  Bacterial polypetide isolated from the Sargasso Sea
RSSILKGCELNEDIAKLMIDEYPILSIAAAFAKSPSIFRGLGELRVKESDRLSLIKNNLINCGVECKVEKDDLYIFPKKNFKINNKIIRTDFDHRIAMAFAVMGSKIGPLEIKDSESINTSFPSFIKQFNNIGGNIF

SEQ ID NO: 120102 - protein, 392 aa, Unknown
  Bacterial polypetide isolated from the Sargasso Sea
NISGSKSESNRLLALRGFASYFDIINISDSDDTKVMMSAINSNQEKIDIGHAGTAMRFLTSYFSSIKNSSVILTGSKRMRERPISILVDALRELEVEILYIENEGYPPIRINGKEINKKHVNLPANVSSQYISSLMMLGVSLKNGLVINLSTEITSLPYIEMTKKIIERIGGNVRLQSNQITIDSLSNKKIPNQLVESDWSSASYFYSIAALSDFSDLTLNTYYKNSIQGDSDLVEIYKNFGIKTTYISNGINLSKTDVKLEKKISLDLSNNPDLAQTIIVTCLGLGIDCDLYGLQTLKIKETDRLKALKSEIQKFGVDKIEITDNSIHLENKSKLKSNISIDTYDDHRMAMSFVPLSILKPIIINDPMVVSKSYVSFWDHLEKLGFKILKK

SEQ ID NO: 120103 - protein, 237 aa, Unknown
  Bacterial polypetide isolated from the Sargasso Sea
EFGIPVEVNKSKNSRSIRVSKSDKINPKDINIPSDFSSAAFFILAALITPKSHLRIRGVGINETRIGFLHALRHMGGKIDIQNIQNGPEPIADLLIESSKLKGITLNTKLVANMIDEMPAFFIAASLAEGITIVKDAEELRAKESDRLEAMANALGSLGVKFKLNQDGIVIHGLGDNGQFKASEINSLGDHRIAMASSIASLRADGEVRIVDCDNVRTSFPDFIEVCGDIGIKIKEQ

SEQ ID NO: 120104 - protein, 259 aa, Unknown
  Bacterial polypetide isolated from the Sargasso Sea
MNLHGIRFSNILQFPPSEVFMPVQYLNIYLIGFLGSVVTVIVGIGFSYSGMSELGFSVYRGMEMTTYYLDKNRYDLYMNAMVYCITFGAALMLILAVILIPSAQQVQKRMSATPYGTPAIGTPPSGIEATPMEMEIPSYEEPEMTPELEDYSEDEGLGMAGLADENDSDVVSGNGRITDESHESFIRDHTESAVKFLMRKDLDDSELKPEDEQVHEEWQKRGLSRGKLRKHVMKMMDWDNIPEVPVDEILSQIREKISS

SEQ ID NO: 120105 - protein, 101 aa, Unknown
  Bacterial polypetide isolated from the Sargasso Sea
MHETPGQTRPIPIKNISGTVDLPGSKSISNRILLLSMLAEGQTEIHNLLDSDDTRRMVEALKTLRVDVLEERNQNKISVFGTCGTIPVTEATLMLGNAGTV

SEQ ID NO: 120106 - protein, 220 aa, Unknown
  Bacterial polypetide isolated from the Sargasso Sea
GKKSLSPIKVKVPGDPSSAAFFTALTILNYKSTIKIKDVGLNPTRTGFYNLLKKNGAKINFSNLKKQNNELRGDILVKSSKLKPLNATKQYYVNSTDEYPILFVIAALTKGVSVFKGISDLANKESNRIKEMQKVLKQIGIKSISNKNDLKIYGKGLFDASRKKITVPNLGDHRICMSSFILAILSGAKTQIKNFETVFTSSPSFLKIMKLLGAKFEIQK

SEQ ID NO: 120107 - protein, 100 aa, Unknown
  Bacterial polypetide isolated from the Sargasso Sea
MNNIRTIKGGVNLKGKVKVPGDKSISHRALIIGSIAKGETTIEGFLHSEDPLSTADCLRKLGVNIPEIKKNEPFTISGLGLDGLKEPKEILNCGNSGNHL

SEQ ID NO: 120108 - protein, 136 aa, Unknown
  Bacterial polypetide isolated from the Sargasso Sea
GIEVPPERAASMIDEYPILAVVAANASGDTRMRGVRELRVKESDRIEAMAKGLRSNGVSVEEGEDWWIVKGNGAGSVKGGSTCQTFLDHRIAMSFLILGLSSQKYIEIDDCSPINTSFPNFIQLMRELGANLEARG

SEQ ID NO: 120109 - protein, 285 aa, Unknown
  Bacterial polypetide isolated from the Sargasso Sea
AYWHKYKAGVSAQLKSAVILAGLNAYGNTTIVEKDRSRDHTENMLINNSKIIKIMNSRKKIIKIFGKKDLSSSEIVVPGDPSSAAFFTAITLLNKDSSITIKNVGLNPTRIGFYKILKRQGAKIRFFKLKKINNELRGDISVKSSKIKPIKANKKYYVNSTDEYPILFIIAALTKGLSIFKGISGLANKESNRIVEMQKVLKQVGIKTALSKDKLKIFGKGIINAQKKKILVPELGDHRICMSTFVLAAITGAEAKIKNFDTVFTSSPSFLKIMSKLGAKFEIKK

SEQ ID NO: 120110 - protein, 305 aa, Unknown
  Bacterial polypetide isolated from the Sargasso Sea
ASFYPKNKFTFPLKLISSNMPVGINYKAGVSAQLKSAAILAGLNSNGNTIIEEQISSRDHTENLLKKNTKTILIKKGNKKLIKIIGKNKLDPLNINVKGDPSSAAFFTALTLLNKGSSIKIKNVGLNPTRIGFYKILKKQKAKLKFVNLKKENNEISGDILVKSSSLKPIKTSSKMYPSTTDEYLLLFLIASFQKGVSIFKGISDLANKESSRAYEMKKILNQVGIKCVLSKDEMKIYGKGMFDASQKKIIINNLGDHRIAMSAFILAILTNAKTLIKNFETVYTSSPSFLKIMKNLGAKFEIQK

SEQ ID NO: 120111 - protein, 262 aa, Unknown
  Bacterial polypetide isolated from the Sargasso Sea
RIACGEKFSRKTFRGLDDSWIQACTETFIVKSEKIEPKGCLKGEINVPGDKSISHRILMLASLAEGESTIQGLSRGQDVKHTMDILSSLGAQLSEIGSDDLHVQGGELKEPTRNLYVGNSGTSIRLMSGMLAGLPFSTTLDGDKSIRKRPMGRIIEPLERMGVSIACLEATGMAPFRIDGGGLKGIEYQMEVPSAQVKGCLMFAALSAEGDTTIIEDTPTRAHTEELFEEVGLEIEIADSSITVKAGRPKPFIHEVKGDPSQ

SEQ ID NO: 120112 - protein, 222 aa, Unknown
  Bacterial polypetide isolated from the Sargasso Sea
MTLQLMRLFGVSVENDKFKHFRVPSMPYKSPGEIYVEGDASSASYFLAGAAISGGPVTVKGCGTKSLQGDSRFAKVLEKMGANVEWSEREISVSRSSLNGIDVDMNMMPDAAMTLAVAALFASGQTAIRNIHNWRVKETERLKAVSTELRKLGAEVEEGEDYLVINPPKKIQNVEIDTYEDHRMAMAFSLAAFGDASVTINDPGCVSKTFPEYFEVFSELCS

SEQ ID NO: 120113 - protein, 306 aa, Unknown
  Bacterial polypetide isolated from the Sargasso Sea
GQKINSSLKGDSSLSKRPMKRIIKPLEAMSVNIKHANNMLPITIRTDDIKPINYKMLTKSAQVKSSLMLASLGSNKYSSIAYNKNTRDHTEKILKYLKFDISVKEKIKIRRSNVEKGFSLTVPGDISNASFIIAACIIIPHSKIIIKNVLYNKTRLGFINALKKMGANIKVVKKERNQNPEKFCDVTVKHTPKLRGITISGDEIITMIDEIPIFSIVATQATGKTIIKNASDLRNKESDRLSLIYKNLVSMGANIREQADGLTISGNKKLYNTTIKHGNDHRIAMSFKVLNLLINSKMDKSYNEVI

SEQ ID NO: 120114 - protein, 294 aa, Unknown
  Bacterial polypetide isolated from the Sargasso Sea
RTEKYWEVIGNGTGGFIEPNEVIDCGNSGTTARLLIGTISSNPIKCTIVGDRSLSRRSMSRVTNLLSTIGADFKLTKDDYLPLMISGNSNLLPSEHVMQKASAQIKSAIILSSLNIDGKTTIVEKIPTRNHTEKMMKFLKIKFKEKKLKNGGKIIELNGPYEIVSKNIHVANDPSSAAFFIAGALIIPNSKITINNVAINPSRIQYLRILKKMGAKIKIKKTKIKCGEEIGNITAEYSKMKGTKISSSFSPFLIDEYPILAIVATQAKGKTVMKGLGELRHKESDRINSIVSNL

SEQ ID NO: 120115 - protein, 154 aa, Unknown
  Bacterial polypetide isolated from the Sargasso Sea
MLKSCKVNKGLNGSLIIPGDKSISHRSLIIASLASGISEVTNILKSEDVLHTLNAMKNMGVKIEENKNKLIIYGEGLDSLKKPNKTIYLGNSGTSARLLIGLLSAQNFESTISGDTSLSSRPMNRIIEPLLKMGATINSKDGKMPVEIIGKKLK

SEQ ID NO: 120116 - protein, 234 aa, Unknown
  Bacterial polypetide isolated from the Sargasso Sea
VRLQVEADGTHVVELEGEAMLTASDVVVPRDPSSAAFPMVAALITEGSDLLIPGIGMNPLRTGLITTLQEMGGDIEISNERNEGGETVADLRVRHSRLRGIDVPAGRAASMIDEYPILAVAATQAEGTTRMLGVAELRVKETDRIAVAAEGIIAAGGDVIYDEDSISVTGSPVAGGMSIDSQHDHRIAMSFLTLGMVSADPITVTGCMTINTSFPGFATSMNGCGAALASVGDA

SEQ ID NO: 120117 - protein, 177 aa, Unknown
  Bacterial polypetide isolated from the Sargasso Sea
MNLISHKIESINGEIICPGDKSISQRILIIGSLLNCDMQLDGFLNAEDPISTMEALNEIGASISIRQNYVFLNKREAPFKNPVNDLNLGNSGTGSRLLLGLISGLGIRCNLTGDKSLSKRPMNRIVEPLKKMGAEIKSNDGKLPITTLGSNITNNFEYKMPIASAQIKSSLLLAALA

SEQ ID NO: 120118 - protein, 183 aa, Unknown
  Bacterial polypetide isolated from the Sargasso Sea
MIAEPCNKVSGEVLCPGDKSISQRIVMLGSLLDHDLTVENFLSAADPISTMSALERVGFKYQYLDDLDTVNILNSKKRVSDPDASLNLGNSGTGLRLMLGFLGGLNIKANYVGDNSLSARPMARVLDPLNQMGIKYNSNAGKLPINYINSTPIKSFSYKLPVASAQVKSSILLAGLCSGAQIE

SEQ ID NO: 120119 - protein, 279 aa, Unknown
  Bacterial polypetide isolated from the Sargasso Sea
IITPLLQTGATFHDSNNENLPIKMKGSKIPLPIKYFSPVASAQIKSSILLAGLSSVGNTTVIEPSLSRDHTERMLNYLGADVSTTQLPNSSWKITLKGLPMLKPHSIEVPSDPSSAAFPIVASLITPNSQIKVLNVCVNELRTGLYTSLIEMGANIKFSNTREINGEKIADISAKYSILNGIKIPKSRVASMIDEYPILSIAAVKAKGNTIMEGVEELRLKETDRISAMCKGLNSIGIQTIDNKDTMVVKGKGPDCVLNGNVSIKSNLDHRIAMSFLCL

SEQ ID NO: 120120 - protein, 316 aa, Unknown
  Bacterial polypetide isolated from the Sargasso Sea
MSSKSFNLIIKKKIPSFKKKVIEVDSDKSISIRSFLIGAISHNISTVTNTLESEDVISTINCLKKLGVKIRKIKPKNYYIYGKGLGSLNAKKNVTLNFGNSGTLARLLIGILSTNPNIDVKLVGDNSLNKRNMKKLILLMSEFGASFFPKKKFYFPLKLISTNLPLGIKYKAGVSAQLKSAVMFAGLNSFGNTEILETDKSRDHTENLLKKNSKVIKINSKKNKFIKIFGKQSLGPINIEVPGDPSSAAFFTALTLLKNNSSIQINNVGLNPTRIGFYNLLKKHGAKIEFKNLKKINNELRGNIIVFSSKIKPIKS

SEQ ID NO: 120121 - protein, 285 aa, Unknown
  Bacterial polypetide isolated from the Sargasso Sea
PPSPTPTRAALSRVRTLWAACGAEVLEMDVARHDQVLARTSHLPHLLAFSLVDTLARQDERLEIFRYAAGGFRDFTRIAGSDPVMWRDIFIANRDAVLASLADFEAGVARLRDAVERGDGDAMLATFDRASHARHYFDTLLNKTSYQAEYQMQQQGKLRYRVSPGGGVTGRIRVPGDKSISHRSIMLGALAEGVTEIKGFLEGEDSLATLQAFREMGVAIEGPHQGRVTVHGVGMHGLKSPSGPLYVGNAGTAMRLFAGLLAGQAFDTELTGDTSLTRRPMGRVA

SEQ ID NO: 120122 - protein, 155 aa, Unknown
  Bacterial polypetide isolated from the Sargasso Sea
NQTKKSNEDVGDLEVFSSELVGVEVPEEIIPNIIDEIPIFSIAASFANGETSIKGASELRVKESDRLEAIGDGLKALNVNYQLYDDGIKIFGQNKNITPKNYVNSYGDHRIAMSFLIASLRSNTEIMVKDCQNILTSYPNFVETMNSLGMKIYEK

SEQ ID NO: 120123 - protein, 171 aa, Unknown
  Bacterial polypetide isolated from the Sargasso Sea
MDFYIEPSENLSGEIEIPGDKSISHRAVIFGSLASGISEFTNFLSGEDCLATLNAFKKMGVYANLSDDKLIIHGVGINGLNKASEALYLGNSGTSARLLVGLLGAQKFESTIEGDKSLSGRPMNRVLDPLEKMGANIQSNNGKLPIHIKSVNEVSSINYSLPIASAQVKSS

SEQ ID NO: 120124 - protein, 269 aa, Unknown
  Bacterial polypetide isolated from the Sargasso Sea
YKNTMSSAQVKSAVLLCGLGTTDTTSYYEPIKSRNHTEIMLKNIGVDIEHNNGKIILRNSNSLIKGLDITIPGDPSTASFFAAAALILPKSELILKNILANPTRFGFFDALKRMGANIEYLSSWNESGEEVKNIKIKYGPLNAIKIDHMDIPVMIDEIPILSIVASQANGKTEIRGAKELRVKESDRIQAIVHNLRNMGVLIVEHNDGFSIFGPVKLKGSKIKTFNDHRIAMAFSIAGLIADGETVLDNKKCVDVSFPNFFNMLQSNIK

SEQ ID NO: 120125 - protein, 290 aa, Unknown
  Bacterial polypetide isolated from the Sargasso Sea
INPLAEMGANIVSSDGKLPISISPSTINMQYTYELPIASAQVKSCILLAGLSAGTGIEIIEPIQTRDHTERMLKNFGANIEITSLDGKNIIKLDSTNNLYAKNYTVVGDISSAAFLIVAALISNSPGLEITNVGMNPSRIGVLKALQKMGANIEFKNQRLVSGEPCADLTVKKSKLKGVELSGEIIPNIIDEIPIISIAAAFADGDTVIRDAAELRVKESDRLQAVSEGFGVLGIKHENFGDGMSIQGSPNTLLIDQSVSIESHDDHRIAMSFLIAGLKCSQSITVRNCE

SEQ ID NO: 120126 - protein, 38 aa, Unknown
  Bacterial polypetide isolated from the Sargasso Sea
MSSNKSSKLSGSIVVPGDKSISHRALILGSLVTGKIKS

SEQ ID NO: 120127 - protein, 175 aa, Unknown
  Bacterial polypetide isolated from the Sargasso Sea
MNFKVKKGKGVRGEITIPGDKSISHRSIMCSSLAEGKSKIYGFLEGEDCLATKLAFQDMGINFETNNDEIVVHGSGLYGLKEPKKEINLGNSGTSIRLLSGILSAQKFSSTLIGDESLSSRPMNRIIEPLSLMGANIKSQNSGRPPLEIGKSDMLSSINYDLPIASAQVKSKYFI

SEQ ID NO: 120128 - protein, 257 aa, Unknown
  Bacterial polypetide isolated from the Sargasso Sea
NSLNEANKPIYLGNSGTSARLLTGLLSSQAFNSVLIGDESLSKRPMNRIANPLSEMNAKINTTNGSLPLTIEGSNLKATNIDLKIPSAQIKSGLLLAALNTQGETILSENKITRDHTEIMLESFGANIKIKQSDNKKIIKIVGKKELIAKNIDVPNDLSSSAFFIVSALINKGSHVKLKNINNNPTRNGIILALKKMGASIKLSNERKNNNENICDIDVFSSELNGCELGPEFADLMIDEYPILSVAACFANSPSIF

SEQ ID NO: 120129 - protein, 265 aa, Unknown
  Bacterial polypetide isolated from the Sargasso Sea
MISNKISNGINGLIEIPSDKSISHRSIIIPSIAKGTSEINNLLMSDDVLHTLNAFKSMGVKITEENNKIIIIGNGLNSLLAPKESIYLGNSGTSARLLTGLLASQTFNSILTGDKSLSSRPMNRIIDPLKIMGASFENKTGTLPLKIIGQNLKNSKIEIEIPSAQIKSGLMLAALNTDGESCLIEKNITRDHTENMLKAFGANIDIKKNGLETTILIKGKHELKSQNIEVPSDLSSSAFFIVAALINKGSKITLNKININPSRDG

SEQ ID NO: 120130 - protein, 200 aa, Unknown
  Bacterial polypetide isolated from the Sargasso Sea
LVAGLLASHEGLLIRNVGINPTRTGLLTILKKMGGSIDLLNKREFGTEPVADIFVKKSKLKGIEIDQNLVPLAIDEFPVIFVAAAYADGYTTVAGAQELRYKESDRLHVMSIGLQEIGIETKEIDDGLIIKGGVVHGGCVDSYGDHRIAMSFAVAGLASQAVIQVKRTDEVSTSFPNFLELANSSGFAVEAFIAAKPLKG

SEQ ID NO: 120131 - protein, 273 aa, Unknown
  Bacterial polypetide isolated from the Sargasso Sea
GKIFGRERGNKAPISIDGNKLKGCVIGTPVASAQVKSAILLAGLKASGSTSVIEPASSRDHTERMLKAFGADISIRGELGRNVVIKPGGNLIGQRILIPGDISSASFWMIAASIVPNSEVLIKNIGLNPTRTGILNVMDAMGCNYEILDKSTIAGEPIGSIKVKTANNLRSFTIEGDILPKLIDEIPILTVAACFCNGVSEIKDAQELRVKETDRLKVMARQLHKFGAEITEKQDGLVINGQSTFHSAEVDSETDHRVAMSLAIASLLAKGSS

SEQ ID NO: 120132 - protein, 281 aa, Unknown
  Bacterial polypetide isolated from the Sargasso Sea
SEFEYKMPIASAQVKSSLILASLSSNNSITIIEPKITRDHTERMIEYFGGSITHSNDVSGLIRVNNTKLTSKNSYEIVGDFSSAAFVIVATLISKESQVIIRNVGLNPSRSGLLEILARMGANIEIRNKKITCNEESGDIFVKSSTLKGIDLPEDIIPNIIDEIPILSIAAAFAKGTTSIKNASELRVKESDRLEAISDGLKKLKIKHETFGDGISITGTNDLVVVDEEINSFDDHRIAMSFLVAGIRSANNIKVRDCKNIETSFPGFKDIMNSIGMKINE

SEQ ID NO: 120133 - protein, 181 aa, Unknown
  Bacterial polypetide isolated from the Sargasso Sea
SASYFLAGAAITGGPVTVKGCGTESLQGDSRFAEVLEKMGANVVWGEREILVSRSSLNGIDVDMNMMPDAAMTLAVTALFASGQTAIHNIHNWRVKETERLKAVSTELRKLGAEVEEGEDYLVIIPPKKIQNAEIETYEDHRMAMAFSLAACGDASVTINDPGCVSKTFPRYFDVFSGLCS

SEQ ID NO: 120134 - protein, 310 aa, Unknown
  Bacterial polypetide isolated from the Sargasso Sea
AQRCAILGLDFDGKEISEDVKHTMEAANALKSSREDVELDLGNSGTGMRLLTGYIVGLGEAAILLGDTSLSKRPMKRIADPLSEWGAKIELTNNKFAPIKINRSELKPKFKYHLEIASAQIKSCLLMAAVSSGSQIEIEEHLISRDHTERLLEECDGLIKKEGKKIFFDGRKKLTKKKIDIPKDFSCVAYFLAADILTGRINEIKNVGVNKTRTAFLDILKEMGAKIEQKNLRIISNEPRADLKASIAGPLKGVTILGDMVPNLIDEIPLIAILAMFAQGKTVVRGAKELRYKESDRISLLLSNLKKFNP

SEQ ID NO: 120135 - protein, 66 aa, Unknown
  Bacterial polypetide isolated from the Sargasso Sea
MNNIRTIKGGVNLKGKVKVPGDKSISHRALIIGSIAEGETTIEGFLYSEDPLSTADCLRKLGVNIP

SEQ ID NO: 120136 - protein, 167 aa, Unknown
  Bacterial polypetide isolated from the Sargasso Sea
LQEMGGDITLENQRTEGGETVADLRVRHSQLRGIDVPPERAASMIDEYPILAIAATQADGVTRMLGVEELRVKETDRIAVVADGLLAAGGSVSYDEDSMTVTGGGIAGGITIDSQHDHRIAMSFLTLGMVSVAPMSVTGCGTINTSFPGFAESMNACGAALSAAPEQ

SEQ ID NO: 120137 - protein, 210 aa, Unknown
  Bacterial polypetide isolated from the Sargasso Sea
ELKKINYNVPGDPSSAAFFISAACLKPGSKLIVKNVLFNETRVGFLKTLKNMGGNIKIINKRKIHNEIIANLKIVQKNNLTPTVLEPNEIPLQVDEIPILSVVASFADGLTIFKGLKELTVKESNRLLLIHENLKRIGVKSIIKNYDLHIYGNLNLKKGDATIKHNDDHRILMSFFIANIICKKNNIIKEKSCVKTSYPTFFKHIAQFSN

SEQ ID NO: 120138 - protein, 266 aa, Unknown
  Bacterial polypetide isolated from the Sargasso Sea
ALILSALNLRGKTKIIEKRNTRDHTERLMTYLKIKYKKTKLNQNSTAIELNGPYEIKPKDLKVAGDPSSAAFFIVGALIIPKSAIILKNVSLNKTRIAFISVLKKMGGKIKIKRTENISGEDIGNVKVSYSSLTGVKINASSSPYLIDEYPILSIAASQAKGSTIMEGLSELRHKESDRIKSITTNLSKLGFKVKSKNDNISIQGNKNIKITKPMKIKTYSDHRIAMSFVILGLLYGKNLFVDDEACISISYPNFKEHLEKLSSIY

SEQ ID NO: 120139 - protein, 241 aa, Unknown
  Bacterial polypetide isolated from the Sargasso Sea
MHNRIIVKEKINNFEKKIVIPGDKSISIRWVLIASLASGLSQAKNLLLSEDVLAAIKVIKKLGVKVKFKNQTCKVYGVGVDGYKYKKGIILDAQNSGTLGRLIAGILINSPYSIKIIGDNSLSKRDFKRIAKPLKKFGANLKLKNDYTLPLIITGSKNLKPIKYLENIGSAQVKSCILFAGARTTGKTFIKVPLAKRSRDHTERLFRYLKLPIKVKRQKNFDLIEISKIKKIKPFNYKIPS

SEQ ID NO: 120140 - protein, 200 aa, Unknown
  Bacterial polypetide isolated from the Sargasso Sea
SAAFFLVAASIAEGSELVLEHVGINPTRTGVIDILKLMGGDITLENQREVGGEPVADIRVRAAKLKGIDIPEDLVPLAIDEFPVLFVAAACAEGRTVLRGAEELRVKESDRIQVMADGLIALGVKAEPTPDGIIIEGGTIGGGEVWAHGDHRIAMSFSVASLRASAPIRIHDCANVATSFPNFLALAAEVGINVAVEGSA

SEQ ID NO: 120141 - protein, 296 aa, Unknown
  Bacterial polypetide isolated from the Sargasso Sea
MNLTSYPVQEIFGDVICPGDKSISQRILIIGSLLNCDINVSGFLNAKDPLSTMAALNKIGASINKDGNLVKIKKRLRPFNSPESSIDLGNSGTGIRLLTGLISGLNLKATLIGDESLSQRPMSRVVDPLVKMGKKISTNDGKTPIKIKGGSIIDNFAYQMPVASAQVKSSLILASLSSGNSIHIEEPKVTRDHTEKMIEYCGGKIDVQNSSEGKIITLNKSNLAEISSYEVVGDFSSAAFIIVAALICKKSKVLIKNVGLNATRKGLLEVLLKMNANIKIVNRRKTCNETCGDPLL

SEQ ID NO: 120142 - protein, 164 aa, Unknown
  Bacterial polypetide isolated from the Sargasso Sea
MNNIRTIKGGVNLKGKVKVPGDKSISHRALIIGSIAKGETTIEGFLHSEDPLSTADCLRKLGVKIPEIKKNEPFTISGLGLDGLKEPKEILNCGNSGTTMRLLMGLLAAQEGKNFILTGDASLNERPMGRVAKPLSLMGGKIFGREKGNKAPISIDGNKLKGVL

SEQ ID NO: 120143 - protein, 275 aa, Unknown
  Bacterial polypetide isolated from the Sargasso Sea
LPLKFEIKIPSAQIKSAIMLSALNTKGTVRIKEFKTTRDHTENMLKSMGYNIKVKENSKHRYIEMKNNKEIKTINYNVPGDPSSAAFFISAACLKPGSKLIVKNMLYNKTRIGFIKTLKSMGGNIKVIKKRKIHNELIVDLKIEQKKYLKSIILRDADVPLQIDEIPILSIAASFANGLTIFKGLKELTVKESDRLLLIHKNLKRIGVKSQIKGYDLFIYGNNILKKGAAIIKHDNDHRILMSFFIANLICKKNNIIKDKSCVNTSYPTFFKHIS

SEQ ID NO: 120144 - protein, 292 aa, Unknown
  Bacterial polypetide isolated from the Sargasso Sea
MGALFKIKKNTLPFSIKGTKFIRPINYNETRGSAQCKSAVMLAALHAPGKTNLKCLKSRDHTELFFKNVLKVPINVKKNKKFDLIQVEGRKNFKGFSYRVPGDISSAAFFIVLTILNKKSSLVIKNINLNPSRIGMIKILNLMGSKISFHNKKKYKGELVGDIHVKSVKKFKSINCPKKFNSSAIDEMLLLFLVSSVARGTSTFQGLEELNKKESKRLDWGIKILKMIGIKTQKISNHGIKIYGNPNLQLKKTYRIKSYLKDHRVYMLSVIAGLTLGGRWVINDPDSIKTSF

SEQ ID NO: 120145 - protein, 213 aa, Unknown
  Bacterial polypetide isolated from the Sargasso Sea
NISEVKNVLESYDVFSTIKCLRKLGVRIVKVKPKKYLIYGKGLGSLFVKKNSILNFQNSGTLCRLLVGIISTTPGIQVKIKGDNSLNKRDMSKLIKLMHEFGAEFHPKNKLKLPLKITSSELPIGINYKSDISAQLKSAVMLAGLNSYGITTITEKKESRDHTENILLKNGPKILRIKKNKKKQNIIKVFGKSYLDSFKLSVPGDPSSAAFFT

SEQ ID NO: 120146 - protein, 249 aa, Unknown
  Bacterial polypetide isolated from the Sargasso Sea
QTRDHTEKMLKHFGANIETSSQDGKNVIKLASPNDLHAKNYHVVGDISSAAFLIVAALISNSPGLEIMNVGVNPSRTGVLQALQKMGANIEVKDKRLESGEPCADLLVKKSELKGVELSGKIIPNIIDELPIISIAAAFANGETLIKDARELRVKESDRLRAVSEGFSKLGIMHRNFEDGMSIKGAPNQLLIDQSISIDSYDDHRIAMSFLIAGLKCSKPITVKNCENIFTSFPNFIELISSTGYELKK

SEQ ID NO: 120147 - protein, 70 aa, Unknown
  Bacterial polypetide isolated from the Sargasso Sea
MSREQVNLLASSNNKINGCIRVPGDKSISHRAIIISSIAEGKTQINQYLDSADINATIDVCRRIEADIVK

SEQ ID NO: 120148 - protein, 261 aa, Unknown
  Bacterial polypetide isolated from the Sargasso Sea
MLSALNTDGKVKIKEFKNTRDHTENMLRSMGYNIKVRENSTFRFIEMRNTKELKTIHYNVPGDPSSAAFFITAACFKPGSKLMIKNILFNKTRIGFIKTLKKMGGDIRVISKRKIHNELIADLKVEQKKNLKSITLEPNEVPLQIDEIPILSIAASFSTGITIFKGLKELTVKESNRLSLIHENLKKIGVKSVIRNYDLYIYGDYNLKKGGAKIKHNNDHRILMSFFISNMICKKNNIIKDKSCVKTSYPSFFKHISQFSS

SEQ ID NO: 120149 - protein, 251 aa, Unknown
  Bacterial polypetide isolated from the Sargasso Sea
MGNSGTGFRLISGLIAGQEINAELTGDDSLSKRPMNRIINPLNEMGAKIESNKGCAPLTFNKSQLVKEFLYEMPIASAQLKSCLLLAAISSNMKLTLHENKVSRDHTERMLKYFGANITTKKYEGGQDIILDTNNKLEAKDYSVVGDFSSASFLIVAAIITKDSSITIKNVGINETRFTLLEILKKMGSDINIKNHSICCGEEVADIEVSSSALSGVSIDEETIPKIIDEIPILSIAASFAEGETSIIGAG

SEQ ID NO: 120150 - protein, 260 aa, Unknown
  Bacterial polypetide isolated from the Sargasso Sea
LIDTMSEFGAYFKPKNKFNFPLKIISTNLPIGIIFKAGVSAQIKSAVMLAGLNSFGDTKIFEKQKSRDHTENMLLKNKEVIKVVNKKNRLIKISGKKYLNPIKINVPGDPSSSAFFCALTLLNPGSQLKIKNVGLNPTRLGFYNLLKKQNARILFENIKKDNNEIKGDVIVKSSNLKPIKASKEYYVKATDEYPILFVIAALVKGVSIFKGIDDLANKESNRIKEMQKVLKQAGVKSIFSKNKLKIFGKGVMNLKKKKIF

SEQ ID NO: 120151 - protein, 194 aa, Unknown
  Bacterial polypetide isolated from the Sargasso Sea
AALITQNSEITIHDVCINPLRTGLITTLKEMGANIEIHNSRIEAGEPVADLIVRSSKLNGVVVPAERAPAMIDEYPILSVAASNAIGTTRMQGLAELRVKESDRLTAITDGLKACGVNVNTDQDDLIVTGTKNNVKGGVTVETRMDHRIAMSFLVLGLNAKNPIAIDDEKHISTSFPSFVSLMNDLGAQIRKVI

SEQ ID NO: 120152 - protein, 299 aa, Unknown
  Bacterial polypetide isolated from the Sargasso Sea
MGRNGLLPLTLRGSSNPISINYASRIPSAQIKSAVLLGALNAPGTTVFYEPQISRDHTEKMLSAFGANISTSISEKGSKVTVEGYAELSAQQVVIPQDPSSAAFPLCAALIVKDSKVSFKNISQNPTRNGLIITLLEMGADIEIKNTKHVNGEKVADLIVSSSELSGVEVPVERAVSMIDEYPILAVVAALASGVTTMRGIKELRVKESDRISAMAKGLAKNGVMVEEGDDYLKIVGTGSNGVPGGATVKTFFDHRIAMSFLCLGLASENSITVDDVRSIDTSFPNFFELMENLGADIG

SEQ ID NO: 120153 - protein, 284 aa, Unknown
  Bacterial polypetide isolated from the Sargasso Sea
ISSISEGISFVNNALESEDVKSTIEVVKRLGINVKKIDNKKYKVYGKGLGSFKCKNYSFLNFGNSGTLARLIIGLLSTTPDIKVKIKGDKSLNKRNMGEIIKLMNQFGAEFLPKNKFYFPLTFSSSNYPIGISYNSGKSAQLKSAVILAGLNAYGKTLINEDEVSRDHTENILIRNKDSFKIIKSRGKKIIVNGKKALKSFSIKVPGDPSSAAFFVALTILKNNSKIKIKDVCLNPTRIGFYELLKKSGAKIKFKNLKRKNNEIVGDIVAESSNLKPIRATKEY

SEQ ID NO: 120154 - protein, 253 aa, Unknown
  Bacterial polypetide isolated from the Sargasso Sea
TLKVLRALGARIKKTDGLINIVGGEFKEPSNLLYTGNSGTTTRLMAGVLSGQKFLSIMSGDKSIRMRPMARIVDPLREMGASIEGRQGGRLCPLVFKQSNLHGIEYDMPIPSAQVKSALLLAALYADGPTIIHQPALSRDHTELMFRAMGINVSEHGLSLNIEPGQLNAIDVNVPADISSAAYWVVAAICHSNAKITIQNVGINPTRTGILDALEMMGASINIENKRLEGGELVGDIIAESSELNSAVIEGDL

SEQ ID NO: 120155 - protein, 269 aa, Unknown
  Bacterial polypetide isolated from the Sargasso Sea
GIKILKKNDKYDVYGLPPGGLFQPNKLIDFGNSGTGIRLISGLISSNNIEVKLVGDKSLSQRPMKRVTEHLSKIGANIKLKKKLFPPIKLKGTGNALPLTFKILIPSAQIKSAIMLSALNTKGIVKIKEFKSTRDHTENMLKSMGYNIKVKEVSKYRFIEMRNNKELKKINYKVPGDPSSAAFFISAACLKPGSKLIVKNILYNRTRVGFIKTLKSMGGEINIINKKKVNNELIADLKIEQKKRLSSTTIEAIQVPLQVDEIPILSVAA

SEQ ID NO: 120156 - protein, 266 aa, Unknown
  Bacterial polypetide isolated from the Sargasso Sea
GQNFESVLDGDESLRKRPMDRVKTPLEEIGAEIYTTDGKFPVEIKGSKIKGGHIKLDSGSAQVKSAVIFAGLTGESELTIETKIKSRDHTEILLEYFTDNIIVEDNLIKVTPNPIIKNDLIDIPNDPSSAAFFIVGSLLNEGSSIKLEKICLNPTRIKFIEILQEMGGDISFENISNISGEKVGDILVKHSNLKGVDISEEDIPLIIDEIPILSLAMSLAEGDSNILGATELRYKESDRIYSIVSELSNLGADINQINDDIKIKGK

SEQ ID NO: 120157 - protein, 53 aa, Unknown
  Bacterial polypetide isolated from the Sargasso Sea
MNNIRTIKGGVNLRGKIKVPGDKSISHRALIIGSIAKGETTIEGFLHSEDPLW

SEQ ID NO: 120158 - protein, 268 aa, Unknown
  Bacterial polypetide isolated from the Sargasso Sea
CLLLAALASENNIKVIEPKITRDHTERMIDYFGGDISFTQKDNVGEINYKFHNLTPKDSYKVAGDFSSATFIIVATLISLNSEVLIKNVGLNKTRSGLLEILKLMGANIQIKNKKIESNEEVGDIVVKSSKLTGVQVPKNIIPNIIDEIPILSIAAAFADGVTKISNASELRVKESDRLNAISNGLSKLNIIHEIFEDGLNITGTKEKIDSGEKINSFDDHRIAMSFLIAGIRSKKGISVENCKNIETSFPNFRNIMNSLGMKIDEKN

SEQ ID NO: 120159 - protein, 63 aa, Unknown
  Bacterial polypetide isolated from the Sargasso Sea
MSFNYHSYIKGTYYPPGDKSISHRILILAGQAIGKSEISNLLEGEDVVNTLKAMRLLGIKIKK

SEQ ID NO: 120160 - protein, 85 aa, Unknown
  Bacterial polypetide isolated from the Sargasso Sea
MVSIISIKSNKLSGEVFVPGDKSISHRALILGACAVGKTTIENLLESEDVLATFSALNELGVNIKKSKNLWEVRGNGLGSLRSPE

SEQ ID NO: 120161 - protein, 309 aa, Unknown
  Bacterial polypetide isolated from the Sargasso Sea
FTKSIKVDSDKSISIRSFLIGSICEDISVVKNVLESDDVFSTIKCLQKLGVKIKKKSNIYFIHGKGLGSLYAKKNLNLNFGNSGTLARLLIGILSTTPEIEIKVKGDQSLNRRSMKKLIKLMSEFGAQFLPKNKFNFPLKLISTEMPVGIKYKAGVSAQLKSAVILAGLNSFGTTLITEEKRSRDHTENMLKNNSQSITVRKNKKSLIKIYGKKFLNQIKIDVPGDPSSAAFFVALTLLNKNSSLKIKNVGLNPTRIGFYELLKKHGANIKFLNKRKKNNEIIGDINVKSSKLKKPIIAPKHFYEKTTD

SEQ ID NO: 120162 - protein, 139 aa, Unknown
  Bacterial polypetide isolated from the Sargasso Sea
MNNIRTIKSGINLKGNIKVPGDKSISHRALLIGSIAKGETTIEGFLHSEDPLSTADCLRKLGVNIPEIKKDEPFTISGLGLDGIEEPKEILNCGNSGTTMRLLMGLLAGHEGKNFILTGDASLNERPMGRVGKPLCLMG

SEQ ID NO: 120163 - protein, 249 aa, Unknown
  Bacterial polypetide isolated from the Sargasso Sea
GIYADGITTFEEPSKSRDHTERMLSAMGADIKIDGNVTTIQKSKLKAQNIVIPSDISSAAFWMVLGACHPNAEILLPNIGLNPNRTGILEVLIEMGANITVNNKTTDMGEPRGDILVKSSKLKGINIDKNTIPKIIDEIPILSLAACFASTQTIIDDAEELRVKESDRIKATVSGLSKLGADIQETEQGMIINPSNKLIGNQVESYGDHRIAMMLGIAGLLSDKTTIIEGAEHASVSYPNFWDEIESKK

SEQ ID NO: 120164 - protein, 248 aa, Unknown
  Bacterial polypetide isolated from the Sargasso Sea
MIIKSKILPFKKTIKVDSDKSISIRTFLIGAISHKISSAKNVLESEDVFSTINCLKKLGVKIQKENEKNYLIYGKGLGSLYIKKNSKLNFGNSGTLARLLVGILSSTPNIEIKIEGDNSLNKRSMKSLILLMSEFGASFLPINKFRFPLKMISSSMPIGIGYKAGVSAQLKSAVILAGLNSYGVTRIIENEKSRDHTENMLSKNSQVINITNKKKKLIKINGKKSLEPINITVPGDPSSAAFFTALTI

SEQ ID NO: 120165 - protein, 254 aa, Unknown
  Bacterial polypetide isolated from the Sargasso Sea
SIKSAVILAGLNSFGNTNIIETEKSRDHTENMLLHNKKCIKIKRGKSKHIKIFGKKFLDSLKIEVPGDPSSSAFFSALTILNEKSSIIIKNVGLNPTRIGFYKLLKKHGANIKFKNFKNKNNEPRGDILVTSCKLKSLKASKEYYVNSTDEYPILFVIAALTKGLSIFKGIKDLANKESNRIKEMQKILKQIGVKSTATKNQLKIFGKGMINARNKMIIVPSLGDHRICMSSFVLGLLTGAKVKIKNFETVFTS

SEQ ID NO: 120166 - protein, 89 aa, Unknown
  Bacterial polypetide isolated from the Sargasso Sea
MRALSSKSLKGIVSIPGDKSISHRSLILGALAIGQTKITGLLEGQDVLDTARAMVAFGAQVEKNEGGEWCVDGVGVGGFAEPSTVVDCG

SEQ ID NO: 120167 - protein, 47 aa, Unknown
  Bacterial polypetide isolated from the Sargasso Sea
MLKSSKIYNGINGEIAIPGDKSISHRSIIIPSISNGISEVSNILKSE

SEQ ID NO: 120168 - protein, 102 aa, Unknown
  Bacterial polypetide isolated from the Sargasso Sea
MSLPGKLTLTPINNISGTVDLPGSKSISNRILLLSMLAEGNTEIHNLLDSDDTRRMMEALNTLRVDLLEDRNQNRVSISGTSGTIPVNKATLMLGNAGTVIR

SEQ ID NO: 120169 - protein, 295 aa, Unknown
  Bacterial polypetide isolated from the Sargasso Sea
HCKVYGNGLNGYVYIKNLTLDAGNSGTAARLLTATLVNSTKYIKITGDTSLKKRDMKRIIDPLKEFGATFKTKNNTLPIFVKGSNFLRPINYHEYRGSAQCKSAVMLAALFAPGITNLKCRKSRNHTELFFKNIIKANTKIKKNKKYDFIEIEGRKNFEGFSYNIPGDFSSAAFFIVLTLLTKNSSIVLKNININPSRTGMVSILNLMGAKISFYNKKKYKGEIVGDIHVKNIKKLKGIKCPMKFNTSAIDEMLLLFLVSSISKGTSTYKNLEELNKKESKRLDWGIKILKMIGI

SEQ ID NO: 120170 - protein, 231 aa, Unknown
  Bacterial polypetide isolated from the Sargasso Sea
KLVSVPYVEMTLQLMMRFGVSVKNNKFKHFRVPRIPYRSPGKVYVEGDASSASYFLAGAAIAGGPVTVKGCGTESIQGDSRFAEVLEKMGANVEWSEREISVSGSSINGIDVDMNMMPDAAMTLAVAALFASGQTTIRNIHNWRVKETERIKAVSTELRKLGADVKEGEDYLVINPPKKIQNAEIDTYEDHRMAMAFSLAACGEASVTIKNPGCVSKTFPEYFEVFSGLCS

SEQ ID NO: 120171 - protein, 276 aa, Unknown
  Bacterial polypetide isolated from the Sargasso Sea
PKNPIDLGNSGTGMRLMFGLISGLGIEATLIGDDSLSKRPMRRVADPLKEMGASNKLKIDGTPPIEIFKGKIIDDFIYEMPVASAQVKSSIILAAIAAKKGITIIEENPTRNHTERMIEYFKGNIEILPIWCDESKSLNSFMGNKIVYKPRELISIEHYDVVGDFSSASFLIVAGLISKSGKLIIKNVGLNPSRSLLIKILKLMGGNVSISNKRMVSNEEVGDITASPSKLKGFNISHLVGEVRADHVIPNIIDEIPILCIAAAFAEGSTILGDLE

SEQ ID NO: 120172 - protein, 311 aa, Unknown
  Bacterial polypetide isolated from the Sargasso Sea
MRRYQIPLSKMNAKINSSNGKLPLKIEGSELSSTKIDLDIPSAQIKSGLLLAGLNTKGETIITENKITRDHTEIMLESFGANIDVIKNYNNKLIKIIGKKELVSKNIDVPNDLSSSAFFIVSALINRNSKVVIKNINNNPTRNGLLFALEKMGAKIRLFNKRISNNENICDIEVLSTDLNGCELGPEIADLMIDEYPVLAVAASFASTPSIFRGLKELRVKESDRLKLIMLNLKKCGVNCKTENDDLFIYPSKDYEISSNIIQTDFDHRIAMAFCIMGTRIGPLRINDSESINTSFPNFKSELNKLGGRII

SEQ ID NO: 120173 - protein, 47 aa, Unknown
  Bacterial polypetide isolated from the Sargasso Sea
MSANGPSHPARELKAGGSLSGHVKVPGDKSISHRSLLFGAIAEGTTT

SEQ ID NO: 120174 - protein, 163 aa, Unknown
  Bacterial polypetide isolated from the Sargasso Sea
MNNICTIKGGVNLKGKIKVPGDKSISHRALIIGSIAEGETTIEGFLHSEDPLSTADCLRKLGVNIPEIKKDKPFTISGLGLNGLKEPNEILNCGNSGTTMRLLMGLLAGQEGKNFILTGDISLNERPMGRVGKPLSLMGGKIFGREKGNKAPISIDGGKLKRM

SEQ ID NO: 120175 - protein, 77 aa, Unknown
  Bacterial polypetide isolated from the Sargasso Sea
MKHIISKKSFRLAGYAKVPGDKSISHRALIISSMCIGQSKIKGLLESEDVFATMNALKTLGVKIEKSNGYWFVNGVG

SEQ ID NO: 120176 - protein, 192 aa, Unknown
  Bacterial polypetide isolated from the Sargasso Sea
MSLGSLTLSPIKRISGKVDLPGSKSLSNRVLLLGMLAEGTTHIRNLLDSDDVRYMIGALEQLGIRMEETRESNKIRVEGCAGKIPNSDLELMIGNAGTAMRPLTAALTLGQGRYVLDGVPRMRERPIVDLVDGLRQLGAEVSLLNGPPGPPVEIIASGLPGGTAEIKGSVSSQFLSAILMAAPSAQNDVTLK

SEQ ID NO: 120177 - protein, 234 aa, Unknown
  Bacterial polypetide isolated from the Sargasso Sea
VLDCGNSGTTSRLMMGAVSSNPISCTFVGDNSLSKRSMSRLSIFLEKMGAEIKLTNKDFLPLQINGNINLLPMEHVMQKPSAQVKSAIILSALNLRGKTKIIEKRNTRDHTERLMRHLKINFKKKILSKSSTSIELNGPYEIKPRDITVASDPSSAAFFIVGALIIPNSMIYLKNIALNKSRIAFIDVLKRMGGKIKIKKTKTISGEDVGNIQVSYSSLQAIEIKASSSPYLID

SEQ ID NO: 120178 - protein, 281 aa, Unknown
  Bacterial polypetide isolated from the Sargasso Sea
NKGKLPIFTLDSKISNNFKYEMPIASAQVKSCLLLAALASENNIKVIEPKITRDHTERMIDYFGGDISFTQKDNVGEINYKFHNLTPKDSYKVAGDFSSATFIIVATLISLNSEVLIKNVGLNKTRSGLLEILKLMGANIQIKNKKIESNEEVGDIVVKSSKLTGVQVPKNIIPNIIDEIPILSIAAAFADGVTKISNASELRVKESDRLNAISNGLSKLNIIHEIFEDGLNITGTKEKIDSEEKINSFDDHRIAMSFLIAGIRSKKGISVENCKNMKPHS

SEQ ID NO: 120179 - protein, 94 aa, Unknown
  Bacterial polypetide isolated from the Sargasso Sea
MSYSLNNKKTLRGDLTIPPDKSLSHRAVMFNSIAQGEARISNFLMGEDCLSTISVLRKLGVNIVVDGNNVFTYGKGIQSLTPPKEILDVGNSGT

SEQ ID NO: 120180 - protein, 121 aa, Unknown
  Bacterial polypetide isolated from the Sargasso Sea
MISDVITKGINGVPKIPGDKSISHRSIIIPSISKGICEINNILKSEDVLHTLNALKAMNVNIEESGKKLIIQGKGLNSLKEAKKKIYLGNSGTSARLLTGLLSSQKFKSVLTGDESLSSRP

SEQ ID NO: 120181 - protein, 278 aa, Unknown
  Bacterial polypetide isolated from the Sargasso Sea
MQIEIDIPSAQIKSGLILAALNTEGASYINEKHITRNHTEIMLETFGADIETKKVGNSSEIIINGKKNLTPKNIDVPADLSSSSFFIVAALINKDSNITLENININPTRNGLLIALEKMGAKIKIFNHKTIAGEIVADIHVKSSELSGCELDKEMAKLMIDEFPILSVAASQANSPSYFKGLDELRVKESDRLELINDNLKRCGCYSEIKDNDLFIDPTKNKEIINPEIRTDFDHRIAMSFAVLGSKIGKLHINESDSISTSFPTFKDQFNRAGGNLI

SEQ ID NO: 120182 - protein, 203 aa, Unknown
  Bacterial polypetide isolated from the Sargasso Sea
ANLKGDASLSKRPMGRILTPLKMMGAKIISSNNEKLPITIKGPKEVFPINYSSKISSAQIKSSILLSGLAASGRTIFKEPNESRNHTEKMLSSLGAKIQSKTLEDGSYKVELGGNPVLRGSNINVPCDPSSAAFLVVAAVICPESKIELKNVMINKGRSGLFETLKEMGAKINIFDKKNNGGEETASIIAEYSHLKGITVPSK

SEQ ID NO: 120183 - protein, 309 aa, Unknown
  Bacterial polypetide isolated from the Sargasso Sea
MKRISEPLEKMGASINLSSEFTPPIKIIGNKNLSAISYDMPIASAQVKSAILFAALFSEGKTKVRESLVSRNHTELMFQQFGINLKTINSEITLSGLEEFEGKDINVPGDFSSAAFMIVGALITPDSSVSIKDVGLNSTRIAFLKVLNSMEADIKIENIRKFGSEEVGDLRVSSSQLKPCKVEASLIPNLIDELPILFIASLFATGDSEFFGIEELRHKESDRLLAMQSGLKNIEIETIYNSGKLTIEGKGSDYLIDSGTVDSFEDHRIAMAFIIAGLRSKKNLVVKNTDCIKTSFPEFSIYLILWEQK

SEQ ID NO: 120184 - protein, 286 aa, Unknown
  Bacterial polypetide isolated from the Sargasso Sea
DKSISHRAVIFNSMSNSTKNSIRNFLPGEDCYSTINIMRQLGVDISIENDKNNNPVIIVNGVGLDGFHEPTSILNCGNSGTTTRLISGALAGRDFISILSGDHSLNSRPMGRIIQPLSEMGAKIFGRENNSFAPLVFAGGSLNSINYKMPVASAQIKSCIIIAALRANGITKISQTALSRDHSERMLLAMGAKVTQDKLDIYVEPSEIHSIDVDVPGDISSAAFWMIAGICHPDSELLLKNVGVNRTRSGIITILKKMNAKIEILNKKDVAGEPVADIYVRTSDLI

SEQ ID NO: 120185 - protein, 123 aa, Unknown
  Bacterial polypetide isolated from the Sargasso Sea
MNNIRTIKGGVNLKGKVKVPGDKSISHRALIIGSIAKGETTIEGFLHSEDPLSTADCLRKLGVNIPEIKKNEPFTISGLGLDGFKEPKEILNCGNSGTTMRLLMGLLAGQEGKNFILTGDISL

SEQ ID NO: 120186 - protein, 173 aa, Unknown
  Bacterial polypetide isolated from the Sargasso Sea
MNNIRTIKGGINLKGKVKVPGDKSISHRALIIGSIAKGETTIEGFLHSEDPLSTADCLRKLGVNIPEIKKNEPFTISGLGLDGLKEPKEILNCGNSGTTMRLLMGLLAGQEGKNFILTGDISLNERPMGRVGKPLSLMGGKIFGREKGNKAPISIDGNKLKGCVIGTPGSERS

SEQ ID NO: 120187 - protein, 305 aa, Unknown
  Bacterial polypetide isolated from the Sargasso Sea
TFYPKNKFMLPLTIQGTSMPLAQKHIENIGSAQVKSAILLAALNTPGITEIEEKKISRNHTENLLAHIKADIKVKKLKKGNTILLRGQKNLQSFNLEIPGDPSSASPFIVLALITAGSKLLIKNVNCNPTRIGFIKILKKMNANIKIINLKKKSGEIVGDILAKSSNLKPINCPKGLVPSAIDEFPLLFIVASILKGITKFSGINELRHKESDRIKSMEIGLKGIGIKTKSTRDSIKIYGNQNAQINKTLKIFPKKDHRIAMAFFCLGQILKGNIEINNFETVNTSFSKFLNIMKNVGAKFEIKK

SEQ ID NO: 120188 - protein, 227 aa, Unknown
  Bacterial polypetide isolated from the Sargasso Sea
FAGFRTQGKTIIRAKKSRNHTELLCKYLRMPIKIKSNKHNDLIEVNRVKKIKSFNYTIPNDISSAAFFMVLTALTKDSILIIKNVNINPTRTGIVEILKKMGVKIFYLNKKLYKGEKVSDIKIISPTKLKPINCSPKLNSKSIDEFLVIFLAAAKAKGISYFKNLQELNQKESPRLEWGNKILKMIGIKTIKSKNSIKIFGNPEIKIKKKIVIRNFLKDHRVFMTST

SEQ ID NO: 120189 - protein, 276 aa, Unknown
  Bacterial polypetide isolated from the Sargasso Sea
MPVGIEYNSGISAQLKSAVIFAGLNSFANTKIIETKKSRDHTENLLKKNIQAIKIKEGKNKLIQIFGKKYLDPLKINIPGDPSSAAFFSALTLLNKSSTLKINNVGLNPTRIGFYQLLKKFGAKISFKDLKRNNNEIYGNIVVRSSKIKPIKASKEFYVKSTDEYPILFVIAGLTKGTSIFKGISDLANKESNRIKEMQKILKQIGIKSVASQNMIKIYGKKFEKRKNFKINVPNLGDHRICMSALILSLITGVKCKIKNFETVFTSSPSFLEIVK

SEQ ID NO: 120190 - protein, 180 aa, Unknown
  Bacterial polypetide isolated from the Sargasso Sea
VGLNESRKGLLDVLLLMGANLEIKNKKKASNEIVGDIYIGSSELRGIDVPDNIIPNIIDEIPILSVAACFAEGQTVIKNAAELRVKESDRLHAISQGLRKLKIKHDIFEDGISIFGTSKLLKCDESIDSYDDHRIAMSFLVSGIRSDNCIKVTNCKNIETSFPNFRHIMNTLGMKINEED

SEQ ID NO: 120191 - protein, 205 aa, Unknown
  Bacterial polypetide isolated from the Sargasso Sea
EVPGDISSAAFLLVAATICPGSDLLLPGVGINPTRSAVLSILRMMGASIETSSERLESNEPVCDLRVRSAALRGIDIPSEFVANAIDEFPVLAVAAATASGVTRLRGASELRVKESDRIAAVVQGLCALGIDAVEYPDGMDITGGSFRSGSVESFGDHRIAMAFAVAGAISDGPVEIREADNIKTSFPNFLSLANSIGMSVTESP

SEQ ID NO: 120192 - protein, 279 aa, Unknown
  Bacterial polypetide isolated from the Sargasso Sea
IPSAQVKSAILLAGLNVRGKTTVIENEPTRDHTEKMLKFLGAKIQIEKKGSSNNISVNGFPKINPGIVSVPGDISSASFPIALACMIPNSKLIIKGVGLNPLRDGFIETIIEMGANIKIQNKNTEAGEIVADLHVSYSPNLVGVEVPEDRSARMIDEYPILSILAATAKGPTIMKGIEELRFKESDRIEAIADGLERNGVSITKKKDQLTVFGNGNQKIKGGSIINASNDHRIAMSFASLGSITENSIEIRGASSIKTSFPNFIDLMNSIGLNIIALKD

SEQ ID NO: 120193 - protein, 288 aa, Unknown
  Bacterial polypetide isolated from the Sargasso Sea
MKRIIDPLSLMGAEIISNDNKAPLTFKPSNLNGINYEMNISSAQVKSCIMLAGLNSHSETVIKQPSLSRDHTERMLEGMGANIKTSKLDIIIEPSKLNSVDLTIPGDVSSASFWMVAALIHPNSNITLKNVGMNPLRTGVIDILKKMGGKIIIEDERIEANEPVANIKVMSSDLNGVEISGEIIPKLIDEIPIIIIAASIANGTTYIKNAEELRYKETDRLLAMSKFLEKSKIEHTLYDDGIKIFGNGQFIGGEFDTYDDHRIAMSVAISSIIAKNKTVINDHEVASI

SEQ ID NO: 120194 - protein, 206 aa, Unknown
  Bacterial polypetide isolated from the Sargasso Sea
LNCDMEIEGFLDAYDPNSTLSALNKIGASIKKNNNNVALTKRSNAFIDASEELDLGNSGTGVRLMLGLVSGLGINANFIGDSSLSKRPMSRVIDPLREMGASIDSNNGKLPINVIKSNIINSYSYKLPIASAQVKSCLLLAAIASKNDINLIEPKITRNHTERMIEYFGGVINYGDPSKIGNIELNYCELQPKSNYQIVGDFSSAS

SEQ ID NO: 120195 - protein, 97 aa, Unknown
  Bacterial polypetide isolated from the Sargasso Sea
MKSISSKKLKGNILIPGDKSISHRLVILSSIAIGKSNIKGILKSDDIMKTIDAMKNFGASIEFSNPYNCLIKGVGLGGLAEPKSALDFGNSGTAVRL

SEQ ID NO: 120196 - protein, 64 aa, Unknown
  Bacterial polypetide isolated from the Sargasso Sea
MIKGTIEFPGDKSISHRALMIASILSGRSQIKNLSNGQDVLSTKKCLEQCGISINDSKNSYQVR

SEQ ID NO: 120197 - protein, 129 aa, Unknown
  Bacterial polypetide isolated from the Sargasso Sea
MITVNRSKALSGHILIPGDKSISHRAIIFGSLCVGKTTIRGLLESEDVQRTIEAVRQLGAKVDKKNDKWEVLGFGVGGFSSPENVIDCGNSGTTCRLLMGAISTTPISAIFVGDKSLSQRPMDRIIDPL

SEQ ID NO: 120198 - protein, 198 aa, Unknown
  Bacterial polypetide isolated from the Sargasso Sea
MDYLVKPAESIKGEIKVPGDKSITHRAMMLASIASGQSRLTGALEGEDCLATKKVFEHLGVNFIKEDDDLIVEGVGIKGLREPERELDFGNSGTGIRLSSGILVAQNFATELIGDSSLSERPMSRIVEPLSLMGANISSNQGILPLNILPTSSLRGITFSLPVASAQVKSALLLAGLYAEGYTEVKEDKITRNHTETI

SEQ ID NO: 120199 - protein, 225 aa, Unknown
  Bacterial polypetide isolated from the Sargasso Sea
MNLISHQINSLSGEVICPGDKSISQRILIIGFLLNSRMEVKGFLDAKDPNSTLIALNGIGASIKKDNGLIYLSKRDDYLKSPSKDLNLGNSGTGMRLILGLISGLGINATLVGDQSLSNRPMSRVIDPLRAMGVEIESNDGNAPIKILGGDICNNFEYEMPIASAQLKSCLMIAALASNNAISIKEPKTSRDHTERMIEYFKGDIKYGDNENKGLIKLNNKDLIS

SEQ ID NO: 120200 - protein, 360 aa, Unknown
  Bacterial polypetide isolated from the Sargasso Sea
YFKSPSKDLNLGNSGTGMRLILGLISGLGINATLVGDQSLTNRPMSRVIDPLKAMGVAIESNDGMAPIKILGGNICNNFEYEMPIASAQVKSCLMLAALASNKTISIREPKTTRDHTERMIEYFKGDIKYGNEENKGLIKLHNKNLISRESYDIVGDFSSASFIIVAALISPESEVIIKNVGLNPTRNGLLKVLALMGADIEIKNVKNICNEESGDVLVRSSNLNGVDIPEDIIPNIIDEIPILSIAAAFAEGTTNIKNAKELRVKESDRINAMAEGLKKLNINHEVFDDGLSITGTNGFVDINEEINSFDDHRIAMSFLISGIRSKNGVRVKNCKNIETSFPHFKDIMNSLGMKVNEKD

SEQ ID NO: 120201 - protein, 434 aa, Unknown
  Bacterial polypetide isolated from the Sargasso Sea
MGLGLIGGSIARSLRHRFPTINLIAHDVSDTNIEIALRDKTIDACDTLENVAKGVDILILALPPLNNIEIIDKLPELVNADTVITDVSSVKSAINIALNSTPTSFRRNFVLGHPLAGSEQSGYSASSSTLFYERNVILTPNENTSTRAVGAIHRLWHSIGANVIGMSVCEHDEMLAATSHLPHLLSYTLVNVLIKKNKGNDIFRYAAGGFADFSRLASSDPALWAEIFLTNASEIEAILDAYIKQLTNYKDLLLEKNKDSLAIEFAKAKTARKYFMEKHFNSQSSLENMPVTKNYVVNPSNRIKGSLRVPGDKSISHRAIILGSVAEGITTVRDFLEGEDTLNTLAAFREMGVTILGPSRGKVIIYGVGLRGLQKPRKPLNMGNSGTAMRLMAGILSAQSFNSILIGDESLSNRPMKRISEPLAKFGAKVESKK

SEQ ID NO: 120202 - protein, 298 aa, Unknown
  Bacterial polypetide isolated from the Sargasso Sea
MLGVEAEAGSAGECPPVTIRSTGVTSAEACIQSTTSSQFASGLALVAPCMPEGLSLELTGTLVSTPYLDMTRKIIESFGGKCELRNDRQWHIAPTGYVSKNYEIEPDASAASYFAAAAAITHGTVTLEGLGRNSMQGDIEFCSALEQMGCTVTWSSNSSSCPSITIQGNDLKGIDIDMNAISDTVMTLAAVALFAEGPTVIRNVAHIRDKETDRISDLTCELQRLGAIVDEQPDGLTIHPAHLRPAKIQTYDDHRMAMSLSLVGLRSKGVCITNPACVRKTFPNYWSALEELVQTSRQ

SEQ ID NO: 120203 - protein, 278 aa, Unknown
  Bacterial polypetide isolated from the Sargasso Sea
MSSLKTISGEVTILGDKSISHRCIILGSLAEGESSFENILISGDTAATIEIFRSLGVNIDLIDENIIKIHGVGLNGLDEPKHDLDAKSSGTTARLLIGLLSRQNFSSRMVGSNQLMKRPMARVIDLFTDNGAKIDSDKGNLPITFTPSSYTFNNLDTKVPSAQVKSAVILSSLYNNEPTIINEETLTRDHTERMLLEMGIELVRLGNTITIPPVSKLNPLNMNVPSDISSAAFLISLGVLKGENLLLKNVLINERRLGFIKVLKRMNANIEILNIKEI

SEQ ID NO: 120204 - protein, 389 aa, Unknown
  Bacterial polypetide isolated from the Sargasso Sea
IRSLIPSFNKVLNVPGDKSLSIRWVLLASQAIGKSKAYNLLESDDVTNAIISMKKLGVEILKRKGYYEINGVGLSGFRHKNNISLDAGNSGTFARLLCGTLAGNVMNVKVTGDSSLSKRDFSRVVKPLELFGVNIKTNKNKLPITIKGSKFLRPIFYKEEKGSAQVKSAILLASLNTPGQTIVKSKLSRNHTELMFKNCLKIPLKLKKYKNYEIIKVNGKKNYKGFNYNIPGDISSAAFFIALTILANKSRLKMKNVNYNKSRIGIIEILKKMRAKIRITNIKNYKGEKVADISVTSSNNLIGINCPKSLNTRSIDEFLIIFLVCAKAKGISKFIGINELRQKESDRLKMAAKFLKSIGIKVDEKFDSLKIYGNPNLKIKKKVVIKNFL

SEQ ID NO: 120205 - protein, 260 aa, Unknown
  Bacterial polypetide isolated from the Sargasso Sea
LDSDDVRYMIKALEQLGIKMEENRENNEICVEGCTGKIPNSDLELMLGNAGTAMRPLTAALTLGQGRYVLDGVPRMRERPIVDLVDGLRQLGAEVRVLDGATGPPVEIMASGLPGGTAEIKGSVSSQFLSAILMAAPSAQNDVTLKIMDSLVSVPYVELTLHLMERFGVKVENRNFKEFHIRGNQTYRSPGEFYVEGDASSASYLLAGAAITGGSISVQGCGTESLQGDVKFAEVLELMGAETNMGAKFSHRPRKIFERS

SEQ ID NO: 120206 - protein, 125 aa, Unknown
  Bacterial polypetide isolated from the Sargasso Sea
MKGVDLDLNRMPDAAMTLAVAALFAEGPTRIRNVYNWRLKETERMKAVTTELRKLGATVEEGEDYLVIDPPQKILPCEIETYDDHRMAMAFSLAACGAETITILDPGCVSKTFPDYFKVLESVSE

SEQ ID NO: 120207 - protein, 328 aa, Unknown
  Bacterial polypetide isolated from the Sargasso Sea
GLLSRQNFSSTMVGSNQLMKRPMARVIDLFTDNGAKIDSDNGKLPITFTPSSYIFSSLDTKVPSAQVKSAAIISSLYNNEPTIINEETLTRDHTERMLLEMGIELVRLGNTVTIPPVSKLNPLNMKVPSDISSAAFLISLGVLKGENLLLKNVLINERRLGFVKVLKRMNANIEILNIKEISNELVGDIKVSKSDLVATTIEPKEISDIIDEIPILTFIASQAEGKTILKGANELRIKESDRLENMKNFIQGLKGDITMYEDGFAINGVQDLDEGNVITEDDHRVAMTAIIANIALGKKILPDNTDCIKDSYPTFFLDIESIGGMINE

SEQ ID NO: 120208 - protein, 329 aa, Unknown
  Bacterial polypetide isolated from the Sargasso Sea
TIFIGDKSLSLRPMDRVLKPLVNFGSNYSLRKDNYLPAILKGSDNPIPFSFELDEPSAQIKSAVLLGALNTPGVTTVKDKFNTRDHTERLLGLYGANINITKKRNIKKISIRGVNELKGLDLSVPGDPSSALFPIIAALICKNSDIMVKNVLINPTRDGAFKVLKDMGADISFLNNRIMAAEEVYDIRVRSSNLKGIDIPGRLAPTMIDDYPILAVAASMAKGKTYFKGINELRFKESDRFVGILNLLEKNGVRVESKKDTIIIHGKCELKKGGIKIETNLDHRMAMSALIMGLVSKNGVKIDNSETIKTSFPSFYNVMIKIGAKLSKK

SEQ ID NO: 120209 - protein, 300 aa, Unknown
  Bacterial polypetide isolated from the Sargasso Sea
LFTDNGAKIDSDNEKLPITFTPSSYIFSNLDTKVPSAQVKSAAILSSLYNNEPTIINEETLTRDHTERMLLEMGIELVRLGNTITIPPVSKLNPLNMKVPSDISSAAFLISLGVLKGDNLLLKNVLINERRLGFVKVLKRMNANIEILNIKETSNELVGDIKVSKSDLVATTIETKEISDIIDEIPILIFIASQAEGKTILKGANELRIKESDRLENMKNFIQGLKGEITMYEDGFAINGVQDLDEGNVITEDDHRVAMTAIIANIALGKKILPDNTDCIKDSYPTFFLDLESIGGVINE

SEQ ID NO: 120210 - protein, 168 aa, Unknown
  Bacterial polypetide isolated from the Sargasso Sea
MPKIPGDKSISHRSIIIPSISNGICEINNILKSDDVLHTLNALKSMGVDIEENKNKIIIQGKGLNSLNKANGEIYLGNSGTSARLLTGLLSSQKFKSVLTGDKSLSSRPMKRIADPLTQMNAKIYTTKGSLPLTIEGSNLKAVNFDLKIPSAQIKSGLLLAALNTKGQ

SEQ ID NO: 120211 - protein, 437 aa, Unknown
  Bacterial polypetide isolated from the Sargasso Sea
MNLTSFKTESLHGEVDCPGDKSVSQRIVIIGSLINCDMHVNGFLNAQDPISTVNALNSIGSSISINKNKVTLKKREVMFSDPQQELNLGNSGTGARLLLGLISGLGLRLTMKGDSSLEKRPMSRVIKPLEMMGAKLSSDSGTLPIRTLGSKIINNFEYKMPIASAQVKSCLLLAALSSQKNIKITEPKITRDHTERMIEFFGGEILYENNRNSKTIQLNYSELESKNSFDVPGDFSSAAFIIVATIISKGSEVVIKNVGLNESRKGLLDVLLLMGANLEIKNKKKASNEIVGDIYISSSELRGIDVPDNIIPNIIDEIPILSVAACFAEGQTVIKNAAELRVKESDRLHAISQGLIKLKIKHDIFEDGISISGASKELKCDESIDSFDDHRIAMSFLIAGIRSDNFIRVMNCKNIETSFPNFKRIMNKIGMKINEED

SEQ ID NO: 120212 - protein, 293 aa, Unknown
  Bacterial polypetide isolated from the Sargasso Sea
QRSSNSINYELPIASAQVKSCILFASLYSEGKTTVRERQTTRNHTEIMFKQFGVPLSIRDTVDGRNIEMYSPSKLKSAEIDIPGDFSSAAFFILAALIIPNSNLTIKNVGMNETRIALLNAFQEMGAEIDIFNKTGEFEPRADLKVKFSKLKGINLDTKLVPNLIDELPAFFVAAAMSSGSTAVRDAEELRNKESDRLEAMGEVLRSLGVDFKMYQDGIDINGLDENNTLSPYKGGIIESFGDHRIAMSSAIACSFFDQESLILNTDNVNTSFPAFLKIADQVGLDISLEEHS

SEQ ID NO: 120213 - protein, 399 aa, Unknown
  Bacterial polypetide isolated from the Sargasso Sea
MSHRAIMLASLAEGKSDISGFLEGEDCLATIEVFKKMGVNISRREGIFIVEGRGLRGLKDPSDPLDFGNSGTSVRLCSGVLAAQKFSSTLVGDSSLSSRPMTRITEPLGLMGANASSTEKGTLPIKIEPVDSLNSIQYSLPVPSAQVKSCLLFAGLYSEGITEIEEKVTTRDHTERMFKQFGIPIDVSQSKGSKLIKLNKVEGINPTNIEICGDFSSASFFILAALITPNSELLLKNVGVNPTRIGFLHALKHMGANIELQKEIDSFEPTADILVRTSSLKGVTLNKNIVANMIDEMPAFFVAASLAEGTTKVKDAKELRTKESDRLQVMSEALDSFGVKFRLEDDGITINGLGKTGTFKTAEIDSHGDHRIAMACSMGSLRSDGETSVLDCFNVNTSF

SEQ ID NO: 120214 - protein, 101 aa, Unknown
  Bacterial polypetide isolated from the Sargasso Sea
MDFYTEPSENLSGEIEIPGDKSISHRAVIFGSLASGVSEFTNFLSGEDCLATLNAFREMGVYTNLSDDKLIIHGVGINGLNEASKSLYLGNSGTSARLLVG

SEQ ID NO: 120215 - protein, 276 aa, Unknown
  Bacterial polypetide isolated from the Sargasso Sea
SRIKGIDYKNTMSSAQVKSAVLFCGLGTSDTTSYYEPVKSRNHTEIMLKNVGVEIEHNNGKIILKNSNSMIKGLDITIPGDPSTASFFAAAALILPKSELILKNILANPTRFGFFDAINRMGANIEFLSSWMESGEKVKNIKIKNGPLNPIKIDHQHIPSIIDEIPIISIVASQADGKTEIRGAKELRVKESDRIQAIVCNLRNMGVPIEEYNDGFSIFGPVKLKGSKIKTFNDHRIAMAFSIAGLIADGVTVLDNKKCVDISFPNFFNMLQSKIK

SEQ ID NO: 120216 - protein, 31 aa, Unknown
  Bacterial polypetide isolated from the Sargasso Sea
MSSSNNLIVNKSKPFLGKVIIPGDKSISHRS

SEQ ID NO: 120217 - protein, 281 aa, Unknown
  Bacterial polypetide isolated from the Sargasso Sea
SYKLPIASAQVKSCLLLAAIASKININLIEPKITRNHTEKMIEYFGGVIDYGDASKVGNIELRNHELQPKSNYQIVGDFSSASFIIVASLISNDSEVLIKNVGLNETRSGLLKVLQMMGAEIQIIQSKEVCNEIVGDILVKSSNLEGIEVPDSIIPNIIDEIPILSIAAIFAKGKTIIKNASELKVKESDRLSAISNGLDKLNIRHELFNDGLSIYGNYNELDTTEVIDSYGDHRIAMSFLIAGARTKNGLMVKNCGNIKTSFPSFKDIMNSIGMKIDEKN

SEQ ID NO: 120218 - protein, 159 aa, Unknown
  Bacterial polypetide isolated from the Sargasso Sea
MISNKIDKGLIGSPKIPGDKSISHRSVIIPSIANGITEVKNILKSEDVIHTINAFKNMGVEISENRENIIINGKGLNSLKGPKSEIYLGNSGTSARLLTGLLSSQKFNSLITGDQSLSSRPMMRIVNPLSKMDAKIETTNGCLPIKINGQDLKSTDIEI

SEQ ID NO: 120219 - protein, 408 aa, Unknown
  Bacterial polypetide isolated from the Sargasso Sea
MNVRLKKTKSKLFGEICISGSKSESNRLLLLNAVYNNIKIENFSNSDDSSQMMLALRSKNKIININHAGTAMRFLTSYYAFKNKSNIILTGSKRMEERPISILVDSLLKIGASIKYMKKNGYPPLKIIGKNPTKNTVNLSSNVSSQYISSLMLIAPKLRGGLEIDLTGNLTSLPYIEMTKSILEKIGVKVDFLKNKIKVYPKENIDDVTIKVESDWSSASYFYSLVALSDRANFILTSFKKKSFQGDSCLTEIYKKLGVNTSFKGDKLLISKQENFKKPNSIKLNLVNSPDIAQTIAVTCLGLGIKCDIDGLHTLKVKETDRLIALKKEITKLGAKISITDRSLSILPTESINQNINILTYDDHRMAMSFAPLAICADINILNAEVVNKSYPNFWNDIKSVGIEYFIE

SEQ ID NO: 120220 - protein, 200 aa, Unknown
  Bacterial polypetide isolated from the Sargasso Sea
MNALIKKGSSFKSSIVLPLDKSIAQRAAILNLETNDGIVGGDVISTRLASKNAIANGEENLYLGNSGTGIRLLTGYLSGLGRKFNLSGDISLSKRPMDRIADPLNELGAKVSLNNGKPPINILPSNLKKEFSYRLPIPSAQLKSSLLLAALNGKTKIEIIEPELSRDHTEKMLKYLECDIKIEYKDSLRRIYFDGEVPIK

SEQ ID NO: 120221 - protein, 393 aa, Unknown
  Bacterial polypetide isolated from the Sargasso Sea
DHYLIVICMLMGFLNAQDPISTVNALNSIGSSISVNENKVTLKKREVMFKDPEQDLNLGNSGTGARLLLGLISGLGLRLTMTGDSSLEKRPMSRVIKPLEMMGAKLSSDSGTLPITTLGSKIINNFEYKMPIASAQVKSCLLLAALSSQKNIKITEPKITRDHTERMIEFFGGEILYENNQNSKTIQLNYSELETKNSFDVPGDFSSAAFIIVATIISKDSEVVIKNVGLNESRKGLLDVLLLMGANLEIKNKKKASNEIVADIYISSSELRGIDVPDNIIPNIIDEIPILSVAACFAEGQTVIKNAAELRVKESDRLHAISQGLLKLKIKHDIFEDGISISGTSKELKCDESIDSFDDHRIAMSFLIAGIRSDNFIRVTNCKNIETSFPNSK

SEQ ID NO: 120222 - protein, 120 aa, Unknown
  Bacterial polypetide isolated from the Sargasso Sea
MEQLTLDPIAKVSGEVNVPGSKSLSNRALLLAALAEGETELTNLLDSEDIEHMLNALTKLGINYRLSEDKTQCVVQGNGGAFNVAEPLELFLGNAGTAMRPLCAALAASNVDTVLTGEPR

SEQ ID NO: 120223 - protein, 360 aa, Unknown
  Bacterial polypetide isolated from the Sargasso Sea
GFNLKKNTVINAGNSGTLARLILGLLVKSKFQVKLIGDNSLSKRDFSRVIKPLKLFGVNIASKNNLMPIKILGTNFLRPIEYSENIGSAQVKSCLILSALNTPGITTINSRKSRNHTELMLKFLKYPIKIIRKKTFEKISIQGLKQFKAFDYNVPGDISSAAFFIVLTLLSKNSSLIIKNVNVNPSRKGIITILNKMGAKIELKNKKSYNGEAIANIYVKGKKNFKSINCPANLNSSAIDEFLIIFLVAAKANGISRFKELSEMNKKESKRLDLGIRFLKLIGVKVERYGDNINIYGNPSLELSKNFEMKNFLKDHRIFFLSCITALTLGGKWKIQDKDSINTSFPNFLKTLKSLGAKIS

SEQ ID NO: 120224 - protein, 221 aa, Unknown
  Bacterial polypetide isolated from the Sargasso Sea
MILTSNPVQEIFGDVKCPGDKSISQRILIIGSLLNCDINVSGFLNANDPLSTMAALNQIGASINKDGDLVKIKKRSRPFNSPESSIYLGNSGTGIRLMTGLISGLNLKATLIGDESLSQRPMLRVVNPLVKMGKKISTNDGKTPIKIKGGSINDNFEYQMPIASAQVKSSLILASLSSGNSIRIEEPKVTRDHTEKMIEYCGGKIDVQNSSEGKIISLNKS

SEQ ID NO: 120225 - protein, 104 aa, Unknown
  Bacterial polypetide isolated from the Sargasso Sea
MRFQGTLQLPGDKSISHRAIMLSAIADGESCVKNLNDGADLQSTINILKDCGALIEQRNEKIIINGRKLHSPKTELDCGNSGTTTRLIAGLLSSQKIIFTLIWR

SEQ ID NO: 120226 - protein, 334 aa, Unknown
  Bacterial polypetide isolated from the Sargasso Sea
AQEFSSTLIGDSSLSSRPMRRIIDPLSLMGADIAGSEDGTLPLEIQPSDSLKPITYSLPVASAQVKSCLMFASLYAQGVTELEEKVITRDHTERMFKQFNIPVEINRLKDSNLIKVENVEYIAPQDINICGDFSSASFFILAGLITPDSEILIRNIGINPSRIGFLHALRHMGANIELQKTGGSVEPTANIIARTSELKGITLNTNLVANMIDEMPAFFIAASLADGVTKVTDAKELRTKESDRLQVMSEALNSFGVKFRLQKDGILINGLGKEGTFKGAEIDSHGDHRIAMASSIGSLRSDSETIILDCLNVDTSFPNFIEVCKDVGIEIESI

SEQ ID NO: 120227 - protein, 249 aa, Unknown
  Bacterial polypetide isolated from the Sargasso Sea
DHTERMLKGFGANIISEQTSEGNIIKLEGYPELKAQEIRVPRDPSSAAFPVCAALITEGSDILVPNIGLNPTRSGLLDTLKEMNANITFENENFQGGEPMADIRAQFSPEMKGIDVPPERAASMIDEYPILSVVAAFAKGRTMMRDVRELRVKESDRIDAMAKGLKSNGLKIEEGEDWWSVEGREIDGVVGGGFCETFLDHRIAMSFLVMGMASQRAITIDDSSPITTSFPSFENLMAQIGANFQKLKQ

SEQ ID NO: 120228 - protein, 45 aa, Unknown
  Bacterial polypetide isolated from the Sargasso Sea
MFSEQTKIGINGSIKIPGDKSISHRSIIIPSISSGICEISNILKS

SEQ ID NO: 120229 - protein, 283 aa, Unknown
  Bacterial polypetide isolated from the Sargasso Sea
PGAITADAPIRVRGDVSSQFLTSLLMTLPLLRTESGVTVVQVDGELISKPYIEITIKLMERFGIKVERHEWHRFVVPAGQRYQSPGTIMVEGDASSASYFLAAGALGGGPLRVEGVGRSSIQGDVGFADALIKMGANLQMGDDWIEVRGVGNDNGKLDPIDMDFNLIPDAAMTIAVAALFADGTTTLRNIASWRVKETDRIAAMATELRKVGAKVQEGEDFLVVTPPEKLIPNASIDTYDDHRMAMCFSLVSLGGVPIRINDPKCVGKTFPDYFERFTALAQP

SEQ ID NO: 120230 - protein, 333 aa, Unknown
  Bacterial polypetide isolated from the Sargasso Sea
MKSISSKKLKGNILIPGDKSISHRLVILSSIAIGHSNIKGILKSDDIMKTIGVMKKFGASIEFTKPLNCSIKGVGLGGLLEPESALDFGNSGTSARLIMGLSASHPITTIFVGDKSLSIRPMDRVLKPLVNFGSNYSLRKDNYLPAILKGSDNPIPFSFELDEPSAQIKSAVLLGALNTPGVTTVKDKFNTRDHTERLLGLYGANINITKKRNVKTISIKGVNELKGVDLSVPGDPSSALFPIIAALICKNSDITVKNVLINPTRDGAFKVLKDMGADISFLNNRIMAAEEVYDIRVKSSNLKGINIPRILAPTMIDDYPILAVAASMAEGKT

SEQ ID NO: 120231 - protein, 295 aa, Unknown
  Bacterial polypetide isolated from the Sargasso Sea
IFGREKGNKAPISIDGNKLKGCVIGTPVASAQVKSAILLAGLKASGTTSVIEPASSRDHTERMLKAFGADISIRGELGRNVVIKSGGNLIGQRILIPGDISSASFWMIAASIVPNSEILIQNVGLNPTRTGILNVMDSMGCDYEILDKSTIAGEPIGSIKVKTADNLRSFTIEGDILPKLIDEIPILTVAACFCDGVSEIKDAQELRVKETDRLKVMARQLNKFGAEIIEKEDGLIINGQSKFHSADVDSETDHRVAMSLAIASLLAKGTSKIKRADAASVSYPTFWEELAKLTN

SEQ ID NO: 120232 - protein, 303 aa, Unknown
  Bacterial polypetide isolated from the Sargasso Sea
MPGDKSISHRTVMLAALSDQRSKVNNLSNGKDVKSTISCLKNCGIDIEYSTGSYFVNGGRFKQPITDLDCGNSGTTMRLLIGLLAGQGIDANFIGDKSLSNRPMERIIDPLKKMGLNIKSNKTMPPIHISKSKLKGIDYVMPIASAQLKSSILLAALGAKSNTTIKENIVSRDHTEIMLKNIGVNLYRKSGSIFVEPCNKFLPQNISVPADPSTAAFFIGAAVLSPRSKLLITNLLLNETRIGFLRALEKMGCSFNYRNIRNVSGEKIGDLEMRYHKLFGIEINKSDIPSIIDEIPILALIAS

SEQ ID NO: 120233 - protein, 293 aa, Unknown
  Bacterial polypetide isolated from the Sargasso Sea
DKPIYLGNSGTSARLLTGLLSSQKFDTILEGDKSLSKRPMKRITDPLCIMGGKFENQSGTLPIKILGNELKNIQHKILIPSAQIKSGLILAALNTTGKTQIIEENITRNHTEIMLKAFGAKITTKERMSGSNISILGKNELTSKNISVPSDLSSAAFFIVAALINENSKLTLENININPTRDGILRALQKMGAKINIKNERFVNEEKIADLNISHSKLKGCELDGSIAKLMIDEFPILAVAASFAETPSKFYGLKELRVKESDRLELIRHNLENCGIYCEIEGENLFINPGKN

SEQ ID NO: 120234 - protein, 276 aa, Unknown
  Bacterial polypetide isolated from the Sargasso Sea
MSRESINLLASSSKKINGCIRVPGDKSISHRAIIISSIAEGKTQINQYLDSADTNATIDVCRQINAEIVKNNESLIITGNNLERIQKDNIELNFGNSGTSMRLMMGVLSAQIFSSILSGDESLSQRPMSRVSKPLTNMNADIKTSNGTPPIFITPVDDIKNVDHKIHIASAQIKSAIMLAGLYGRDPFTIITPKSRDHTEIMLNQFGCDITIESDYINVIPSKLTSPETIDVPGDISSAAFFIVGSILSRDSQVKIENVGLNPLRTGFIDILKMMG

SEQ ID NO: 120235 - protein, 270 aa, Unknown
  Bacterial polypetide isolated from the Sargasso Sea
VAIASAQIKSSIMLAGLYGNKSFRITTPKSRDHTEIMLSEFGCNISIDSDSIEMEPGKLITPNIINVPGDISSAAFFIVGSIISKNSKINIENVGLNPLRTGLIEILKMMGANIHITNIKTINGELVGNIYTESSRLNGIEIPKDLIASSIDELPLIALAASRANGKTSIRNAEELRVKESDRISSMTKMMEAFSISTDEFPDGMNVYGGSIKGARVNSFGDHRIAMTALMASLVSEGDILVENCKNIDTSFPTFIEIANNIGMDIKKND

SEQ ID NO: 120236 - protein, 325 aa, Unknown
  Bacterial polypetide isolated from the Sargasso Sea
MNNIRTIKGGVNLNGKVKVPGDKSISHRALIIGSIAKGDTNIEGFLHSEDPLSTADCLRKLGVNIPEIKQNEPFTISGLGLDGFKEPKEILNCGNSGTTMRLLMGLLAGQEGKNFILTGDISLNERPMGRVGKPLSLMGGKIFGREKGNKAPISIDGNKLKGCVIGTPVASAQVKSAILLAGLKASGTTSVIEPASSRDHTERMLKAFGADISIRGELGRNVVIKSGGNLIGQRILIPGDISSASFWMIAASIVPNSEVLIQNVGLNPTRTGVLNVMDSMGCDYEILDETTIAGEPIGSIKVKTSKNLRSFTIEGDILPKLIDEI

SEQ ID NO: 120237 - protein, 223 aa, Unknown
  Bacterial polypetide isolated from the Sargasso Sea
MLISSKIYNGINGEIEIPGDKSISHRSIIIPSISNGVSEVSNILKSEDVLHTMSAFRQMGVKIEEVKDKIIIYGKGLNSLNKPSKKIYLGNSGTSARLLIGLLSSQNFISNLTGDISLSSRPMGRIMDPLNLMGAKIDSADKKLPIRIYGQKLKPINYTVPVPSAQVKSGLILAALNTEGVSKFIEKDITRDHTEIMLESFGADIDIKEDNKYKHISIIEKKS

SEQ ID NO: 120238 - protein, 293 aa, Unknown
  Bacterial polypetide isolated from the Sargasso Sea
TILNKNNLVVEGRGLNSLKKPISKIDLGNSGTSARLLTGLLSSQKFESIIYGDESLSKRPMDRIIDPLELMGAKFISNEKKLPINIIGKKLRNIEYELNLPSAQVKSGIMLAALNTDGKTKIIEKEITRNHTEIMLTAFGADISINKFDNENHIYLNGGKELVSKKIHVPSDLSSAAFFIVGALINKNSEINMQNINLNPTRTGILQALNLMGAKINIKNKKTLNDEEVGDLEIKDSNLNGCELNGDIARLMIDEYPILSIAASFANSPSVFRGLGELKHKESDRLELIRYNL

SEQ ID NO: 120239 - protein, 237 aa, Unknown
  Bacterial polypetide isolated from the Sargasso Sea
MNNIRTIKGGVNLKGKIKVPGDKSISHRALIIGSIARGETTIEGFLHSEDPLSTADCLRKLGVNIPEIKKNEPFTISGLGLNGFKEPKEILNCGNSGTTMRLLMGLLAGQEGKNFILTGDISLNERPMGRVGKPLSLMGGKIFGREKGNKAPISIYGNKLKGCVVGTPVASAQVKSAILLAGLKASGTTSVIEPASSRDHTERMLKAFGADISIRGELGRNVVIKSGGNLIGQRILI

SEQ ID NO: 120240 - protein, 228 aa, Unknown
  Bacterial polypetide isolated from the Sargasso Sea
MIKGTIEFPGDKSISHRALMIASISSETSQIKNLSNGQDVLSTKKCLEQCGISINGSKNSYQVRGGKFADPVKDLDCQNSGTTVRLLTGLLAGKNINARLIGDESLSKRPMERIVKPLSKMGLQIKSNDGKLPISIKNSRINGIDYKNTMSSAQVKSAVLLCGLGTTDTTSYYEPIKSRDHTEIMLKNIGVDIEHNNGKIILRNSNSLIRGLDITIPGDPSTASFFAA

SEQ ID NO: 120241 - protein, 184 aa, Unknown
  Bacterial polypetide isolated from the Sargasso Sea
MISNSIAEGKGINGTPVVPGDKSISHRSIIIPSISNGVCEINNILKSDDVMHTLNAFKDMGVKIIESENKLIIFGNGLNSLKKSKNSIYLGNSGTSARLLTGLLSSQKFNSVLTGDDSLSKRPMRRISNPLSKMNAKIYTNNGSLPLTIEGADLIPCDIELEIPSAQIKSGLLVASLNTKGETN

SEQ ID NO: 120242 - protein, 240 aa, Unknown
  Bacterial polypetide isolated from the Sargasso Sea
MKSNKINSSFNGLINIPGDKSISHRSIIIPSIANGISEVNNILMSDDVMHTLNAFRELGVKIVLEGKKVIIHGKGLNSLNEAKKNIYLGNSGTSARLLTGLFASQNFNTLIEGDKSLSSRPMKRIIEPLKLMGAVFENTSGKLPLKIIGTKLKNTNIKIDIPSAQIKSGILLAALKTDGITSVIEKNITRDHTENMLKLFGADIKIEKNSSENCISINGNIELISNNIDVPSDLSSSAFF

SEQ ID NO: 120243 - protein, 254 aa, Unknown
  Bacterial polypetide isolated from the Sargasso Sea
IVEKEKSRDHTENMILKNYSVIKVKNNNEKIITIKGKENLKPLNLKVPGDPSSAAFFVGLTLLKKNSFIKIKNVGLNPTRTGFYQLLQEQKAHIKFLNLKKINNEIKGDIVVKNSKIKPIKAAKKYYVNATDEYPILFVIAALTKGISVFKGISDLANKESNRITEMQKILKQIGIKSIASKNELKIFGKGIFDASNKRINVPNLGDHRICMATFILAILTGAKTKIKNFETVFTSSPSFLKTMKFLGVKFEIQ

SEQ ID NO: 120244 - protein, 218 aa, Unknown
  Bacterial polypetide isolated from the Sargasso Sea
EGEGSLSGIDIEVPGDISSAAFFMVAAAISEGSAINLLHVGLNPTRTGIISLLNLMNTKLEITNEKIIGGEPVGDIRVTSSNLEGIAVPSQLVPLAIDEFPIFCIAAACATGTTTIRGAEELRVKESDRIEAMAEGLTALGIKVKTFADGLEIKGGTILGGRVKSHSDHRIAMAFSIAAIKAKDRIFIEDCKNVATSFPGFVDLANSIGMDIKEISDG

SEQ ID NO: 120245 - protein, 194 aa, Unknown
  Bacterial polypetide isolated from the Sargasso Sea
MNNIRTIKGGVNLKGKVKVPGDKSISHRALIIGSIAKGETTIEGFLYSEDPLSTADCLRKLGVNIPKIIKDETFKILGMGLNGLKEPKEILNCGNSGTTMRLLMGLLAAQEGKNFILTGDASLNERPMGRVGKPLSLMGGKISGRDGGNKAPISIDGKKLKGCVIGTPVASAQVKSAILLAGPNASGTTSVIEP

SEQ ID NO: 120246 - protein, 288 aa, Unknown
  Bacterial polypetide isolated from the Sargasso Sea
SSTRVTNLRGHANVPGDKSISHRSLILGALSIGKTKINGLLEGQDVIDTAKAMSSFGALIKKHKNGEWTVDGFGVGGFAEPKKVIDCGNSGTGVRLIMGAMSTSDITATFTGDASLNKRPMARITEPLNLFGAKTFSRRNGKLPITVVGSDSPIPITYQTPIASAQIKSAILFAGLNSPGTTTVIEKEKTRDHTERMFRGFGADIISEQTNEGNIIKLEGYPELKAQEIRVPRDPSSAAFPVCAALITEGSDILVPNIGLNPTRSGLFDTLKEMNANITFENENFQGG

SEQ ID NO: 120247 - protein, 286 aa, Unknown
  Bacterial polypetide isolated from the Sargasso Sea
MEKVSKFKLVKNQIKINKIINPFKKKIYIPGDKSISIRCILLASIATGKSEIFNLLKSEDVLNAVKAVKKIGVNCIKKKNSFEIYGVGINGFHIKKNTTINAGNSGTLARCILGLCSGIDKEIKIIGDKSLSKRDFLRVIKPLNLFGTKVVSKNGMMPLKIVGSDLLRPINYIENKGSAQIKTCIILSAINTNGITNIKAKKSRNHTELILKNLNYPINIKKNKKYDFIKIRGLSQFNSFNYNVPGDISSAAFFIALTILSNNSNLLIKDVNINPSRNLVLLKFKK

SEQ ID NO: 120248 - protein, 296 aa, Unknown
  Bacterial polypetide isolated from the Sargasso Sea
EKSLLPICILGANDPVGIDFTGKVASAQVKSAILIAGLNATGETRYIESVHTRDHTERMLSTFGAEVEISQLTDSKCINIKGLAQLGPQEVSIPGDPSSAAFPMCAALMVNGSEITIPNICQNPTRIGLQETLCEMGADISVENKRIYGGEPVADLSVRFGPLRGVSVPPERAPSMIDEYPILAILASTAEGKTIMKGIKELRVKESDRIKAVSDGLRQNGIEIEETEDSLTVFGKPGSISGGSLVKTYYDHRIAMSFLCLDLVAEEPIRVDSLSSINTSFKEFLSSMKKIGAKFD

SEQ ID NO: 120249 - protein, 200 aa, Unknown
  Bacterial polypetide isolated from the Sargasso Sea
QGNQTYLSPREFYVEGDASSASYFLAGAAITGGSITVQGCGTESLQGDAKFAEVLELMGAETKWQPNSVTVHGKSLKGVDLDMNRMPDAAMTLAVAALFAEGPTRIRNVYNWRLKETERMKAVTTELRKLGASVEEGEDYLVVDPPQKILPCEIETYDDHRMAMAFSLAACGAEPITILDPGCVSKTFPDYFEVLESVSE

SEQ ID NO: 120250 - protein, 98 aa, Unknown
  Bacterial polypetide isolated from the Sargasso Sea
MKILKVNKSSLISRTINIPGDKSISHRAIILLSLASNSSTIRGLLEAEDCLNTIRIMQGLGVKISKQGEEYIIEGVGINGLTKPKEELYCGNSGTAMR

SEQ ID NO: 120251 - protein, 150 aa, Unknown
  Bacterial polypetide isolated from the Sargasso Sea
MSYSLNNKKTLRGDLTIPPDKSLSHRAVMFNSIAQGEARISNFLMGEDCLSTISVLRKLGVNIVVDGNNVFTYGKGIESLTPPKEILDVGNSGTTIRLMSGILAGRNFNCVLDGDSSIRKRPMNRIIKPLNMLGANISAKNNNENAPIEF

SEQ ID NO: 120252 - protein, 210 aa, Unknown
  Bacterial polypetide isolated from the Sargasso Sea
MNNIRTIKGGVNLKGKVKVPGDKSISHRALIIGSIAKGDTTIEGFLHSEDPLSTADCLRKLGVNIPEIKKNEPFTISGLGVDGFREPKEILNCGNSGTTMRLLMGLLAGQEGKNFILTGDISLNERPMGRVGKPLSLMGGRIFGRENGNKAPISIDGNKLKGCVIGTPVASAQVKSAILLAGLKASGTTSVIEPASSRDHTERMLKAFGA

SEQ ID NO: 120253 - protein, 291 aa, Unknown
  Bacterial polypetide isolated from the Sargasso Sea
MISNKIEVGFNGIIQIPGDKSISHRSIIIPSISNGTSEINNLLMSDDVLCTLEAFRKLGVNITISNKKVTIFGKGLNSLSKPSERIYLGNSGTSARLLTGLLASQNFNSILEGDKSLSSRPMKRIINPLKLMGAKFENTNGLLPLNIIGQELKNQKIIIDVPSAQIKSGLILAALNTKGLTTIIEKNITRDHTENMLTSFGADIDIKKNKSESTILIKGKKELISNNIDVPSDLSSCAFFIVAALINKGSKIFMENININPTRDGILKALKQMGAKINIKNRRFLSGEIVA

SEQ ID NO: 120254 - protein, 216 aa, Unknown
  Bacterial polypetide isolated from the Sargasso Sea
LQSPPNALYLGNSGTSMRLLAGLMAGQSFDVEMSGDESLSKRPMGRVADPLALMGAIVDTAEGGRPPLKVKGGSDLKGIHYDLPMASAQVKSCVLLAGLYAEGETSVTEPAPTRDHTERMLRGFGYDVITEGNKVTLRSGGELTATEIDVPSDISSAAFFMVGASIMPGSDITLEHVGINPTRVGVINILRAMGGNIDVLNEREVGGEPVADIRIR

SEQ ID NO: 120255 - protein, 205 aa, Unknown
  Bacterial polypetide isolated from the Sargasso Sea
MNNIRTIKGGINLKGKVKVPGDKSISHRALIIGSIAKGETIIEGFLHSEDPLSTADCLRKLGVNIPEIKKNEPFTISGLGLDGLKEPKEILNCGNSGTTMRLLMGLLAGQEGKNFILTGDVSLNERPMGRVGKPLSLMGGKIFGREKGNKAPISIDGNKLKGCVIGTPVASAQVKSAILLAGLKASGTTSVIEPASSRDHTERML

SEQ ID NO: 120256 - protein, 152 aa, Unknown
  Bacterial polypetide isolated from the Sargasso Sea
MSLSNNLIVNKSRPLIGKIKIPGDKSISHRSIILGSLSEGELVVSNFLNSDDCLSTINAMRELGVEIHLDNDKVKIIGKGLYGLNKPKSIIDVGNSGTLLRLLTGLLSAQKFESSITGDKSIIKRPMARVIKPLVANGARIESDNYMAPNTK

SEQ ID NO: 120257 - protein, 99 aa, Unknown
  Bacterial polypetide isolated from the Sargasso Sea
MTLKPIKKIDGTVRLPGSKSLSNRILLLAALAEGTTKVENLLDSDDIRYMVDALKVLGLSFTEDRANNILEITGCGGKFEKTGKDVTELFLGNAGTAMR

SEQ ID NO: 120258 - protein, 264 aa, Unknown
  Bacterial polypetide isolated from the Sargasso Sea
PLLRMNANIKTSDGTPPVYINPVSSLKCVDHNIEIASAQIKSSIMLAGLYGDNTFKIVTPNSRNHTEIMLKEFGCNISIDSDSIKITPGKLITPNFIEIPGDISSAAFFIVGSIISKNSRVKIENVGLNPLRTGLIKILEMMGANIQISNVRTINGEIIGDIYTESSLLNGIEIPKELISSSIDELPLIVLAASQANGKTSIRNAEELRVKESDRILSMIKMMDKFRISTDEFPDGMNIYGGLIKGARVNSYGDHRIAMTAIMA

SEQ ID NO: 120259 - protein, 182 aa, Unknown
  Bacterial polypetide isolated from the Sargasso Sea
MPFNYHSKIEGTYYPPGDKSISHRALILASHAIGESKISNLLEGEDVINTLKAMRSFGVKINKISDKYIIFGIPPGGLFQPKKTIYFGNSGTSIRLISGLIASNNITVTLTGDKSLSKRPMKRVTEHLSMIGAIIKLRKNTYPPIKIKGSGNAIPLTFNIIIPSAQIKSAIMLSALNTNGTV

SEQ ID NO: 120260 - protein, 194 aa, Unknown
  Bacterial polypetide isolated from the Sargasso Sea
MPLNYKSIIKGTYLPPGDKSISHRILILAGQAIGKSNIYNLLEGEDVINTLKAMKLLGIRIKKNKKKYEIFGVPPGGLFQPDRNIDFGNSGTGIRLLAGLISSNNIEVKLIGDNSLSKRPMKRVTEHLVRIGANIALKKELFPPIKIKGTGKATPLTFEILIPSAQIKSAIMLSALNTNGTVKIKEFKSTRDHT

SEQ ID NO: 120261 - protein, 199 aa, Unknown
  Bacterial polypetide isolated from the Sargasso Sea
MPIRGSIHMPGDKSISHRSVLISSLIPGEHNIKNISTAEDVNYSLKCLNNIGIIHSRENNNIIIHGNTFSNPTEPLFCGNSGTTMRLLIGLLSGLNIGAELFGDESLMKRPMDRVINPLIEMGADISYHEGKSSIIIHKKQFLRDLNYTMSIASAQVKSALLIAGISANKKIVLYEKYPTRNHTEIMLNDIGYDIITKR

SEQ ID NO: 120262 - protein, 307 aa, Unknown
  Bacterial polypetide isolated from the Sargasso Sea
QEPTEILNCGNSGTTMRLMLGLLAGRAGRHFVLDGDASLRRRPMGRVSQPLASMGADVRGRQGGNLAPLAVKGCRLKGTVIGTPVASAQVKSALLLAALTAEGATNVIEPARSRDHSERMLRAFGADLEVDGEMGRHITVRPGATLRGQDVVVPGDISSAAFWLVAGALVPGADLTIENVGLNPTRTGILEVLEQMEARIEVLNRRDVAGEPVGDLRITHGPLKPFHFGDEIMPRLVDEVPILSVAACFCEGESRISGASELRVKETDRLAVMARQLKAMGADIEEHDDGMTIRGGRSLKGAVLTAK

SEQ ID NO: 120263 - protein, 277 aa, Unknown
  Bacterial polypetide isolated from the Sargasso Sea
IKCVDHKIDIASAQIKSSIMLAGLYGNNSFKIKTPKSRDHTEIMLCEFGCNISINSDSIKIKPGTLTTPNAIEVPGDISSAAFFIVGSIISKNSQIKIENVGLNPLRTGLIEILKMMGANIQISDVKKVNGEITGTIYTESSRLNGIEVPKELIASSIDELPLIVLAASQANGKTSIRNAQELRVKESDRISSMIKMMNDFKISTDEFSDGLNIYGGKIKGAKIESYGDHRIAMTALMASLVSDGEILVEDCKNIDTSFPTFIEVANNIGMNIKKND

SEQ ID NO: 120264 - protein, 310 aa, Unknown
  Bacterial polypetide isolated from the Sargasso Sea
MSYSLNNKKTIRGDLTIPPDKSLSHRAVMFNSIAQGEARISNFLMGEDCLSTISVLRKLGVNIVVDGNNVFTYGKGIESLTPPQEILDVGNSGTTIRLMSGILAGRDFKCVLDGDSSIRKRPMNRIIKPLNMMGANISAKNNNENAPIEFNGGNLLDLDYDLPVASAQLKSSLILAGIRSKNGIKIKEKDTSRDHTERLLSNMGADINVDGLKITVKPSLIESRDIIVPGDISSAAFWMVAASIHNDSEIMIRNVGINETRAGIISVLNRMGASLEFSNKMDYSGEPACDILVKSSNLKGTNISGKEIPL

SEQ ID NO: 120265 - protein, 279 aa, Unknown
  Bacterial polypetide isolated from the Sargasso Sea
MLAKNNLSIISKRISSIKGIIIVPGDKSISHRALILSSISIGTTKISGLLESEDVLATLNALKKLGVKITKDKMNNYLVTGVSTFGYISPKNILNLGNSGTGVRLLIGTIAGQNVKAKFTGDKSLSSRPMERITSPLMKIGAQIKFNKQSIKSKTLPLEVIGTNKPLPIQIETDIASAQVKSCLMLACINARGTIEITEPQVSRDHTEIMFRHFGISVKQKFYSNGKHKISFNGEKTLIAKDLLVPRDPSSASFVIVACLLQRTVILQSQMFVLTLKEL

SEQ ID NO: 120266 - protein, 154 aa, Unknown
  Bacterial polypetide isolated from the Sargasso Sea
MISNLITEGINGIPEIPGDKSISHRSIIIPSISNGITEISNILKSEDVLHTLNAFKAMGVKIEENKKNITIFGNGLNSLKKPKTEIYLGNSGTSARLLTGLLSSQKFNCVMTGDFSLSKRPMNRIADPLSKMDARIKTTNGTLPITIEGNSLMP

SEQ ID NO: 120267 - protein, 291 aa, Unknown
  Bacterial polypetide isolated from the Sargasso Sea
SGIVDLPGSKSLSNRILLISMLAEGHTEIHNLLDSDDTRRMVDALKILGVEVHEDRSNNRISVNGTSGTIPVTEATLMLGNAGTVMRPLTAALTLGKGRFVLDGVQRMRERPIIDLVNGLNQLGANVKCINGTNSPPVEVIANGLPGGTTLLSGVISSQYLSAILMAAPYAKTEVQIQITDNLVSVPYVEMTIQLMKRFGVSVENYKFKYFRVPSIPYSSPGKVYVEGDASSASYFLAGAAITGGTVKVKGCGTESLQGDSRFGEMLEKMGAIVEWSEREISVKGSSLNGI

SEQ ID NO: 120268 - protein, 180 aa, Unknown
  Bacterial polypetide isolated from the Sargasso Sea
MSSYKSSKLSGEIMVPGDKSISHRALILGSLVTGKIKVKNLLESDDVIATAEALKKLGVKINKKINFWEIFGNGIGNFFGSNYELDMGNSGTGSRLMMGLIAGSDVEATILGDESLSKRPMKRIILPLLKTGATFDDPNNDNLPVKIKGSKIPLPIEYISPVSSAQIKSSILLTGLSSTG

SEQ ID NO: 120269 - protein, 165 aa, Unknown
  Bacterial polypetide isolated from the Sargasso Sea
MNSISSSKSINLSGNLSVPGDKSISHRSLIIGSLVSGRIEINNLLESEDVVATAEALKILGVKINKLNDKWEVFGSGIGNFFGSNYILNMGNSGTGARLLMGLVAGSDVEATFIGDESLSKRPMKRVTTPLKKTGAVIKSQTSNLPIKIQGSKNSFTNLNIKAPL

SEQ ID NO: 120270 - protein, 290 aa, Unknown
  Bacterial polypetide isolated from the Sargasso Sea
MGDKSISHRALIIGSIAQGKTTIEGFLHSEDPLSTADCLRKLGVNIPKIRKDEPFTISGLGLDGLKEPKEILNCGNSGTTMRLLMGLLAGQEGKNFILTGDTSLNERPMRRVGKPLSLMGGKISGRNSGNKAPISIAGNKLKGCVIGTPVASAQVKSAILLAGLKAAGTTSVIEPASSRDHTERMLKAFGADISIRGELGRNVVIKSGTNLIGQKILIPGDISSASFWMIAASIVPNSEVLIENVGLNPTRTGILNVMDLMGCNYEIFDKSIIAGEPIGSIKVKTAKNLR

SEQ ID NO: 120271 - protein, 203 aa, Unknown
  Bacterial polypetide isolated from the Sargasso Sea
MKHIISKKSFRLAGCAEVPGDKSISHRALIISSMCIGQSKIEGLLESEDVFSTMDALQKLGVRIEKLNGYWFVNGVGLFGFKEPTEYLDLGNSGTGARLILGAIMGSSILANLKGDASLSKRPMGRILTPLKLMGAKIISSNNEKLPITIKGPKEVFPLNYYSKISSAQIKSSILLSGLSASGKTVFKEPNESRNHTEKMLSS

SEQ ID NO: 120272 - protein, 245 aa, Unknown
  Bacterial polypetide isolated from the Sargasso Sea
MESLTLQPIARVDGTVNLPGSKSVSNRALLLAALARGTTVLTNLLDSDDVRHMLNALSALGVHYVLSSDRTRCEVTGNGGPLQAGSALELFLGNAGTAMRPLAAALCLGSNDIVLTGEPRMKERPIGHLVDALRQGGAQIDYLEQENYPPLRLRGGFTGGDVEVDGSVSSQFLTALLMAAPLAPQDTVIAIKGELVSRPYIDITLHLMKTFGVEVENQAYQRFIVRGNQQYQSPGDYLVEGDASS

SEQ ID NO: 120273 - protein, 177 aa, Unknown
  Bacterial polypetide isolated from the Sargasso Sea
MLKKKFFAKGGHVISGEVVMPGDKSISHRAVMCGALAKGVSRIANCLMGDDVKATIQAFKSMGVEFEFDSQFSFLIKGRGCHLEHPRRTINLQNSGTSIRLITGILAGLNLSARLDGDESLRRRPMERIATPLRKMGAIINLREEDFPPIDIISSKRLEAIEYTLPVASAQVKSAVI

SEQ ID NO: 120274 - protein, 261 aa, Unknown
  Bacterial polypetide isolated from the Sargasso Sea
MNNIRTIEGGGSLKGKIKVPGDKSISHRALIIGSISKGETTIEGFLHSEDPLSTADCLRKLGVNIPEIKKDEPFTISGLGLDGIKEPKEILNCGNSGTTMRLLMGLLAGQEGKNFILTGDSSLNERPMNRVGKPLSLMGGKIFGRERGNKAPISIDGNKLKGCVVGTPVASAQVKSAILLAGLKASGTTSVIEPASSRDHTERMLKAFGADISIRGEFGRNVVIKSGGNLIGQRILIPGDISSASFWMIAASIVPNSEILI

SEQ ID NO: 120275 - protein, 212 aa, Unknown
  Bacterial polypetide isolated from the Sargasso Sea
ETLTSGRHDGLTGLFDVPGDKSISHRSFILGGLAIGTTRVTGLLEGDDVMATGRAMQALGAGIIRDSDGSWTITGVGTAGLVSPEAPLDLGNSGTGVRLLMGVVAGLPVTATFCGDESLSRRPMARVTDPLELMGAKITARDGGRLPVTITGARAPLAADHASKVASAQIKSAVLLAGLNARGTSVVREPHASRDHTESMLRHFGANLRLQV

SEQ ID NO: 120276 - protein, 287 aa, Unknown
  Bacterial polypetide isolated from the Sargasso Sea
CGNSGTTARLMLGAVCTNPIYCTLIGDKSLSKRPMKRVTAHLEKIGSRVSLTNNKNLPLTITGSQTCLPLLHKISKPSAQIKSAIILAALNINGETTIIEPRQTRDHTELLLKYLKVDYKNQKMSSGGRKLIFNGPYEIKSKNLFVPGDPSSAAFIIVGALITPNSKIKLIDVLLNKTRIAYLSILKKMGGKIKIKKTKIQSGEQLGTITVLASSLRGINIPANLSPYLIDEYPILSVAAARAKGTTVMKGLDELRYKESDRIKSTVGMLKSFGIKAESIKNDIKIK

SEQ ID NO: 120277 - protein, 212 aa, Unknown
  Bacterial polypetide isolated from the Sargasso Sea
MSATGSPSTPRVLPAGGSLSGRVTVPGDKSISHRSLLFGAIAEGTTTIEGLLPAEDPLSTAACLRAMGVAISPITPGATVTVQGVGLEGLQEPSVILDCGNSGTSMRLMLGLLAGRSGRHFILDGDASLRRRPMRRVGQPLSAMGAEVRGRESGNLAPLAVQGRQLKGTVIGTPVASAQVKSALLLAALTADGPTTVIEPAQSRDHSERMLR

SEQ ID NO: 120278 - protein, 192 aa, Unknown
  Bacterial polypetide isolated from the Sargasso Sea
MNTNHVRAVKGGSSLQGTIKVPGDKSISHRSLIIGSIAEGETNIEGFLYSEDPLSTADCLRKLGVCIPEIKKDNSFTVKGLGLDGFKEPKEILNCGNSGTTMRLLMGLLAGQKSRNFILTGDRSLNERPMGRVSKPLRQMGGVIYGRESGTKAPISITGNKLKGCVIGTPVASAQVKSAILLAGLTASGTTS

SEQ ID NO: 120279 - protein, 237 aa, Unknown
  Bacterial polypetide isolated from the Sargasso Sea
LQIKGKTLNGGEMSVDGSVSSQFLTALLMAAPLFSGDVTIRIKGELVSKPYIDITLDTMAKFGVTVKNDNYQTFTVSGDAKYIAPGKFMVEGDASSASYFLAAGAIKGGTVRVTGIGQNSIQGDIRFADVLEAMGATVVWNDEYVEITGAPLKGVNMDMNHIPDAAMTIATTALFAEGPTTMTNIYNWRVKETDRLAAMATELQKLGAKVEEGHDYIKVWPTDSLKHAEIDTYNDHR

SEQ ID NO: 120280 - protein, 268 aa, Unknown
  Bacterial polypetide isolated from the Sargasso Sea
CQNSGTTVRLLTGLLAGKNINAKLIGDESLSKRPMERIVNPLSKMGLQIKSNDGKLPISIKDSRINGIDYKNTMSSAQVKSAVLLCGLGTTDTTSYYEPIKSRNHTEIMLKNIGVDIEHNNGKIILRNSNSLIKGLDITIPGDPSTASFFAAAALIMPKSELILKNILANPTRFGFFDALVKMDANIEYLSSWNDSGEEVKNIKIKYGPLNAIKINHMHIPGMIDEIPILSIVASQANGKTEIRGAKELRVKESDRIQAIVHNLRNMG

SEQ ID NO: 120281 - protein, 259 aa, Unknown
  Bacterial polypetide isolated from the Sargasso Sea
MKSSKITNGINGEPKIPGDKSISHRSIIIPSISNGICEIQNILESEDVMHTLNAFIKMGVNIKKTENKIIIDGKGLNSLNKPTNDIYLGNSGTSARLLTGLLAAQNFDSRLIGDKSLSSRPMGRIANPLSLMKANIITNNGKLPLEIHGTELVNTTVNIEVPSAQIKSGLIFAALNTKGKTIIIENSITRDHTEIMLEAFDADITIRKEKTKKIIEINGKKELKSKNIIVPSDLSSSAFFIVAALINDNSKITLKNINI

SEQ ID NO: 120282 - protein, 150 aa, Unknown
  Bacterial polypetide isolated from the Sargasso Sea
MLTSSKISGGINGNVNIPGDKSISHRSIIIPSISNGFTEIDNILLSEDVMNTMNAFRAMGVKIIKNNNKLLIEGKGLNSLTSPTSEINLGNSGTTARLLTGLLSSQNFNSILIGDISLSKRPMDRIIQPLEKVGASFKSNDSKLPLEIFG

SEQ ID NO: 120283 - protein, 205 aa, Unknown
  Bacterial polypetide isolated from the Sargasso Sea
MLVQGALQLPGDKSISHRAIMLSAIADGISCVRNLNDGADLQSTINVLRDCGASIEQKEDEIIINGKELHSPSKDLDCGNSGTTTRLVAGLLSSQKLIFTLTGDKSLSKRPMKRIVTPLVAMGCKISSNNGLLPLSIDASNGINAIDYDMKVASAQVKSSILFSALGGNNVSSINEVISTRNHSEIMLKNMGALIEGKGSKIIVH

SEQ ID NO: 120284 - protein, 234 aa, Unknown
  Bacterial polypetide isolated from the Sargasso Sea
MLVQGALQLPGDKSISHRAIMLSAIADGISCVRNLNDGADLQSTINVLRDCGASIEQKEDEIIINGKELHSPSKDLDCGNSGTTTRLVAGLLSSQKLIFTLTGDKSLSKRPMKRIVTPLVAMGCKISSNNGLLPLSIDASNGINAIDYDMKVASAQVKSSILFSALGGNNVSSINEVISTRNHSEIMLKNMGALIEGKGSKIIVHPLKSKLKSIDISVPSDPSSAAFFAALAVI

SEQ ID NO: 120285 - protein, 179 aa, Unknown
  Bacterial polypetide isolated from the Sargasso Sea
MKLKNINLKSLLSHSLSGTAKIPGDKSISHRSLIIGSLSIGKSKVFRLLESDDVLATKQALRELGVKISKSKKDYWEINGVGLHGFKSPKNFLNLHNSGTGVRLLMGAVMGSNITTSFKGDPSLSSRPMMRIIEPLKLMGAKFDYYNNGTLPITLFSPSEVLSLENKTPVSSAQIKSSI

SEQ ID NO: 120286 - protein, 260 aa, Unknown
  Bacterial polypetide isolated from the Sargasso Sea
MRRVGKPLSLMGGKIYGREDGNKAPISINGKKLKGCVIGTPVASAQVKSAILFAGLNASGTTSVIEPASSRDHTERMLKAFGADISIRGELGRNIVIKSGSNLIGQRILIPGDISSASFWMIAASIVPNSEVLIKNVGLNPTRTGILNVMDSMGCNYEILDKSTVAGEPIGSIKVKSSKNLRSFTIEGDTLPKLIDEIPILTVAACFCNGVSEIKDAQELRVKETDRLKVMARQLQKFGAEIIEKEDGLIINGQSKFTLR

SEQ ID NO: 120287 - protein, 329 aa, Unknown
  Bacterial polypetide isolated from the Sargasso Sea
MNGAPNIPGDKSISHRSIIIPSISNGICEIENILKSDDVMHTLNAFKEMGVEIKESEKKLIIIGKGLNSLEKPKKEIYLGNSGTSARLLTGLLSSQKFDSILTGDKSLSKRPMKRISDPLHKMNAKIETANGTLPLLIKQSKLVPINIDLVIPSAQIKSGLLLASLNTEGETIINEFKTTRDHTETMLKSFGANIDIVKNNEKKLIKVLGKKELKSKNIKVPNDLSSSAFFIVSALINKNSKLIIKNINNNPTRNGLLIALKKMGAKISLSNEHLSNNENICDIEVSSSDLIGCELGPEIADLMIDEYPILGHCCIFLQVHPSVFSCFA

SEQ ID NO: 120288 - protein, 240 aa, Unknown
  Bacterial polypetide isolated from the Sargasso Sea
MLTCKVHAQKLQLNSVIDGIPGDKSISHRAFILGSLCDNQSLFSHILESEDCLNTLTIMRTLGATISKSDDIYCVEGLGLNGLKAPSTLSPLDVGNSGTSIRLLTGLLAAQPFESVITGDSSIQGRPMRRIIDPLSKMGALITGQSHTNSDDIYPPLLIQPVDQLSSLSYSSPVASAQLKSSLLLAGLYADSVSVDEPDHSRDHTERLLRYFGASVDTYGKRVTLHHTQLLTNPNPDHVL

SEQ ID NO: 120289 - protein, 257 aa, Unknown
  Bacterial polypetide isolated from the Sargasso Sea
MFSEQTSVGINGTILIPGDKSISHRSIIIPSISNGICEISNILKSDDVLRTMNAFKEMGVEIKEENKKIIINGKGLDSLKKPNKELYLGNSGTSARLLTGLLASQNFETILSGDKSLSSRPMKRITNPLKEMGAKIKTQDGKLPLNIKGTNLKNCNIQIEIPSAQIKSGLILAALNTEGTSYIKEQNITRDHTEIMLETFGADIQTKKYENSSEIIINGKKNLFPKNIDVPSDLSSSAFFIVAALINKNSNITLENI

SEQ ID NO: 120290 - protein, 227 aa, Unknown
  Bacterial polypetide isolated from the Sargasso Sea
MKLISKPSMNLNGKIRIPGDKSISHRALICAAISEGTSKISNLQESEDVMNTLNSLKQLGINIYKEGHCYFVEGKGFKGLQKSDDQLYFGNSGTGLRLMSGLLSSQDFSSSLTGDESLSKRPMKRIIDPLIEMGANISGSKMDTLPIHIIPTKKIKGINYEMPIASAQVKSAILFASLGLDSNTKITEKSVSRDHTERMFEYFGANIFLFKNRNNFRKNHEFQFTKY

SEQ ID NO: 120291 - protein, 277 aa, Unknown
  Bacterial polypetide isolated from the Sargasso Sea
KRPMGRVAKPLSLMGSKITGREGGNKAPISIDGKKLKGCVIGTPVASAQVKSAILLAGLNASGTTSVIEPASSRDHTERMLKAFGADISIRGELGRNVVIKSGGNLIGQRILIPGDISSASFWMIAASIVPNSEVLIQNVGLNPTRTGILNVMDSMGCNYEILDKSTVAGEHIGSIKVKTSNNLRSFTIEGDILPKLIDEIPILTVAACFCNGVSEIKDAQELRVKETDRLKVMARQLQKFGAEITEKEDGLIINGQSKFHSAEVDSETDHRVAMSL

SEQ ID NO: 120292 - protein, 441 aa, Unknown
  Bacterial polypetide isolated from the Sargasso Sea
PTKDQSLRNFQKRGELCGKVKVPGDKSISHRALLFGAIAKGKTLIEGLLPAEDPLSTAECLRSMGVKISPIKKGDIIEIEGVGLNGLQEPQDILNCGNSGTTMRLIMGLLAGQKDHHFILTGDKSLRNRPMKRVGQPLKMMGGKVFGRCGGNLAPLSIIGNKLRGAVIGTPVASAQIKSAILLAALNAEGSTTVIEPARSRDHSERMLKAFGANLEVGGEMGRHITVSPGKDLKGQSIIVPGDISSAAFWLVAGSIIPGSELVVENVGLNPTRTGILDVLEAMEANINVINKRDVAGEPVGDIEVFYKENLKPFKIDGEIMPRLVDEIPILSVGACFCNGISQIKGASELRVKETDRLAVMARQLKRMGASVDEHQDGLTIYGGKSLEGCELDSEDDHRIAMSLAIASIMANSNSTLRRSEAAAISYPDFWSDLKRLQQKN

SEQ ID NO: 120293 - protein, 436 aa, Unknown
  Bacterial polypetide isolated from the Sargasso Sea
MNNIRTIKGGVNLKGKVKVPGDKSISHRALIIGSIAEGQTTIEGFLHSEDPLSTADCLRKLGVNIPEIKKNEPFTISGLGLNGLKEPKEILNCGNSGTTMRLLMGLLAGQERKNFILTGDISLNERPMGRVGKPLSLMGGKIFGREKGNKAPISINGNKLKGCVIGTPVASAQVKSAILLAGLKASGTTSVIEPASSRDHTERMLKAFGANISIRGELGRNVVIKSGSKLTGQRILIPGDISSASFWMIAASIVPNSEVLIQNVGLNPTRTGILNVMDSMGCNYEILDQSTIAGEPIGSIKVKTSNNLRSFTIEGDILPKLIDEIPILTVAACFCNGVSEIKDAQELRVKETDRLKVMAQQLQKFGAEIIEKEDGLIINGQSKFHSAEVDSETDHRVAMSLAIASLLAKGTSKIMRADAASVSYPTFWEELAKLTN

SEQ ID NO: 120294 - protein, 374 aa, Unknown
  Bacterial polypetide isolated from the Sargasso Sea
MITSSKTNSLHGSIILPGDKSISHRAIIFGALSVGKTVIEGLLESEDIYRTMKAMEKFGARINKNKNNWEVYGFGVGGFSSPDSVIDCGNSGTTCRLLMGAIATTPIKAVFVGDPSLSKRPMDRIIEPLERMGARFIARENSFLPITITGAKEPLPIRFESKIDSAQIKSAVLLAGLNCRGETTYIEKSLTRNHTENMLSGFGVKLDSEFSSKGFSHKLLGFQELTPKEIIVPTDPSSAAFFIASALIVKDSSINLYNLCMNHTRSGFLETVKEMGAKIELSNNRTISGELVADLTVCFSKLKGIEVPISRVPSMIDEYPILSIIASFATGKTIMRGIKELTVKESNRILSMAKGLKQCGIEIEYGDDFLIVSG

SEQ ID NO: 120295 - protein, 179 aa, Unknown
  Bacterial polypetide isolated from the Sargasso Sea
SLQLLLLKGGTIKVTGIGKNAVQGDIHFADALEAMGATVDWGYDYISVTRNQLKGIDRDYNAIPDAAMTIATTALFAQGPTAIRNVYNWRVKETDRLNAMATELRKVGADVEEGEDYILITPPKTLKHASIATYNDHRMAMCFSLVALSDTAVTIEDPDCTRKTFPQYFEVFSKLSTLA

SEQ ID NO: 120296 - protein, 436 aa, Unknown
  Bacterial polypetide isolated from the Sargasso Sea
MEQLTLKPIKKVEGTVRLPGSKSLSNRILLLAALAEGTTKVENLLDSDDIRYMVDALKVLGLDFTEDRENNILEITGCGGEFPVEGADLFLGNAGTAMRPLTAAVAAAGKGTFVLDGVERMRERPIQDLVDGLVQLGVKAECTMGTGCPPVKVEANGLPGGRVELSGSVSSQYLTALLMAAPLCQGSIEIVIVDELISKPYVEMTITLMERFGVKVEKADDLQSFKIQGGQKYVSPGSAFVEGDASSASYFLAGATITGGTVTVIGCGSESIQGDTNFAYTMEQMGATLEWGPNSVTCTGPQGPLKAIDVNMNAMPDAAMTLAVAALFADGVTTIRDVASWRVKETERMIAICTELRKLGCDVFEGSDYCVITPPHKLEPPATMKANVDIDTYDDHRMAMAFALAACGDVDVIINDPKCTKKTFPTYWDVLSSVSA

SEQ ID NO: 120297 - protein, 430 aa, Unknown
  Bacterial polypetide isolated from the Sargasso Sea
MVWTIDTPSDKSISHRALILGSLCIGETKIHNLLLSEDITSTICALEQFGANINVEEEHNITNIYGIGIGGLLQPSKKIYLGNSGTSVRLLIGLMSSCDVCVEFEGDESLSKRPMGRVLDPLKEIGLEILSNEKENLPLKLKGTALPVPINHKLVVPSAQIKSALMLAALNIRGRSTIIETIKTRDHTEKLFEYFGADIQIRLNDVGQKEIMISGQKKLSPREIDIPGDPSSAAFFIVAGLISKGSKLRIKNIMINPTRSLFIDYLISMGAKIDFLDKYSKCGEEVADIDVTASELKGVTTSLNDAPSIIDEFLILSVAAAYAKGESKFCGVSELKVKESDRLEAIIKMLTASGVKCGTKDDDLIIYGNGEVPGGSDIKSNYDHRVAMSALILGLGSKSQIRIDDVSPIATSFPNFMEIYHRIGGNFHSG

SEQ ID NO: 120298 - protein, 416 aa, Unknown
  Bacterial polypetide isolated from the Sargasso Sea
MLVQGTLQLPGDKSISHRAIMLSAIADGVSYVRNLNDGADLQSTINILKDCGASIQQRDGEVVINGKKLHSPSNDLDCGNSGTTTRLVAGLLASQKLTFSLIGDESLSKRPMKRIITPLTAMGCKISSNNGLLPLSIDASDGISAIDYDMKVASAQVKSSILFSALGGNNVSSINEIIPTRNHSEIMLKNMGASIESEGSKIIVHPLKSKLKSIDISVPSDPSSTAFFAALAVINNNSNLKLTNVLLNESRIGFVEVLNKMNCLISKSNESVHNGEKVGDLTISSSSLKAIEIESETIPSIIDEVPILAVVAAFANGTTVFKNVEELKYKECDRLRAIIHNLEEFGIKAYEKNNDLFVEGGKVKRMPKITTFDDHRIAMAFTILSLTSFEKYELDNRSCVDISLPNFFNYLSEIAE

SEQ ID NO: 120299 - protein, 288 aa, Unknown
  Bacterial polypetide isolated from the Sargasso Sea
MSINAAELSGIHYEMKIASAQVKSCLLLAGLYAKGVTKINEPVVCRDHTERMLAGFGYPVVRNESGDITIEGEGALAGIDIEVPGDISSAAFFMVAAAISEGSAINLLHVGLNPTRAGIISLLNLMNTKLEVTNEKIIGGEPVGDIRVTSSKLEGIAVPSQLVPLAIDEFPIFCIAAACATGTTTIRGAEELRVKESDRIEAMAEGLTALGIKVKTFADGLEIKGGTILGGRVKSHSDHRIAMAFSIAAIKAKDPIFIEDCNNVATSFPGFVDLANSIGMDIKEISDG

SEQ ID NO: 120300 - protein, 270 aa, Unknown
  Bacterial polypetide isolated from the Sargasso Sea
MSREQVNLLASSNNKINGCIRVPGDKSISHRAIIISSIAEGKTQINQYLDSADINATIDVCRRIEADIVKHNESLIVTGNNLERIKKEDIELNFGNSGTSMRLMMGVLSAQIFSSILSGDESLSQRPMNRVSKPLINMNADIKTSNGKPPIFISPVNEIKNVDHKIHIASAQIKSAVMLAGLYGRDPFTIITPKSRDHTEIMLNEFGCNITLESDSINVIPSKLTSPKTIDIPGDISSAAFFIVGSIISKDSQVKIENVGLNPLRTGFIK

SEQ ID NO: 120301 - protein, 167 aa, Unknown
  Bacterial polypetide isolated from the Sargasso Sea
MNSFRLEPISRVAGEVNLPGSKSVSNRALLLAALARGTTRLTNLLDSDDIRHMLAALTQLGVKYKLSADKTECTVHGLGRSFAVKEPVNLFLGNAGTAMRPLCAALCLGSGEYTLGGEPRMEERPIGHLVDALREAGAHIQYLKKDGYPPLVVDAKGLWGGDVHVDG

SEQ ID NO: 120302 - protein, 438 aa, Unknown
  Bacterial polypetide isolated from the Sargasso Sea
MNLTTSINNEIFGTVQCPGDKSISQRVLMIGALMNQEMIVDGFLHGEDPLSTMNALNQIGAGITVDENGLVHLSKRNHVFQNCDEPLNLGNSGTGLRLMLGLTSGIGLNLSFCGDESLSSRPMSRIINPLTEMGANIKSSSGKLPISISTTSLQKQYRYELPVASAQVKSSILLAGLASGSGVEIIEPIQTRDHTERMLKNFGANIEISSVESKNIIQLQPSNKLVAKNYTVVGDISSAAFLIVAALISNSSGLEITKVGMNPSRTGVLEALKKMGANIKVKNQRLESGEFCADLIVKQSKLKGVELSGEIIPNIIDEIPILSIAAAFAEGETLIRDAAELRVKESDRLQAVSDGFRMLGIAHKNFDDGMSILGSSESLCIEEPIFIESHDDHRIAMSFLIAGLKCSKPITVKDCKNIFTSFPNFIELISSVGYKLEK

SEQ ID NO: 120303 - protein, 415 aa, Unknown
  Bacterial polypetide isolated from the Sargasso Sea
MKQLRLEPVVQVRGEINIPGSKSISNRALLLATLAKGTTTLTNLLDSDDIRHMLASLKQLGVEYRLSQNNTVCELIGLGGTISADSAQTLFLGNAGTAMRPLCAALTLGRGEFTLTGELRMEERPIGDLVDALRQLGANVVYLKNDGFPPLTINATGLNGGDVEIAGDLSSQFLTALLMVAPLAKGSVNIHVKGELVSKPYIDITLALMAQFGVNVINHDYARFEIPVGQQYVSPGKVLVEGDASSASYFLAAGAIKGGEVKVTGVGRLSIQGDVKFADVLEKMGADIEWGDDYIIARGAPLTAVDLDMNHIPDAAMTIATAALFAKGTTTIRNIYNWRIKETDRLAAMATELRKVGALVEEGHDYIQITPPAVLNTAEIDTYNDHRMAMCFSMLAFADCGITINDPDCTSKTFP

SEQ ID NO: 120304 - protein, 435 aa, Unknown
  Bacterial polypetide isolated from the Sargasso Sea
MSREQVNLLASSNNKINGCIRVPGDKSISHRAIIISSIAEGKTQINQYLDSADINATIDVCRRIDAEIIKSNESLIVTGNNLERIQKDDIELNFGNSGTSMRLMMGILSAQIFSSILSGDDSLSQRPMNRVSKPLINMNANIKTSNGKPPIFISPVDEIKNVDHKIHIASAQIKSAIMLAGLYGRESFTITTPKSRDHTEIMLNEFGCNITLESNSINVIPSKLTSPNTIDIPGDISSAAFFIVGSIISKDSQVKIENVGLNPLRTGFIDILKMMGASIEISDLKTVNGEVVGNIDVESSSLEGIAIPKELIASSIDELPLIILAASQADGKTSLRNAEELRFKESDRISSMAKMMQRFNIPIDEFNDGMDIHGGIIEGNTINSFGDHRIAMTALLASLVSNGDIIVEDTVNIDTSFPEFIEIANNIGMDIKTYD

SEQ ID NO: 120305 - protein, 410 aa, Unknown
  Bacterial polypetide isolated from the Sargasso Sea
SHRSLLFGAIAEGTTTIDGLLPAEDPISTAACLRAMGVRISPIEAAGLVTVEGVGLDGLQEPAEILDCGNSGTTMRLMLGLLAGRAGRHFVLDGDASLRRRPMRRVGQPLASMGADVRGRDGGNLAPLAVQGQSLRGTVIGTPVASAQVKSALLLAALTADGTTTVIEPAQSRDHSERMLRAFGADLQVGGEMGRHITVRPGNTLKGQQVVVPGDISSAAFWLVAGALVPGADLTIENVGLNPTRTGILEVLEQMNAQIEVLNRRDVAGEPVGDLRVTHGPLQPFSIGEEIMPRLVDEVPILSVAACFCDGESRISGASELRVKETDRLAVMARQLKAMGAEIEEHEDGMTIRGGRPLKGAALDSETDHRVAMSLAVASLLASGDSTLQRSDAAAVSYPSFWDDLDRLRC

SEQ ID NO: 120306 - protein, 489 aa, Unknown
  Bacterial polypetide isolated from the Sargasso Sea
MATRVCSRGCVRRSTPATARRSKRCSRARVPHARHGRSAAARPLPNRSRNNRTIPMDYLDLGPYSSASGTVRLPGSKSISNRVLLLAALAEGETTITNLLDSDDTRVMLDALGKLGVKLARDGDTCVVTGTRGAFTAKTADLFLGNAGTAVRPLTAALAVNGGDYRVHGVPRMHERPIGDLVDGLRQIGAQIDYELNEGYPPLRIKPANISVDAPIRVRGDVSSQFLTALLMTLPLVKAKDGKIVVEVDGELISKPYIDITIRLMERFGVTVERDGWQRFVVPAGVRYRSPGRIMVEGDASSASYFLAAGALGGGPLRVEGVGRASIQGDVGFANALMQMGANVTMGDDWIDVRGIGHDHGKLEPIDMDFNLIPDAAMTIAVAALFANGTSTLRNIASWRVKETDRIAAMATELRKVGAIIEEGPDYLVVTPPEKLTPNAAIDTYDDHRMAMCFSLISLGGVPVRINDPKCVGKTFPDYFDRFAALAKA

SEQ ID NO: 120307 - protein, 442 aa, Unknown
  Bacterial polypetide isolated from the Sargasso Sea
MTDNTHATTNPTFVVAPGGQLQGRLRVPGDKSMSHRSIMLGSLAEGVTQVEGFLEGEDALATLQAFRDMGVVIEGPHNGQVTIHGVGLHGLKAPEKALYMGNSGTSMRLLTGLLAGQSFDVELTGDASLSKRPMERVAKPLREMGAQITTGTDGRPPVRIRGGQSLKGFHYDLPMASAQVKSAVLLGGLYADGETSVTEPAPTRDHTERMLGGFGYEVRRDGATRALSGGGKLTAGKLEVPADISSAAFFLVGASIAANSEVTLPHVGINPTRTGVIDILKLMGADIRLENQRDAGGEPVADLVVNAAPLKGIEIPEALVPLAIDEFPAIFIAAACAQGDTILRGAEELRVKESDRIQVMADGLAALGVSHQVFDDGIRITGGEFGGGEVQSHGDHRIAMSFAMAALRATGPITIHDCANVATSFPGFAQLATHAGLKLEVK

SEQ ID NO: 120308 - protein, 285 aa, Unknown
  Bacterial polypetide isolated from the Sargasso Sea
MKSISSKKLKGNILIPGDKSISHRLVILSSIAIGHSNIKGILKSDDIMKTIEAMKNFGASIEFTNPHNCSIKGVGLGGLSEPESALNFGNSGTSARLIMGLSASHPITTIFIGDKSLSIRPMDRVLKPLVNFGSNYSLRKDNYLPAIVKGSDNPIPFSFELGEPSAQIKSAVLLGALNTPGVTTVKDKFNTRDHTERLLGLYGANINITKKRNVKEISIKGVNELKGLDLSVPGDPSSALFPIIAALICKNSDIMVKNVLINPTRDGAFQVLKDMGADISFLNNR

SEQ ID NO: 120309 - protein, 415 aa, Unknown
  Bacterial polypetide isolated from the Sargasso Sea
MVIRGEIELPGDKSISHRALMFAALAQGESKIENISTGDDIQSTMNCLKACGIDINNKNEGLIVKGGSFSDPKRPLNCGNSGTTARLMLGLLAGRGLQAKFIGDDSLSSRPMDRIMSPLSKMGLKYRSTNGKLPVTIEQSNLVGIDYRSSIASAQLKSALLLAGLGADSKTIVREPLKSRDHTEIMLSEMGAKIHTDGLSTFIEPQSSDLRSINLSIPGDPSSAAFFVAAAAMLPGSDIILKNILLNPTRAEVFHHLEKMGVVIKYINNYKRSGESIGSLAISNGELSSIIINEQDVPGVIDELPILAILATQANGTTIVKGASELRVKECDRINAICLNLRKMGGDIIELEDGFKINGPTELHGANIETFHDHRIAMAFAIAGLITTQSVILDHPECASTSFPEFYDVLDRVCQ

SEQ ID NO: 120310 - protein, 280 aa, Unknown
  Bacterial polypetide isolated from the Sargasso Sea
MNFIAEKTSNLKGEVVCPGDKSISQRILMIGSLLDQDIEISGFLNALDPLSTLNALSCVGVKIKNDNTKIKIFNKTNFISPKNDINLGNSGTGMRLMMGFISGLSIDANLVGDHSLSKRPMMRVANPLNDMGSNITCTNELPPVLIKRGNIVNNYKYELPIASAQVKSSILLAALTAKKNVTVIEPSATRDHTEKMIEHFNGDIETHFKDGKNYIKLLTSNLTSNSSYEIVGDFSSASFLIVACLISKNSRILIKNVGLNQTRSGLINLLKKMGAKYKYC

SEQ ID NO: 120311 - protein, 437 aa, Unknown
  Bacterial polypetide isolated from the Sargasso Sea
MKSISSKKLKGNILIPGDKSISHRLVILSSIAIGRSNIKGLLKSDDIMKTIGAMQNFGASIEFKNSFNCSIKGVGLGGLLEPKSALDFGNSGTAARLIMGLSASHSITTLYVGDSSLSIRPMDRVLKPLINFGSNYSLRKDNYLPAILKGSDNPIPFSFDLEEPSAQIKSAVLLGALNTPGITTVKDKFNTRDHTERLLGLYGANINITKKRNAKEISIKGVNELNGIDVSVPGDPSSALFPIIAALICKNSDIIVKNVLINSTRDGAFRVLKNMGADISFLNHRIMAAEDVYDIRVRSSKLRGVDVPRKFSPTMIDDYPILAVAASMAKGKTHFKGINELRFKESDRFTGIINLLEKNGVRVESKKDTIIIHGRCELKKGGIEIKTNLDHRMAMSALIMGLVSKKEIKIDNSETIKTSFPSFYKVMIKVGAKLSKK

SEQ ID NO: 120312 - protein, 162 aa, Unknown
  Bacterial polypetide isolated from the Sargasso Sea
MLISSKIKNGFNGKVLIPGDKSISHRSIIIPSISNGTSEINNILWSDDVINTLGAFKTMGVKIDKYKDNLIIDGKGLNSLKKPNKNIDLGNSGTSARLLIGLLASQKFESTLTGDSSLSKRPMERITKPLEIMGAEFQSTKNLLPMKILGQDLKKINYKLVL

SEQ ID NO: 120313 - protein, 437 aa, Unknown
  Bacterial polypetide isolated from the Sargasso Sea
MKSISSKKLKGNILIPGDKSISHRLVILSSIAIGNSKIKGLLKSDDVMKTVEAMKSFGASINLSNSSNCFINGIGLGGLAEPKTALDFGNSGTSARLIMGLSSSHPITTLFIGDTSLSVRPMQRVLKPLINFGSSFSLREDEFLPAILKGSVSPIPFIFDLNEPSAQIKSAVLLGALNTPGTTIVRDKFNTRDHTERLLELYGANISVKRKKSLKEISIKGIKDLNGIDVNVPGDPSSALFPIVAALICADSDIIVKNVLINPTRDGAFEVLKEMGANINYLNHRIMAAEDVYDIRVKSSNLSGIDVPKKISPTMIDDYPILAVAASMAKGKTCFRGIGELRFKESDRFNGILNLLKKNGVKVESNKDTIIIHGKKELKRGGIEISTNLDHRMAMSALVMGLISIKEVKIDNAKTIKTSFPNFYNLMIKIGAKLFKK

SEQ ID NO: 120314 - protein, 448 aa, Unknown
  Bacterial polypetide isolated from the Sargasso Sea
MIKKNIIKNNLVSHGSSSLKGIITPPGDKSISHRALLFSSLALGKSEISNLLHSEDVLNMVKALKLLGIKITKINNIFYVIGSGLTGFNIPKKHIDCGNSGTLARILIGAIGGSEIFVTLTGDESLRTRPMNRVIKPLEKMGINFHSSNGLLPLIVYGTNEILPIKYNSPISSAQVKTSILLAGLNAQGTSEIIEPYTSRDHSENLLKYFGANIKYNSKTSGKNKVLITGGNTLKSCSIEIPGDISSAAFIIIAAIIIPGSDIIVKNVGINYFRKGVLEALEKMGAKISIENKFTNNFNEPVADISAKYSKIKGITLDSTYSSRLIDEYPILAIAAAVASGKSVFKGLSELRHKESDRFNGIIDGLKASGIKVEAKNDDIVIYGNLSRIKGGITINCQYDHRIAMSFLVLGAVAENPIKVIGCNSISTSYPNFISELNNMGTKIRNEK

SEQ ID NO: 120315 - protein, 437 aa, Unknown
  Bacterial polypetide isolated from the Sargasso Sea
MKSISSKKLKGNILIPGDKSISHRLVILSSVAIGKSNIKGILKSDDIMKTIEAMQNFGASIEFKNSSNCSIKGVGLGGLSEPKSALDFGNSGTAARLVMGLSASHPITTIYVGDTSLSTRPMDRVLKPLVNFGSNYSLRKDNYLPAILKGSDNPIPFSFNLREPSAQIKSAVLLGSLNTPGVTTVKDKFNTRDHTERLLELYGANINITKKRNIKEISVKGVNELKGIDVNVPGDPSSALFPIIAALICKNSDIIVKNVLINPTRDGAYRVLKDMGADISFLNQRIMAAEEVYDIRVKSSNLKGVDIPSKLSPTMIDDYPILAVAASMAKGKTYFKGINELRFKESDRFNGILNLLEKNGVKVESIKDTIIIHGKCELKKGGIEIETNLDHRMAMSALIMGLVSKKEIKIDNSDTIKTSFPSFYKVMIKIGAKLSKK

SEQ ID NO: 120316 - protein, 255 aa, Unknown
  Bacterial polypetide isolated from the Sargasso Sea
MNLTSTNTNSLNGEIICPGDKSISQRILILGSLLNCDMEISGFLDAKDPNSTLNALNEIGASINKSGSKVILCKRELPFIKPSQNLDLGNSGTGMRLMIGLISGLGINATLVGDASLSKRPMSRVIKPLKEMGAKIQSNEGKSPIEIIESNISSEFEYKMPIASAQVKSSLILASLSSNNSITIIEPKITRDHTERMIEYFGGSVTHSNDESGRITVDNSKLTSKDSYEIVGDFSSAAFVIVATLISKESKVIIK

SEQ ID NO: 120317 - protein, 416 aa, Unknown
  Bacterial polypetide isolated from the Sargasso Sea
MLVQGTLQLPGDKSISHRAIMLSAIADGVSCVRNLNDGADLQSTINILRDCGASIEQKEDEIIINGKKLHSPSKDLDCGNSGTTTRLVAGLLSSQKLIFTLTGDESLSKRPMKRIVTPLVGMGCKISSNNGLLPLSIDASDGITAIDYDMTVASAQVKSCILFSALGGNNISIINEIIPTRNHSEIMLKNMGVSIEREGSKIIVHPLKSKLKSIDISVPSDPSSAAFFAALAVINNNSNLKLTNVLLNESRIGFVEVLNQMNCLISKSNESVHNGEKVGDLTISSSNLKAIEIKSETIPSIIDEVPILAVVAAFANGTTVFKNVEELKYKECDRLRAIIHNLEAFGIKAYEKNNDLFVEGGKVKRMPKITTFDDHRIAMAFTILSLTSFKKYELDNSSCVDISLPNFFNYLSEITK

SEQ ID NO: 120318 - protein, 416 aa, Unknown
  Bacterial polypetide isolated from the Sargasso Sea
MLVQGTLQLPGDKSISHRAIMLSAIAEGVSYVRNLNDGADLQSTINILKDCGASIQERENEIVINGKELHSPSNDLDCGNSGTTTRLVAGLLASQKLTFSLIGDESLSKRPMKRIITPLTAMGCKISSNDGLLPLSIDASNGISAIDYDMKVASAQVKSSILFSALGGNNVSSINEIIQTRNHSEIMLKNMGASIESEGSKIIVHPLKSKLKSIDISVPSDPSSAAFFVALAVINNNSNLKLTNVLLNESRIGFVEVLNKMNCLITKSNDSVHNGEKVGDLTIGASNLKAIEIESETIPSIIDEVPILAVVAAFAKGTTVFKNVEELKYKECDRLSAIIHNLEAFGIRAYEKNNDLFVEGGKVKRMPKITTFDDHRIAMAFTILSLTSFGKYELDNMQCVDISLPNFFNYLSEVTK

SEQ ID NO: 120319 - protein, 426 aa, Unknown
  Bacterial polypetide isolated from the Sargasso Sea
MKQLRLEPVVQVRGEINIPGSKSISNRALLLATLAKGTTTLTNLLDSDDIRHMLASLKQLGVEYRLSQNNTVCELTGLGGVISSDTAQTLFLGNAGTAMRPLCAALTLGRGEFTLTGEPRMEERPIGDLVDALKQLGANIVYLKNEGFPPLTINATGLNGGDVEIAGDLSSQFLTALLMVAPLAKGSVNIHVKGELVSKPYIDITLALMAQFGVQVINHDYARFEIPAGQQYMSPGKVLVEGDASSASYFLAAGAIKGGEVKVTGVGRLSIQGDVKFADVLEKMGADIEWGDDYIIARGAPLTAVDLDMNHIPDAAMTIATAALFAKGTTTIRNIYNWRIKETDRLAAMATELRKVGALVEEGHDYIQITPPAVLNTAEIDTYNDHRMAMCFSMMAFADCGITINDPDCTSKTFPDYFAQFASLKA

SEQ ID NO: 120320 - protein, 415 aa, Unknown
  Bacterial polypetide isolated from the Sargasso Sea
DKSISHRALIIGSIAKGETTIEGFLHSEDPLSTADCLRKLGVNIPEIKKNEPFTISGLGLDGLKEPKEILNCGNSGTTMRLLMGLLAAQEGKNFILTGDASLNERPMRRVGKPLSLMGGKIYGREGGNKAPISIDGKKLKGCVIGTPVASAQVKSAILLAGLNASGTTSVIEPASSRDHTERMLKAFGADISIRGELGRNVVIKSGSNLIGQRILIPGDISSASFWMIAASIVPNSEVLIQNVGLNPTRTGILNVMDSMGCNYEILDKSTIAGEPIGSIKVKTSYNLRSFTIEGDILPKLIDEIPILTVAACFCNGISEIKDAQELRVKETDRLKVMARQLRKFGAEITEKEDGLIINGQSKFNSAEVDSETDHRVAMSLAIASLLAKGTSKIMGSHAASVSYPSFWEELAKLTN

SEQ ID NO: 120321 - protein, 308 aa, Unknown
  Bacterial polypetide isolated from the Sargasso Sea
MIKGTIEFPGDKSISHRALMIASISSETSQIKNLSNGQDVLSTKKCLEQCGISINDSKNSYQVKGGKFTNPEKDLDCQNSGTTVRLLTGLLAGKKINARLIGDESLSKRPMERIVTPLSKMGLNIKSNNGKLPILIKNSRIKGIDYKNTMSSAQVKSAVLFCGLGTTDTTSYYEPVKSRNHTEIMLKNVGVEIEHNNGKIILKNSDSMIKGLDITIPGDPSTASFFAAAALILPKSELILKNILANPTRFGFFDAINRMGANIEFLSSWMESGEKVKNIKIKNGPLKAIKIDHGHIPSIIDEIPNIIN

SEQ ID NO: 120322 - protein, 438 aa, Unknown
  Bacterial polypetide isolated from the Sargasso Sea
MQFKISQGKGLRGDITIPGDKSISHRAVMLASLAEGKSKISGLLEGEDCLATVEVFKKLGVSISKEEEEYIVEGKGLQGLNEPISSLDFGNSGTSVRLCAGLLAAQEFSSTLIGDSSLSSRPMRRIIDPLSLMGADIAGSEDGTLPLKIQPSDSLKPITYSLPVASAQVKSCLMFASLYAQGVTELEEKVITRDHTERMFKQFNIPVEINRLKESNLIKVKNVEYIAPQDINICGDFSSASFFILAGLITPDSEILIRNVGINPSRIGFLHALRHMGANIELQKTGSSVEPTANIIARTSDLKGITLNTNLVANMIDEMPAFFIAASLADGVTKVTDAMELRTKESDRLQAMSEALNSFGVKFRLEKDGILINGLGKEGAFKGAEIDSHGDHRIAMASSIGSLRSDSETIILDCLNVDTSFPNFVEVCKDVGIEIESI

SEQ ID NO: 120323 - protein, 402 aa, Unknown
  Bacterial polypetide isolated from the Sargasso Sea
MTTVTRETPGFSSFSNPLSGAIEVPGDKSISHRAIILGALAVGETQVFGLLESADVLGTIDAMVALGAEVKKNNDGSWSVFGVGVGGFSEPNKVIDFGNSGTGVRLALGAIATSPIVATFTGDQSLIGRPMGRILEPIQMFGASNLSRSNGFLPLTLSGAKNPIPITYVSPIPSAQVKSAVLLAALNVPGETIFKEPSLSRDHTERMLKSFGADISSVSQGEERSIFCHGYAELKAQQVFVPGDPSSAAFLICAALMVEGSHIKISNVCQNETRNGLIITLKEMGAKIEIENERNFHGETVADLSVSSSDLSGVEVPPQRVVSMIDEYPILAVVAAIANGKTVMRGLRELRVKESDRIASMAKGLSDSGVKVEEAEDSLTVYGSGSREINGGAKIKTFHDHR

SEQ ID NO: 120324 - protein, 239 aa, Unknown
  Bacterial polypetide isolated from the Sargasso Sea
MNLESKPTKHLEGEVICPGDKSISQRILIIGSLLNCDIEIEGFLDAYDPNSTLSALNKIGASITKNNNTVTLSKRAHSFVDASEVLDLGNSGTGIRLMLGLVSGLGISANFKGDSSLSKRPMSRVIDPLREMGALIESNNGKLPINVSKSNIINSYSYKLPVASAQVKSCLLLAAIASKNQINLVEPKITRDHTERMIEHFGGIINYGDDLKKGNIELDYCELKPKGNYRVVGDFSSAS

SEQ ID NO: 120325 - protein, 435 aa, Unknown
  Bacterial polypetide isolated from the Sargasso Sea
MSIKQNSLLATSNTKINGCINVPGDKSISHRAIIISSIAHGRTKIKGYLNSTDIDATINACRAIGADIKEDIDSLIIDGNNLEQRHGDNAELNFGNSGTSMRLMMGVLSAQKFSSILKGDESLTQRPMNRVTDPLLRMNADIKTSDGTPPVFINPISFIKCVDHSIEIASAQIKSSIMLAGLYGDSAFKIITPQSRNHTEIMLNEFGCDISVIADSIELVPGKLITPNHIEIPGDISSAAFFIVGSIISRDSQIKINNVGLNPLRTGFIKILKMMGANIQISNERIINGELIGDIYTESSILNGIDIPKELISSSIDELPLIVLAASQANGKTSIRNAEELRVKESDRILSMIRMMDKFRISTDEFPDGMNIYGGSIKGARVNSYGDHRIAMTALIASLVSDGDILVEDCKNIDTSFPTFIDTANNIGMDIQIND

SEQ ID NO: 120326 - protein, 302 aa, Unknown
  Bacterial polypetide isolated from the Sargasso Sea
MSIKTNSLSASSNTKINGSINVPGDKSISHRAIIISSIAHGRTKIKGYLNSTDIDATINACRVIGADIKEDIDSLVIDGNDLEQRHGDNTELNFGNSGTSMRLMMGVLSAQKFSSVLKGDESLTQRPMNRVMQPLLRMNADIKTSGGTPPVYINPVSFLKSVDHTIEIASAQIKSSIMLAGLYGDSAFKIITPQSRNHTEIMLSEFGCNISVKADLIELVPGKLITPNQIEIPGDISSAAFFIIGSIISRDSQIKINNVGLNPLRIGFIKILKMMGANIQISNERIINGELIKDIYTDSSIL

SEQ ID NO: 120327 - protein, 423 aa, Unknown
  Bacterial polypetide isolated from the Sargasso Sea
MRSRIVGEVNIVGDKSISHRAIILSSLASGKSMLSNVLISGDTKATINIFKNLGVEINEISNNQLEIHGVGLNGLNESKEPLNALNSGTTARLLIGLLSKQKFESDLIGSTQLNKRPMSRVIDPLVNEGAKISGNGGSLPIKIKPSDYSFENIHSTKPSAQVKSSFLLASLYHKAPTTISEIVLTRDHTERMLSLMGVNIVRLGNTSTVAPTNEITSIDYLVPGDPSSAAFLIAIGLLKSKKVVIKNVLLNERRIGFLKVLKRMNADILLENIENFQNEPVGDIVVKKSKLQGVTIDGSDVVDMVDEIPIFTLLASQAEGVTKVIGAQELRLKESDRLAAMENFINELDGEITTFEDGFEINGKQNLQSGVVETLEDHRIAMTAVVANICIDSQIKADNIICISDSYPDFFFDLEKIGANYES

SEQ ID NO: 120328 - protein, 426 aa, Unknown
  Bacterial polypetide isolated from the Sargasso Sea
MNISLNNVSTIRGEINIPPDKSLSHRAVMFNSIANGDAKITNFLMGEDCLSTIDVLRKLGVKIRVDGSNVYTYGKGLHSLQKPSEVLYVGNSGTTIRLMSGILAGRNFESILDGDSSIRKRPMKRIIDPLTKMGAKISAENNNENAPIKFLGGKLSSINYELPVASAQLKSALILAGLRSDNTVTIIEKDVSRDHTERLLTGMGAKIKKDGLSIDISPSDLSANDLVIPGDISSAAFWMVAAAIHKNAEINIINVGINETRAGIISVLERMGANLNFDNNKEYSGEPVSDITVKTSKLKGTVISGKEIPLLIDEIPIIALAAVFAEGETKIVDAKELRYKESDRISLTVDWMKKAGAKIEELEDGMIINGTNNLDGGTFSSHGDHRLAMTLGIASLVSKNKIEIENPEAANVSYPTFWDTLKGIGK

SEQ ID NO: 120329 - protein, 294 aa, Unknown
  Bacterial polypetide isolated from the Sargasso Sea
MSREQVNLLASSNNKINGCIKVPGDKSISHRAIIISSIAEGKTQINKYLDSSDINATIDVCRRIDVEIIKNNESLIITGNNLERIQKEDIELSFGNSGTSMRLMMGVLSAQNFSSILSGDESLSQRPMNRVSKPLINMNANIKTSNGKPPIFVSPVDAIKNVDHKIHIASAQIKSAIMLAGLYGKDPFTITTPKSRDHTEIMLNEFGCNITLESNSINVIPSKLISPKIINIPGDISSAAFFIVGSIISKDSQVKIENVGLNPFRTGFIDILRMMGASIEISDLKTINGEVVEI

SEQ ID NO: 120330 - protein, 161 aa, Unknown
  Bacterial polypetide isolated from the Sargasso Sea
MKILKVNKSSLKSRTINIPGDKSISHRAIILLSLASNSSTIRGLLEAEDCLHTIRIMQELGVKIYKQGEEYIIEGVGLNGLTKPKKELYCGNSGTAMRLISGILAGQDFESKLTGDTSLLSRPMERVSEPLKLMGANLTLENKEKAPINFKPAKLTGINMK

SEQ ID NO: 120331 - protein, 171 aa, Unknown
  Bacterial polypetide isolated from the Sargasso Sea
MSRGSLTLSAIRRISGKVDLPGSKSLSNRVLLLSMLAEGTTHIRNLLDSDDVRYMIGALEQLGIRMEETRESNEISVEGCAAKIPNSDLELMLGNAGTAMRPLTAALTLGQGLYVLDGVPRMRERPIVELVDGLRQLGAKVSLLNGPPGPPVEIIASGLPGGTAEIKGSVS

SEQ ID NO: 120332 - protein, 227 aa, Unknown
  Bacterial polypetide isolated from the Sargasso Sea
MSATGHSHSPRELKAGGSLSGRVKVPGDKSISHRSLLFGAIAEGTTTIDGLLPAEDPISTAACLRAMGVRISPIEAGGLVTVEGVGLDGLQEPAEVLDCGNSGTTMRLMLGLLAGRAGRHFVLDGDASLRRRPMRRVGQPLASMGADVRGRDGGNLAPLAVQGQSLRGTVIGTPVASAQVKSALLLAALTADGTTTVIEPAQSRDHSERMLRAFGADLEVGGEMGRH

SEQ ID NO: 120333 - protein, 441 aa, Unknown
  Bacterial polypetide isolated from the Sargasso Sea
MSGTGQSDDPRELKAGGSLQGRVKVPGDKSISHRSLLFGAIAEGTTTIDGLLPAEDPLSTAACLRAMGVSISPITDGGIVTVEGVGLDGLQEPAEVLDCGNSGTTMRLMLGLLAGRDGRHFVLDGDASLRRRPMRRVGQPLASMGADVRGRDGGNLAPLAVRGRQLKGTVIGTPVASAQVKSALLLAALTAESPTTVIEPAQSRDHSERMLKAFGADLTVGGEMGRHISVRPGATLQGQNVVVPGDISSAAFWLVAGALIPGADLTIENVGLNPTRTGILEVLEQMGARIEVLNPRDVAGEPVGDLRVTHGPMKPFNFGEQIMPRLVDEVPILSVAACFCEGESRISGASELRVKETDRLAVMARQLKAMGADIDEHEDGMTIRGGRPLKGAMLDSETDHRVAMSLGVAAMLADGNSSLARSEAAAVSYPSFWDELERLRC

SEQ ID NO: 120334 - protein, 282 aa, Unknown
  Bacterial polypetide isolated from the Sargasso Sea
INYKAGVSAQLKSAAILAGLNSFGNTEIIEGEKSRDHTENMLLHNSNSIKIKKGKKKIIKISGKKNLNPINITVPGDPSSAAFFTALTLLNKNSSLKIKNVGINPTRTGFYELLKKSGAKIKITNKKRKNNEMSGDIFIKSQKIKPIIASKEYYVKATDEYPILFIISALTNGTSIYKNVDGLKNKESDRIKEMQKVLRQVGIKTLLSKNELKIFGKGMIDGRTKKIIIPNIGDHRIAMSGFILASLIGARAKIRNFETVFTSSPSFLKIMRFLGAKFEKQF

SEQ ID NO: 120335 - protein, 438 aa, Unknown
  Bacterial polypetide isolated from the Sargasso Sea
MDSIMEFLDLGPFSRASGTVRLPGSKSISNRVLLLAALAEGETTITNLLDSDDTRVMLDALEKLGVRLKREGDTCVVTGTRGAFTARTADLFLGNAGTAVRPLTAALAVNGGDYRIHGVPRMHERPIGDLVDGLRQLGAKVDYEENEGYPPLRIRPAQITADAPIRVRGDVSSQFLTSLLMTLPLLRTESGVTVVQVDGELISKPYIEITIKLMERFGIKVERHEWHRFVVPAGQRYQSPGTIMVEGDASSASYFLAAGALGGGPLRVEGVGRSSIQGDVGFADALIKMGANLQMGDDWIEVRGVGNDNGKLDPIDMDFNLIPDAAMTIAVAALFADGTTTLRNIASWRVKETDRIAAMATELRKVGAKVQEGEDFLVVTPPEKLIPNASIDTYDDHRMAMCFSLVSLGGVPIRINDPKCVGKTFPDYFERFTALAQP

SEQ ID NO: 120336 - protein, 308 aa, Unknown
  Bacterial polypetide isolated from the Sargasso Sea
MSGLEKPIPMLSTRVTNLRGQAKVPGDKSISHRSLILGALSIGKTKIHGLLEGQDVIDTAKAMTSFGALVEKHKNGEWTVDGFGVGGFAEPEKVIDCGNSGTGVRLIMGAMSTSDITATFTGDASLNKRPMERITEPLNLFGAKTFSRRSGKLPITVVGSAAPIPITYKTPVASAQIKSAILFAGLNSPGTTTVIEKEKTRDHTERMLQGFGTKIQSEETSEGNIIKLEGYPELKAQEIRVPRDPSSAAFPVCAALITEGSDIIVTNIGLNPTRSGLFDTLKEMNANITFENENLQGGNQWPTSSKVR

SEQ ID NO: 120337 - protein, 193 aa, Unknown
  Bacterial polypetide isolated from the Sargasso Sea
MKFTIQKGNGLKGEISVPGDKSISHRAIMLASLANGNSEISGFLEGEDCLATIEVFKKMGVNISKNEEKFVVEGRGLHGLASPSSPLDFRNSGTSVRLCSGVLAAQQFSSTLLGDSSLSSRPMTRITEPLELMGANTISTEEGTLPIRIEPVESLKSIKYSLPVASAQVKSCILFAGLYSKGNTEIEEKVTTR

SEQ ID NO: 120338 - protein, 432 aa, Unknown
  Bacterial polypetide isolated from the Sargasso Sea
MISFKIDNGLKGNPKIPGDKSISHRSIIIPSISNGICEVKNYLESEDVINTLETFISMGVKIIKNDKKLIIEGKGLNSLKKPNKDIYLGNSGTSARLLTGLLCSQKFDSILTGDSSLSSRPMSRIAEPLKKMEANIVTNKGKMPLIIKGCNLVNAEIDIKIPSAQIKSGVILAALNTEGITKIIEHNISRDHTEIMLEAFQADIKITREDKKKIIAINGKRELQSKNIDVPSDLSSSAFFIVASLINKNSHLKLKNININPTRNGILIALEKMGANILYSNQRTINNEKICDIEVYTSDLKGCDLHADVANLMIDEYPILSIAASFANSPSVFRGLGELKVKESDRLKLININLLNCGVDCKIIDDDLHIFPSKKFEIKNNTIKTDFDHRIAMAFAVMGSKIGPLNIKESNSINTSFPSFVNEFNTIGGKIS

SEQ ID NO: 120339 - protein, 244 aa, Unknown
  Bacterial polypetide isolated from the Sargasso Sea
AAGDTRIHIKGELVSKPYIDITLHIMKQFGVVIEHDNYKLFYIKGNQSYVSPGDFLVEGDASSASYFLAAGAIKGKVRVTGIGKHSIQGDIHFADVLEKMGARITWGDDFIEAEQAPLHGIDMDMNHIPDAAMTIAVAALFAEGPTSIRNIYNWRVKETDRLHAMATELRKLGVEVEEGRDFITVTPSAQLKHAAIDTYNDHRIAMCFSLVALSDTAVTINDPGCTSKTFPDYFDKLASISQRA

SEQ ID NO: 120340 - protein, 292 aa, Unknown
  Bacterial polypetide isolated from the Sargasso Sea
MGLNGTPQIPGDKSISHRSIIIPSISEGICEVTNILKSDDVMHTLKAFSLMGVKIEEKDQKIIIYGKGLKSLKKPSTYIYLGNSGTSARLLTGLLASQNFETEIKGDDSLSSRPMNRMSEPLKKMDANITTTNGCLPIKIHGKELKCTNIEVKIPSAQIKSGIILAALNTIGVTKITENFITRDHTEIMLESFGAGIEIKKEGKKKIIAIEGGRELKSKNIEVPCDLSSSSFFIVAALINENSNIKLNNININPTRDGILIALEKMGADITIYNKRKKNNEMICDIEVRSSI

SEQ ID NO: 120341 - protein, 414 aa, Unknown
  Bacterial polypetide isolated from the Sargasso Sea
MAISGTLNLPGDKSISHRALMLASLANGRSELRNLSTADDVVSTISCLKSCGLKYDRTSNGVIINGGNFVDPDQPLDCGNSGTTMRLLLGLLSGQGINATLIGDESLSKRPMKRIINPLKQMGLKIISKDYKSPIKIQKSKLNGISYNSPIASAQIKSSLLFSGLGAAGTTMITEPILSRNHSEIMLNNLGAKIKTNDLSISITKSNNFSPLNLTIPSDTSTASFFIAAAILISDSRIKFNRLLLNPTRTGFLNAIKKMGCTIKFIDTSIENGEKIGNVEVYHQKLKGITIDKSDVPSIIDELPILALMATQAHGITKVYGAEELRVKESDRIAAICDNLKNMGADVEELDDGFIIKGPTKLNGALIKTYDDHRIAMTFEIAALIAEGKTQLDNNSCISISFPEFYSTLESILQ

SEQ ID NO: 120342 - protein, 237 aa, Unknown
  Bacterial polypetide isolated from the Sargasso Sea
MFLQKSYQVINLKMNNIRTIKGGVNLKGKVKVPGDKSISHRALIIGSIAKGETTIEGFLHSEDPLSTADCLRKLGVNIPEIKKNEPFTISGLGLDGFKEPKEILNCGNSGTTMRLLMGLLAGQEGKNFILTGDVSLNERPMGRVGKPLSLMGGKIFGREKGNKAPISIHGNKLKGCVIGTPVASAQVKSAILLAGLKASGTTSVIEPASSRDHTERMLKAFGADISIRGELGRNVVS

SEQ ID NO: 120343 - protein, 449 aa, Unknown
  Bacterial polypetide isolated from the Sargasso Sea
MFLQKSYQVFNLKMNNIRTIKGGVNLKGNVKVPGDKSISHRALIIGSIAKGDTTIEGFLHSEDPLSTADCLRKLGVKIPEIKKNEPFTISGLGLDGLKEPKEILNCGNSGTTMRLLMGLLAGQEGKNFILTGDISLNERPMGRVGKPLSLMGGKIFGREKGNKAPISINGNKLKGCVIGTPVASAQVKSAILLAGLKASGTTSVIEPASSRDHTERMLKAFGADISIRGELGRNVVIKSGGNLIGQRILIPGDISSASFWMIAASIVPNSEVLIQNVGLNPTRTGILNVMDSMGCNYEILDKSTIAGEPIGSIKVKTSNNLRSFTIEGDILPKLIDEIPILTVAACFCNGVSEIKDAQELRVKETDRLKVMARQLQKFGAEITEKEDGLIINGQSKFHSAEVDSETDHRVAMSLAIASLLAKGSSRIMRADAASVSYPTFWEELAKLTN

SEQ ID NO: 120344 - protein, 428 aa, Unknown
  Bacterial polypetide isolated from the Sargasso Sea
MFLQKFYQVINLKMNNIRTIKGGVNLKGKVKVPGDKSISHRALIIGSIAKGKTTIEGFLHSEDPLSTADCLRKLGVNIPEIKKNEPFTISGLGLDGLKEPKEILNCGNSGTTMRLLMGLLASQEGKNFILTGDASLNERPMRRVGKPLSLMGGKIYGRERGNKAPISIDGKKLKGCVIGTPVASAQVKSAILLAGLKASGTTSVIEPASSRDHTERMLKAFGADISIRGELGRNVVIKSGGNLIGQRILIPGDISSASFWMIAASIVPNSEVLIQNVGLNPTRTGILNVMDSMGCNYEILDKSTIAGEPIGSIKVKTSNNLRSFTIEGDILPKLIDEIPILTVAACFCDGVSEIRDAQELRVKETDRLKVMARQLQKFGAEITEKEDGLIINGKSKFHSAEVDSETDHRVAMSLAIASLLAKGTSKIM

SEQ ID NO: 120345 - protein, 449 aa, Unknown
  Bacterial polypetide isolated from the Sargasso Sea
MFLQKTYLVINLKMNNIRAIKGGVNLKGKVKVPGDKSISHRALIIGSIAKGDTTIEGFLHSEDPLSTADCLRKLGVNIPEIKKNEPFTISGLGLNGLKEPKEILNCGNSGTTMRLLMGLLAAQEGKNFILTGDDSLNERPMGRVGKPLSLMGGKIYGREGGNKAPISIDGKKLKGCVIGTPVASAQVKSAILLAGLNASGTTSVIEPASSRDHTERMLKAFGADISIRGELGRNVVIKSGSNLIGQRILIPGDISSASFWMIAASIVPNSEILIQNVGLNPTRTGILNVMNSMGCNYEILDKSTIAGEPIGSIKVKTSNNLRSFTIEGDILPKLIDEIPILTVAACFCNGVSEIKDAQELRVKETDRLKVMARQLQKFGAEITEKEDGLIINGQSKFHSAEVDSETDHRVAMSLAIASLLAKGTSKIIRSDAASVSYPTFWEELAKLTN

SEQ ID NO: 120346 - protein, 281 aa, Unknown
  Bacterial polypetide isolated from the Sargasso Sea
FGLGNEHFVIRIKNFRQILGKNHLEIYKLSRNHIEDQCKGLSHVEQINRNSASKIISSNSARVQEALRVIEEFSRIHNSKLSKIASEIRYEIYTLEIELLNFNTRKRAQLIIRKNNLYSITDQRENLLEIIEKILLGGVKIIQHRFKEGNDKDHLKEAIEINNLCKKYNSLFIVNDRLDIAMASNADGVHLGQGDLDIKTVRKLLGASKIIGVSANNSTDINKAVKDECDYIGVGPVFPTLTKKNKESLGVEKIKALTKDLNIPCFAIGGINKLNISSLKN

SEQ ID NO: 120347 - protein, 158 aa, Unknown
  Bacterial polypetide isolated from the Sargasso Sea
MVSSPALTLDKLEDALRAGVTIVQMRDKDASTRELVERAKAMKAVCDKYSVPFIVNDRCDIAVACDADGVHLGQSDMTCVEARQILGPNKWIGVSCREESLARAAKADGADYVGCGACFGTDSKGDAKVIGVDGVARVAAVARELSLPIVGIGGISPE

SEQ ID NO: 120348 - protein, 289 aa, Unknown
  Bacterial polypetide isolated from the Sargasso Sea
RDTMVTRAEELGEWGCEWVLLKGGHVDDDEATSVDYLYHSKTKTTIPYSGERIPTTNTHGTGCTLASSIAASLAQGYDVPTAVQRAKAYISEAIRTNPRYGAGHGPLNHLPFYSATAATGKRFDASVLRLYLVSSPALTLDKLEDALRAGVTIVQMRDKDASTRELVERAKAMKAVCDKYSVPFIVNDRCDIAVACDADGVHLGQSDMTCVEARQILGPNKWIGVSCREESLARAAKADGADYVGCGACFGTDSKGDAKVIGVDGVARVAAVARELSLPIVGIGGISPE

SEQ ID NO: 120349 - protein, 284 aa, Unknown
  Bacterial polypetide isolated from the Sargasso Sea
MRRGWLAAYLSELNRYANTTSKKTVTSVFFGGGTPSLMGSQTLGEIITVIKDLWNLWENAEVTLEANPSSVEKNKFIEFQKNGVTRLSLGVQSLDEDSLLFLGRKHSASEAREAAVLASEVFERFSLDVIYGLPGQSLHKWKRELAEILKLVTTHISAYQLTIEPGTQFSRDKVETSGEAVERKLFDYTCDFFEKENLTAYEVSNFAKPGHECLHNCTYWTGDDYIGVGPGSHGRLTKPDIDSLEIQTYATLGIKSPKKWLENVEEKGSGDLRSTKLKLSERID

SEQ ID NO: 120350 - protein, 149 aa, Unknown
  Bacterial polypetide isolated from the Sargasso Sea
MKENKLEVIIGACVLAVALGFVIFLYQKTGFSVSNSRHYELKADFRSADGIHVGTDVRLAGVKVGTVSNLDLNLQTYRAEAAFAIENKIDIPDDSALTVSSEGLLGGNFIEIIPGASFEYMQPGDEFLDTQGSVSLISLLLKFVSGSDN

SEQ ID NO: 120351 - protein, 208 aa, Unknown
  Bacterial polypetide isolated from the Sargasso Sea
MTKIYLISPEDFALDDFNARLENLLQKFDIDIFQLRIKNKSHSEVRQYAKKLLDSCNKYGCKFIINDYADIALEIGAHGVHVGQDDIDISQIRSRAQNKDFIIGVSCYDSIDIATDYTKKGASYVSFGTFFPSNTKNSHGKPDITIIPKMRKCYDVPIVAIGGIDSDNCGQLVKNKVDYLAIISYIWNNPLGEEKAMQNLLNKLNSID

SEQ ID NO: 120352 - protein, 206 aa, Unknown
  Bacterial polypetide isolated from the Sargasso Sea
MKKNRLNKKFVYLISPNKIKENLFYYDLEEVLKTGKVKYFQMRFKKKNLKRKIFIGKKIKKICKKYNVNFLVNDDPWLARRLESDGCHLGQKDMNIIEARKILKNKIIGITCHNSINLINKAIKNKASYIALGAFFSSSTKKVKFKASVDLLNYAKNITNIPIVAIGGIKFSNYKKLLLNNANFLAISGYIWNNKKYKPVDAIKKL

SEQ ID NO: 120353 - protein, 242 aa, Unknown
  Bacterial polypetide isolated from the Sargasso Sea
HNTKLSKIASEIRYEIYTLEIDLLNFNTRKQAELIISENNLYCVTDQNKNLLEIIEKILSGGVKIIQYRFKEGNDIDHLKEATEIKQLCKKYKSLFIVNDRIDIALASNADGVHLGQDDMDIINARKLLGSSKIIGITANNSNDITNAIKNGCDYIGIGPVFKSPTKKNKKPLGIEKIKSLTKDLDLPWFAIGGINKNNISSLISKGIKKVAVISGLLDSQDPREEAIIILKELSYENHSKR

SEQ ID NO: 120354 - protein, 225 aa, Unknown
  Bacterial polypetide isolated from the Sargasso Sea
MSARRTDSAGDDYRCRLYLISPPNLGGDRLTNFAAALESALGAGDVACLQLRLKDVDEAPVDDDEIRRAVRALMPVTREHDVAFILNDRPDLSTELGCDGVHVGQDDASYAQARAILGDDAIVGVTCHDSRHLALEAAEAGADYVAFGAFFETGTKSPKSRAGMDVLTWWSDFTEVPCVAIGGISADNCRPLIAAGADFLAVSAGVWAHPNGPAAAVCAFNAAFS

SEQ ID NO: 120355 - protein, 198 aa, Unknown
  Bacterial polypetide isolated from the Sargasso Sea
EVRRLVKAAIAGGDISALQVRIKPEGVVDTAATRKVAQAVQSLCQVNQIALIINDSPQLCRALNADGVHLGMDDMDIGQAREIVGDDAIIGATCKNSRHQAMVAGESGADYVAFGAFYSTDTKADTIRAEPDVLTWSQMFLTLPCVAIGGITTETAKDLVLAGADFLAVSSGVWNHPDGPAAAVDMFNRAIDQAMAEN

SEQ ID NO: 120356 - protein, 351 aa, Unknown
  Bacterial polypetide isolated from the Sargasso Sea
MLNSNPKDAEDLRIYQIIDANLDRAREGLRVLEDWARFGLGKEKYVEKIKNFRQILGKNHLEVYKQSRNHIEDKCKGLTHREQINRKTSEQIISSNSARVQEALRVIEEFSRLQNHELSKIASEIRYEIYTIEIDLLSNSKFKKSEEILKENDLYVITDQKDNLLEIIEEILIAGVRIIQHRFKTGTDQDHLQEAIQIKNLCKRYNSLFIVNDRLDIALASNADGIHLGQDDLDSKTARKLLGYSKIIGISANNEVDISNALRDGCDYIGIGPIFETATKKNKKPIGIENIKTLTKDLNIPWFAIGGIKSNNISYLKRNGFKKVALVSELMNSEDPKEDAMMILKKLSHEN

SEQ ID NO: 120357 - protein, 293 aa, Unknown
  Bacterial polypetide isolated from the Sargasso Sea
HHDSYKQARSTSTDTGAGLEHPAQLDRHSPDHVVAANCARVQEALRVLEEYGRTIDPALAAEAAAIRYGLYDLEVTCLNATLGARRRNKLKDARLCLITTPCDDLSDRVEAALRNGVGMVQYRCKAGNDRERLREAQQLRQLCNRFGALLFINDRVDLALAVDADGVHLGQDDMPSEVARDLLGVDRLLGRSTHSIDQVHQAQQEPIDYLGFGPIHCTAVKPERKPVGVELLAQATAISQRPVFAIGGITSANLPALLTAGGQRAAVIGAIMHADDSGLASRQLLQQLDHATF

SEQ ID NO: 120358 - protein, 139 aa, Unknown
  Bacterial polypetide isolated from the Sargasso Sea
MSKNKSLTKLYLISPSEIIVNEFEKSLELVLKTGLVSCFQLRLKNIEDDFIISASKKLIPICKKYNVPFILNDRLDLANKMNADGVHLGESDGSILEARKLLGTKAIIGASCYNSKHLAMEAAEKGADYVAFGAFLKLL

SEQ ID NO: 120359 - protein, 200 aa, Unknown
  Bacterial polypetide isolated from the Sargasso Sea
MKKLVYLISPNKIDKNFFASLDKVLSFKNVKFFQLRLKNLSQKKLLYFSKRIIKITTKHKVKFIINDNFILAAKISADGCHMGQHDGSFLKARKKLKNKIFGITCHNSKKLAINAIKNNASYIAFGSFFKSKLKQNAIKANLNILRWAKKNIKKPIVAIGGINNKNYKKLIRAGAKYIAISSFIWDNPKLKPELAIRKFK

SEQ ID NO: 120360 - protein, 200 aa, Unknown
  Bacterial polypetide isolated from the Sargasso Sea
MKKLVYLISPNKIHNDFYDNLKKVLSKKNVNFFQLRLKKVKKNKIIKIAKKVRKITKKYKVKLIINDNINTAKIVKADGCHLGQKDGSVIEAKKYLKNKIIGITCHNSKLLAKIAVQNKADYLAFGSFSKSKLKPNAKKANLNILKWAKKNIKKPIVAIGGIDNLNYKKFIKSGAKYIAISSYIWDNPKLKPEIAIRKFK

SEQ ID NO: 120361 - protein, 209 aa, Unknown
  Bacterial polypetide isolated from the Sargasso Sea
MPKSGGIYVISDYRNRKTDEFLEITEKILNAGISLFQFRDKNSKYATKRMLAKKLQALCKKYKTPFIINDDVELAKEISADGVHLGKYDMKIKEAKEILGKKIIGASCYNNLEFAISAEKSGASYIAFGSFFNSQTKPYTNSVGVELLIKSKLKLKIPIVAIGGITPENGKQLIKNNADFLAVISGIYGSSNVENNVLAYKKLFCPSLK

SEQ ID NO: 120362 - protein, 523 aa, Unknown
  Bacterial polypetide isolated from the Sargasso Sea
MSPVTDSRPVVWTIAGSDSGGGAGIQADLHTLHDLGVHGCSVISAITAQNSVAVKMVDPVLMQTFTAQIDALGVDLPPAAIKIGLLPTRLHVEVLARRLAATPAPFVVYDPVAIASSGTPMAEPNMLAAVREQLLPRLSLITPNGPELEALTGWPVSSPELVRLAARRLRELGARAVLVKGGHLEWGGELCLDYYQDETREFWLAAPRLDTRHGHGTGCCYASAIAAVVAQDYPVEDAITLARAYLQQGLAAAQGVGAGPGPIAHLGWPADLAHFPRAVLAGSTLDRRFGLYETSSARLPQGPFAPTEHNLGLYPVVDSVKWLRRLLGQGVKTIQLRIKNLPAAQVAPAIRDAVALGRRHGARLFINDYWQQAIEAGAWGVHLGQEDMETADLAAIQAAGLRLGISTHGYFELMRARELAPSYIALGHIFPTNTKVMPSRPQGLVRLHRYRALMTEWPTVAIGGISEERMAAVKASGVGSIALVSAITASDDWQGATERLLAAVGAGDEPRSATVIREAEHAL

SEQ ID NO: 120363 - protein, 207 aa, Unknown
  Bacterial polypetide isolated from the Sargasso Sea
MRQNRKNKRFVYLISPNKIQNEKFYSKLNQVLSSKKVSFFQLRLKKESFKNKIYIGRKIKKICKKYKVKFIINDDPIIAKIVNADGCHLGQKDMNISRAKKILKNKIIGVTCHNSINLAKKAISNDASYLAFGAFFSSKTKKTKYKASLKILTLAKKLTNIPIVAIGGIKDSNYKKLLLNKANFLAISSYIWNNKKLNPKEAIKKLK

SEQ ID NO: 120364 - protein, 149 aa, Unknown
  Bacterial polypetide isolated from the Sargasso Sea
MKENKLEVIIGAVVLVVAIGFVIFLYQSTGLSVSNSRHYELKADFRSADGIHVGTDVRLAGVKVGTVSDLSLNVETYRAEAELAIENKVDIPDDSALTVSSEGLLGGNFIEIIPGASYEYMQPGDEFLDTQGSVSLISLLLKFVSGSDN

SEQ ID NO: 120365 - protein, 177 aa, Unknown
  Bacterial polypetide isolated from the Sargasso Sea
MRDKNATTAQMIQHAKALQPILATHHVPLIINDDVEAAIACGADGIHVGQDDLDVVQVRQKVGRDKIVGLSIETAEAARIVDAGIVDYIGISPIFATQTKSDHKPPVGFDGLLDIVASSPVPSVAIGGLNANHCKKVFAAGAAGIAVVSAICGKNDPFKATVAIRQQIDLVKEKGWK

SEQ ID NO: 120366 - protein, 302 aa, Unknown
  Bacterial polypetide isolated from the Sargasso Sea
MGCESSLDPRVARLIDANLDRAREGLRVVEDWCRFGLERDDLVISLKDWRQRLGKLHREHYKQARSTATDPAAGLDHPAQLDRHSPRQVVEANCGRVQEALRVLEEYARSVDAPLAAEAAAIRYGVYDLEVTCLKATGGNSRRNRLQDCQLCLITAPCPDLIERVTAALRSGVAMVQHRCKSGSDLERLAEAKALAALCQDHGALLIINDRIDLALAVDADGVHLGQDDLPTEVARGLIGPDRLLGRSTHELDQVAEANREDCDYLGLGPVNTTAVKPERPAIGAELVGQALAITQKPGCHR

SEQ ID NO: 120367 - protein, 349 aa, Unknown
  Bacterial polypetide isolated from the Sargasso Sea
MGCESSLDPRVARLIDANLDRAREGLRVVEDWCRFGLERDDLVISLKDWRQRLGKLHQERYKRARSTVTDPGAGLEHPAQLDRHSPRQVVEANCGRVQEALRVLEEYGRNVDAPLAAEAAAIRYGLYDLEVTCLTATSGNNRRNRLQDCQLCLITSPCPDLVDRVTAALRSGVAMVQHRCKSGSDLERLAEARTLAALCRDHGALLIINDRIDLALAVDADGVHLGQDDLPTDVARGLIGPGRLLGRSTHSLNQVAEAHREDCDYLGLGPVNNTAVKPERPAIGAALVGEALAITPKPVFAIGGITQANLDALVAVGCRRVAVIGAIMGSDNPEKASQNLLSSLSRPTL

SEQ ID NO: 120368 - protein, 159 aa, Unknown
  Bacterial polypetide isolated from the Sargasso Sea
MAAIELGRRYDARLFINDYWRLAIKHNAYGVHLGQEDLETTDLKAIQAAGLRLGVSTHDDMEIDVALAAKPSYIALGHVFPTQTKQMPSSPQGLTQLASHINRLADYPTVAIGGISLERAPSVLATGVGSIAVVSAITQAADWQAATAQLLDIAGVGDE

SEQ ID NO: 120369 - protein, 211 aa, Unknown
  Bacterial polypetide isolated from the Sargasso Sea
MYQPDFPTVPFRLGLYPVVDSVAWIARLLDAGVRTLQLRIKDKRDEEVEADVVAAIELGRNANARLFINDYWRLAIKHRAYGVHLGQEDLETTDLKAIQAAGLRLGVSTHDDMEIDVALATRPSYIALGHVFPTQTKQMPSAPQGLEQLARHIDRLHDYPTVAIGGISLDRAPAVLATGVGSIAVVSAITQAADWRAATAQLLAIAGAGDE

SEQ ID NO: 120370 - protein, 53 aa, Unknown
  Bacterial polypetide isolated from the Sargasso Sea
MNPLKHVAIIMDGNGRWGLKNKNSRNAGHKAGLNSVEKIIKATIKNDIKFLTL

SEQ ID NO: 120371 - protein, 100 aa, Unknown
  Bacterial polypetide isolated from the Sargasso Sea
IIVNLAINYGSKNEILNAIKKIRNKPNLKKIENNLYTQKMPDPDILIRTGGQQRLSNFMLWQLAYAELFFLNKLWPDFNVTDLRKVINKFKKRKRNFGAI

SEQ ID NO: 120372 - protein, 49 aa, Unknown
  Bacterial polypetide isolated from the Sargasso Sea
MNPLNHVAIIMDGNGRWGVKNRSSRNAGHKAGLNTVEKIIKESLKQKIK

SEQ ID NO: 120373 - protein, 164 aa, Unknown
  Bacterial polypetide isolated from the Sargasso Sea
MNKLNHVAFIMDGNGRWGKKKKRGRNYGHLQGVKTVEKVVQSSLRLKIPIITFYVFSTENWKRPKTEVNFLFNLIGSYFKKEIKNVVKNGIKINILGSISSFSPPLKKILKDTIKKTEKNKKLIVNLALNYGSKNEIKNALLKLKEKRSSISESKISKHLLQAN

SEQ ID NO: 120374 - protein, 87 aa, Unknown
  Bacterial polypetide isolated from the Sargasso Sea
AFTKLNKNSIDQLDEEKFRASLLLPEMPDPDLLIRTAGEKRVSNFLLYQLSYTELMFTDTLWPDFDEKELDSAVQEFQNRVRKYGNA

SEQ ID NO: 120375 - protein, 122 aa, Unknown
  Bacterial polypetide isolated from the Sargasso Sea
MSLKHVAIIMDGNGRWGLKKKKSRNFGHKQGIKTVEKILNAAIKKKIKFLTLYTFSIDNWKRPIEEINYLFKLLNVYIDKELKNINDQGIKIKIIGNINKFPTNLKKKLFRSEKITNKNKKI

SEQ ID NO: 120376 - protein, 185 aa, Unknown
  Bacterial polypetide isolated from the Sargasso Sea
MSLSINLSNLTIFALSSENFNRSSVDIIYDIIYQNFSTILENLVNDREIKINIFGSKENLPKKVLDIFQNIEKNSSNNKNLNLNIGFNYGFKDEIKNILIKLKNENININLNNQSEINNLFYIGSIPDPDLLIRTGGYQRLSNFIMYNLTYTELFFTKTLWPEFTETEFKSIINKYFLIKRKYGL

SEQ ID NO: 120377 - protein, 89 aa, Unknown
  Bacterial polypetide isolated from the Sargasso Sea
MPLDSYLQKQLPSHVAFIMDGNRRWAKKKRLQIIDGHKKGSEVVKNIVKKSLELKIKYLTFFSFSTGNWNRSKNEIVNLQTLLNFYLDS

SEQ ID NO: 120378 - protein, 84 aa, Unknown
  Bacterial polypetide isolated from the Sargasso Sea
MTVESFKDYLSFKDLPELDLIIRTSGETRLSNFMLWQSAYSEIHFTETLWPNFEEQEFLEILQSYSQSERRFGNVDEDIELKEA

SEQ ID NO: 120379 - protein, 53 aa, Unknown
  Bacterial polypetide isolated from the Sargasso Sea
MNFPEHVAIIMDGNGRWGIKKKKSRNYGHSQGVKTVEKIIEEATNNNIKFLTL

SEQ ID NO: 120380 - protein, 156 aa, Unknown
  Bacterial polypetide isolated from the Sargasso Sea
MAKWLLKFRVVSAPARLISNSRIAWSLVSRLDRIRTRRQRDRITKASLPEHVSIIMDGNRRFAWNMSLETEIGHRHGKEKLKNVMEWVLDLGVPYLTVYALSTENLSSRDPEELNALYDLYVTGLNEISEDPKIHSRNVKVRVAGKLDLLPKRVRE

SEQ ID NO: 120381 - protein, 37 aa, Unknown
  Bacterial polypetide isolated from the Sargasso Sea
MSYLDKIDLKALPQHVGIIMDGNGRWALERHLPRIHG

SEQ ID NO: 120382 - protein, 108 aa, Unknown
  Bacterial polypetide isolated from the Sargasso Sea
MNKLQHIAFIMDGNGRWGIKKKKSRNYGHLKGLETVKKVVNYSIQLKIPIITFYVFSSENWKRPRAEINFLFKLIDQYFSKEIYNVIKQEIKLNFFGELNQLPLNVKK

SEQ ID NO: 120383 - protein, 127 aa, Unknown
  Bacterial polypetide isolated from the Sargasso Sea
LGETNKLSKDIKQILKKTTNLTKKNKKISVNLAINYGSKKELIRAFKKTKKSFNIKNFESNLFTKNMPNPDILIRTGGHQRLSNFMLWQLAYTELFFLKKLWPDFKKQDLIKIIAKYKKCKRNFGGV

SEQ ID NO: 120384 - protein, 222 aa, Unknown
  Bacterial polypetide isolated from the Sargasso Sea
YNQIQHIAIIMDGNKRWAEINHKKLSEGYTAGLNNLKKILEECIKYKICNLTVYALSSENIKRKNSIIIFNIIRKIYKDLFLEFKSKKVNLNIVGEKEGIPEDVTDIFNNYINKVKDPLINLNVAFNYGSQYEIKNIVENMLIKRSGDNFLKEIKNNMYLGDIPDPEILIRTGGFQRLSNFMLLNLSYTELFFTKTLWPDFSIDELHKIFEKFSKIKRNYGL

SEQ ID NO: 120385 - protein, 121 aa, Unknown
  Bacterial polypetide isolated from the Sargasso Sea
MNKIKHLAIIMDGNQRWAKKNNKTKLDGYKKGLKKLEEFIEFSILNNIPILTIYALSQENYKRKSVNLIFQLIENFYKKFLDRLIKDKQVQVKIIGEKDTLSPKYKNIFIEIEKATINLKN

SEQ ID NO: 120386 - protein, 37 aa, Unknown
  Bacterial polypetide isolated from the Sargasso Sea
MIRPKHVAIIMDGNGRWGLKKNKTRNHGHLQGIKTVK

SEQ ID NO: 120387 - protein, 223 aa, Unknown
  Bacterial polypetide isolated from the Sargasso Sea
MRNTIKHIAIIMDGNKRWAKKNQKKTYDGYVTGLNNLKTLTEECIRMNISYLTVFALSSENIHRNNSVIIFNIIRKVFKNLISDLYSKKINLNIIGEKEGIPEDILQIFEKKINKVQNPAINLNVAFNYGTQYELKKIVNSIILSKSKNNLLDKIRSNMYLGSIPDPEILIRTGGFQRLSNFMLLNLSYTELFFTKTLWPDFSIKEFNEIIKKFSNIQRNYGL

SEQ ID NO: 120388 - protein, 63 aa, Unknown
  Bacterial polypetide isolated from the Sargasso Sea
MCFDSNLKKQLPNHVAFIMDGNRRWAKKKKLKIIEGHKKGSEIVKKIVKKSLEFNIKYLTFFS

SEQ ID NO: 120389 - protein, 69 aa, Unknown
  Bacterial polypetide isolated from the Sargasso Sea
KKNLFTKNIPHPDILIRTGGQCRLSNFMLWQLAYSELFFLRKLWPDFTSNDLIRIIKKYKKIKRNFGAI

SEQ ID NO: 120390 - protein, 36 aa, Unknown
  Bacterial polypetide isolated from the Sargasso Sea
MNSIKHVAIIMDGNGRWGIKHKKSRNLGHKEGIKGC

SEQ ID NO: 120391 - protein, 53 aa, Unknown
  Bacterial polypetide isolated from the Sargasso Sea
MNSPKHVAIIMDGNGRWGIKKKKSRNFGHTAGVKTVEKIIEEAVKNKIKFLTL

SEQ ID NO: 120392 - protein, 64 aa, Unknown
  Bacterial polypetide isolated from the Sargasso Sea
IIRTSGETRLSNFMLWQSAYSEIHFTETLWPNFEEQEFLEILQSYSQSERRFGNVDEDIELKEA

SEQ ID NO: 120393 - protein, 60 aa, Unknown
  Bacterial polypetide isolated from the Sargasso Sea
MNSPKHVAIIMDGNGRWGIKKFKSRNLGHREGVKVVEKIIKASVKKKIKFLTLYTFFTEK

SEQ ID NO: 120394 - protein, 174 aa, Unknown
  Bacterial polypetide isolated from the Sargasso Sea
MNKLNHIAFIMDGNGRWGKKNNKGRNYGHLKGVETVKKIVKSSIKLKIPILTFYVFSSENWKRPKKEINFLFNLINNYFTKEINNVIKQGIKLNILGEINKLSSNLKKTLKKSTDLTKKNKKIIVNLAINYGSKNEILLAFKRTKKILNIINFEKNLYTKRLPHPDILIRTGGH

SEQ ID NO: 120395 - protein, 109 aa, Unknown
  Bacterial polypetide isolated from the Sargasso Sea
MNEPKHVAIIMDGNGRWGLKKKNSRNLGHKKGIIRVEEVINQSIKKKIKFLTLYTFSSDNWKRPKIEIKFLLNLLENYIDKEFNNLKNKNIKIKVLGDISKFSSGLKTK

SEQ ID NO: 120396 - protein, 94 aa, Unknown
  Bacterial polypetide isolated from the Sargasso Sea
MAISLSNNHNHPKKIGIIMDGNGRWAKLNKLKINKGHEKGVGVVRDIVKECIAQNIQSLTIYAFSAENWSRPQSEVNGIKKLIVKAIHEQVPEL

SEQ ID NO: 120397 - protein, 177 aa, Unknown
  Bacterial polypetide isolated from the Sargasso Sea
MQTRVMSDKLPEHISIIMDGNRRYASDSGLAATLGHRAGKEKLEDVMDWVLEIGVPYLTVYALSTENISSRKPDELEALFNLYVEGLNDLAIDERIHKNHVKVRVVGRMDLLPQNVLEAIENTEKVTADYDKFVFTVCLAYGSREEIIEAVREIAKEHAKGNLELDAIDEKEISNRL

SEQ ID NO: 120398 - protein, 61 aa, Unknown
  Bacterial polypetide isolated from the Sargasso Sea
MILPKHVAIIMDGNGRWGIQKKKSRNYGHLKGIEVVEISSKKQYQKKLNTLRYLLFLLKIG

SEQ ID NO: 120399 - protein, 53 aa, Unknown
  Bacterial polypetide isolated from the Sargasso Sea
MNPLNHVAIIMDGNGRWGLKHKNSRNAGHKAGLITVEKVIKETIRNNIRFLTL

SEQ ID NO: 120400 - protein, 53 aa, Unknown
  Bacterial polypetide isolated from the Sargasso Sea
MNSIKHVAIIMDGNGRWGEKKNKSRNIGHKAGLKSAEKIILRTIKHKINYLTL

SEQ ID NO: 120401 - protein, 91 aa, Unknown
  Bacterial polypetide isolated from the Sargasso Sea
MTSFLPSVDMLIRTGKEKRISNFLIWDCAYAELYFSDSYWPDFGVNELHEAIKDWNSRVRRFGGSVNVKTMEISEKADALIQERKKTVNER

SEQ ID NO: 120402 - protein, 63 aa, Unknown
  Bacterial polypetide isolated from the Sargasso Sea
LSDQPDPDLLIRTGGYQRLSNFYLIYLSYCELFFTKTLWPDLKISEVKKIISKYKKTLRKYGL

SEQ ID NO: 120403 - protein, 41 aa, Unknown
  Bacterial polypetide isolated from the Sargasso Sea
MNRLTHVAIIMDGNGRWGLKKKKSRNYGHLKGIKAVETVLK

SEQ ID NO: 120404 - protein, 44 aa, Unknown
  Bacterial polypetide isolated from the Sargasso Sea
NFLLWQLAYSEIFFEKKLWPEFNEKDYNRIIKEYKKIKRNFGTI

SEQ ID NO: 120405 - protein, 62 aa, Unknown
  Bacterial polypetide isolated from the Sargasso Sea
IRDGNGRWATRKGLPRSFGHKQGVSVLKKILKAAKNLGCKVITVYAFSTENWTRPSKEVDFL

SEQ ID NO: 120406 - protein, 86 aa, Unknown
  Bacterial polypetide isolated from the Sargasso Sea
NALQKTKNKKKISVNILKRNLYTNHLPDPDILIRTGGHKRLSNFMLWQLAYAEIYFLNKLWPDFNDKDLKRVINDFKKIKRNFGSI

SEQ ID NO: 120407 - protein, 51 aa, Unknown
  Bacterial polypetide isolated from the Sargasso Sea
MNITSPAGKDTNTPRHVAIIMDGNNRWARKRLMPGVAGHKAGVDAVKARSR

SEQ ID NO: 120408 - protein, 130 aa, Unknown
  Bacterial polypetide isolated from the Sargasso Sea
MAVIMDGNSRWAEKENVSRSEGHRAGAEAVRRLLKNCKNYGVDILTLFVFSSENWHRPQKEVRGLLALLVRYLRNDVSKLNDERVSIRFIGSRYRLSPRIRRLFSKVEAVTAENKGARLILAVDYGGKWD

SEQ ID NO: 120409 - protein, 50 aa, Unknown
  Bacterial polypetide isolated from the Sargasso Sea
YAELYFTDVLWPDFTTADLSMAIKDYYSRDRRYGGDPAGVAGDIEAGKRA

SEQ ID NO: 120410 - protein, 144 aa, Unknown
  Bacterial polypetide isolated from the Sargasso Sea
MQTRVMSDKLPEHISIIMDGNRRYASDSGLAATLGHRAGKEKLEDVMDWVLEIGVPYLTVYALSTENISSRKPDELKALFNLYVEGLNDLAIDERIHKNHVKVRVVGRMDLLPQNVLEAIENTEKVTADYDKFVFTVCLAYGKS

SEQ ID NO: 120411 - protein, 55 aa, Unknown
  Bacterial polypetide isolated from the Sargasso Sea
MRRVLRNFLSPVYKLYEKRLERQIRKNKVPEHLAVIMDGNRRYAETLGILPHEGH

SEQ ID NO: 120412 - protein, 407 aa, Unknown
  Bacterial polypetide isolated from the Sargasso Sea
ENFMRDLEQSPLEAFKITQTDMSAFELGENLATTEGKVVYQNDLMQLIHYTPKKAKTYAPPVLFVPPFINKYYILDLDEKKSAVKGLLENGFSVFMISWVNPDKSLADHDFVSYMKHGPLAALDVVCEITKQPKVNMTGFCVGGTLSAVTAAYLRAQGDERIQSLTLLTTLTDFSEPGEIGNYLTEESLNAMEQNADIKGVYDGRILGLSFSLLRENNLFWSYFINNYLKGEDPAAFDILFWNSDATNITAACFKQYVRTMYWENKLREPGGIVIDGVPIDLGNIDVPVYFLATIADHIVLWQAAYKGTQLVGGDTRFVLAGSGHLAGVINPPAKGKYPHWINEDLPADAAAWFDGATQHEGSWWPDWYNWLQSHNDKQVTSPKPGKHKSYPIIEDAPGSYVKRRLG

SEQ ID NO: 120413 - protein, 97 aa, Unknown
  Bacterial polypetide isolated from the Sargasso Sea
MSEITNLPDHVAIILDGNRRWARGKELQDEDGHRKGIETLVLIATAAANFNIKYLTLFSFSKENWKRDPSEISNLMDLMEKLESEYLDEIILNNIRL

SEQ ID NO: 120414 - protein, 154 aa, Unknown
  Bacterial polypetide isolated from the Sargasso Sea
ISFLFKLIDKYFSKEINNVLNKGIRLNIFGDLKKFPPKLKKTLKNSIKLTKKNRKIIVNLAINYGSKNEIINSLKKTKKITLENFEKNLYTKNMPNPDILIRTGGHQRLSNFMLWQLAYAELFFLKKLWPDFNKRDLLKIINKYKKSTRNFGAI

SEQ ID NO: 120415 - protein, 55 aa, Unknown
  Bacterial polypetide isolated from the Sargasso Sea
MKNPLPQHIAIIMDGNRTWAKDNGISTIKGHDKGLDVAKEICIYCNHIGVKNLTL

SEQ ID NO: 120416 - protein, 434 aa, Unknown
  Bacterial polypetide isolated from the Sargasso Sea
MNRRSFLKSLLFLFASLSLKIFPTEKTKTIAFNYGVASGDPTNTNVILWTKISGGDLKDKKIKWEVSNQKSFQKILVSGNAKAKFDDNFTVKVDAQIPSNFNGKTIYYRFSFQGIVSDIGTTKTLPINNPNKFNIAFCSCSNYPAGYFNAYKEMANDEEVDLVLHLGDYLYEYSREGYASSDAKKMGRVVNPPNEIISLDDYRKRYATYRSDTDLQLLHQSKPMIAVWDDHEITNDTWKKGAQNHSPDEGSFNKRKNNAIKAYYEWMPIRDTNKKEKIWRKFKVGNLINLVMLDTRLYGRDKQLEISSYIKDEVFDKVQYKKDLNKPRNLLGREQLNWVNKSVSKDFKWSIFGQQLLIGPKYLPNIFKSEKLAGSRSYLTKQLAGEKLATNTDQWDGYPKEREKFYQSIMNSQSNIILAGDSHNSWFSNLYDKN

SEQ ID NO: 120417 - protein, 55 aa, Unknown
  Bacterial polypetide isolated from the Sargasso Sea
MNSPKHVAIIMDGNGRWGLKNKKSRNLGHRAGLKTVEKIIKASIRNNIKYLTLYA

SEQ ID NO: 120418 - protein, 134 aa, Unknown
  Bacterial polypetide isolated from the Sargasso Sea
RKLEQMESITSENSGLKLTLAIAYGGQQEIINGIKKLIDDHDNQIIDVNDLTVELFNEYLSFNDLPELDLIIRTSGETRLSNFMLWQSAYSEIHFTETLWPNFEEQEFLEILQTYSLSERRFGNVDEDTELKEA

SEQ ID NO: 120419 - protein, 62 aa, Unknown
  Bacterial polypetide isolated from the Sargasso Sea
FLIWQAAYAELYFTEVLWPDFNKEELYKAILEYQNRKRRMGGTTSSDFISKSKKQVLRIVSD

SEQ ID NO: 120420 - protein, 84 aa, Unknown
  Bacterial polypetide isolated from the Sargasso Sea
LDEKLISHYLDTKQQDDPDLIIRTAGEKRLSNFLIWQSTYSELFFSKKMWPEFSINDFKIALNDYYQRNRKFGEVTHSKKQLFS

SEQ ID NO: 120421 - protein, 94 aa, Unknown
  Bacterial polypetide isolated from the Sargasso Sea
MAISLSNNNNHPKKVGIIMDGNGRWAKFNKLKINKGHEKGVGVVRDVVKECIAQNIESLTIYAFSSENWSRPQNEINGIKKLIVRAIDDSSPRA

SEQ ID NO: 120422 - protein, 61 aa, Unknown
  Bacterial polypetide isolated from the Sargasso Sea
IPDPELLIRTGNTKRLSNFLLWQLAYAEIFFIKKLWPDFNEKDFSNILRKYKSIKRNFGNI

SEQ ID NO: 120423 - protein, 71 aa, Unknown
  Bacterial polypetide isolated from the Sargasso Sea
ITDNLYTKSIPDPEILIRTGDRNRLSNFLLWQLSYTEIYFVKKLWPDFNKKDFSNIISKFSLVRRNFGGIK

SEQ ID NO: 120424 - protein, 176 aa, Unknown
  Bacterial polypetide isolated from the Sargasso Sea
NLDRKNDELDYLYDLIYKRLEKLYNDPRIHKNKMRVKAIGTIELLPESIKEVLGRLDKVTKNYDKHFLNIAIAYGGQNELVDAVKKIGMKIKNGELDAKEINKEVIESNLYTSHLPQSSPDMILRTSGEKRMSGFLLWQSAYSELVFLDIFWPEFRKIDLMRAIRTFQKRKRRIGK

SEQ ID NO: 120425 - protein, 221 aa, Unknown
  Bacterial polypetide isolated from the Sargasso Sea
MNNLNHVAFIMDGNGRWGKKKNKGRNFGHLKGVETVKKIVKSSINLKIPIVTFYVFSSENWKRPKSEISFLFKLINNYFTQEIEKVISQGIKINIIGEISKLGTDIKKNLNRSMFLTRKNKKIIVNLAINYGSKNEIINAFKKTKKISLKNFEKNLYTKNIPNPEILIRTGGHQRLSNFMLWQLAYAELFFLKKLWPEFSSNDLKKIVSKYKKSKRNFGAI

SEQ ID NO: 120426 - protein, 209 aa, Unknown
  Bacterial polypetide isolated from the Sargasso Sea
RWARQNNFTISHWGHRKGVETLVEITKEAKKKKVKKLIVYAFSSENWSREKFEVNSLMNLISFGTEVKLDEIIKNEVRMEFIGNLDSIPKKAKEEVDRCVRSTKNFSDFTLVIALNYGGVWDIVNALKKISKKGETINAKNFLKFTELKGEEVEIFIRTGGEKRVSNFLLPNIGYSELFFSDKLWPDFNAQDFNAVLDDFKTRQRRFGK

SEQ ID NO: 120427 - protein, 140 aa, Unknown
  Bacterial polypetide isolated from the Sargasso Sea
KAIGTIELLPESIKEVLGRLDEVTKNYDKHFLNIAIAYGGQNELVDAVKKIGMKIKNGELDAKEINKEVIESNLYTSHLPQSSPDMILRTSGEKRMSGFLLWQSAYSELVFLDIFWPEFRKIDLMRAIRTFQKRKRRIGK

SEQ ID NO: 120428 - protein, 52 aa, Unknown
  Bacterial polypetide isolated from the Sargasso Sea
TGNTNRLSNFLLWQISYSEIFFSKKLWPDFNSKDYLDIIFKYQKIKRNFGKI

SEQ ID NO: 120429 - protein, 155 aa, Unknown
  Bacterial polypetide isolated from the Sargasso Sea
MANTSKTNSPKNVGIIMDGNGRWAIKNSLKISEGHKKGVSIVKDIVEESVKQDLSSLTIYAFSSENWKRPKTEVTAIKKLVVDAINDQVSDLKEQKVRLKFFGHIYDFGKKVIDKISYAEEETYIQNSKLDLNVALGYGGKQDIVDMAKKISSSV

SEQ ID NO: 120430 - protein, 223 aa, Unknown
  Bacterial polypetide isolated from the Sargasso Sea
MNKLNHVAFIMDGNGRWGKKKNNNRNSGHFAGVKTVKKIVEASIKLKIPVVTFFVFSTENWKRPKTEVNFLFNLVNSYFKSELQNVIKNGIKINIMGELNRLPQKLKLVLRETAKKTEKNKKILVNLALNYGSKKEIINTFNKIKSKKITEKIVKNSLYTKNIPDPDILIRTGGKKRLSNFMLWQLAYSELFFLDKLWPDFMPSDLKKILTHFNRTKRNFGGI

SEQ ID NO: 120431 - protein, 93 aa, Unknown
  Bacterial polypetide isolated from the Sargasso Sea
MKSAPSLHETISSPPTHVGIIMDGNGRWAAARGWPRVEGHRRGVETVREVVRGSLQSGIKYLTLYGFSIENWKRPSEEIDFLMGLFRLYLREE

SEQ ID NO: 120432 - protein, 120 aa, Unknown
  Bacterial polypetide isolated from the Sargasso Sea
MTSSQNNHPETIPNQPKHVGIIMDGNGRWAKIRGKRRIFGHEAGVLKARELVETAVKIKLDAMTLYAFSSENWSRPKKEVSGLMSLFEKTIEKYTSLLIDNNVRFKTAGDPSMLPDVLKR

SEQ ID NO: 120433 - protein, 74 aa, Unknown
  Bacterial polypetide isolated from the Sargasso Sea
IDTNEISSRLYDAEIPDPDLVIRTSGEERVSNFLLWQIAYSELYFTDVHWPSFSKAVLYEAIETYQMRRRRFGG

SEQ ID NO: 120434 - protein, 49 aa, Unknown
  Bacterial polypetide isolated from the Sargasso Sea
NRLSNFLLWQSSYSEIYFVSKLWPDFTRNDFNKIIEKFVKVKRNFGGIK

SEQ ID NO: 120435 - protein, 160 aa, Unknown
  Bacterial polypetide isolated from the Sargasso Sea
KLRVIGNRSRFTPRLGRLIEWAEQETAANTGINLTLALDYGGRQEVTSAARKLANEVANGMLDPGDINEDMLKSRMGSAALPDIDLLIRTGGEQRVSNFMLWDISYAELHFTPIFWPDFSTDDLDRALSDFAGRERRFGGNGIVDVNETVNSLADKRRLS

SEQ ID NO: 120436 - protein, 195 aa, Unknown
  Bacterial polypetide isolated from the Sargasso Sea
HRKGVETLVEITKEAKKKKVKKLIVYAFSSENWSREKFEVNSLMNLISFGAEVKLDEIIKNEVRMEFIGDLDSIPKKAKEEVDRCIKSTKNFSDFTLVIALNYGGVWDIVNALKKISEKGETINTKNFLKFTELKGEEVEIFIRTGGEKRVSNFLLPNIGYSEFFFSDKLWPDFSAEDFNAVLNDFKTRQRRFGK

SEQ ID NO: 120437 - protein, 107 aa, Unknown
  Bacterial polypetide isolated from the Sargasso Sea
MNKVNHIAIIMDGNGRWGKKRGKSRNFGHLNGIKVIEKIVKESIKLKIPILTFYTFSTENWKRPKKEISFLFKLIDHYFKKEIYNLIKNNIRINIIGNINVLPHKVK

SEQ ID NO: 120438 - protein, 186 aa, Unknown
  Bacterial polypetide isolated from the Sargasso Sea
LPKTGSGPPRKVDGIMELISTFIHSELDNYHRQNMRFQMIGERSGLSAKILKALEVAEERTRNNTGLHVVVAVNYGSRAEIAGAARALARQVAEGKIDPDDIDEAAIGERLDTAGLPDPDLVIRTSGEQRLSNFLLWQTAYSELVFLPCNWPDFSREMFFEALSEYARRNRRFGALSAPQAALTDT

SEQ ID NO: 120439 - protein, 187 aa, Unknown
  Bacterial polypetide isolated from the Sargasso Sea
MSSSQNTHIDKIPNQPKHVGIIMDGNGRWAKLRGKRRIFGHEAGVLRARELVETGVKIELEALTLYAFSSENWSRPKKEVSGLMNLFEKTIEKYTSLLIDNNVRFRTAGDPSMLPKILKRKLEQMESITSENTGLKLTLAIAYGGQQDIINGIKRLIDDHDSQVIDINQMTVESFEDYLSFKDLPEL

SEQ ID NO: 120440 - protein, 67 aa, Unknown
  Bacterial polypetide isolated from the Sargasso Sea
MSRPPATSHDTTPSRLCPAELDSQQLPAHVAVIMDGNGRWAKSRGLPRVMGHRAGVEALKSTLRLCS

SEQ ID NO: 120441 - protein, 95 aa, Unknown
  Bacterial polypetide isolated from the Sargasso Sea
YGSKLELINAFKKITKSKNKINEKNLERYLQTKNIPDPDILIRTGNTKRLSNFLLWQLAYTEIFFEKKLWPAFTEKDFNKIIKEYKNIKRNFGKI

SEQ ID NO: 120442 - protein, 136 aa, Unknown
  Bacterial polypetide isolated from the Sargasso Sea
MSSSQNTHIEKIPNQPKHVGIIMDGNGRWAKLRGKRRIFGHEAGVLKARELVETSVKIELEALTLYAFSSENWSRPKKEVSGLMSLFERTIEKYTSLLIDNNVRFKTAGDPLMLPKILKRKLEQMESITSENTGLK

SEQ ID NO: 120443 - protein, 110 aa, Unknown
  Bacterial polypetide isolated from the Sargasso Sea
KTIKNKKLQINLALNYGSKSEIINSINLLKKNKISFNEKNLEKFLYTSGCPDPDILIRTGNTKRLSNFLLWQMAYSEIYFEKKLWPDFNKNDYNKILNNFRNLKRNFGSI

SEQ ID NO: 120444 - protein, 79 aa, Unknown
  Bacterial polypetide isolated from the Sargasso Sea
KKIKPSYKNIEKNLYTSGMPDPQILIRTGGVNRLSNFLLWQISYTEIYFVKKLWPDFNVKDYNKIIKDFKSVKRNFGKI

SEQ ID NO: 120445 - protein, 203 aa, Unknown
  Bacterial polypetide isolated from the Sargasso Sea
IRSIEGHKKGIETAKFIAKYCGNQNIKELTLYAFSMQNWKRPKVEIKSLLKLFSTLFEDKSHFFIKNNFQFNPIGRIDELNEAVRKKINSLKNKTKSNNGMAINVAINYGGIEEIIDTYKRITLNGEKNIDEKILKKYSYLPESSEVDLIIRTGGYSRISNFLNLHNSYSEIEISNILWPDFGQEDFEKILSKYKKIERNYGK

SEQ ID NO: 120446 - protein, 150 aa, Unknown
  Bacterial polypetide isolated from the Sargasso Sea
MSYLDKIDPKALPQHVGIIMDGNGRWALERNLPRIHGHRSAVNAVRASVEASAELGLNVLTLFAFSTENWQRPEKEVSDLMELFHEFLEKELHTMLENNVRFQLIGDRDKLPSFLQDRLSKALNSTSENSGLLLDIALNYGGRDEISRAV

SEQ ID NO: 120447 - protein, 184 aa, Unknown
  Bacterial polypetide isolated from the Sargasso Sea
IVKSCIKLNVPIITFYVFSSENWKRPKNEINYLFNLIKIYFSKEIKSIINQGIKINILGEINRLPKGIKLILKKTINSTKRNKKIIINLAINYGSKLEIINAIKKTKKNKSIKNLEKNLYTKNLPHPDILIRTGGRQRLSNFMLWQMAYTELFFLKKLWPDFNPSDLIKIIKKYDKIKRNFGGV

SEQ ID NO: 120448 - protein, 176 aa, Unknown
  Bacterial polypetide isolated from the Sargasso Sea
MSSPKHVAIIMDGNGRWGIKKKKSRNYGHNQGVKVVEKIIAEAISNDIKYLTLFTFSTENWKRPKKEISFLMYLLNQYIKKELKNLVKKNIKIKIIGNIRKFPIKLKQRLREAEIQTLSNTKIQINIALNYGSKEEIIKTVKKLNKLSIPINEKNISKNLYTKDTPDPEILIRTGN

SEQ ID NO: 120449 - protein, 159 aa, Unknown
  Bacterial polypetide isolated from the Sargasso Sea
FLMFFNRDILIRRREEFNNKGVKFHFIGDLGDERIPDENKRLMSETEELTKNNTNLNLVFAFNYGSRKEIYDAIAKISKNNSGSINEESFRSNLLLPEMPDPDLLIRTAGEKRVSNFLLYQLSYTELMFVDTLWPDFDENQLDLAVKEFENRVRKYGNA

SEQ ID NO: 120450 - protein, 57 aa, Unknown
  Bacterial polypetide isolated from the Sargasso Sea
PDLIIRTSGEKRVSNFLLWQLAYSELVFSDTLWPDFSEGDFEKALSEFYLRDRRFGS

SEQ ID NO: 120451 - protein, 41 aa, Unknown
  Bacterial polypetide isolated from the Sargasso Sea
MRLKKISTNKESIKLSNEIDIQRIPEHIAIIMDGNGRWATK

SEQ ID NO: 120452 - protein, 68 aa, Unknown
  Bacterial polypetide isolated from the Sargasso Sea
MTAAPLTSDIGAVPPQHIAIIMDGNGRWAQDKGLARSAGHKHGAEAARLAVEGAVEEGIRYLTLFGFS

SEQ ID NO: 120453 - protein, 48 aa, Unknown
  Bacterial polypetide isolated from the Sargasso Sea
MSLEKVIDDKIIDLLIKIDKQKLPKHVAIIMDGNGRWAIRKGLPRSFG

SEQ ID NO: 120454 - protein, 121 aa, Unknown
  Bacterial polypetide isolated from the Sargasso Sea
SRAEIISAFNSHIKERPGEPISEEKLDCLLSNPESGDVDLLIRTGGDVRISNFLLWQCAYAEFYFSPVPWPDFSNREFRRILNEVSDRERRFGGVNLQTSLIQSAEIAKKNKTLLSESLRF

SEQ ID NO: 120455 - protein, 173 aa, Unknown
  Bacterial polypetide isolated from the Sargasso Sea
MIKNSINHLAIIMDGNGRWAKHKNQPRTFGHKHGAQTAKKIINDCVKKEIPFLTLYTFSKENWSRPKEEIDTLMILLSTMLKNETENMLRNNIKFNIVGRIEDLPEKTRDWILTTIDKTKNNTGLTLTLALSYGGRQEIVDAFNSIINKEIKIIKEEILKNHLYCPDCQIQTS

SEQ ID NO: 120456 - protein, 214 aa, Unknown
  Bacterial polypetide isolated from the Sargasso Sea
GARNLKNIIQKSSSLNIQQLTAFAFSTENWNRNKNEISIIFHLLEKFIRSEIAEINANNIKFNLIGDKSVFKERLTEIINRAEDLTKYNDGLNFNLAFNYGGEMDIVKSFTKIFEKLLKSKTQVPIINLEIIKENLLSSSVNDIDLLIRTGGEQRISNFMLLQLSYSELFFSDINWPDFSFSHFEQAIKSFSNRKRRFGSSKSHKSGHRKITSY

SEQ ID NO: 120457 - protein, 221 aa, Unknown
  Bacterial polypetide isolated from the Sargasso Sea
EQTLPYCFHYGRQWEGWGKKKNKGRNYGHIKGVETVKKVVKSSIILKIPVVTFYVFSSENWKRPKTEIAFLFKIIKNYFSKEIKSVISQGIKINILGELKKLSPELRKVLKKSAQQTKKNKKIIVNLAINYGSKNEIIHAAKNCKNLNFKNFEKNLFTKDLPNPDILIRTGGHKRLSNFMLWQLAYAELFFLKKLWPDFNRSDLVKIIKKFKVSKRNFGAI

SEQ ID NO: 120458 - protein, 49 aa, Unknown
  Bacterial polypetide isolated from the Sargasso Sea
NRLSNFLLWQSSYTEIFFIKKLWPDFNKSDFRKVILKFKNTRRNFGGIK

SEQ ID NO: 120459 - protein, 60 aa, Unknown
  Bacterial polypetide isolated from the Sargasso Sea
PDPDILIRTGSTHRLSNFLLWQLAYSEIFFEKKLWPDFKENDYNKILKKFKKTKRNYGNI

SEQ ID NO: 120460 - protein, 83 aa, Unknown
  Bacterial polypetide isolated from the Sargasso Sea
HDFEQFLSLKGSSPDLLIRTAGYQRLSNFMLWQHAYTELYFTDCLWPDFDEKELDLAINHYFTTTRKFGKLDEYNPLLEEDVE

SEQ ID NO: 120461 - protein, 208 aa, Unknown
  Bacterial polypetide isolated from the Sargasso Sea
EWAKKNNLPSASGHRKGIETLIEIVKTAKNNSIKRLVVYAFSSENWSRENFEVNALMNLINFGVDVKLDEIKENGISLTFIGDIENMPKKAKDGISKCIGETRHLKEFNLIIALNYGSIWDMLNAARILNNSGEELTQKNFIKNTQLGEFDVDIFIRTGGDMRLSNFLLPNIGYSELFFTEKLWPEFNSRDFQKILKEFEARQRRFGK

SEQ ID NO: 120462 - protein, 63 aa, Unknown
  Bacterial polypetide isolated from the Sargasso Sea
MVQKKNLNHLAVIMDGNGRWAKKRGMSRIFGHERGADVAIELVETCVEKKIKELTLYALSVEN

SEQ ID NO: 120463 - protein, 205 aa, Unknown
  Bacterial polypetide isolated from the Sargasso Sea
KKKSRNYGHREGLNTVKKIIDESINNNIKYLTLFAFSTENWKRPKKEIKYLFNLLETFLHKEINKLIEKNIKLKIIGNKKHFSNKLKKILTNSEKITNKNSGLQINLALNYGFKEELVSSINNLIKKKKRINEKSIKSNLYTSNIPDPEILIRTGNTNRLSNFMLWQIAYSEIFFIKKLWPDFSKSDFKKVINTFYNTKRNFGGL

SEQ ID NO: 120464 - protein, 69 aa, Unknown
  Bacterial polypetide isolated from the Sargasso Sea
RKYLQTGNIPDPDVLIRTGDTNRLSNFLLWQLAYSEIFFEKKLWPDFNEKDYNRIIKKYKKIKRNFGNI

SEQ ID NO: 120465 - protein, 180 aa, Unknown
  Bacterial polypetide isolated from the Sargasso Sea
MITGKRPKEETSKLMQLLRKFISNDLSELHSNNVRIKVIGSRNEIPKDIVDLIKGAEALTVNNTGLYLQVAFNYSGRQEIINATKKIAIASAKGEIDPNKIDNTVFESNLYSAGVPDPDLIIRTGSEKRVSNFLLWQLSYSEVYFEECLWPDFNKNKLDLAINDYNSRSRRFGNVINEYK

SEQ ID NO: 120466 - protein, 133 aa, Unknown
  Bacterial polypetide isolated from the Sargasso Sea
MGISERMGNVLGQAVESKLLRSIQEHPVKVNHLAIIMDGNRRFAWSKALETNIGHKMGKQKLEQVLDWVLELEIGYLTVYALSTENLTRENHELDGLFNLYIEGLKDIADDPRIHENKVKVQIIGRRELLPES

SEQ ID NO: 120467 - protein, 200 aa, Unknown
  Bacterial polypetide isolated from the Sargasso Sea
MTSSQNNHPETIPNQPKHVGIIMDGNGRWAKIRGKRRIFGHEAGVLKARELVETAVKIKLEALTLYAFSSENWSRPKKEVSGLMSLFEKTIEKYTSLLIDNNVRFKTAGDPSMLPDVLKRKLEQMEGITSENSGLKLTLAIAYGGQQEIINGIKKLIDDHDNQIIDVNDLTVESFNEYLSFNDLPELDLIIRTSGETRLS

SEQ ID NO: 120468 - protein, 104 aa, Unknown
  Bacterial polypetide isolated from the Sargasso Sea
KLIVNLALNYGSKNEIKNAFNKLKGNRSLISESKITKHLYTGKLPDPDILIRTGGQKRLSNFMLWQLAYSELYFLDKLWPDFNSSDLRRIIKNYRSIRRNFGKI

SEQ ID NO: 120469 - protein, 172 aa, Unknown
  Bacterial polypetide isolated from the Sargasso Sea
ENWKRPINEIKYLFNLLDNYLDKELKNLQKNNIKIKIIGNINPFPNKLKNKILNIQKLTKKNKSIQINMALNYGSRQEIVNAFKMLKKKSLRINEYNISKFLYTSGVPDPDILIRTGNTNRISNFLIWQLIYTEIFFIKKMWPEFTKRDFFKIISKFKHINRNYGGLNDKFK

SEQ ID NO: 120470 - protein, 164 aa, Unknown
  Bacterial polypetide isolated from the Sargasso Sea
MTLPKHVAIIMDGNGRWGLKKGKSRNFGHRQGVKTVEKIINQAIKKKISFLTLYTLSTENWKRPIFEINYLLKLLEKYINNELESLVKNNIKIKIIGSINKFSKKLKNNLKNVENMTKKNNKIQINIALNYGSRQEIVNSIKKLKYNSLSINEKNISKFLYTKD

SEQ ID NO: 120471 - protein, 215 aa, Unknown
  Bacterial polypetide isolated from the Sargasso Sea
MGARNLKSIIHKSSSLNIEQLTAFAFSTENWNREKHEVDIIFRLLEKFIKSEMAEMNKNNIKFKLIGDKVPFKDSLVKIINRAENLTANNTGLSFNLAFNYGGEMDIVNSFTKIFEKFLTSKTQIPITNLEIIKENLLSSSVDDIDLLIRTGGEQRISNFMLLQLSYSEFFFSDINWPDFSFSHFEQALKSFTNRKRRFGSSKNQKSAHRKITSL

SEQ ID NO: 120472 - protein, 178 aa, Unknown
  Bacterial polypetide isolated from the Sargasso Sea
MNSPKHVAIIMDGNGRWGIKKKKSRNYGHKKGLEVVEKIIETAIDENIKYLTLFVFSTENWKRPTNEVNYLFKLLNNYVEKKINKLLKKNIKIKVIGNISPFPTDLKRKLKNVQKLTRKNSNIQVNMALNYGSRQELVHALRKLKNKNLLINESNINNNLYTKGMPDPEILIRTGNTN

SEQ ID NO: 120473 - protein, 223 aa, Unknown
  Bacterial polypetide isolated from the Sargasso Sea
NHLAMIMDGNKRWANLHGASLQEGYQKGLNKLREIISVCLEQEIKHFTVYALSAENMKRDSVSAIFDIIIKQSKKIIEEFSFDNNVRVAIIGEREKIPQIIKKEFLKIEKLTQNNKKLKLNIAFNYGTDVEFLKIVKQIVSSYRNKENKITHALLKKHMYLYGSPDPDLLIRTGGFQRLSNFILLNISYTEIFFTKTLWPDLSKIELLKIFDKFYKIERKYGL

SEQ ID NO: 120474 - protein, 43 aa, Unknown
  Bacterial polypetide isolated from the Sargasso Sea
MRLKKISTNKDFIEVSKEIDMKRVPEHVAIIMDGNGRWATKRG

SEQ ID NO: 120475 - protein, 141 aa, Unknown
  Bacterial polypetide isolated from the Sargasso Sea
QNSVKINIIGQKNNLPNSILKIVNEIENFETKKFKLNLNIAFNYGTDDELVSMVKKIIRNKEIPIEDINKAFIYENLYLSKVPDPDLLIRTGGYKRLSNFILLKLRYTELFFTNTLWPDLSENELSNIFNEFKKIKRNYGL

SEQ ID NO: 120476 - protein, 77 aa, Unknown
  Bacterial polypetide isolated from the Sargasso Sea
KKITEKLVRNNLYTKSIPDPDILIRTGGKKRLSNFMLWQLAYSELYFLDKLWPDFTSQDLGKVLKDFYKTKRNFGGI

SEQ ID NO: 120477 - protein, 174 aa, Unknown
  Bacterial polypetide isolated from the Sargasso Sea
MQLMLEAIYEHQQELVDQGITVRIIGDKRAFNANLIKAMDQLEAATAKGGRMQLNLALNYSGQWDILQASSKIAQAAKNNQLDPGALTAENFSSYLATAPHNRVDLLIRTGGEQRISNFMLYQVAYSELYFSDLLFPDFDEAAFQQAISWYNQRQRRFGKTQEQINKHKEKQDG

SEQ ID NO: 120478 - protein, 179 aa, Unknown
  Bacterial polypetide isolated from the Sargasso Sea
MNSPEHVAIIMDGNGRWGIKKKKSRNFGHSQGVKIVEKIIEEAILNKVSYLTLYTFSTENWKRPKKEITFLIYLLEKYIDQKLDKFIKKNIKLKIIGNINKFPSSLKSKLLNAEKLTKKKDKIQVNIALNYGSKEEIIYSVKKLINSSISINEKNISKGLYTKNIPDPEILIRTGDRHR

SEQ ID NO: 120479 - protein, 121 aa, Unknown
  Bacterial polypetide isolated from the Sargasso Sea
MDSKQKNKLKHIAIIMDGNGRWAEKRNKTRIKGHIHAKKSVKECIEFCLENKIKYLSLFAFSTENWSRPKIEVSALMSLLDVVINDEANNLMDKNIKFRCIGEINELPKKTIESIEKIKML

SEQ ID NO: 120480 - protein, 113 aa, Unknown
  Bacterial polypetide isolated from the Sargasso Sea
MNSPKHVAIIMDGNGRWGIKKKKSRNYGHTVGVKVVENIIREAIFQKIKYLTLYTFSTENWKRPKNEIKFLIKLLENYIYKEIENLKKNKIKLKIIGNINKFPDSLKSKLRQA

SEQ ID NO: 120481 - protein, 96 aa, Unknown
  Bacterial polypetide isolated from the Sargasso Sea
NYGSKSELIDAFKKINKSKSAINEKNLSKNLQTKNLPDPDILIRTGNTKRLSNFLLWQLAYSEIFFEKKLWPAFNEKDYNRIIKEYKNIKRNFGKI

SEQ ID NO: 120482 - protein, 65 aa, Unknown
  Bacterial polypetide isolated from the Sargasso Sea
MTKDIPDPDFVIRTSGEMRLSNFLLWQVAYSELYFTKTLWPEFNTQKYILALKNYINRKRRFGGD

SEQ ID NO: 120483 - protein, 216 aa, Unknown
  Bacterial polypetide isolated from the Sargasso Sea
WAKARGLPRAMGHKHGVENVRVVVEGSLSLGIKYLTLFGFSSENWKRTPKEIFDLMSLLRNYLDNEINELHRKNIRFKVIGDREKLDTDIVELIEAAEELTKANCDLMLTIALSYGGRRAITLAAKELAYRACKGTIKLDDISEESFELVLETQGVPHPDLVIRTSGEKRISNFLLWECAYSEFVFFDTLWPDFSGEHLTKAVQEYCNRERRFGAA

SEQ ID NO: 120484 - protein, 147 aa, Unknown
  Bacterial polypetide isolated from the Sargasso Sea
KKNLNKLIKNNIRINVIGNINDLPSSLKKKLISVQKKTQKNKLIQVNVALNYGFKDEIIRSFKLIKKKSLTISKKNVEKNLYTNSIPDPEILIRTGGTNRLSNFLLWQLAYSEIFFVKKLWPDFSEKDYYNIISKFEKINRNFGSVK

SEQ ID NO: 120485 - protein, 79 aa, Unknown
  Bacterial polypetide isolated from the Sargasso Sea
MQQSKRDKVLSGYIPEHIAIIMDGNGRWARSRSLPRISGHKEGINSVREITRICGEIGVKYLTLYTFSTENGKDHERRF

SEQ ID NO: 120486 - protein, 192 aa, Unknown
  Bacterial polypetide isolated from the Sargasso Sea
LSWLTVYAFSTENWTRTTEEVDFLMFFNRDILIRRREEFHEKGVKFNFIGDLKDKRIPEENKKLMKETEHITKDNKKLNLVFAFNYGSHKEIHNAVHKTAFGHYFYLKLNAWLFTKKHIEENFKNYMYLPEMPNPDILIRTAGEKRLSNFLLYQLSYTELMFIDTLWPDFDEDDFYNIVEEYKKRVRKYGKA

SEQ ID NO: 120487 - protein, 145 aa, Unknown
  Bacterial polypetide isolated from the Sargasso Sea
NNISEKISEDNINLSFIGDLTNLPKKTISKINKLNKINKNDQSNKLIIAWNYSGRSDIVNALNNIKSKNRITEQELKSHLMTNKIPDPDLIIRTGNQIRLSNFMLWQAAYSELYFSQKLWPDFNKNDLNKALKEFEKRRRNYGSI

SEQ ID NO: 120488 - protein, 69 aa, Unknown
  Bacterial polypetide isolated from the Sargasso Sea
AKSLMTRDIPDPDLVIRTSGEMRLSNFLLWQVAYSELYFTKTLWPEFNTQKYVLALKNYINRKRRFGGD

SEQ ID NO: 120489 - protein, 164 aa, Unknown
  Bacterial polypetide isolated from the Sargasso Sea
MKIPKHIAIIMDGNGRWGVKKKGSRTLGHKYGLKTVEKIIKASLKKKIKFLTLYTFSTENWKRPKSEINYLFNLLEFYIDNEINKLQKNGVKINILGDLKKFPKNLRFKLNKTQSLTKKNNKITVNVALNYGSREEIINAMKLLNKKSLKINETNLSKFLYTKN

SEQ ID NO: 120490 - protein, 121 aa, Unknown
  Bacterial polypetide isolated from the Sargasso Sea
KLNLLLNSAEKKTSKNSKIQINLALNYGSKFELVNAFKKIIKNNININEKNIEKFLYTKNIPNPDILIRTGNTKRLSNFLLWQLAYSEIFFEKKLWPDFNETDYSKIINKFKKVKRNYGNI

SEQ ID NO: 120491 - protein, 154 aa, Unknown
  Bacterial polypetide isolated from the Sargasso Sea
MHVGIIMDGNGRWAAEKGRPRAFGHRKGASRVTEIVESCPNLGIKTLTIYAFSTENWSRAAHEVESLMRLFRGYLQNKFLSLVKNNVHVKFIGDPSPIAKDLRLQMRKLEIATKTNNGLNLNVALNYGGRDEIVRSAKKFAKLVSSNKMKISDL

SEQ ID NO: 120492 - protein, 48 aa, Unknown
  Bacterial polypetide isolated from the Sargasso Sea
KRLSNFMLWQLAYSELYFLDKLWPDFNSNDLRRIVKNYRSIKRNFGKI

SEQ ID NO: 120493 - protein, 62 aa, Unknown
  Bacterial polypetide isolated from the Sargasso Sea
NIVNPDILIRTGGKKRLSNFLLWQIAYTEVYFVNKLWPDFKINDYIKIINNFKKVKRNYGNI

SEQ ID NO: 120494 - protein, 219 aa, Unknown
  Bacterial polypetide isolated from the Sargasso Sea
GRWAEEKGLSRTEGHIAGTQNIRRVVRQLIVNDVQYVTLYAFSTENWDRPVDEVDSLLQILSDSIVNETAEMNDEGVRIRHLGRIDRLPERLQKAIEESVDLTSQNTVINLNVAFDYGGRDEIVQAVRRIVDSKVKFEDITEETLSSGLYTAGMPDPDLIIRTAGEMRISNFMIWQASYSEYYSSPVCWPDFDELELNNALSEYSRRKRKFGSLNKTVT

SEQ ID NO: 120495 - protein, 174 aa, Unknown
  Bacterial polypetide isolated from the Sargasso Sea
AEVKALMTLLLKTINIEIKELHKNNVRFTIIGELDLLPISTVEGLENGVELTSKNTGLNLCLALNYGSRKEILDAVKSICTKIQNEELRLEQLDENLFSKELYTKSIPDPDLMIRTSGEYRLSNFLLWQSAYTEIYMTETYWPNFREKQLIESINDYQNRERRFGKVSDQLKIL

SEQ ID NO: 120496 - protein, 211 aa, Unknown
  Bacterial polypetide isolated from the Sargasso Sea
MNIDIKKKVNAVESDAVFSVPNHLAVIMDGNSRWAQKENLSRSEGHRAGAEAARRLLKNCKTYGVEILTLFVFSSENWHRPEKEVRSLIALLVRYLRNELPTLNEERVSIRFIGSRYRFSRRIRRLFSKVEAVTAENKGARLILAVDYGGKWDITEAAKYFANRVADGSMSSEEITPELFEKQMSMENLPAPDLCIRTGGDIRLSNFMLWQ

SEQ ID NO: 120497 - protein, 87 aa, Unknown
  Bacterial polypetide isolated from the Sargasso Sea
MNKVSHIAIIMDGNGRWGKKRRKSRNFGHLNGIKVIEKVVKDSIKLKIPILTFYTFSTENWKRPKREILFLFKLIDQYFKKEINNLV

SEQ ID NO: 120498 - protein, 74 aa, Unknown
  Bacterial polypetide isolated from the Sargasso Sea
ESNVSDNLYTKGIPDPEILIRTGNRFRLSNFLLWQSSYTEIFFIKKLWPDFNKNDFKKIILKFKRMRRNFGGIK

SEQ ID NO: 120499 - protein, 90 aa, Unknown
  Bacterial polypetide isolated from the Sargasso Sea
IINSVKKLKKLALPINQKNITKFLYTTNIPDPEILIRTGDTNRLSNFLLWQSIYSEIFFEKKLWPDFNKNDLNRILIKFKKINRNFGGLR

SEQ ID NO: 120500 - protein, 180 aa, Unknown
  Bacterial polypetide isolated from the Sargasso Sea
MNKLNHVAIIMDGNGRWGLKKKGSRNYGHLKGIKTVENIISASVKNNISFLTLYTFSTENWKRPKQEINFLFDLIRKSLKSKFKKIVKQGVKVNIIGSKKGLPDDIKKIIKFIESKTLNNKSITLNLALNYGSKEEIINACKKLIKTRKKVINTKNFEKQLYTNKIPDPDILVRTGGTKR

SEQ ID NO: 120501 - protein, 73 aa, Unknown
  Bacterial polypetide isolated from the Sargasso Sea
KNISNNLYTKGIPDPEILIRTGDRYRLSNFLLWQLSYAEIFFVKKLWPDFNENDLNKILSRYTKIRRNFGGIK

SEQ ID NO: 120502 - protein, 52 aa, Unknown
  Bacterial polypetide isolated from the Sargasso Sea
TGNTKRLSNFLLWQLAYSEIFFEKKLWPAFNGKDFNRIIKEYKYIKRNFGKI

SEQ ID NO: 120503 - protein, 171 aa, Unknown
  Bacterial polypetide isolated from the Sargasso Sea
MNNGIDIQNLFPSHVAFIMDGNRRWAKKNNFPIIDGHKKGAEIIKKIVNKSIKLKIKYLTFFGFSTENWNRSRKEVVELQLLLKYYLDSETHNFMENKINFSFIGDVDKFDAPIRQKLYNLKEVTNTFDRLFFTLALGYGSRGEILGSVNKLLKTNKSEITEKNISENLMT

SEQ ID NO: 120504 - protein, 41 aa, Unknown
  Bacterial polypetide isolated from the Sargasso Sea
MHRKKTIKHVAIIMDGNGRWASRKNLIRAEGHKAGVKNCIK

SEQ ID NO: 120505 - protein, 136 aa, Unknown
  Bacterial polypetide isolated from the Sargasso Sea
IKLKIIGNLEKFPKSLKLKLKNAEKLTRSNNKIQIIIALNYGSKEEIINTVKKLNNSSIRINEKNISENLYTRNIPDPEILIRTGNRNRLSNFLLWQLSYTEIYFVSKLWPDFTRKDFSKIINNFSKVIRNFGGIK

SEQ ID NO: 120506 - protein, 146 aa, Unknown
  Bacterial polypetide isolated from the Sargasso Sea
MNSPKHVAIIMDGNGRWGLKKNKTRNFGHAQGIKVVEKIITEAIFQKVKYLTLYTFSTENWKRPKKEIRFLIFLLDSYIKKELKNLIKKNIKLKIIGNLNKFPKTLKSKLRKAEKLTNKNSKIQLNIALNYGSKEEMIRSIKKINN

SEQ ID NO: 120507 - protein, 220 aa, Unknown
  Bacterial polypetide isolated from the Sargasso Sea
MNKLNHIAFIMDGNGRWGKRKKRSRNFGHLKGVETVKKVVKNSLRLKIPILTFYVFSSENWKRPKKEISFLFRLIQNYFLKEIKSIERQGIKINILGELSKIPFNIKSTLKSTVLRTKKNKRIIVNLAINYGSKNEILNALRKTKKISIKNFEKNLYTKNLPDPDILIRTGGHQRLSNFMLWQLAYAELFFLKKLWPDFNYSDLKLIIERFKKSKRNFGA

SEQ ID NO: 120508 - protein, 132 aa, Unknown
  Bacterial polypetide isolated from the Sargasso Sea
KVIGDLKKFPKKIQDQLINAQNKTKKNSKLELILALNYGSKNELINAMKLINYNKMKISETSVDNFLYTKGIPDPDILIRTGNTNRLSNFLLWQLSYSEIFFVKKMWPDFNERDYKNILEKFKKIKRNFGNI

SEQ ID NO: 120509 - protein, 115 aa, Unknown
  Bacterial polypetide isolated from the Sargasso Sea
MYKKLRDKVKNNGNLPKHIAIIMDGNGRWAKLKNLPRAAGHREGINSVREIVRVCGEIGVSYLTLYTFSSENWSRPKTEVSAIMKLLFSTIKKEIENLHKNNVKLSTIGNLEDLP

SEQ ID NO: 120510 - protein, 178 aa, Unknown
  Bacterial polypetide isolated from the Sargasso Sea
YGINKLIVYAFSTENWSRESQEVNALMNLINFGVDVKLPDIVKNEMKLEFIGDLSKLPTSAQKGIEKCVESTKQFSNFTLVIALNYGAIWDIVETFKKMVKNNIEMTESNFLSNTQISNTNVDIFIRTGGDRRLSNFLLHNLSYSELFFSDKLWPDFNESDLKEIIDSFESRQRRFGK

SEQ ID NO: 120511 - protein, 108 aa, Unknown
  Bacterial polypetide isolated from the Sargasso Sea
MAKKNFHLNLPNFLICQKKKHQNNKKLQINLALNYGSKNEIINALNEIKKNKLKVNEVNVSKNLFTKNTPDPDILIRTGNTKRLSNFLLWQIAYSEIFFEKKLWPRFQ

SEQ ID NO: 120512 - protein, 133 aa, Unknown
  Bacterial polypetide isolated from the Sargasso Sea
KILGNLSKFPKSLKIRLTQAERLTRKNTKIQINIALNYGAKEEIVKSIKKLNNLSKQINEKNISEYLYTKGIPDPEILIRTGNRKRLSNFLLWQLSYTEIYFVRKLWPDFTINDFNKIISNFVQVKRNFGGIK

SEQ ID NO: 120513 - protein, 60 aa, Unknown
  Bacterial polypetide isolated from the Sargasso Sea
MDGNGRWAKKNALSVTSGHEKGVDVVKKIVESAAKAKLESLSLYAFSTENWSRPKKEILE

SEQ ID NO: 120514 - protein, 90 aa, Unknown
  Bacterial polypetide isolated from the Sargasso Sea
MGTKIKTGELDTEEINKEVIESNLYTSHLPQSSPDMILRTSGEKRMSGFLLWQSAYSELVFLDIFWPEFRKIDLMRAIRTFQKRKRRVGK

SEQ ID NO: 120515 - protein, 111 aa, Unknown
  Bacterial polypetide isolated from the Sargasso Sea
KKTSKNSKIQINLALNYGSKFELVNAIKKIIKNNLNINEKNIEKFLYTKNIPNPDILIRTGNTKRLSNFLLWQLAYSEIFFEKKLWPDFNEKDYSKIIKKFKKVKRNYGNI

SEQ ID NO: 120516 - protein, 157 aa, Unknown
  Bacterial polypetide isolated from the Sargasso Sea
INYLFNLLERFLKSKIYEFHKNNIKLKIIGEKKFPRKTNNLLSRCEKLTKNNSAMQINLALNYGSKNEIIRAIEILNKKKIKITEENISNSLYTKDIPDPEILIRTGGTKRLSNFLLWQLSYSEIFFSGKFWPDFSEKDFITIIKKYKNIKRNFGDI

SEQ ID NO: 120517 - protein, 222 aa, Unknown
  Bacterial polypetide isolated from the Sargasso Sea
MNKLNHVAFIMDGNGRWGKKRKKGRNFGHLKGVETVKKIVSSSIKLKIPIITFFVFSSENWKRPKTEITFLFKIIKNYFSKEIYNVVSKGIKLNIIGELNKLPSELKGILKRSSELTKDNKKILVNLAINYGSKNEILKSAKKIKTNINLKNFEKNLYTCEQPNPDILIRTGGHKRLSNFMLWQLAYAELFFLKKLWPDFNGEDLKKIINKYKKAKRNFGAI

SEQ ID NO: 120518 - protein, 194 aa, Unknown
  Bacterial polypetide isolated from the Sargasso Sea
MENNSSEILKDKILKAFDSSNLSMPNHVGIIMDGNRRWAAENKKPVFFGHKEGTKNLESLIKFSIEIGIKYLTIYTFSTENWERPKLEVNYITKTLLNESLNENFDNLHKLGVKIVIRGSIQKLDKSLKDKILNAQKKTLNNTSISLVIAFDYGGRNEIVNTVKEIIKDNIELSKINEKLFNNYINKDSIPDPD

SEQ ID NO: 120519 - protein, 203 aa, Unknown
  Bacterial polypetide isolated from the Sargasso Sea
QRPKKEISALMELFYEFLEKELHTMLENNVRFKLIGDREKLPDFLQNRLSNALNSTSKNSGLLLNLALNYGGRDEISHAFRKISKLVKKGELQPENIDETLISANTYTAGLPDPDLIIRTSGELRLSNFLIWQAAYAEFYFTEVLWPDFTKEDLHKALLDYQNRKRRMGRTTTSTGISKSKKRVSRMAKDKSKKSRLTEETST

SEQ ID NO: 120520 - protein, 121 aa, Unknown
  Bacterial polypetide isolated from the Sargasso Sea
LKTKLQKVERKTNNNTLIQINIALNYGSRQELINAFKKININKKKKITENLISNNLYTKNIPDPEILIRTGDTNRLSNFLLWQINYTEIFFVKKLWPDFKKNDFNKILNKFNRIKRNFGAI

SEQ ID NO: 120521 - protein, 112 aa, Unknown
  Bacterial polypetide isolated from the Sargasso Sea
MKQSAKNKKMQINLALNYGSKDEILRSIKLIIKKKIRPSTKNFEKYLYTKNIPDPDILIRTGNTNRLSNFLLWQISYSEIFFIKKLWPDFSKKDFYSILNNYKKIKRNFGNI

SEQ ID NO: 120522 - protein, 119 aa, Unknown
  Bacterial polypetide isolated from the Sargasso Sea
PQHLKKILIRSSLLTKKNKKIIVNLAINYGSKYEIISAIKKMKKINIKSLEDNLYTKNLPHPDILIRTGGYQRLSNFMLWQLAYSELYFLKKFWPDFSNEDLKKIIIKYKRSKRNFGSI

SEQ ID NO: 120523 - protein, 138 aa, Unknown
  Bacterial polypetide isolated from the Sargasso Sea
HKQNIKFKVIGKKKFSKKLNLLLNSAEKKTSKNSKIQINLALNYGSKFELVNAFRKIIKNNININEKNIEKFLYTKNIPNPDILIRTGNTKRISNFLLWQIAYSEIFFEKKLWPDFNETDYSKIINRFKKVKRNYGNI

SEQ ID NO: 120524 - protein, 121 aa, Unknown
  Bacterial polypetide isolated from the Sargasso Sea
MIRPKHVAIIMDGNGRWGLKKKNSRNFGHKKGLETVEKIISAAINKNIKYLTLYVFSTENWKRPLKEINYLFSLLENYIDKEINNLIKKNIKIKVIGNIKKFPAILKNKINKVQLLTKSNN

SEQ ID NO: 120525 - protein, 54 aa, Unknown
  Bacterial polypetide isolated from the Sargasso Sea
MNSQKISTKENSKLSNEIDKLRIPKHIAIIMDGNGRWAMKKGLPRSFGHNKGVN

SEQ ID NO: 120526 - protein, 103 aa, Unknown
  Bacterial polypetide isolated from the Sargasso Sea
LQLILALNYGSKSEIVNAIKLIKNKNIKISESSIDKFLYTKGIPNPDILIRTGNTNRLSNFLLWQLSYSEIFFVKKMWPDFNGRDYKSIIDKFKKIKRNFGKI

SEQ ID NO: 120527 - protein, 182 aa, Unknown
  Bacterial polypetide isolated from the Sargasso Sea
VKYCVKSKIPIVTFYVFSSENWRRPKTEISFLFNLIKKYFTQEIQSIMSQGIRIKILGEINKLPSDLKKIINKCIKLTNKNKKILVNLAINYGSKNEILNASRKTKNFSIKNFEKHLYTKNIPNPDILVRTGGHQRLSNFMLWQLAYAELFFLKKLWPDFNGDDLKKIIDKFKKSKRNFGAV

SEQ ID NO: 120528 - protein, 95 aa, Unknown
  Bacterial polypetide isolated from the Sargasso Sea
RAGQLEPSDITDDLIQEHLSIGDLPMPDLLIRTAGEQRISNFLLWHLAYTEFYFSEVFWPDFKSEQMLKALDAYAHRQRRFGQTDDQIAARAAQQ

SEQ ID NO: 120529 - protein, 186 aa, Unknown
  Bacterial polypetide isolated from the Sargasso Sea
MSILGRPDLSQTKTELYKTYDIDCDAIPVHIAMIMDGNGRWAQKKNKPRVMGHKQGAESVRTVVKSCVEFGIHYVTIYAFSTENWQRSKVEVSFLMSLFKQLIDKEAPELIKQGVRVRILGDIEQLPKALQEKIIDIEKKTHKNTVFQLNICLNYGAKQEILQGVKRCVEDVLNKKFESHDITEDL

SEQ ID NO: 120530 - protein, 39 aa, Unknown
  Bacterial polypetide isolated from the Sargasso Sea
MQSAYSEFVFQDVYWPEFRKIDFLRCLREYAQRERRFGK

SEQ ID NO: 120531 - protein, 160 aa, Unknown
  Bacterial polypetide isolated from the Sargasso Sea
MAIKNQNANLKNVAIIMDGNGRWARKNSLKISQGHKKGVQIVREIVEESILQNINSLTIYAFSSENWQRPKSEINAIKKLVVDAINDQVPELKEQKVKLKFFGHTEDFGEKVIKKIKYAESETFCEDYKLNLNVALSYGGKQDILDLVKKISKEVLDKKL

SEQ ID NO: 120532 - protein, 238 aa, Unknown
  Bacterial polypetide isolated from the Sargasso Sea
MSSPKLIYSIYENRLQNRLKKENLPKHIGLIHDGHRRYARKEGLLSFEVSYKIGMTRLKECIAWCDDVGIDYITSWLLSRENLARPKEELEPYFEILNELFEDLLIDDVVDNFKIEFIGSTDLLPGFLQTTIKQLEEVRGGGQKTLTIALGYGGRQEILDAIKGLIDENRNQENDFNRLIENVTDEQLRQHLYSPEAPDIDLIIRTSGESRLSGFLLWQSAYSEVIFQDVYGQNLERL

SEQ ID NO: 120533 - protein, 135 aa, Unknown
  Bacterial polypetide isolated from the Sargasso Sea
MSDAPSHVAIIMDGNSRWAKKNKLTKKEGHRAGVKAAKNIIEYAAKKHLDHLTLFAFSTENWGRSKFEVNSIMDLFVEALREETPELIKNSVKVNFIGDVSKLNKIIIKKIIETKGLTSNYQPKLNLNIAISYGG

SEQ ID NO: 120534 - protein, 56 aa, Unknown
  Bacterial polypetide isolated from the Sargasso Sea
MSPKHVAIIMDGNRRWAKSHDLSFLEGYKKGVENLYITVENFIELKIKFLTVFGFS

SEQ ID NO: 120535 - protein, 91 aa, Unknown
  Bacterial polypetide isolated from the Sargasso Sea
MNSPNHVAIIMDGNGRWAEQKGMPREFGHQNGVRSVKKIVEEANKHKVKYLTLFAFSIENWERPSYEVETLMRLLVETLRDEFEDLFNNNI

SEQ ID NO: 120536 - protein, 173 aa, Unknown
  Bacterial polypetide isolated from the Sargasso Sea
ITFYVFSTENWRRPKTEINFLFKLITHYFKKNIDEVVVNGIKINLIGKISKLPFKIKSTLRKVQLLTKNNNKILVNLAINYGSKDELLESFKKIKKKNINTNLIQKNLYTKNLPNPDILIRTGGQKRLSNFMLWQLAYTEIYFLKKLWPDFRHNDLKRIIYDFKKIKRNFGGI

SEQ ID NO: 120537 - protein, 79 aa, Unknown
  Bacterial polypetide isolated from the Sargasso Sea
KKQNINVKNIEKNLYTSNIPDPDILIRTGNTNRLSNFLLWQMAYSEIFFEKKLWPDFKENDYNKILKKFRKIKRNYGNI

SEQ ID NO: 120538 - protein, 62 aa, Unknown
  Bacterial polypetide isolated from the Sargasso Sea
KRLSNYLLWQLAYTELYFTEKYWPEFDVSAFEEALIAFSRRERRFGKTHEQIHSKDVESLSQ

SEQ ID NO: 120539 - protein, 78 aa, Unknown
  Bacterial polypetide isolated from the Sargasso Sea
IKNRKSINKFETYLYTNNIPDPEIIIRTGGEYRMSDFLLWQSAYSELFFTKILWPDFKFNNLKKLLNDFLKRNRNYGR

SEQ ID NO: 120540 - protein, 222 aa, Unknown
  Bacterial polypetide isolated from the Sargasso Sea
MNQLNHIAFIMDGNGRWGRKKNKGRNYGHIKGVDTVKKVVRSSIKLKVPAITFYVFSSENWKRPKSEINFLFKLIKNYFSKEIQSVISQGIKINIIGDVNKLTPDLKKVLKKTMYLTKKNSKILVNLAINYGSRNEIINAVKKASKKITIKSFQKNLFTNNIPDPDILIRTGGHKRLSNFMLWQLAYAELFFLKKLWPDFNEKDLKSIIKKFKSTKRNFGAL

SEQ ID NO: 120541 - protein, 165 aa, Unknown
  Bacterial polypetide isolated from the Sargasso Sea
NWKRPKKEVNYLFRLLENFLLNRIDELNKQNIKLKIIGNKNFSQKLNKQLNSVEKKTSKNTKLQINLALNYGSKTELLNAFKKLQKNKEYINEKNLKKYLQTKNIPDPEILIRTGNTKRLSNFLLWQLAYAEIFFEKKLWPAFNENDFNKIIKEYKTIKRNFGNI

SEQ ID NO: 120542 - protein, 181 aa, Unknown
  Bacterial polypetide isolated from the Sargasso Sea
LLKIPIVTFYVFSTENWKRPKSEINFLFKLIQTYFEREMKDVMKNKIKINFLGKISNIPKNTRKIIKKTVQKTKKNKNILVNLAINYGSRAELIDCFNKLKNSKSKISIKSINNKLYTQNLPDPDILIRTGGKKRLSNFMLWQLAYTELNFLDKLWPDFNKNDLKRIVLKYKRIKRNFGGI

SEQ ID NO: 120543 - protein, 97 aa, Unknown
  Bacterial polypetide isolated from the Sargasso Sea
EIIDAVKSISDKVKKNIISLENIDEKIINDHLYTRNLDNVDLLIRTGGEIRVSNFLLWQISYAELFFLELLWPDFKKRHFFEAIVEYQKRARRFGKI

SEQ ID NO: 120544 - protein, 122 aa, Unknown
  Bacterial polypetide isolated from the Sargasso Sea
MANSSKINTPKHVGIIMDGNGRWAIKNSLKISEGHKKGVSIVKDIVEESVKQDLSSLTIFAFSTENWKRPKTEVAAIKKLVIDAVNDQVPQLKEQKVRLKFFGHTNDFGQKVIDKIDYAEKE

SEQ ID NO: 120545 - protein, 55 aa, Unknown
  Bacterial polypetide isolated from the Sargasso Sea
MNLKNIAIIMDGNGRWAKKNNLQIREGHARGVSALKEIVKESVNQNIESLTVYAF

SEQ ID NO: 120546 - protein, 72 aa, Unknown
  Bacterial polypetide isolated from the Sargasso Sea
KNIDKNLYTSDCPNPDILIRTGDTKRLSNFLLWQIAYAEIFFVNKLWPDFTKNNYTLILNKFLKIKRNFGSI

SEQ ID NO: 120547 - protein, 42 aa, Unknown
  Bacterial polypetide isolated from the Sargasso Sea
FLLWQSAYAELYFTKILWPNFKIKSLNKIISIYFNRIRKYGR

SEQ ID NO: 120548 - protein, 170 aa, Unknown
  Bacterial polypetide isolated from the Sargasso Sea
STENWKRPKKEISFLIYLLEKYIDQQFENLLKKNIKLKILGNLNKFPSSLKKKLNKVQKISNKNNKIQINLALNYGSKEEIITSVKKIINHSKPINDKNIKKNLYTKDIPDPEILIRTGNTFRLSNFLLWQISYTEIFFVKKLWPDFNKNDFNKIICEFKKMRRNFGGIK

SEQ ID NO: 120549 - protein, 152 aa, Unknown
  Bacterial polypetide isolated from the Sargasso Sea
MNTPNHVAIIMDGNGRWAEQKGMPREFGHQNGVRSVKKIVEEANKHKVKYLTLFAFSVENWERPSYEVETLMKLLVETLRDEFEDLFNNNIRLNTIGDVQSLPNEVIYELDKIINSTKDNTGMTLTLALSYGGKQEIFMAVQEISEKVKNEI

SEQ ID NO: 120550 - protein, 166 aa, Unknown
  Bacterial polypetide isolated from the Sargasso Sea
MNRINHIAIIMDGNGRWGRKRGKSRNYGHTKGVEVIQKIVKYSIKKKIPTLTFYTFSTENWKRPKKEITFLFNLIENYFKKEIINLKKNGVKIDILGNVNTLPKKIKKCLINSKKITKKCNNIRVNLAINYGSKNEIINASKTIKKNKTKFTIKRFRKKFIYKRYS

SEQ ID NO: 120551 - protein, 136 aa, Unknown
  Bacterial polypetide isolated from the Sargasso Sea
MSVTVQDKLFKKIDKTKVPNHVAVIMDGNGRWAKKIGKERFFGHNSGISSVRDTIEASIDIGIKNLTLYVFSMENWKRPETEVKALMHLLFSSIDIELENLNKNNIKLDVIGKKDLLPKTTKKRLESAVEETSNND

SEQ ID NO: 120552 - protein, 73 aa, Unknown
  Bacterial polypetide isolated from the Sargasso Sea
KNISENLYTKNIPDPEILIRTGNRNRLSNFLLWQLSYTEIYFVSKLWPDFTRKDFSKIINNFSKVKRNFGGIK

SEQ ID NO: 120553 - protein, 149 aa, Unknown
  Bacterial polypetide isolated from the Sargasso Sea
MNHLNHIAIIMDGNGRWGLEKGKSRNFGHRKGVLVVQSIIKASIKKKIKYLTLYTFSTENWKRPVQEINFLMNLMSDYLEKNVHKLIKNNIKVNVIGDINKIPLKLKKKLIVIQKKTQKNSLIQVNIALNYGFKDEIIRSFKLIKKNLK

SEQ ID NO: 120554 - protein, 120 aa, Unknown
  Bacterial polypetide isolated from the Sargasso Sea
KLKNILNNVILKTKKNKKIVINLAINYGSKHEILNAVQKIKNSKKININKINSNLYTSGQPDPEILIRTGGKKRLSNFLLWQLAYTELFFLDKLWPEFNEIDLKKIIKKYHQIKRNFGNI

SEQ ID NO: 120555 - protein, 51 aa, Unknown
  Bacterial polypetide isolated from the Sargasso Sea
SNFLLWQCAYSEFIFTDTFWPDFTVDHFHNALEQYSQRERRYGRNTPNKRV

SEQ ID NO: 120556 - protein, 114 aa, Unknown
  Bacterial polypetide isolated from the Sargasso Sea
MSEKKTSKNKRLQINLALNYGSKSEIINALNEIKKNKLKINEANVSKSLFTKNIPDPDILIRTGNTKRLSNFLLWQLAYSEIFFEKKLWPDFSDNDYNEILSKFKKIKRNYGNI

SEQ ID NO: 120557 - protein, 159 aa, Unknown
  Bacterial polypetide isolated from the Sargasso Sea
MAIKNQNANLKNVAIIMDGNGRWARKNSLKISQGHKKGVQIVREIVEESILQNINSLTIYAFSSENWQRPKSEINAIKKLVVDAINDQVPELKEQKVKLKFFGHTEDFGEKVIKKIKYAESETFCEDYKLNLNVALSYGGKQDILDLVKKISKEVFDKK

SEQ ID NO: 120558 - protein, 250 aa, Unknown
  Bacterial polypetide isolated from the Sargasso Sea
MRAPEPLAANSPVAPGVVPHPLPTHLAVILDGNRRWADRLGVPAAEGYRAGGRNVHALLSWCEEAGIPFVTLWPLSTENLGRDAGELRDLLAVIADVFDELAASGRWRLHVIGDLTKLPRATAERIGAAQRRTAHTRGLDVNIAVAYSGRLDVLHAIRSLIEEHVAAGTVDQLLAQLSPELIESRLYTAGQPEPDLVIRTSGEQRLSNFMLWQTAFSEFYFTPTCWPDFGRDDFEQAIAAYGTRARRFGK

SEQ ID NO: 120559 - protein, 243 aa, Unknown
  Bacterial polypetide isolated from the Sargasso Sea
MAISLSNNNNHPKKIGIIMDGNGRWAKSNKLKINKGHAKGVSVVRDIVKECIAQNIESLTIYAFSSENWSRPESEINGIKKLIVKAIHEQVPELMEQNVMLDFFGDISSWGDEIERKISKAEDDTFMEYPSLRLNVALGYGGRNDIVSASIRIAENLKSDLISTGDIDEDMIAKFSQVPDDNIDLIIRTGGDKRLSNFLLFQAAYAEIFFVDKLWPDFTRDDFINCLDAFKKTDRRFGKRIED

SEQ ID NO: 120560 - protein, 174 aa, Unknown
  Bacterial polypetide isolated from the Sargasso Sea
PKEETSKLMQLLRKFISNDLSELHNNDVRIKVIGSRKDIPKDIIDLIKGAESLTINNSGLYLQIAFNYSGRQEIINATKKIAFAAAKGELDPNKIDKNIFESNLYSAGIPDPDLIIRTGSEKRISNFLLWQLSYSEVYFEECLWPDFNKNKLDVAINDYKNRSRRFGNVISEYR

SEQ ID NO: 120561 - protein, 181 aa, Unknown
  Bacterial polypetide isolated from the Sargasso Sea
FSAENWNRPKSEVEGLMDLLVQSITGELDEMNNNGVRLLSVGNTNQLPKKCRESLFDAQLKTKDNSDLNLVLALNYSAREDIIDGVKKISKEIVNNNISEQDITADLFSNYLSTSDIPSPELLIRTSGEIRISNFLLWEIAYTELYFTDVFWPDFKREDFLSAIVEYQNRERRFGMVSEQI

SEQ ID NO: 120562 - protein, 241 aa, Unknown
  Bacterial polypetide isolated from the Sargasso Sea
MAKKNTKKNNYPKNVGIIMDGNGRWALKNSLKISQGHKQGVEIVKKIVEESVKQNIQSLTLYAFSSENWKRPKAEVNAIKKLVVEAINEQVPELKEQKVSLKFFGHLNDFGKKILEKIAYAENTTKSKFSKLDLNIALGYGGQQDIVDVVKNISSMVLAKEIKIKDINEKTIYRNSSVPVDEIDLLIRTGGDNRISNFLLFQIAYAEIMFVDKYWPDFTTNDYMKCLNNFKKVSRRFGRRI

SEQ ID NO: 120563 - protein, 246 aa, Unknown
  Bacterial polypetide isolated from the Sargasso Sea
LIMDKTGKNIIDNNVPDHIAIIMDGNGRWAQKNSLPRIAGHKEGISSVRAITKKCDEIGVKYLSLYTFSSENWKRPRSEVKALMRLLLTTIRREIKDLNKNNVRLMTIGNLNELPSDARKGMEEGLEKTKNNSGINLILALSYGSRNEILRMVKNIANKAKNGETDPNKIKEIDIINELDTSKIPDPDLLIRTGGEFRLSNFLLWQIAYSEIYITNKYWPEFRENELLIAVKDYQQRERRFGKVSN

SEQ ID NO: 120564 - protein, 214 aa, Unknown
  Bacterial polypetide isolated from the Sargasso Sea
VAIIMDGNGRWGLKHKKSRNAGHRAGLDTVETIIKETLKSKIKYLTLYTFSTENWKRPKKEILFLFDLLENFLTKKLDELKKNGIKLKIIGEKKMLTKRLKDLLKLAEKKTSKNKKLQINLALNYGSKNEIINALKIISKSRKKISQKNIEKNLYTKNIPDPDLLIRTGNTKRLSNFLLWQLAYTEIFFEKKLWPDFNESDYKKILNTFKILKR

SEQ ID NO: 120565 - protein, 186 aa, Unknown
  Bacterial polypetide isolated from the Sargasso Sea
MYRKKTIDHIAIIMDGNGRWAVRKGLKRSFGHRAGIKNCINLIKNLDKLDYKIKNLTLFIFSTENWKRPSSEVNDLFNLIEDFYINFKNVANEENIRIRHLGSTRNIPNKLIKIIKDVVKITRANDGTSINLAFNYGGRAEIIDAVNNNTGLITYKKLSKNLYISNLPDPDLIIRTGGEMRLSNFL

SEQ ID NO: 120566 - protein, 190 aa, Unknown
  Bacterial polypetide isolated from the Sargasso Sea
TVEKIIRESIKNNIKFLTLFAFSTENWKRPKKEINFLFNLLENFLQNKIDDLYNQNIKLKILGKKNFPKKINKLLYLSEKKTFKNNRLQVNLALNYGSKSELINAFKSIKKNKDKITEKTLSKHLLTKNIPDPDILIRTGNTKRLSNFLLWQIAYTEIFFEKKLWPAFNEADYNKIITNYKKIKRNFGNI

SEQ ID NO: 120567 - protein, 220 aa, Unknown
  Bacterial polypetide isolated from the Sargasso Sea
AESRGLPRVMGHRAGVEALKATLRLCSDWGVGALTAYAFSTENWSRPGDEVNFLMTLFERVLQRELRTLEEEQVRIRFLGDLEALPLKLQELISDATDRTAGNGGIHFNVCTNYGGRRELVRAAQRLARQAANGDLAPEDIDENSLAAELFTAGEQDPDLLIRTSGEHRISNFLLWQLAYAEIHVTDVFWPDFNEKALKQALLDFQSRSRRFGGLDPLTP

SEQ ID NO: 120568 - protein, 99 aa, Unknown
  Bacterial polypetide isolated from the Sargasso Sea
MGDIKPNEVNEELFESELLTKGSKDPELLIRTSGEKRISNFLLWQLAYSEIYITDVLWPDFNEVEFLKAIIDYQARNRRFGGIESISNDSFNDSYYNPN

SEQ ID NO: 120569 - protein, 121 aa, Unknown
  Bacterial polypetide isolated from the Sargasso Sea
MDLAPSSNNQQANTPNHIAIIMDGNGRWAEARGLPRIAGHHKGAESLRIIIKACIDLQINFLTIYAFSSENWKRPSNEVSDLMGLLQNYLRSEISEISSNGIKLQFIGDRERLTDDIKKLY

SEQ ID NO: 120570 - protein, 139 aa, Unknown
  Bacterial polypetide isolated from the Sargasso Sea
MINDRPLKHLAIIMDGNGRWALNQDLPRTAGHAAGEHSLSKTIDWAIANKLEWLTVYAFSTENWLRSEEEVDFLMFFNRDILIRRREEFNQKGVRFKFLGDLSDSKIPEENKNLMKETDELTKNNNTLNLVFAFNYGSH

SEQ ID NO: 120571 - protein, 239 aa, Unknown
  Bacterial polypetide isolated from the Sargasso Sea
RLKKENLPKHIGLIHDGHRRYARKEGLLSFEVSYKIGMTRLKECIAWCDDVGIDYITSWLLSRENLARPKEELEPYFEILNELFEDLLIDDVVDNFKIEFIGSTDLLPEFLQTTIEQLEEVRGGGQKTLTIALGYGGRQEILDAIKGLIDENRNKENDFDRLIENVTDEQLRQHLYSPEAPDIDLIIRTSGESRLSGFLLWQSAYSEVIFQDVYWPEFRKIDFLRCLREYAQRERRFGQ

SEQ ID NO: 120572 - protein, 253 aa, Unknown
  Bacterial polypetide isolated from the Sargasso Sea
MALNADTISQQCLPKHVAIIMDGNGRWAQARNRPRVYGHKKGVDAVRQSVQFCTKLGVQSLTLFAFSSENWRRPEDEVNTLMELFLFVLTKEVKKLHKNNVKLTIIGDLSRFSEGLQNKVHSAQQLTENNTGLCLNVAANYGGRWDMANAAKQLAMQVASGDIDAQDITEERIAQHMSMADQPEPDLLIRTGGDVRISNFLLWQAAYAELYFTETLWPDFNEAAFAEAIACYVARERRFGCTGEQIKQLLAQT

SEQ ID NO: 120573 - protein, 241 aa, Unknown
  Bacterial polypetide isolated from the Sargasso Sea
MPDSNRNKNNSPRNVGIIMDGNGRWALKNSLKISQGHKQGVKIVRDIVEESAKQNIKSLTLYAFSSENWKRPKTEVNAIKNLVIEAINEQVPELKKKKVRLKFFGHLDDFGKKILDKIAYAENETACRSCKLDLNVALGYGGQQDIVDAVKKISYKVASKEIKIKDIDEKTINQNSSVPINEIDLLIRTGGDNRISNFLLFQIAYAEIMFIDKYWPDFTTNDYIKCLNKFKKVRRRFGRRV

SEQ ID NO: 120574 - protein, 213 aa, Unknown
  Bacterial polypetide isolated from the Sargasso Sea
MNPINHVAIIMDGNGRWGIKHKKSRNLGHRAGLNTVERIIKSTIKNKVKYLTLYAFSTENWKRPQKEIKFLFKLLDSFIDKKISEFNKNNIKLKIIGNINVFNKKLKKKLQKSEQLTKNNKRLQVNLALNYGSKSELINAFKRINKDKLNISIKNIEKCLYTSNILDPDILIRTGNTQRLSNFLLWQLAYSEIFFEKKLWPDFKESDYNKILK

SEQ ID NO: 120575 - protein, 207 aa, Unknown
  Bacterial polypetide isolated from the Sargasso Sea
MNSPTHVAIIMDGNGRWGLKRKNSRNYGHSKGISVVKNIINAAISNKIKYLTLYTFSTENWKRPNQEINFLINLLKTYIEKELGNLIKNNIKLKIIGNIKKFPKSLKIKLIRAEKLTNYNDKIQINIALNYGSKEEIVKSIKKLNKLSKPINEKNISKYLYTRGIPDPEILIRTGNRNRLSNFLLWQLSYTEIYFVSKLGQILQTMI

SEQ ID NO: 120576 - protein, 142 aa, Unknown
  Bacterial polypetide isolated from the Sargasso Sea
MSPKKLSHISIIMDGNGRWANSKGMPRAYGHRAGIKSVNKIVSACSVRQIQELTLFAFSSENWERPNYEVKFLLSLFEESINLYIADLHKNNVQINFIGDLSQFSQKLLKNIKKAEALTKNNNNLKLNFAINYGGKWDIINS

SEQ ID NO: 120577 - protein, 144 aa, Unknown
  Bacterial polypetide isolated from the Sargasso Sea
IKLEIIGDTSKLPDITRNKLLAGVQETSQNDVLILSLAISYGARQELIRATKLISEKVKKNIISVENIDENIINEHLYTRNLKNVDLLIRTGGELRLSNFLLWQISYAELCFQDVLWPDFKKEHFLNAIIDYQGRTRRFGKINK

SEQ ID NO: 120578 - protein, 66 aa, Unknown
  Bacterial polypetide isolated from the Sargasso Sea
MNPLKHVAIIMDGNGRWGLKYKNSRNAGHKAGLKTVERVIKETLKNKIKFLTLFAFSTENWKRPKK

SEQ ID NO: 120579 - protein, 173 aa, Unknown
  Bacterial polypetide isolated from the Sargasso Sea
MKIDKQKLPKHVAIIMDGNGRWATRKGLPRSFGHKQGVSVLKKILKAAKNLGCKVITVYAFSTENWTRPTKEVDFLINLFSEVLKNEIKEIHEESTKIKFIGDLSPFPKNLKEIISRSESLTKNNNKFLFNVCVNYGGRQEIVNVAKELAFKSSAGEIKPSENNEELFNSQLL

SEQ ID NO: 120580 - protein, 214 aa, Unknown
  Bacterial polypetide isolated from the Sargasso Sea
MNKLNHVAFIMDGNGRWGKKKNKNRNFGHYAGVKTVKKIVESSIKFKIPIVTFYVFSTENWKRPKAEINFLFNLINSYFKSELQNVIKNEIKINIIGELNKLPNKLKSILKETTQKTKKNKKILVNLALNYGSKRELINAFKKIRSKKLTENNIKNYLYTKNIPDPDILVRTGGRKRLSNFMLWQLAYAELYFLDKLWPDFTPKDLHSILKTLL

SEQ ID NO: 120581 - protein, 180 aa, Unknown
  Bacterial polypetide isolated from the Sargasso Sea
KRKIKFLTLYAFSTENWKRPKKEINYLFALLENFLAKKINDLNKQNIKLNVIGIKQFSKKLNNLLNNAETMTINNDKLQVNLALNYGSKTELLNAFKQLNKNKKKITEKNFLNYLQTRNIPDPDILIRTGNTRRLSNFLLWQLAYSEIFFIKKLWPDFNEKDYLEIINEYKSIKRTFGNI

SEQ ID NO: 120582 - protein, 259 aa, Unknown
  Bacterial polypetide isolated from the Sargasso Sea
MSRPQVAAARPSTRTALPACLDSGRLPAHVAVIMDGNGRWANQRGLPRVMGHRQGVEALKRTLRLCSDWGIGTLTAYAFSTENWSRPGEEVSFLMTLFEQVLARELEALQQEQVRIRFLGDLSALPDGLQALIAEATKRSAANSGIHFNVCTNYGSRSELVHATRALARRVHAGELDPEAIDENLMASELHTSGEVDPDLLIRTSGEHRLSNFLLWQLAYAEIHVTDVLWPDFDAEALTLALQDFQGRRRRFGGVEAGE

SEQ ID NO: 120583 - protein, 74 aa, Unknown
  Bacterial polypetide isolated from the Sargasso Sea
NEKNVSKNLLTNGIPDPDLLIRTGNTKRLSNFLLWQMAYTEIYFEKKLWPEFNIIDYKKIIKKFKSTKRNFGKI

SEQ ID NO: 120584 - protein, 211 aa, Unknown
  Bacterial polypetide isolated from the Sargasso Sea
KKILKAAKNLGCKVITVYAFSTENWTRPTKEVEFLINLFSEVLKNEIKEIHEESTKIKFIGDLTPFPKNLKELISSSESLTKNNNKFLFNVCVNYGGRQEIVKVAKELALKSSAGEIKPSEINEELFNSELLTRGIKDPELLIRTSGEKRISNFLLWQLAYSEIYISDVLWPEFDEHEFLKAIIDYQSRNRRFGGIESLPNESFEDSQYFS

SEQ ID NO: 120585 - protein, 216 aa, Unknown
  Bacterial polypetide isolated from the Sargasso Sea
MEGNQTETLPKHVAIIMDGNNRWASEKNLPGVAGHKKGVERARESVEYAVQRGLSTLTLFAFSSENWGRSSEEVNLLMQLLNSALQEEVPNLIKNSVQLSFIGDLSQFDQKLIEQMKESEKLTHCDTKRKKLDLVVAASYGGRWDIVNAINKHLDSGSNGELTEEGFDKFLSTSKFTDPDLCIRTGNELRISNFLLWQLAYSELYFSEVLWPDFDD

SEQ ID NO: 120586 - protein, 267 aa, Unknown
  Bacterial polypetide isolated from the Sargasso Sea
MSLGKLIDKKNNDLFNRIDKHKVPEHVAIIMDGNGRWAIKKGLPRTYGHKRGVDVLKEILKASKKLGCKVLTVYAFSTENWTRPTKEVDFLINLFREVLRSEIEEIHEESTKIKFIGDLTPFPETLKKIISRSESLTKNNDKFLLNVCVNYGGRQEIVKVAKELALKSSTGEIKPSEVNEELFNSELLTRGIKDPELLIRTSGEKRISNFLLWQLAYSEIYISDVLWPDFNEFEFLKAIIDYQSRNRRFGGIESLPNESFGDSPYSS

SEQ ID NO: 120587 - protein, 182 aa, Unknown
  Bacterial polypetide isolated from the Sargasso Sea
MVSQAKIGRRPKAELDFLMLLLEQYMIEERTLLMRERIRPVMIGNRAGLPNSTLAAIDETVDMCRNNTGMRLCLAVNYGGRAEIVEATKTLAHQVAEGMLQPDEITEKSIEDHLETNGMPDPDLLIRTAGEMRLSNFLLWQMSYAEFWVTSDLWPDFTENHLDQALTAFQSRERRFGGLSST

SEQ ID NO: 120588 - protein, 89 aa, Unknown
  Bacterial polypetide isolated from the Sargasso Sea
LIEAFKKMNRKKTAISEKNLSLNLQTKNIPDPDLLIRTGDTKRLSNFLLWQIAYSEIFFEKKLWPAFNEKDYNRIIREYKNIKRNFGKI

SEQ ID NO: 120589 - protein, 94 aa, Unknown
  Bacterial polypetide isolated from the Sargasso Sea
MNQIQHVAIIMDGNGRWGLKHKKSRNLGHKEGLKTVEKIIKISVKKKIKYLTLYAFSTENWKRPRREIKYLFSLLENFLNNKISDLNNENIKLK

SEQ ID NO: 120590 - protein, 237 aa, Unknown
  Bacterial polypetide isolated from the Sargasso Sea
REGIFKRKRNNDNMNPLNHVAIIMDGNGRWGIKNKKSRNAGHKAGLNTVEKIIKETIKNKIKYLTLYAFSTENWKRPKKEITYLFNLLENFLINRIEDLHKQNIKLKIIGIKNFSKKLNNLLVQSEKKTFKNTKLQINLALNYGSKYELINAFKKLNKNKEKINEKNLIKNLFTKNLPDPDILIRTGNTKRLSNFLLWQLAYSEIFFEKKLWPDFNEFDFNKIIKKYKKVKRNFGNI

SEQ ID NO: 120591 - protein, 215 aa, Unknown
  Bacterial polypetide isolated from the Sargasso Sea
PRIAGHKEGINSVREITRVCGEIGVKHLTLYTFSTENWKRPSSEVSALMSLLLKTIKEEIIELHKKNVRFTIIGDLDTIPIKTANGLRDGIDMTKNNKGLNLNLALNYGSHQEIIRAVKNLALKVQQGEIDPENIDKEKISEFLYTSNISDPELLIRTSGEHRLSNFLLWQIAYTEIYMTDLFWPEFREQELFDAILEFQSRERRFGNVKKMIQG

SEQ ID NO: 120592 - protein, 196 aa, Unknown
  Bacterial polypetide isolated from the Sargasso Sea
MGVLNVEKIINASIKKKIKFLSLYTFSTENWKRPKSEINFLLKLLENYIDKELTNLKKKGVKIKIIGDIDKFPNSLKKKLKITELITKNNNFIQVNVALNYGSRQELINCLKKIQKKTLKINEKNISENLYTKGIPDPDILIRTGNTKRLSNFLLWQLTYSEIFFERKLWPDFTERDYTRIINKFKKTNRNFGGLI

SEQ ID NO: 120593 - protein, 229 aa, Unknown
  Bacterial polypetide isolated from the Sargasso Sea
EIMTNMNPLRHVAIIMDGNGRWGLKNKNSRNAGHKAGLNTVEKIIKQTIKNKISFLTLFAFSTENWKRPKKEINFLFSLLENFLKKRIEELHSQNIKLKILGSKKFSSKLNKLLNKSEKKTSKNTKLQINLALNYGSKSELIEAFKKMKKNKSMINEKNLSKNLQTRNIPDPDLLIRTGDTKRLSNFLLWQLAYSEIFFEKKLWPAFNEKDYNRIIKEYKNIKRNFGKI

SEQ ID NO: 120594 - protein, 235 aa, Unknown
  Bacterial polypetide isolated from the Sargasso Sea
KKPSTKIITPKHVAIIMDGNNRWTKKHKFRGFKGHEKGIEAIQNAIDVAKIYKIKFLTLFSFSSENWSRPKKEVNFLMNLLRNYLSDKINDLIKDNISIKMIGEKSRIPKDILNKIKKYEELTSKKKGLKLILALNYGSRKEITIAIKNLFSNSKKKNIIINEKTISANLFTNNFPDPDLLIRTSGEKRLSNFLLWQLAYTELVFLKVLWPDFKKKHFVDALMQYSKRKRRYGSR

SEQ ID NO: 120595 - protein, 165 aa, Unknown
  Bacterial polypetide isolated from the Sargasso Sea
MNPLNHVAIIMDGNGRWGLKYKNSRNAGHKAGLKTVEKIIKETIKNKISYLTLFAFSTENWKRPKKEINYLFNLLENFLSNSVSDLHKQNIKLKILGSKKFSPKLNKLLNNSEKKTSKNNKLQINLALNYGSKSELIDAFKKIKKSKIIVNEKNLSINLQTKNIP

SEQ ID NO: 120596 - protein, 199 aa, Unknown
  Bacterial polypetide isolated from the Sargasso Sea
NAGHRAGLNTVEKIIKETINQKIKYLTLYAFSTENWKRPRKEIKYLFGLLEDFLITKIDELNDQNIKLKIIGIKNFSIKLNKLLNLAEKKTCKNTKLQINLALNYGSKSEIISALKKLKKNKKPISEKNLTENLQTKNIPDPEILIRTGNTQRLSNFLLWQAAYSEIFFEKKLWPSFERSDFKKIIKKYKSIKRNFGSI

SEQ ID NO: 120597 - protein, 215 aa, Unknown
  Bacterial polypetide isolated from the Sargasso Sea
GHKAGVKVLRNLIEHAVHLELKTLTVYAFSRENWQRPKKEVELLLDLFISSLESEVKDLHENNIKLNFIGETDKFSEKLKKSMSKSESLTSNNSKLTLNVALNYSGRWDVYKALLSIIDDMTAKKITKNDVNEELINTKLSLADYDEPDLLIRTGGEKRLSNYLLWQIAYTELYFTNTLWPDFNTDQFDLALDWYTKRQRRFGKTSEQIEKNKNA

SEQ ID NO: 120598 - protein, 223 aa, Unknown
  Bacterial polypetide isolated from the Sargasso Sea
MSLGNIIDKTNIDLSKRIDKQKIPEHVAIIMDGNGRWATKKGLPRSFGHNKGVSVLKDIIKASKKLGCKVLTVYAFSTENWNRPTQEVDFLINLFSEVLKNEIEEIHQESIKIKLIGDITPFPENLKKIINSSESLTKKNNSFLLNVCVNYGGRQEIVKVAKELAFKCSSGEIKPSEVNEKLFNSKLLTRGIKDPELLIRTSGEKRISNFLLWQLAYSEIYIS

SEQ ID NO: 120599 - protein, 225 aa, Unknown
  Bacterial polypetide isolated from the Sargasso Sea
NMNPLKHVAIIMDGNGRWGLKNKNSRNAGHRAGLNTVEKIIKETIKNNIKFLTLYAFSTENWKRPKKEINFLFNLLENFLKEKIEDLNKQKIKLKIIGKKSFSTKLNSLLNLSERKTSKNKRLQINLALNYGSKAELISAFQELGKNKESINEKNVRKYLQTRNIPDPDLLIRTGNTKRLSNFLLWQIAYSEIFFEKKLWPDFNEKDYYKIIKKYKNIKRNFGNI

SEQ ID NO: 120600 - protein, 213 aa, Unknown
  Bacterial polypetide isolated from the Sargasso Sea
MKNLPKNIGIIMDGNRRWASNRKLPTAYGHSQGVKALKKIVKSCSEINISQLNIFAFSSENWKRDPLEIRSIMHLIETYLKSEIAELNSQNICFKVFGNKEKINKKINILIESAEKITCNNNGLKLNIALSYSGRNDILYSTKNIAEKVSLGKLKVNDISEDLFQKNLLSSYVDDIDLLIRTSGEQRLSNFLLWQLQYSEIYFSNKLWPRFYL

SEQ ID NO: 120601 - protein, 193 aa, Unknown
  Bacterial polypetide isolated from the Sargasso Sea
LNTVEKIIKCSIKKKIKYLTLFAFSTENWKRPKKEINFLFKMLESFLEKKINDFNTQNIKLKIIGNINVFNKKLKSKLKYSEKLTRNNKKLQINLALNYGSQYEILNAIKIINKKNKKFNIKNLEKNLYTKNIPNPDILIRTGNTFRLSNFLLWQMAYTEIFFVKKLWPDFLEKDYVKILSKYENTKRNFGNI

SEQ ID NO: 120602 - protein, 189 aa, Unknown
  Bacterial polypetide isolated from the Sargasso Sea
MSLGKIIDTKNNNLSMKIDKQKVPEHVAIIMDGNGRWATKKGFPRTYGHKKGVSVLKEILKASKNLGCKVLTVYAFSTENWTRPTKEVDFLINLFSEVLRNEIGKIHEESTKIKFIGDLTPFPENLKKIISNSESLTKNNNKFLLNVCVNYGGRQEIVKVAKELALKSSSGEINPSEVNEELFNSELLT

SEQ ID NO: 120603 - protein, 112 aa, Unknown
  Bacterial polypetide isolated from the Sargasso Sea
DRVVLQTKDNTGTYVNLLFNYGSRDEINDAIKSIIKNNNKAVNIRNYFYVPKSQDPDLIIRTGGEKRLSNFMLWQAAYAELYFTKVLWPDFSIIHLRKAIIDYFKRVRKHGK

SEQ ID NO: 120604 - protein, 128 aa, Unknown
  Bacterial polypetide isolated from the Sargasso Sea
GVNITKDNNGLNLCLALNYGSRQEIIDAVKTTAIKVTQREIKPDDITEEYFSDLLYTKGVPDPDLLIRTSGECRLSNFLLWQIAYTEIFMTDTYWPAFREKELMDAIFDFQSRERRFGKVSEQVANTI

SEQ ID NO: 120605 - protein, 141 aa, Unknown
  Bacterial polypetide isolated from the Sargasso Sea
IEFNKNNIKLKIIGIKKFSPKLNALLTQSEKKTKNNKKLQINLALNYGSKHEIIHAIKKLIKLQKKIDEKNISKCLFTENVPDPDLLIRTGNTHRLSNFLLWQIAYSEIFFEQKMWPDFNEKDYNKILNKFKNIKRNFGNI

SEQ ID NO: 120606 - protein, 173 aa, Unknown
  Bacterial polypetide isolated from the Sargasso Sea
TLYAFSTENWKRPKKEINYLFSLLENFLISRIDELHKQNIKLKIIGVKNFSSKLNNLLNKSEKKTSKNSKLQINLALNYGSKFELINAFKNLKKKNEMINEKNLAKYLQTKNIPDPDLLIRTGNTQRLSNFLLWQAAYAEIFFEKKLWPEFNEKDYNKIIKKFKNIKRNFGKV

SEQ ID NO: 120607 - protein, 222 aa, Unknown
  Bacterial polypetide isolated from the Sargasso Sea
MNKLNHVAFILDGNGRWGKKKRKGRNFGHLKGVETVKKIVKAAIKLKIPIITFYVFSSENWKRPENEKKYIFKLIKIYFNKEIKNIVKEGIKINILGELNKFSSDLRISLKKSVDLTKKNKRIIVNLAINYGSKNEIFKALKKTKNSLTIKNFEKNLYTTNMPNPDILIRTGGYQRLSNFLLWQLAYAELFFLKKLWPDFNSNDLLKIIKKYKKINRNYGNI

SEQ ID NO: 120608 - protein, 129 aa, Unknown
  Bacterial polypetide isolated from the Sargasso Sea
MVSQMHIGIIMDGNGRWAVEKGRPRAFGHRKGASRVTEIVKACPQLGVETLTLYAFSTENWNRAAHEVESLMRLFRGYLQNKFLSLVENNVKVKFIGDPSPIASDLRLQMGNLEKATESNYGLNLNVAL

SEQ ID NO: 120609 - protein, 144 aa, Unknown
  Bacterial polypetide isolated from the Sargasso Sea
MNSPKHVAIIMDGNGRWGIKKKKSRNFGHKAGLKTVENIIKETIKNKIKFLTLFAFSTENWRRPKNEVTYLFNLLENFIKNRIIEFNKNNIKLKIIGVKKFSPKLNRLLTESEKKTEYNNKLQINLALNYGSKDEIIYTVKKLI

SEQ ID NO: 120610 - protein, 123 aa, Unknown
  Bacterial polypetide isolated from the Sargasso Sea
MKIDKQKLPKHIAIIMDGNGRWATRKGFPRSFGHKQGVSVLKNILKSAKNLGCKVITVYAFSTENWSRPTKEVNFLINLFSEVLKNEIQEIHEESIKIKFIGDLTPFPKHLKEIISSSESLTK

SEQ ID NO: 120611 - protein, 107 aa, Unknown
  Bacterial polypetide isolated from the Sargasso Sea
KNKRLQINLALNYGSKTELINAFKELKKNKENINEKNLKKYLETKNIPDPDLLIRTGNTMRLSNFLLWQLAYSEIFFEKKLWPDFNEKDYNKIIKNYKNIKRNFGNI

SEQ ID NO: 120612 - protein, 173 aa, Unknown
  Bacterial polypetide isolated from the Sargasso Sea
MITEELDIDNIPNHIAIIMDGNGRWAKEKGLPRIAGHKEGINSVRDITRACGEIGVKYLTLYTFSTENWNRPKKEVNALMSLLLRTIKKEVRELHKNNVKFSTIGDLSFLPNITENGLKEGMDLTKNNTGLNLILALNYGSRQEIIDSVINISGKVKSGEIDISHIDETLFSS

SEQ ID NO: 120613 - protein, 203 aa, Unknown
  Bacterial polypetide isolated from the Sargasso Sea
KSRNYGHNEGVKVVEKIIAEAISNNIKYLTLFTFSTENWKRPKKEISFLMYLLEQYIKKELKNLLKKNIKIKIIGNIRKFPKKLKQRLREAEIQTLRNTKIQINIALNYGSKEEIIKTVKKLNKQSIPINEKNISKNLYTKDMPDPEILIRTGNRFRLSNFLLWQSSYTEIFFVKKLWPDFSKKDFNYIIKNFKKIRRNFGGI

SEQ ID NO: 120614 - protein, 196 aa, Unknown
  Bacterial polypetide isolated from the Sargasso Sea
QKGVKVIEKIVKASINANIPILTFYTFSSENWKRPKKEISFLFKLINYYFIKEINNLIKNNIKIKVIGNIKNLPGKVRLSLIDSMKKTKHCNKILVNLAINYGSQNEILEATKQMYKKGLSFNSKNLQNNLYTKGIPNPDILIRTGGKKRLSNFLLWQMAYTEIYFINKLWPDFKVIDYFKIINNFKKVKRNFGNI

SEQ ID NO: 120615 - protein, 248 aa, Unknown
  Bacterial polypetide isolated from the Sargasso Sea
MQQSKKEKILSGYIPEHIAIIMDGNGRWARSRSLPRIAGHKEGINSVREITRICGEIGVKYLTLYTFSTENWKRPRAEVSALMTLLLKTVNHEIEALNKNNVRFTIIGDLNILPSNTTKGLIDGVDITKNNDGLNLCLALNYGSRQEIIDAIKTAAIKVKEGEIKPDDITEQTFSNLLYTKDIPDPDLLIRTSGECRLSNFLLWQIAYTEILMTDTYWPAFREEELMDAIFDFQSRERRFGKVSEQVA

SEQ ID NO: 120616 - protein, 179 aa, Unknown
  Bacterial polypetide isolated from the Sargasso Sea
MANKSSKKNNYPANIGIIMDGNGRWALKNSLKISQGHKKGVDIVKKIVEESVKQNIKSLTLYAFSSENWKRPKPEVNAIKKLVVEAINEQVPELKEQKVRLKFFGHLDDFGKKILDKIAYAEHTTKLESSKLDLNIALGYGGQQDIVDVVKNISLKVLSKEIKIKDINEKTINKNSSVP

SEQ ID NO: 120617 - protein, 217 aa, Unknown
  Bacterial polypetide isolated from the Sargasso Sea
MNPLNHVAIIMDGNGRWGLKNKNSRNAGHKAGLKTVEKIIKHSIKRKIKFLTLYAFSTENWKRPDSEIKYLFNLLEVFLKEKIQQLHSNGIKIKILGNKNLNKKLKTLLTYAEKKTSKNKKIQINLALNYGSKKEILDTIKKLIKYKKKITEENFKNNLYTKNIPNPDILIRTGNTKRLSNFLMWQLTYSEMYFEKKLWPDFNEIDYDKIIKKYSQI

SEQ ID NO: 120618 - protein, 234 aa, Unknown
  Bacterial polypetide isolated from the Sargasso Sea
MSPAASPPVPRHLAVIMDGNGRWAERRRRPRAIGHRAGARAVNVCIDFCLERGIGALTLFAFSSENWGRPEEEVGALMKLFLNALDREVEELHRRQVRVRFIGDRARFSADIRARMDAAEALTAGNTRLHLVIAASYGGRQDIAFAARALAADVAAGRLRPEDIDEAALGAHVALADLPPPDLFIRTGGDHRISNFLLWQLAYTELWFTDVLWPDLDATLLQRALDDFARRERR

SEQ ID NO: 120619 - protein, 253 aa, Unknown
  Bacterial polypetide isolated from the Sargasso Sea
MTSSQNNHPETIPNQPKHVGIIMDGNGRWARIRGKRRIFGHEAGVLKARELVETAVKIKLEALTLYAFSSENWSRPKKEVSGLMSLFEKTIEKYTSLLIDNNVRFKTAGDPSMLPDVLKRKLQQMESITSENSGLKLTLAIAYGGQQEIINGIKKLIDDHDNQIIDVNDLTVESFNEYLSFNDLPELDLIIRTSGETRLSNFMLWQSAYSEIHFTETLWPNFEEQEFLEILQTYSLSERRFGNVDEDTELKEA

SEQ ID NO: 120620 - protein, 224 aa, Unknown
  Bacterial polypetide isolated from the Sargasso Sea
MNPLNHVAIIMDGNGRWGLKFKNSRNAGHKEGLKTVEKIIRASIKKDIKFLTLFAFSTENWKRPKKEINYLFSLLKNFLENQAKELEKKNIKLKFFGIKVSDKNLQKLIIQSEKKTQKNKKLQLNIAINYGAKNEIISAVNKLNKENKKITEMNIEKNLYTKNIPDPDILIRTGNTKRLSNFLLWQLAYSEIFFEEKLWPDFNEKDFNKIIRKYLTIKRNFGSI

SEQ ID NO: 120621 - protein, 223 aa, Unknown
  Bacterial polypetide isolated from the Sargasso Sea
MNHLAIIMDGNGRWAIHQKKPRVFGHQAGAQTAKKIINDCVEKKIPYLTLYTFSKENWSRPKEEIETLMDLLSVMLEGELENMLRNNIRFNVVGRIEDLPKKTREFTLSTIEKTKNNTGLVLTLALSYGGRQEIIDAINSMIKSGEKIINEDILKNHLYCPELPDPDLIIRTGGEYRLSNFLLWQSAYAEIYTSGKNWPDFDSEDLKKAIKEYDNRNRTYGKV

SEQ ID NO: 120622 - protein, 264 aa, Unknown
  Bacterial polypetide isolated from the Sargasso Sea
IINGIKDAALYLSGFYSIYSKRLESEILEGDMPNHIAIILDGNRRWAKRNLTIQEKGHFKGADAVENLLDWCEEFDIKIITLYVLSAENLDRKNDELDYLYDLIYKRLEKLYNDPRIHKNKMRVKAIGTIELLPESIKEVLGRLDKVTKNYDKHFLNIAIAYGGQNELVDAVKKIGMKIKNGELDAKEINKEVIESNLYTSHLPQSSPDMILRTSGEKRMSGFLLWQSAYSELVFLDIFWPEFRKIDLMRAIRTFQKRKRRIGK

SEQ ID NO: 120623 - protein, 171 aa, Unknown
  Bacterial polypetide isolated from the Sargasso Sea
MAIIMDGNGRWGLKHKNSRNLGHKEGLKTVEMVMRHCIKKQVKFLTLYAFSTENWKRPKKERNYLFNLLEIYLKEKLEEINNKKIKIKILGEKNFSKNLNKLLDFAEKKTMKNKKLQINLALNYGSKKEIVYAFHKFKRKSRISENDINNNLYTKNIPESRNSYTNRKHPK

SEQ ID NO: 120624 - protein, 186 aa, Unknown
  Bacterial polypetide isolated from the Sargasso Sea
MNPLNHVAIIMDGNGRWGLKKYNSRNKGHKAGLDVIEKVIKVSIDSKIKYLTLFAFSTENWKRPKSEVKYLFNLLENFLLVKLNELHKKNIKLKIIGEKKFSKKINNLLVKCEKLTKNNSILQINLALNYGSKQEIINAVKNINNKKLKITEKNLTESLYTRGVPDPDILIRTGKTKRLSNFLLWQ

SEQ ID NO: 120625 - protein, 219 aa, Unknown
  Bacterial polypetide isolated from the Sargasso Sea
HVAIIMDGNGRWGLKHKNSRNAGHQAGLKTVEKIIKESIKHKVKFLTLYAFSTENWRRPKNEIDFLFSLLETFLINRIDELHKQDIKLKIIGVKNFSVKLNKLLNSAEKKTSRNKKLQLNLALNYGSKFELINAFKKLKKNKKTINEKNLSQYLQTKNIPDPELLIRTGNTMRLSNFLLWQLAYSEIFFEKKLWPEFNDKDYDKIIKKFKNIKRNFGNI

SEQ ID NO: 120626 - protein, 108 aa, Unknown
  Bacterial polypetide isolated from the Sargasso Sea
MGREKDAREQAELRAHGSIPKHIAIIMDGNGRWAERRDLTRTEGHRSARDVVRGTVRACGELQVDVLTLFTFGTENWNRPWGEVLSLMQLIRDSSMEELPELQDNNVR

SEQ ID NO: 120627 - protein, 254 aa, Unknown
  Bacterial polypetide isolated from the Sargasso Sea
LSVKIDKQKVPKHVAIIMDGNGRWATRKGLPRSFGHKQGVSVLKKILKAAKNLGCKVITVYAFSTENWARPTKEVDFLINLFSEVLKNEIKEIHEESTKIKFIGDLTPFPKNLKEIIYSSECLTQNNNKFLFNVCVNYGGRQEIVKVAKELALKSSSGEIKPSEINEELFNSELLTRGIKDPELLIRTSGEKRISNFLLWQLAYSEIYISEVLWPDFNEYEFLKAIIDYQSRNRRFGGIESLPNESFKDSQFSS

SEQ ID NO: 120628 - protein, 160 aa, Unknown
  Bacterial polypetide isolated from the Sargasso Sea
MSYLEQINENKLPNHLAIIMDGNGRWAKQKGFLRAFGHENGTKSVRVTVETCAKLGIKNLTLYAFSTENWNRPKLEVDTLMKLLISSLKQEEATLMKNNIKLNAIGNLTTLPKNVYKELHEVIEKTKNNNRMTLTLALSYGSREELIQVVKNISNKVKII

SEQ ID NO: 120629 - protein, 205 aa, Unknown
  Bacterial polypetide isolated from the Sargasso Sea
MDNDSSEILKEKIQEIFKSSKLSVPNHVGFIMDGNRRWAAENKKPVFYGHKEGTKNLESLVDFSIKIGIKFLTIYTFSTENWERPKLEVNYITKTLLSESLNENFDNLNELGVKILIKGSIDKLDNPLKNKIINAQKKTQQNKSISLVIAFDYGGRNEIVNAVKKILDDNIDSKNVTEELFDKYINKNEVPDPDLIIRTGGEYRL

SEQ ID NO: 120630 - protein, 181 aa, Unknown
  Bacterial polypetide isolated from the Sargasso Sea
MNATKIQTLPSHVAIIMDGNNRWAKAKNLPGVSGHQQGVERAREAVEYAVEKKLDTLTLFAFSSENWGRSNEEVSLLMKLLAQALEEQVPNLIKNKVQLSFIGDLTKFDADLQDRMKKAEKLTECDKEKNLDLIIAASYGGRWDIVQALEKINASQGEIEINEELISSNTSLGPFSDPDLC

SEQ ID NO: 120631 - protein, 174 aa, Unknown
  Bacterial polypetide isolated from the Sargasso Sea
MNPIKHVAIIMDGNGRWGLKKRKSRNYGHKKGLDTVEKIIKASIKNKIKYLTLYAFSTENWKRPKKEIHFLFNLLENYLENKITQLNKQNIKLKIIGNKKFSKKLNNLLISSEKKTSKNNKLQINLALNYGSKNELVDTFKMIKKNNIKINEKNISKHLFTKNIPDPDFLIRTG

SEQ ID NO: 120632 - protein, 85 aa, Unknown
  Bacterial polypetide isolated from the Sargasso Sea
FKELKKNKEDINEKNLNKYLQTYNTPDPDLLIRTGDTKRLSNFLLWQLAYSEIFFEKKLWPDFNEKDYNKIIKKYKNIKRNFGNI

SEQ ID NO: 120633 - protein, 189 aa, Unknown
  Bacterial polypetide isolated from the Sargasso Sea
EKIVQASIKLKIPIITFYTFSSENWKRPKKEIGFLFNLIKYYFTKEINNLVKNSIKINIIGNIKPLPKNVKICLINSMKKTKKCNKILVNLAINYGSQNEIIETTKKIYKKKIPINMKNFEKNLYTKNIVNPDILIRTGGKKRLSNFLLWQMAYTELYFVNKLWPDFKINDYTKIINNFKKVKRNYGNI

SEQ ID NO: 120634 - protein, 101 aa, Unknown
  Bacterial polypetide isolated from the Sargasso Sea
MNPLKHVAIIMDGNGRWGLKNKNSRNAGHRAGLNTVEKIIKETIRNKIKFLTLYAFSTENWKRPKKEINFLFNLLESFLKEKIEDLNKKKIKLKIIGKKNF

SEQ ID NO: 120635 - protein, 249 aa, Unknown
  Bacterial polypetide isolated from the Sargasso Sea
QNNHPETIPNQPKHVGIIMDGNGRWARIRGKRRIFGHEAGVLKARELVETAVKIKLEALTLYAFSSENWSRPKKEVSGLMSLFEKTIEKYTSLLIDNNVRFKTAGDPSMLPDVLKRKLQQMESITSENSGLKLTLAIAYGGQQEIINGIKKLIDDHDNQIIDVNDLTVESFNEYLSFNDLPELDLIIRTSGETRLSNFMLWQSAYSEIHFTETLWPNFEEQEFLEILQTYSLSERRFGNVDEDTELKEA

SEQ ID NO: 120636 - protein, 204 aa, Unknown
  Bacterial polypetide isolated from the Sargasso Sea
MNKLNHVAFIMDGNGRWGKKKNKGRNFGHFKGVEVVKKIVKSSIKIKIPIVSFFVFSTENWKRPKKEIFYLFKLIKSYFDKEISMIVKEGIKINILGDQRKLPSNIKSTLKKTIKLTKKNKKIIVNLAINYGSKNEILNSFKQVKKKINTKNFKKYLYTKNMPDPDILIRTGGHKRLSNFMLWQLAYTELYFLKKLWPDLKQKI

SEQ ID NO: 120637 - protein, 260 aa, Unknown
  Bacterial polypetide isolated from the Sargasso Sea
MSRPPVTSHDTTPSSLCPAELDSQQLPAHVAVIMDGNGRWAESRGLPRAMGHRAGVEALKSTLRLCSDWGIAALTAYAFSTENWSRPGDEVNFLMTLFERVLQKELRTLEDEQVRIRFLGDLDALPLKLQELIGDATERTAANGGIHFNVCTNYGGRRELVRAAQRLARQAANGDLVPEDIDENSLAAELFTAEEQDPDLLIRTSGEHRISNFLLWQLAYAEIHVTDVFWPDFNAKALKRALLDFQSRSRRFGGLDPLTP

SEQ ID NO: 120638 - protein, 74 aa, Unknown
  Bacterial polypetide isolated from the Sargasso Sea
SEKNINKNLQTQNIPDPDLLIRTGNTKRLSNFLLWQLAYSEIFFEKKLWPDFNENDYNKIINEYKSIKRNFGNI

SEQ ID NO: 120639 - protein, 115 aa, Unknown
  Bacterial polypetide isolated from the Sargasso Sea
MSFLEKIDPKSLPQHVGIIMDGNGRWAAERHMPRIHGHRSAVNAVRASVEAAAEMGLNVLTLFAFSTENWQRPKKEVSALMELFYEFLEKELHTMLENNVRFQLIGDRYKLPDFL

SEQ ID NO: 120640 - protein, 215 aa, Unknown
  Bacterial polypetide isolated from the Sargasso Sea
MDGNGRWGKKRGKSRNFGHLNGIKVIEKLVQDSIKIKIPILTFYTFSSENWKRPKKEITFLFKLIDHYFIKEINNLVKNSVKINIIGKINGLPNRVKTRLLDSMRRTKKCKKILVNLAINYGSKNEIISAIKGLRRKNQSISAINLKKNLYTWNIPDPDILIRTGGKKRLSNFLLWQLAYSELYFINKLWPDFTTKDYHKVIKHFKRVKRNFGNI

SEQ ID NO: 120641 - protein, 268 aa, Unknown
  Bacterial polypetide isolated from the Sargasso Sea
ANVDAIHPGIGMLSENFSFAKIVNDHGFKFIGPKYDHIEKMSDKVKAKNFAKELGLPIIPGSKKNIKNFSEAKTISKEIGYPVLVKATNGGGGRGIKKVSNESELKDNFLLAKKETIQSFGNDNVYIEKFIENPRHIEVQIIGDNNGNLIHVGEREDILQATKKLVEQAVREGREVEVTEDAFAPHLAMAYAPEPDLFIRTGGEQRVSNFLLWQLAYAEFYFTDKYWPDFDGAALADAMASYTERERRFGRTSAQLEPQSQNADSLSC

SEQ ID NO: 120642 - protein, 225 aa, Unknown
  Bacterial polypetide isolated from the Sargasso Sea
MNKINHIAIIMDGNGRWGKKRGKSRKFGHSNGVRVIEKVVKSSIKSKISILTFYTFSTENWKRPKTEINFLFKLIENYFVKEINNLVKNNIRINVIGNTKKLPEKIKQRLKESVNRTKKCKKILVNLALNYGSKDEIINSIRLMKKKRQNISVKNFEKNLYTNRIPNPDLLIRTGGKKRLSNFLLWQLAYSELYFMDKLWPDFTTADFYKIIKNFKKVKRNFGKI

SEQ ID NO: 120643 - protein, 140 aa, Unknown
  Bacterial polypetide isolated from the Sargasso Sea
MSSPKHVAIIMDGNGRWGLKNKNSRNLGHKAGINTVEKIIKSSIKNNIKYLTLYAFSTENWKRPIFEINFLINLLESYLKEKIDELYSNGIKLKIIGDISKFPKKIQNSLKFAQNKTKKNKNLNLVLALNYGFKSELILM

SEQ ID NO: 120644 - protein, 122 aa, Unknown
  Bacterial polypetide isolated from the Sargasso Sea
NNKGLKLNIALNYGGKIDILTAVRSMVDDVQKGVLESTNINESTLENYLLSNSVSEIDLLIRTSGESRISNFLLWQICYSEIYFTETLWPDFNEKHFDLAIQTFRCRNRRFGNNSSKLKMEG

SEQ ID NO: 120645 - protein, 119 aa, Unknown
  Bacterial polypetide isolated from the Sargasso Sea
KEKLNESMKRTQKCKKILVNLAINYGSKDEILNSIKKLIKTKQKISKKNLNRNLYTKNLVDPDILIRTGGKKRLSNFLLWQLAYSELYFEKKLWPDYTVSDYKKVIDNFKRVKRNFGNI

SEQ ID NO: 120646 - protein, 235 aa, Unknown
  Bacterial polypetide isolated from the Sargasso Sea
MTSNSSNKIGHVAIIMDGNSRWARQRNLKTIEGHRQGVNRLRDIVEYSAKSEITHLSVFAFSSENWKRSASDVSDLMKLFLQSIIKEVPELIENKVQLNFIGDIPRFSKSLVSQINSAMKDTQAKKPNLNLNVAISYGGRWDILNAIKRMKDHKINIDKLNEDDFSNLLSTSNFPDPDLLIRTGDEIRISNFFLWQISYSELYFSEITYGTDFKLSNFKFALNKFSARDRRFGKE

SEQ ID NO: 120647 - protein, 225 aa, Unknown
  Bacterial polypetide isolated from the Sargasso Sea
MNPIQHVAIIMDGNGRWGKKHKNSRNAGHKAGLNTVENIINSSIKNKIKYLTLYAFSTENWKRPQSEIKFLFKLLNNFIDQKIDEFNKNDIKLKILGNINIFNLKLKKKLIKSEEITKNNMRLQVNLALNYGSKSELIYAFNKLKKKKLSITEKNLEKYLYTDKIPDPDILIRTGNTKRLSNFLLWQLAYTEIFFEKKLWPDFNRKDYSKILKKFKVTKRNYGNI

SEQ ID NO: 120648 - protein, 63 aa, Unknown
  Bacterial polypetide isolated from the Sargasso Sea
DLIIRTGGENRLSNFLLWQSAYSEIYISEKNWPEFGEDDLTSALNDFSSRTRKYGKVLGQDEN

SEQ ID NO: 120649 - protein, 225 aa, Unknown
  Bacterial polypetide isolated from the Sargasso Sea
MSEISHVAIIMDGNGRWGLKKYKSRKFGHQKGIETVENIIEASIKTKIKYLTLYTFSTENWKRPKYEVNFLFKLLSEYLKKNLDILLKNNLKLKILGDINKFPRQLKNSLNKAMKLTSKNKKLQINLALNYGSKDEIVNSFKIIQKKKIAININNIEKNLYTQNIPDPDILIRTGNTNRLSNFLLWQLSYSEIFFVKKLWPDFNKKDYYRILKNYKTIKRKFGNI

SEQ ID NO: 120650 - protein, 90 aa, Unknown
  Bacterial polypetide isolated from the Sargasso Sea
NKNNLDTNSIDENIFSSYLDTNNCPDPDLLIRTSGELRISNFLLWQSAYTEMYLTDTYWPSFRKNELFQAIFEFQNRERRFGKISEQVEN

SEQ ID NO: 120651 - protein, 203 aa, Unknown
  Bacterial polypetide isolated from the Sargasso Sea
KELGCKILTVFAFSTENWSRPRKEVDFLINLFSEVLEKEIEEIHKDSIKIKFIGDLTPFSEAFKERIYSSESLTKNNNFLLNICLNYGGRQEIVNVAKEIALKTSSGEIKPSEVNEELFNSEILTRGIKDPELLIRTSGEKRISNFLLWQLAYSEIYISEVLWPDFNESEFLKAIIDYQSRNRRFGGIESLPNESFEDSQYSS

SEQ ID NO: 120652 - protein, 163 aa, Unknown
  Bacterial polypetide isolated from the Sargasso Sea
MNPLKHVAIIMDGNGRWGIKNKNSRNAGHKAGLITVENIIKASLKKRIKFLTLYVFSTENWNRPKKEVNYLFNLLENFLKKELDSLNKNNIKLKILGKKKFSKKLNNLLSLCEKKTKNNEDLQVNLALNYGSKTEIINAFKIIDKKNLKINEKNISKNLYTNK

SEQ ID NO: 120653 - protein, 78 aa, Unknown
  Bacterial polypetide isolated from the Sargasso Sea
KSDINEKNISKNLQTRNIPDPDLLIRTGDTKRLSNFLLWQLAYAEIFFEKKLWPAFNEKDYSKIIKDYKNIKRNFGKI

SEQ ID NO: 120654 - protein, 117 aa, Unknown
  Bacterial polypetide isolated from the Sargasso Sea
LLRISEKKTSKNKKLQINLALNYGSKAELINAFKELKKRNEAINEKNLKKYLQSNNTPDPDLLIRTGDTKRLSNFLLWQLAYSEIFFEKKLWPDFNEKDYNKIIRKYKNIKRNFGNI

SEQ ID NO: 120655 - protein, 162 aa, Unknown
  Bacterial polypetide isolated from the Sargasso Sea
GTINKEIDNLDKNNVKLSTIGNLNDLPKEPLQGMANGVKKTKNNTGLNLILALSYGSRQELIMAFKRIVNKIEIGEMKLEDISQENISKELYTSNIPDPDLLIRTGGENRISNFLLWQSAYTELYMTDKFWPDFREAELLHSILDYQTRQRRYGQTSEQVSE

SEQ ID NO: 120656 - protein, 162 aa, Unknown
  Bacterial polypetide isolated from the Sargasso Sea
MISNKLKPNHIAIIMDGNGRWAIDQGLDRSAGHLKGYENIKPTVIAAKKLGIKHLTIFAFSTENWTRSSEEIKFILNLATDVIDSETDELNKNGVKIRHIGSKKNLPKNILKKIDRSEEITKNNDDFFLTVAFNYGSRNEIVQSVRKLKVSDLKNLTENSFS

SEQ ID NO: 120657 - protein, 71 aa, Unknown
  Bacterial polypetide isolated from the Sargasso Sea
ANLPLPDLCIRTGGEKRISNFLLWQLAYAELYFSDLYWPDFKQAALREAMADFAGRQRRFGKTSEQIATGA

SEQ ID NO: 120658 - protein, 196 aa, Unknown
  Bacterial polypetide isolated from the Sargasso Sea
CIAWCDDVGIDYITSWLFSRENLARPKEELEPYFEILNELFEELLIDDVVDNFKIEFIGSTDLLPDFLQTTINQLEEVRGGGQKTLTIALGYGGRQEILDAIKGLIYENRNQENDFDRLIENVTDEQLRQHLYSPETPDIDLIIRTSGESRLSGFLLWQSAYSEVIFQDVYWPEFRKIDFLRCLREYAQRERRFGQ

SEQ ID NO: 120659 - protein, 222 aa, Unknown
  Bacterial polypetide isolated from the Sargasso Sea
MHVGLIMDGNGRWATRKGFNRIEGHKSGAKVVEEIIRSCSQAGVKTLTLYAFSTENWSRAKDEIKGLMDLFNYYISRHLTEMISNGIRIKFLGSKDGLPDKIVDLINNATEKSAYNNKFFLNIAINYGGRDEIVRAVRKIAKNVKNGLIDVDDIDEKTITSMLDTSSQKDPDLIIRTAGEQRLSNFLSWQSAYSEFYFSGLEWPEFNKTEFFKALESYKSRV

SEQ ID NO: 120660 - protein, 177 aa, Unknown
  Bacterial polypetide isolated from the Sargasso Sea
VYAFSTENWKRPKSEVKAINNLIVNSINNELDELIEQKVKVRFFGDYSNFGKKTYEKIKFAEEKSFSNKPQLRLNVALGYGGKMDIINIAREVSRLKIKASDIDDQTINELSQVPESNIDLLIRTGGDTRISNFLLYQIAYSEIHFVKKLWPDYSKQDFKRNINKYFNSERRFGERT

SEQ ID NO: 120661 - protein, 184 aa, Unknown
  Bacterial polypetide isolated from the Sargasso Sea
YLTIFAFSTENWKRTQLEVSGLMKLFKRYIYKETQPLVEAGVRVRFIGDRVRLEPSLVNLMDQLEQLTENNSAVNLTIAINYGARDEVTRAAKRMAKDVLSGELNVDSINEETLPKYLDTHVLPDPGLVIRTSGEARISNFLLWQSAYAEYEFIDTLWPDFTKEIFSSLVSEFGNRERRFGGVL

SEQ ID NO: 120662 - protein, 86 aa, Unknown
  Bacterial polypetide isolated from the Sargasso Sea
MQKKLNAATMPKHIAIIMDGNGRWAKKQKKPRSFGHKAGVSTLRETIKHCLEFKIKHLSVYAFSTENWKRPEKEVTFLLKLLATMI

SEQ ID NO: 120663 - protein, 224 aa, Unknown
  Bacterial polypetide isolated from the Sargasso Sea
EAAAELGLNVLTLFAFSTENWHRPEKEVSALMELFYEFLEKELNTMLKNNVRFRLIGDRKKLPSFLQDRLSNALNSTSNNSGLLLNIALNYGGRDEISRAVRKLSELVKKGELQPENIDEALISANTYTADLPDPDLIIRTSGELRLSNFLIWQAAYAEFYFTEVLWPDFNKEDLHKALLDYQNRKRRMGRTNSSALIPKPKKYSSRMVSDKSKKANLLKLQLE

SEQ ID NO: 120664 - protein, 61 aa, Unknown
  Bacterial polypetide isolated from the Sargasso Sea
MNPLNHVAIIMDGNGRWGLKHKNSRNAGHRAGLNTVEKIIKESIKQKIKHLTLYAFSTENW

SEQ ID NO: 120665 - protein, 211 aa, Unknown
  Bacterial polypetide isolated from the Sargasso Sea
MNPLNHVAIIMDGNGRWGLKNKKSRNEGHRAGLNTIENILKETIKQKIKFITLFTFSTENWNRPKKEIKYLFNLLENFLHNKIENLNKKNIKLKIIGYKNFSPELNKLLRKSENLTAQNTKLQINLALNYGSKMELIETFKKLKKLKKKFTEKNVSKNLFTNEIPDPDLLIRTGNTKRLSNFLLWQLAYTEIHFEKKLWPDFNVIDYKKNY

SEQ ID NO: 120666 - protein, 231 aa, Unknown
  Bacterial polypetide isolated from the Sargasso Sea
KRKRSFTIMNKLNHVAFIMDGNGRWGKKKNKNRNSGHYAGVKTVKKVVETSIKLKIPIVTFYVFSTENWKRPKTEINFLFNLVNSYFKSELINVIKNGIKINIMGELGRLPKKLKHVLKETVKKTKKNKKILVNLALNYGSKRELINAFKKIKLRKITENNVKNNLYTKKIPDPDILIRTGGKKRLSNFMLWQLAYSELYFLDKLWPDFKAKDLQKILKHYYKIKRNFGGI

SEQ ID NO: 120667 - protein, 121 aa, Unknown
  Bacterial polypetide isolated from the Sargasso Sea
MNPIQHVAIIMDGNGRWGLKHKKSRNLGHKAGLNTVEKIIKETIKNKIKYLTLFAFSTENWKRPKKEITYLFNLLEEFLTKKIENLNKNKIRFKLIGNKKKFSRRLKNILQKSEQITKKNK

SEQ ID NO: 120668 - protein, 224 aa, Unknown
  Bacterial polypetide isolated from the Sargasso Sea
MNHIKHVAIIMDGNGRWGIKHKNSRNLGHKEGLKTVERIIKSTVKNRIKYLTLYAFSTENWKRPKKEINFLFSLLESFLKSKISDLNKQKIKLKVIGNKKFSKKINNLLKKSEKLTLKNKRLQINLALNYGSKNEIINAINEIKKNKLKVTETNLSKNLFTKKIPDPDILIRTGNTKRLSNFLLWQLAYSEIYFEKKLWPDFNEQDYNKILNNFKKVKRNFGNI

SEQ ID NO: 120669 - protein, 73 aa, Unknown
  Bacterial polypetide isolated from the Sargasso Sea
MPQILNHLAIIMDGNRRWARNLGIEVLKGHHRGADTLKDISQTAINLKIEWMTVFAFSSENWQRPRAEVRGLL

SEQ ID NO: 120670 - protein, 59 aa, Unknown
  Bacterial polypetide isolated from the Sargasso Sea
RTGGEYRLSNFLLWQSAYSELLISETFWPDFRESDLLNSIADYQNRQRRFGQTAEQVKS

SEQ ID NO: 120671 - protein, 183 aa, Unknown
  Bacterial polypetide isolated from the Sargasso Sea
SIKKKIPILTFYTFSTENWKRPKKEIKFLFKLIENYFNKEIINLKKNGVKLDILGNINTLPKKIKKCLINSKKITKKCNNIRVNLAINYGSKNEIINAFKNIKKNKTKFTIKDFEKNLYTKGIPDPDLLIRTGGKKRLSNFLLWQLSYSEIYFINKLWPDFKVNDFIKILNHFKNVTRNFGKV

SEQ ID NO: 120672 - protein, 264 aa, Unknown
  Bacterial polypetide isolated from the Sargasso Sea
RWQIINGIKDAALYLSGFYSIYSKRLESEILEGDMPNHIAIILDGNRRWAKRNLTIQEKGHFKGADAVENLLDWCEEFDIKIITLYVLSAENLDRKNEELDYLYDLIYKRLEKLYNDPRIHKNKMRVKAIGTIELLPESIKEVLGRLDKVTKNYDKHFLNIAIAYGGQNELVDAVKKIGMKIKNGELDAEEINKEVIESNLYTSHLPQSSPDMILRTSGEKRMSGFLLWQSAYSELVFLDIFWPEFRKIDLMRAIRTFQKRKRR

SEQ ID NO: 120673 - protein, 241 aa, Unknown
  Bacterial polypetide isolated from the Sargasso Sea
MEGIQPATLPNHVAIIMDGNNRWASERELPGVSGHKRGVERAREAVEFSVKKGISVLTLFAFSSENWGRSADEVNLLMKLLYTALHEEVPNLIKNSVQLNFIGDLSQFDKDLIEQMRNSEYQTRCKKGDKKLDLVVAASYGGRWDIVNAVNEIQKSNQKKIITEEIFNSYLSTASFPYPDLCIRTGHEKRISNFLLWQLAYSELYFPDLLWPDFDDNQFEQAINEYAKRTRRFGDKSNFKI

SEQ ID NO: 120674 - protein, 137 aa, Unknown
  Bacterial polypetide isolated from the Sargasso Sea
KQNIKLKILGSKKFSPKLNKLLNKSEKKTSKNNKLQINLALNYGSKSELISAFKKIKLRKNIISEKNVAKNLQTKNIPDPDLLIRTGNTKRLSNFLLWQLAYAEIFFEKKLWPAFNEKDYNRIIKEYKSIKRNFGKI

SEQ ID NO: 120675 - protein, 75 aa, Unknown
  Bacterial polypetide isolated from the Sargasso Sea
MNPIKHVAVIMDGNGRWGLKNKKSRNLGHKAGLKTVEMIIKHSIKKKIKFLTLYAFSTENWKRPSSEKNFLFNLL

SEQ ID NO: 120676 - protein, 184 aa, Unknown
  Bacterial polypetide isolated from the Sargasso Sea
KKSIKYNIKFLTLFAFSTENWKRPKKEIDYLFNLLESFLISRIDEFDKQDIKFKVIGKKNFSKKLNLLLNSAEKKTSKNSKIQINLALNYGSKFELVNAFKKIIKNNININEKNIEKFLYTKNIPNPDILIRTGNTKRLSNFLLWQLAYSEIFFEKKLWPDFNEKDYSKIINKFRKVKRNYGNI

SEQ ID NO: 120677 - protein, 121 aa, Unknown
  Bacterial polypetide isolated from the Sargasso Sea
MSRSQTDEATLDERLTLLNMPKHVAIIMDGNGRWAKKKGKIRTFGHRAGVESVRAAVRFARKNAIQSLTLFAFSSENWKRPEEEVSVLMDLFNLVLNSEAKRLNKNGVRLKVLGDTSRFDR

SEQ ID NO: 120678 - protein, 149 aa, Unknown
  Bacterial polypetide isolated from the Sargasso Sea
FLGDPSPIQSDIVDQMQNLEEATKKNDGLTLNIALNYGGQDEIVRAAKKFGLETAKGTQNPADLTVAGFEKYLDTANQSHPDLIIRTAGQQRLSNFLLWQVAYSEFYFTKTNWPDFSIKELVQILSEFSERERTFGGNNTVDQKQQLSL

SEQ ID NO: 120679 - protein, 124 aa, Unknown
  Bacterial polypetide isolated from the Sargasso Sea
IIESTKDNTGMTLTLALSYGGKQEIFKAVKEISEKVKNDIICLDNFDDSVINDHLYTSNLPDVDLLIRTSGEKRISNFLLWQIAYAELYFTDVYWPDFTEEDLEKAIVEYQNRERRFGKTSKQL

SEQ ID NO: 120680 - protein, 224 aa, Unknown
  Bacterial polypetide isolated from the Sargasso Sea
MNPLNHVAIIMDGNGRWGLKYRNSRNAGHKAGLNTVEKIIKETIKHKIKFLTLYAFSTENWKRPKKEINYLFNLLEVFLLKRIEDLHKQNIKIKIIGNKNFSKKLNRLLKLAEKKTVNNTKLHINLALNYGSKFELINAFKILSKKKDPINEKNFVKYLQTKNTPDPDLLIRTGNTNRLSNFLLWQLAYSEIFFEKKLWPAFNEKDYNLIIKKFKKIKRNFGRI

SEQ ID NO: 120681 - protein, 215 aa, Unknown
  Bacterial polypetide isolated from the Sargasso Sea
MNPLNHVAIIMDGNGRWGLKNKNSRNAGHKAGLKTVEKIIKHSIKSKIKFLTLYAFSTENWKRPDSEIKYLFDLLEIFLRKKIQQLYSNGIKIKILGNKNLNKRLRNLLINVEKKTSKNKKIQINLALNYGSKKEILDTIKKLIKYKKKITEENFTNNLYTKNIPNPDILIRTGNTKRLSNFLVWQLAYSELFFEKKLWPDFNENDYDKIIKKYS

SEQ ID NO: 120682 - protein, 220 aa, Unknown
  Bacterial polypetide isolated from the Sargasso Sea
IHVAIIMDGNGRWGLKNKNSRNAGHKAGLNSVEKIIKETIKHDIKFLTLYAFSTENWKRPKREIKFLFNLLEDFLINKIEDLNKQKIRLKIIGKKNFSTKLNNLLRLSEKKTFKNKRLQINLALNYGSKIELIDAFKELKKNRDAINEKNLKKYLQTKNIPDPDILIRTGNTNRLSNFLLWQLAYSEIFFEKKLWPDFNENDYNKIIKKYKGIKRNFGNI

SEQ ID NO: 120683 - protein, 202 aa, Unknown
  Bacterial polypetide isolated from the Sargasso Sea
NSRNAGHKAGLNTVEKIIKETIKNKIKFLTLYAFSTENWKRPKKEINYLFNLLENFLVNRIEELHKQNIKLKIIGIKNFSSKLNKLLNLSEKKTSKNNKLQINLALNYGSKFELINAFKSLKKSKEKITEKNLNKFLLTKNIPDPDLLIRTGNTKRLSNFLLWQLAYSEIFFEKKLWPDFTEKDYNIIIKKFKNIKRNFGKI

SEQ ID NO: 120684 - protein, 91 aa, Unknown
  Bacterial polypetide isolated from the Sargasso Sea
MNPLNHVAIIMDGNGRWGIKYKKSRNAGHKAGLITVEKIIKESIKRNIKFLTLYAFSTENWKRPKKEINYLFDLLEKFLAKKLNKLNNQKY

SEQ ID NO: 120685 - protein, 248 aa, Unknown
  Bacterial polypetide isolated from the Sargasso Sea
MTSSENNHLEKIPNQPQHVGIIMDGNGRWAKIRGKRRIFGHEAGVVKARELLETAVKIELEALTLYAFSSENWSRPKKEVSGLMSLFEKTIEKYTNLLIEKNVRFKIAGDPSMLPDILKRKLEQTESITSENSGLKLTLAIAYGGQQDIINGIRNLINDHENKIINVNDLTVESFKDYLSFKDLPELDLIIRTSGETRLSNFMLWQSAYSEIHFTETLWPSFEEKEFLDILQTYSLSERRFGNVDEDT

SEQ ID NO: 120686 - protein, 206 aa, Unknown
  Bacterial polypetide isolated from the Sargasso Sea
GHLMGKGTLENLSEWCRNLDIKYLTVYAFSLENFSRDEKELDPLMDLFEESFLNAADDPQVHKNKVRIRSIGHRELLPERVIKAIDYAEDKTKDYEDYNYNLAVAYGGRQEIVRSMTKIAEKIKTGELDSKDIDVDLISDNLYTSNLPDPDLILRTSGEERVSNFLLWQLAYSELYFADVFWPEMRKIDFLRAIRSFQQRQRRIGR

SEQ ID NO: 120687 - protein, 205 aa, Unknown
  Bacterial polypetide isolated from the Sargasso Sea
RKGVERAREAVEFAVKKGISTLTIFAFSSENWGRSNEEVNLLMQLLNTALKEQVPNLIENSVQLNFIGDLTQFDSDLLNEMKKSEDLTVCNEKEKKLDLVVAASYGGRWDIINAFNSLKESNKDKISEEDLTSLLSTSKFRDPDLCIRTGKEKRISNFLLWQLAYTELYFPDLLWPDFDDDEFEKAILEYSTRTRRFGDKSNFSL

SEQ ID NO: 120688 - protein, 219 aa, Unknown
  Bacterial polypetide isolated from the Sargasso Sea
KHIAIIMDGNGSWALERGLNRDKGHIEGLKTLQIIVSCCLDMHIKNLTVFALSHENVNRPKSEIRNLYNLFIESIQKNLEFAHQKKIKISFVGNFSVFPKSLLTKIKVAQESTKNYKNMNLNIAINYGGIQDIEHAVKGIIASGKKKYNIKEFLYTKDLPDVDLLIRTGGYQRMSNFLLWQITYSEIYFTKTKWPSFKKSNFLKSLDWYNKIERKFGKL

SEQ ID NO: 120689 - protein, 221 aa, Unknown
  Bacterial polypetide isolated from the Sargasso Sea
AEKRGEKRIKGHIKGVKSVKIVVEEAAKLKIKFLTLFTFSTENWNRPKTEIDTLMKLLVSSLKDEFEELNKNNIKLNTIGNINNLPNKVQKELNYVENKTSKNSGMVLTLALSYGAKEEITNALKIISDKVKNNIISIEKVDQYTINNHLYTHNLPDVDLLIRSSGEQRISNFLLWQIAYAELYFTDILWPDFNKLDFYKALDFYNERERRFGKTSKQIND

SEQ ID NO: 120690 - protein, 233 aa, Unknown
  Bacterial polypetide isolated from the Sargasso Sea
MSNLKHVAIIMDGNGRWAQNKGLSRAEGHIAGTQNIRRVVRQLIVENVQYVSLYAFSTENWDRPVAEVDSLLQILSDSIANETAEMHEEGVRIRHLGRIDRLPNSLQKAIENSVNLTSRNTVINLNVAFDYGGRDEIVQAVRRLVESEVKPDQITEETLTERLYTGGMPDPDLIIRTAGEMRISNFMIWQASYSEYYSSPACWPDFDEIELKNALAEYSRRKRKFGALNKAVT

SEQ ID NO: 120691 - protein, 232 aa, Unknown
  Bacterial polypetide isolated from the Sargasso Sea
MHIGIIMDGNGRWAANRGRPRAFGHRKGASRVTEIVKACPDLGVKTLTLYAFSTENWNRAAHEVESLMRLFRGYLQNKFISLVENNVKVRFIGNPTPIAADLRLQMRDLEKATATNDGLNLNVALNYGGRDEIIRTCRKIAAQIQNNQIGLSDINETLFETHLDTAKQENPDFILRTAGEQRISNFLLWQAAYSEFYFTDLTWPEFTADDLRGAVYDLTERSRTFGKNKIGK

SEQ ID NO: 120692 - protein, 67 aa, Unknown
  Bacterial polypetide isolated from the Sargasso Sea
YLQTKNIPDPDLLIRTGNTKRLSNFLLWQLAYSEIFFEKKLWPEFTEKDYNKIIRNFKKVKRNFGNI

SEQ ID NO: 120693 - protein, 138 aa, Unknown
  Bacterial polypetide isolated from the Sargasso Sea
MPQILSHLAIIMDGNRRWARNLGIEVLKGHHHGADTLMNISQTAINEKIEWLTVFAFSSENWQRPRAEVRGLLELMKRFVTAQSKDLIDNNIRLRVVGRRDRFSSELQQSIADVERRSSHNTGLNLTVALDYGGRQDM

SEQ ID NO: 120694 - protein, 134 aa, Unknown
  Bacterial polypetide isolated from the Sargasso Sea
MSSTVEFEPDPNAELEQVTSNMLPCKLSDVVKQSLPKHVAIIMDGNGRWAQQQGKARVFGHKAGVKAVRRAVSTASQLGIESLTLFAFSSENWRRPDKEVNLLMELFFTVLQRELKLLDKNQVKLNIIGDISRF

SEQ ID NO: 120695 - protein, 247 aa, Unknown
  Bacterial polypetide isolated from the Sargasso Sea
MANINEINKENIPKHVAIIMDGNGRWAKQKGKLRVFGHKNGVKAVQSTIEGAARIGIKYITLYAFSTENWNRPKFEVNALMELLVDTIQKEINTLNKNKIRLKAIGDLSTLPKKAKDKLKNAIEETAKNDHMTLVLALSYSSKWEIINAVKKICKKVKSDELSSDEINERIIDNCLSTKGIPDPELMIRTSGEHRVSNFLLWQLAYAELYFTPKLWPDFREDDLFEALLSFQKRERRFGKTSEQITE

SEQ ID NO: 120696 - protein, 70 aa, Unknown
  Bacterial polypetide isolated from the Sargasso Sea
LISSNLYTSGLPDPDLILRTSGEERISNFLLWQLAYSELYFADVFWPEMRKIDFLRAIRAFQMRKRRLGH

SEQ ID NO: 120697 - protein, 243 aa, Unknown
  Bacterial polypetide isolated from the Sargasso Sea
MNIKELGIQHVAIIMDGNGRWATEKNLDRTAGHAAGEHALSKAIYWALENNLSWLTVYAFSTENWTRSTEEVDFLMFFNRDILIRRREEFHEKGVKFNFIGDLKDKRIPEENKKLMKETEHITKDNKKLNLVFAFNYGSHKEIHNAVHKTAFGHYFYLKLNAWLFTKKHIEENFKNYMYLPEMPNPDILIRTAGEKRLSNFLLYQLSYTELMFIDTLWPDFDEDDFYNIVEEYKKRVRKYGKA

SEQ ID NO: 120698 - protein, 185 aa, Unknown
  Bacterial polypetide isolated from the Sargasso Sea
VKNLTLYVFSMENWKRPETEVKALMHLLFSSIDSELENLNKNNIRLSVIGQKDLLPEKTKKRLIEAVDQTSKNTGLKLNLAISYGSKQEIIEAVKSISNKVKKNIISLENIDENIINDHLYTRNLDNVDLLIRTGGEIRLSNFLLWQISYAELFFLDLLWPDFKKKHFYEAVIEYQNRARRFGKV

SEQ ID NO: 120699 - protein, 204 aa, Unknown
  Bacterial polypetide isolated from the Sargasso Sea
MHIGFILDGNGRWASNKGLPRAIGHKKGAENVEAILRHCIDLNIERVTLYAFSTENWDRPVYEVKALMSLFKYYLNKKLIQLHEENVKVSIIGDIEPFPKIIKKYIQNLTKLTKHNDGMYLNLALNYGGRAEIVRATKRIGLQLLQKKILLEDVNEKNFALNLDTGTQPYPDLIVRTAGERRLSNFLLWQSAYSELYFSKKTWP

SEQ ID NO: 120700 - protein, 70 aa, Unknown
  Bacterial polypetide isolated from the Sargasso Sea
LKNHLYCPDLPNPDMIIRTGGEYRLSNFLLWQSAYSEIYVCDKNWPDFDVEELEKALKEYDNRNRTFGKV

SEQ ID NO: 120701 - protein, 224 aa, Unknown
  Bacterial polypetide isolated from the Sargasso Sea
MNPLKHVAIIMDGNGRWGLKYKKSRNAGHKEGLKTVEKIIKETINNNIQFLTLYAFSTENWKRPEKEVSYLLNLLENFLVNRIEDFYKQNIKLKIIGKKKFSKKLNKLLNDSEKKTLNNNKLQINLALNYGSKSELVSAFKKTIKNKEKINIKNIEKNLQTKNIPDPDIIIRTGNTNRLSNFLLWQLAYSEIFFEKKLWPQFNEKDYNKIIKKFKKIKRNFGSI

SEQ ID NO: 120702 - protein, 265 aa, Unknown
  Bacterial polypetide isolated from the Sargasso Sea
LEKIIDKKNADLSKSIDKQKVPEHIAIIMDGNGRWATKKGLPRSFGHNKGVSVLKEIIKASKKLGSKILTVYAFSTENWTRPTKEVDFLINLFDKVLKNEIKEIHQELIKIKFIGDLTPFPENLKETIYNAESITKNNNNFLLNVCANYGGRQEIVKVAKELVLRSYSGEIKPSEVNEELFNSELLTQGIKDPELLIRTSGEKRISNFLLWQLAYSEIYISEVLWPDFNEFEFLKAIIDYQSRNRRFGGIESLPNESFQDSGCSS

SEQ ID NO: 120703 - protein, 89 aa, Unknown
  Bacterial polypetide isolated from the Sargasso Sea
MKNDRPLKHLAIIMDGNGRWALNQDLPRTAGHAAGEHSLSRTIDWAIANKLEWLTVYAFSTENWLRSEEEVDFLMFFNRDILIRKKRRV

SEQ ID NO: 120704 - protein, 225 aa, Unknown
  Bacterial polypetide isolated from the Sargasso Sea
MTSPKHVAIIMDGNGRWGLKRKKTRNFGHQQGIKTVEKIINASIYFNIKFLTLYTFSTENWKRPTNEINFLFRLLENYLVKQINNLIKKNVKIKIIGNINKFPLSLKSKLKEAEFLTKKNNKIQINVALNYGSREEIIYSVKKINKLSLSINQKNITNFLYTSKVPDPEILIRTGNTNRLSNFLLWQSIYTEIFFEKKLWPDFNKNDLKRILDKFKMINRTFGGI

SEQ ID NO: 120705 - protein, 152 aa, Unknown
  Bacterial polypetide isolated from the Sargasso Sea
MNHIRHVAIIMDGNGRWGLKQKKSRNFGHKAGLKTVEKIIKETIKNKIKFLTLYAFSTENWKRPKKEINFLFNLLENFLLNRLEQFHKQNIKLKIIGIKNFSSKLNKLLNDSEKKTAKNNKLQINLALNYGSKSELIGAFKNLYKSKDKLNE

SEQ ID NO: 120706 - protein, 241 aa, Unknown
  Bacterial polypetide isolated from the Sargasso Sea
MLVPNTNDNNLEHVAIIMDGNGRWAQNKGRPRLFGHQAGARRVREIVESCPDLGIKYLTIFAFSTENWKRTQIEVSGLMKLFKHYIYKETKPLIDAGVRVRFIGDRVRLEASLVKLMDQLENLTKENTEVNLTIAINYGGRDEVARAAERMARDVQSGNLSVENINEETLPRYLDTHVLPDPGLVIRTSGEARISNFLLWQSAYSEYEFIDTLWPDFTAEIFSSIVNEFENRERRFGGIIK

SEQ ID NO: 120707 - protein, 258 aa, Unknown
  Bacterial polypetide isolated from the Sargasso Sea
MPSKHPTGTSDGVNNPVAIPSTNQPTRTADQQKAEPSDKSLPQHVAIIMDGNGRWAKKRNLPRIEGHRQGVTSVRKVTEHAARRNIKQLTLYCLSSENWRRPKAELDFLMLLLEQYMIEERSLLMREHIRPVMIGNRTGLPNRTLAAIDETIDMCRNNTGMRLCLAVNYGGRAEIVEATKTLARQVASGSLQPDEIDEKSVESHLETNGMPDPDLLIRTAGEMRLSNFLLWQMSYAEFWVTSDLWPDFTENHLDQALA

SEQ ID NO: 120708 - protein, 264 aa, Unknown
  Bacterial polypetide isolated from the Sargasso Sea
MSATVHNTLIDKIDYSNIPNHVAIIMDGNGRWARKLNRERFFGHNTGINSVRESLDISIELGIETLTLYAFSIENWNRPKNEVNALMSLLSNTIEKELTNIQENNIKLNVIGNLDLLPKNTRDKLLNGVEKTNNNNGLNLNLAVSYGAKQEMIRAVKLISDKVKKNIISQENIDEDTINEHLYTRNSKNVDLLIRTGGEYRISNFLLWQISYAELNFQDVLWPDFKKKHFLNAIIDYQKRTRRFGKMKLRLFTFILIFLSGFSL

SEQ ID NO: 120709 - protein, 149 aa, Unknown
  Bacterial polypetide isolated from the Sargasso Sea
MNQIKHVAIIMDGNGRWGIKHKKSRNLGHKEGINTVEKIIKASIKNKIKYLTLYAFSTENWKRPKKEINFLFNLLENFLLNKISEFNRQSIKLKVIGKKKFSKKINLLLKKSEKSTFKNKKLQINLALNYGSKSELVHSFNMIKKNKKK

SEQ ID NO: 120710 - protein, 214 aa, Unknown
  Bacterial polypetide isolated from the Sargasso Sea
MNPIRHIAVIMDGNGRWGVKHKKSRNLGHKEGLKTVEKIIRISVKNKIKYLTLFAFSTENWKRPKKEVNFLFELLENFLKDKINMLVENNIKLKIIGNQIFLSKINKLLKKSEKLTKKNTKLQINLALNYGSKNELVNSFKNIYKQKKKINEKNVSKYLYTSKIPDPDLLIRTGNTHRLSNFMLWQLAYSEIYFEKKLWPDFTEKDFNKILKNF

SEQ ID NO: 120711 - protein, 184 aa, Unknown
  Bacterial polypetide isolated from the Sargasso Sea
MNHLHHVAIIMDGNGRWGIKKKKSRNFGHKAGLNTVEKIIKSSIKNKVKYLTLYAFSTENWKRPKNEIKFLFNLLDSFIDKKINEFIKNNIRFKVIGDISVFNKKLQKKLNDSEKITLKNKKLQVNLALNYGSKVELIRAFKRLNEKRLNVNLKNLEKNLYTAGIPDPEILIRTGNTHRLSNFF

SEQ ID NO: 120712 - protein, 117 aa, Unknown
  Bacterial polypetide isolated from the Sargasso Sea
MLNIIDDVTSLTRDNKGTIVNLLFNYGSRQEIIDAIDKIKKLKNPSRNLKDYFYVPESKDPDLIIRTGGEIRLSNFMLWQSAYAELYFTKVLWPDFKIGNLSRALDQLMKRNRNYGQ

SEQ ID NO: 120713 - protein, 209 aa, Unknown
  Bacterial polypetide isolated from the Sargasso Sea
MNPLYHVAIIMDGNGRWGLKNKNSRNAGHRAGLNTVEKIIKETIKNKIRFLTLYAFSTENWKRPKKEIKFLFKLLEDFLRDKIKDLNKQKIRLKIIGKKNFSPKLNNLLRFSEKKTIKNKRLQINLALNYGSKLELIDAFKELKKNKDAINEKNLKKYLQTKNIPDPDLLIRTGNTNRLSNFLLWQLAYSEIFFEKKLWPDFNEKDYNK

SEQ ID NO: 120714 - protein, 215 aa, Unknown
  Bacterial polypetide isolated from the Sargasso Sea
MDGNGRWGIKKKNSRNLGHKAGLKTVETIIKASIKNNIKFLTLYAFSTENWKRPKLEVKFLINLLESFLIEKINNLVNQGISLKVIGDLKKFPKNIQNHLINAQKKTKKNSKLKLILALNYGSKNELINAMKLINYNKAQVNESSVKNFLYTKGIPDPDILIRTGNTNRLSNFLLWQLSYSEIFFVKKMWPDFNERDYKNIIEKFKKIKRNFGTI

SEQ ID NO: 120715 - protein, 227 aa, Unknown
  Bacterial polypetide isolated from the Sargasso Sea
MASANPANNPKNVGIIMDGNGRWAKQNSMITNRGHEKGVAVVKEVVKEAVRQKLQSLTLYAFSTENWSRPKKEISGIKRLIIEAIHEQVPELAEQKVKLNFFGDIETFGKKVHTNILQAEKATSFTKPALNLNIALGYGGRSDIINGIRIIVDEAKKTKKDLQIDETSFFNYLSAPINDLDVLIRTGGDHRISNFLLYHIAYTELIFVDKLWPDFSSNDFQDCLNFF

SEQ ID NO: 120716 - protein, 208 aa, Unknown
  Bacterial polypetide isolated from the Sargasso Sea
GRKKNKSRNFGHIKGIKIIEKLVKDSIKIKVPILTFYTFSTENWRRPKKEINFLFKLIDHYFFKEINNLVKNNIKINIVGNIKILPKKVRLRLIESMRRTNKCKKILINLAINYGSKNEILEAVRSMRRKKVSTSVKNFENNLYTKNLPDPDILIRTGGKKRLSNFLLWQLAYSEIYFVDKLWPDFNVTDYHRVIKDFKRVKRNFGNI

SEQ ID NO: 120717 - protein, 204 aa, Unknown
  Bacterial polypetide isolated from the Sargasso Sea
MAIIMDGNGRWGLKHKNSRNLGHKEGLKTVEMVIKYCIKKKIKFLTLYAFSTENWKRPLKERNYLFRLLEIYLIEKLEKLNNEKIKIKIIGEKKFYNKLNKLLDFAEKRTKKNTKLQINLALNYGSKKEIVYAFNKLKKRKKISENDINNNLYTKNIPDPEILIRTGNTQRLSNFLLWQSAYTEIFFEKRLWPDFKYEDLNKII

SEQ ID NO: 120718 - protein, 252 aa, Unknown
  Bacterial polypetide isolated from the Sargasso Sea
MKIDKQKLPKHVAIIMDGNGRWATRKGLPRSFGHKRGVSVLKKILKVAKNLGCKVITVYAFSTENWTRPTKEVDFLINLFSEVLKNEIKEIHEESTKIKFIGDLTPFPKNLKEIIFSSESLTKNNNKFLFNVCVNYGGRQEIVKVAKELALKSSAGEIKPSEINEELFNSELLTGGIKDPELLIRTSGEKRISNFLLWQLAYSEIYISDVLWPEFNEHEFLKAIIDYQSRNRRFGGIESLPNESFEDSQYFS

SEQ ID NO: 120719 - protein, 225 aa, Unknown
  Bacterial polypetide isolated from the Sargasso Sea
MSKINHVAIIMDGNGRWGIKKYNSRKIGHQKGIKTVEKIIEASIKKKIKYLTLFTFSTENWKRPKYEINFLFKLLSEYLTKNLKILLKNNLKLNILGDTSKFPNNLKKSLANATKLTSNNTKLQLNLALNYGSKDEISRSIKLLIKKKQKPNIKNIEKNLYTKDMPDPDILIRTGNTNRLSNFLLWQLSYSEIFFVKKLWPEFSKKDFYIILNEYKKIKRKFGNI

SEQ ID NO: 120720 - protein, 273 aa, Unknown
  Bacterial polypetide isolated from the Sargasso Sea
MRLNNLQLKKNNLNLSNELDKERIPEHIAIIMDGNGRWATKKGLPRSFGHNKGVSVLKEIIKASKNIDCKVLTVYAFSTENWNRPSKEVDFLINLFEKVLKKEISEIHQESIKIKFIGDLSPLPNSLKLLIKSSEALTNNNKKFTLNICINYGGRQEIVKAAKEIAIKSSQGKIKLSDIDEQLFNSELLTKGSKDPELLIRTSGEKRISNFLLWQLAYSEIYITDVLWPDFTEREFLKAIIDYQSRNRRFGGIESLSNESFEDSCYSSVSKND

SEQ ID NO: 120721 - protein, 249 aa, Unknown
  Bacterial polypetide isolated from the Sargasso Sea
MEIENINRSHLKNVPKHIAIIMDGNGRWAKERGLPRIAGHREGINSVREITRICGEIGVKYLTLFTFSTENWNRPKREVKALMTLLLSTIKKETKELHKNNVKFSTIGDISILPKSTEKGIKEGIKLTSNNSGLNLILALNYGSRQEILSAVNNIISDINKKDIEIDSIDENIFSSYLYTNNCPDPDLLIRTSGELRISNFLLWQSAYTEMYLTDTYWPSFRENELFQAILDFQNRERRFGKTSEQLDS

SEQ ID NO: 120722 - protein, 241 aa, Unknown
  Bacterial polypetide isolated from the Sargasso Sea
MLVPNTNDNNLEHVAIIMDGNGRWAQNKGRPRLFGHQAGARRVREIVESCPDLGIKYLTIFAFSTENWKRTQIEVSGLMKLFKRYIYKETKPLIDAGVRVRFIGDRVRLEASLVKLMDQLENLTKENTEVNLTIAINYGGRDEVARAAKRMARDVQSGDLSVEKINEETLPRYLDTHVLPDPGLVIRTSGEARISNFLLWQSAYSEYEFIDTLWPDFTAEIFSSIVNEFENRERRFGGITK

SEQ ID NO: 120723 - protein, 224 aa, Unknown
  Bacterial polypetide isolated from the Sargasso Sea
MNPLNHIAIIMDGNGRWGIKHKKSRNAGHKKGLGTVEKIIKTSIKQKIKFLTLFAFSTENWKRPRQEINYLFKLLQSFLISRIDDLDKQGIKLNIIGKKNFSKKLNKILKFSEKKTSSNSRIQINLALNYGSKSELINAFKKLKKKNESINEKNIKKNLLTYNVPDPEILIRTGNTKRLSNFLLWQIAYSEIFFEKKLWPDFNEKDYEQIIKKYKNTKRNFGSI

SEQ ID NO: 120724 - protein, 249 aa, Unknown
  Bacterial polypetide isolated from the Sargasso Sea
MPSNRELLDPSRMPRHVGIIMDGNGRWATERRYPRVYGHRNAVKAVRATVEAAVELELEVLTLYAFSTENWKRPVQEVSTLMDLFAEYLQKELKTMLDNNVRFQVAGESQGLPQFLQQPLNHALESTSENTGLLLNLAVNYGGRAELVRAVKKISSLVQSGNLKLEEINEDLISEHTFTPGIPDPDLIIRTSGEKRLSNFLIWQAAYSEYFFTDVLWPDFDKEDFFQALLEFQKRNRRLGRTEPLKETA

SEQ ID NO: 120725 - protein, 223 aa, Unknown
  Bacterial polypetide isolated from the Sargasso Sea
MNKLNHIAFIMDGNGRWGKRRNKNRNFGHYAGVKTVKKIVKSSIKYKIPFVTFYVFSTENWKRPKKEINFLFNLVSNYFKAEINDVIKNGIKINIIGEQNRLPKKLKKILKDTTKKTLKNRKITVNLALNYGSKKELINTFKKLNTKKITEKDVSKNLYTKKLPDPEILIRTGGRKRLSNFMLWQLAYSELYFLDKLWPDFGEKDLKKIIKDYHNIKRNFGGV

SEQ ID NO: 120726 - protein, 252 aa, Unknown
  Bacterial polypetide isolated from the Sargasso Sea
MKPIGKEPNNSFESIVLDSFKENSSLMPSHIAIIMDGNRRWAAKKKIPVFSGHKAGTKNIESILKFMELLGIKFLTLFTFSTENWNRPKKEVNYITKTLLAESLAENFSNLHKLGVKILIKGSIERLDNKTRDNILEAVRKTENNKSINLIIAFDYGGRKEIIETTKKIVNSKVNSEKINEDLFNKFLNDGVPDPDLVIRTGGEYRLSNFLIWQTAYSEFFTSNALWPDFDISEFSKALIEFSKRKRRFGVD

SEQ ID NO: 120727 - protein, 231 aa, Unknown
  Bacterial polypetide isolated from the Sargasso Sea
FSSNKIGHVAIIMDGNSRWARQRNLKTIEGHKQGVNRLRDIVKYSAKSEITHLSVFAFSTENWKRSASDVSDLMKLFLQSIIKEVPELIENKVQLNFIGDIPRFSKSLVSQINSAMKDTQAKKPNLNLNVAISYGGRWDILNAIKRIKDHKINTDKLSEDDFSNLLSTSDFPDPDLLIRTGDEIRISNFFLWQISYSELYFSKLLWPDFKLSNFKSALNKFSKRDRRFGKE

SEQ ID NO: 120728 - protein, 252 aa, Unknown
  Bacterial polypetide isolated from the Sargasso Sea
MKIDKQKLPKHVAIIMDGNGRWATKKGLPRSFGHKQGVSVLKKILKAAKNLGCKVITVYAFSTENWTRPTKEVDFLINLFSEVLKNEIKEIHEESTKIKFIGDLTPFPKNLKEIISSSESLTKNNNKFLFNVCVNYGGRQEIVKVAKRLALKSSSGEIKPSEIDEELFNSELLTRGIKDPELLIRTSGEKRISNFLLWQLAYSEIYISDVLWPEFNEHEFLKAIIDYQSRNRRFGGIESLPNESFEDSQYIS

SEQ ID NO: 120729 - protein, 224 aa, Unknown
  Bacterial polypetide isolated from the Sargasso Sea
MNPLNHVAIIMDGNGRWGKKNKNSRNSGHRQGLKAIEKIIKQTIKRKISYLTLYAFSTENWKRPKKEIDYLFNLLEYFLTKKLDEFHKNKIKLKIIGKKNFSRKLNILLRYAEKKTFNNKTLQVNLALNYGSKSELIDAIKKLKNSKKKVTEKNLIKYLQTSNIPDPDFLIRTGNTKRLSNFLLWQLAYSEIFFVKKLWPDFNEKDFDKIIKEYQSIKRNFGNI

SEQ ID NO: 120730 - protein, 230 aa, Unknown
  Bacterial polypetide isolated from the Sargasso Sea
MIGKRLSAAKSTKAEVPAESAGPKHVAIIMDGNGRWAQRKGKIRTFGHKAGVESVRSVVRFARQNGIESLTLFAFSSENWKRPEEEVSVLMELFNLVLNSEAKRLHKNGVRLQVIGDVEAFDAKLVEKIRKAEDMTKDNKDLVLNIAANYGGRWDIVNAAKQLATQVKSGELDVESICEDALNAHISTANLPELDLLIRTGGEHRISNFLLWQCAYAELYFTDVLWPDFN

SEQ ID NO: 120731 - protein, 203 aa, Unknown
  Bacterial polypetide isolated from the Sargasso Sea
RNSRNVGHKEGLKTVEIIIKSSIKNKIKFLTLYAFSTENWRRPKKEINYLFKLLENFLSKKLDDIHKQNIRIKVLGYKKFSKKLNFLLNFAEKKTIKNSKLQINLALNYGSKSEIINAFKKIKRNKIKINEKNLEKNLQTNNIPDPDILIRTGNTKRLSNFLLWQLAYAEIFFEKKLWPAFSEKDYIKIIKEYKNVKRNFGRI

SEQ ID NO: 120732 - protein, 241 aa, Unknown
  Bacterial polypetide isolated from the Sargasso Sea
MEGNNTETLPKHVAIIMDGNNRWATERNLPGVAGHKEGVKRAREAVEYAVQKGLSTLTLFAFSSENWGRSSEEVNLLMRLLNTALREEVPNLVKNSVQLSFIGDLTQFDKDLIDQMKRSEELTSCDPKVKKLDLVVAASYGGRWDIVNAIQKLQESSPNETITEDIFSSYLSTSAFEDPDLCIRTGNELRVSNFLLWQLAYSELYFPNILWPDFDDNQFEYALKEYSKRTRRFGDKSNFKQ

SEQ ID NO: 120733 - protein, 169 aa, Unknown
  Bacterial polypetide isolated from the Sargasso Sea
MRNEIDQIHEESTKIKFIGDLSPFPETLKKIISSSESLTKNNNKFLLNVCVNYGGRQEIVKVAKELALKSSSGEIKPSEVNEELFNSELLTRGIKDPELLIRTSGEKRISNFLLWQLAYSEIYISDVLWPDFNEFEFLKAIIDYQSRNRRFGGIESLPNESFEDSQYSS

SEQ ID NO: 120734 - protein, 225 aa, Unknown
  Bacterial polypetide isolated from the Sargasso Sea
MNSLQHVAIIMDGNGRWGIKKKKSRNFGHKAGLETVEKIIKSSIKNKIKYLTLFAFSTENWKRPKNEIKFLFKLLDSFIVKKIIEFKKNNIRLKIIGDISNFNKKLKKKLNDSEKITLKNKKLQVNLALNYGSKAEIVRAFKQLNKKRININLKNLEKNLYTSSIPDPEILIRTGNTRRLSNFLLWQLAYTEIFFEKKLWPDFNEKDYTKILNKYKKTKRNFGNI

SEQ ID NO: 120735 - protein, 239 aa, Unknown
  Bacterial polypetide isolated from the Sargasso Sea
MAIKNQNANLKNVAIIMDGNGRWARKNSLKISQGHKKGVQIVREIVEESILQNINSLTIYAFSSENWQRPKSEINAIKKLVVDAINDQVPELKEQKVKLKFFGHTEDFGEKVIKKIKYAESETFCEDYKLNLNVALSYGGKQDILDLVKKISKEVFDKKLNIDDIDESKIHESSCAPVNEIDLLIRTGGDKRISNFLLYQIAYAEIMFIDKFWPEFSKKDFKECVSNFQKVSRRFGKRV

SEQ ID NO: 120736 - protein, 253 aa, Unknown
  Bacterial polypetide isolated from the Sargasso Sea
MTSSQNNHPETIPNQPKHVGIIMDGNGRWAKIRGKRRIFGHEAGVLKARELVETAVKIKLEALTLYAFSSENWSRPKKEVSGLMSLFEKTIEKYTSLLIDNNVRFKTAGDPSMLPDILKRKLEQMESITSENSGLKLTLAIAYGGQQEIINGIKKLIDDHDNQIIDVNDLTVESFNEYLSFNDLPELDLIIRTSGETRLSNFMLWQSAYSEIHFTETLWPNFEEQEFLEILQTYSLSERRFGNVDEDTELKEA

SEQ ID NO: 120737 - protein, 254 aa, Unknown
  Bacterial polypetide isolated from the Sargasso Sea
MVTPKFVYSLYETRLQNNLKNETLPKHIGIIHDGHRRYARRENLLSYEVSYRIGMVRFKECLAWCDELGIDNITSWLLSKENLSRPEDELNSYYLVLNELFEELLIDDLVDNFKINFVGSIDLLPDYLQNSIKKLKEVRGGGEKLLTIALGYGGRQEIVDAMKSLLQENQELEIQDLIKSINDEQIRDHLYSPNSPDIDLIIRTSGESRLSGFLLWQSAYSEVVFQDVYWPEFRKIDFLRCLREYVQRDRRFGK

SEQ ID NO: 120738 - protein, 254 aa, Unknown
  Bacterial polypetide isolated from the Sargasso Sea
MVSPRFIYSLYESRLQKGLPKTELPKHIGLIHDGHRRYARRENLLSYEVSYKIGMVRFKECLSWCDELGIDYVTSWLLSKENLSRPEEELEPYFTVLNELFEELIIDDLVDNFKIQFIGSIDLLPDYLKETIKKLQEVRAGGEKTITIALGYGGRQEILDAIKSLVIENKEKDLEELVEEINDEQIREHLYLPDAPDIDLIIRTSGESRLSGFLLWQSAYSEFVFQDVYWPEFRKIDFLRCLREYVQRERRFGK

SEQ ID NO: 120739 - protein, 275 aa, Unknown
  Bacterial polypetide isolated from the Sargasso Sea
MSSTVEFDPQSRSTEQDACAQTSLPEVLPELVKQSLPKHVAIIMDGNGRWAQTQGKPRVMGHKAGVKAVRRAVSAASQLGIQSLTLFAFSSENWRRPDKEVSLLMELFFTVLQREIKLLDKNQVRLNIIGDISRFSARLQKQIRAAEEKTAGNSGLILNVAANYGGRWDILQAAQKLAEKVENGEMTSSQFTEEALSEHLCMQNQSEVDLMIRTGGDYRISNFVLWQAAYAELVFMDTLWPDFDEQAFHEAIATFASRQRRFGLTGSQIDEMRAL

SEQ ID NO: 120740 - protein, 222 aa, Unknown
  Bacterial polypetide isolated from the Sargasso Sea
GANSRSLPRIAGHKEGINSVREITRICGEIGVKYLTLYTFSTENWKRPPMEVRALMTLLLKTINIEIIELNKNNVRFTIIGDLGVLPSDTSMALQNGIELTKENDGLNLCLALNYGSRQEIIEAIKLFAIQVKEESIEPHDITENKFSQLLYTKDIPDPDLLIRTSGECRLSNFLLWQSAYTEIFMTDTLWPAFRENELMDAILDFQSRERRFGKVSEQVNS

SEQ ID NO: 120741 - protein, 241 aa, Unknown
  Bacterial polypetide isolated from the Sargasso Sea
MSNKLVDNNIPAHIAIIMDGNGRWAKTNSLPRIAGHKEGISSVRAITKKCDEIGVKYLSLYTFSSENWKRPKNEVKALMRLLLSTIRREIKDLNKNNVRLMTIGNLEDLPTNARKGMEEGLEKTKNNSGLNLILALSYGSRNEILRMVKNIAIKSMNGDLDPNKINEDNIIHELDTSKIPDPDLLIRTGGEFRLSNFLLWQIAYSEIYVTKKYWPEFRENELSKAIKEYQTRDRRFGKIFD

SEQ ID NO: 120742 - protein, 155 aa, Unknown
  Bacterial polypetide isolated from the Sargasso Sea
MAIIMDGNGRWGLKHKNSRNSGHKEGLKTVEMVIKYCIKKKIKFLTLYAFSTENWKRPLKERNYLFRLLEIYLIEKLEKLNNEKIKIKILGEKIFSNKLNNLLDFAEKKTVRNTKLQINLALNYGSKKEIVYAFNKLSKRSKISENDINNNLYTK

SEQ ID NO: 120743 - protein, 253 aa, Unknown
  Bacterial polypetide isolated from the Sargasso Sea
MSSSQNTHIEKIPNQPKHVGIIMDGNGRWAKLRGKRRIFGHEAGVLKARELVETSVKIELEALTLYAFSSENWSRPKKEVSGLMSLFERTIEKYTSLLIDNNVRFKTAGDPSMLPKILKRKLEQMESITSENTGLKLTLAIAYGGQQDIINGIKRLIDDHDSQVIDINQMTVESFEDYLSFKDLPELDLIIRTSGETRLSNFMLWQSAYSEIHFTETLWPNFEEQEFLEILQSYSQSERRFGNVDEDIELKEA

SEQ ID NO: 120744 - protein, 225 aa, Unknown
  Bacterial polypetide isolated from the Sargasso Sea
MNKINHIAIIMDGNGRWGRKKGKSRNFGHLNGIKVIEKIVKESLKIKIPTLTFYTFSTENWKRPKNEISFLFRLIDHYFNKEISNLITNNIRINIIGNTKTLPKKVRSRLLESMRRTKKCKKILVNLAINYGSKDEIIKAAQMTKVKNKKITVKNFEDNLYTKGISNPDILIRTGGKKRLSNFLLWQLAYSELYFIDKLWPDFNINDYRKIIKNFKKVKRNFGNI

SEQ ID NO: 120745 - protein, 135 aa, Unknown
  Bacterial polypetide isolated from the Sargasso Sea
KKPFDRINDGILMTKENTGLNLTLALSYGGRQELISAVKSIIRKFIEKPQEYDMIDEKEFKKHLYTSDMPDPDLLIRTGGEKRISNFLLWQIAYTELFMTDAYWPDFREELLMKSIFDFQNRQRRFGKTGDQVSL

SEQ ID NO: 120746 - protein, 249 aa, Unknown
  Bacterial polypetide isolated from the Sargasso Sea
MQKSKRDKVLSDKIPEHIAIIMDGNGRWANSQSLPRIAGHKEGINSVREITRICGEIGVKYLTLYTFSTENWKRPPMEVRALMTLLLKTINIEIIELNKNNVRFTIIGDLGVLPSDTSMALQNGIELTKENDGLNLCLALNYGSRQEIIEAIKLFAIQVKEESIDPHDITENKFSQLLYTKDIPDPDLLIRTSGECRLSNFLLWQSAYTEILMTDTLWPAFRENELMDAILDFQSRERRFGKVSEQVNS

SEQ ID NO: 120747 - protein, 293 aa, Unknown
  Bacterial polypetide isolated from the Sargasso Sea
MGRGRKRAGRLIDNIAKGLLRFRIFSVPARVISNSWLAWSFVSRLDRVRVKRQRDRISRGELPKHVSIIMDGNRRFALSLSLGTEIGHVHGKEKLKEVMDWIMDLGIPYLTVYALSTENLSSREEDELEALFDLYVAGLNEISEDERIHSKGVRVRVVGRKEELPERVNEAIRNAEDRTGDYSNFTFTVCLAYGGREEIVDAVKEIASDHATGELSLDQINTNEISRRLYDAEIPDPDLVIRTSGEERVSNFLLWQIAYSELYFTDVHWPSFSKAVLYEAIETYQMRRRRFGG

SEQ ID NO: 120748 - protein, 244 aa, Unknown
  Bacterial polypetide isolated from the Sargasso Sea
MPRHVAIIMDGNGRWAQNRGKMRVYGHKAGVKSVREAVTFAARAKIDALTLFAFSSENWRRPEGEVSALMELFMTVLGREVQKLHSNGIRLKVIGDTARFSERLQAKIAKAEALTANNQGLTLNIAANYGGQWDIAQAARKLARAVASGELAADQIDEAMLGREVCMADLPPVDLLIRTGGDHRISNFVLWQLAYAELYFTPVLWPDFNEAEFSEAVASFVARERRFGCTGEQIRELIAEQQTG

SEQ ID NO: 120749 - protein, 260 aa, Unknown
  Bacterial polypetide isolated from the Sargasso Sea
MSRPPATSHDTTPSRLCPAELDSQQLPAHVAVIMDGNGRWAKSRGLPRVMGHRAGVEALKSTLRLCSDWGIAALTAYAFSTENWSRPGDEVNFLMTLFERVLQKELRTLEDEQVRIRFLGDLDALPLKLQELIGDATERTAANGGIHFNVCTNYGGRRELVRAAQRLARQAANGDLVPEDIDENSLAAELFTAGEQDPDLLIRTSGEHRISNFLLWQLAYAEIHVTDVFWPDFNAEALKRALLDFQSRSRRFGGLDPLTP

SEQ ID NO: 120750 - protein, 256 aa, Unknown
  Bacterial polypetide isolated from the Sargasso Sea
MSSPRLIYSIYENRLRNKLVNESIPKHIGLIHDGHRRYARKEGLLSFEVSYKIGMTRLKECIGWCDEVGINFITSWLLSRENLSRPQEELEPYFQVLNELFEELLIDDVVDNFKIEFIGSTDLLPDFLQETIKQLKEVRGGGQKTLTIALGYGGRQEILDAIKGLIDQNRKDHNDFDELIENVTDDQLRKHLYSPETPDIDLIIRTSGESRLSGFLLWQSAYSEVIFQDVYWPEFRKIDFLRCLREYSQRERRFGQ

SEQ ID NO: 120751 - protein, 181 aa, Unknown
  Bacterial polypetide isolated from the Sargasso Sea
EVDFLINLFGEVLKNEIKEIHEESTKIKFIGDLTPFPKNLKKIISTSESLTKNNNKFLFNVCVNYGGRQEIVKVAKELALKSSAGEIKPSEINEELFNSELLTGGIKDPELLIRTSGEKRISNFLLWQLAYSEIYISEVLWPEFNEHEFLKAIIDYQSRNRRFGGIESLPNESFEDSQYSS

SEQ ID NO: 120752 - protein, 145 aa, Unknown
  Bacterial polypetide isolated from the Sargasso Sea
MNPLNHVAIIMDGNGRWGLKYKKSRNAGHKAGLNTVEKIIKETIRNKIKFLTLFAFSTENWKRPKKEINYLFNLLENFLINRLEELDKKNIKLKILGVKNFSPKLNKLLNKSEKKTSKNTKLQINLALNYGSKFELINALKNLKK

SEQ ID NO: 120753 - protein, 241 aa, Unknown
  Bacterial polypetide isolated from the Sargasso Sea
MANLNKENIPKHVAIIMDGNGRWAIENSFKISEGHKKGVLTVKDIVEESVKQQLSSLTIYAFSSENWKRPRSEINAIKKLVIDAIDEQVPDLIEQKVRLKFFGHTNDFGNRIIKKIDFAEEKTFVKKSKLDLNVALGYGGKQDIVDITKKISSNILKNKIKLQDINEKIVHESSSVPVKEIDLLIRTGGDKRISNFLLYQIAYAEIMFIEKYWPDFSRKDFIKCLSDFKKIKRRFGRRKVN

SEQ ID NO: 120754 - protein, 179 aa, Unknown
  Bacterial polypetide isolated from the Sargasso Sea
LSRENLSRPQEELEPYFQVLNELFEELLIDDVVDNFKIEFIGSTDLLPDFLQETIKQLKEVRGGGQKTLTIALGYGGRQEILDAIKGLIDQNRNDHNDFDALLENVTDEQLRQHLYSPETPDIDLIIRTSGESRLSGFLLWQSAYSEVIFQDVYWPEFRKIDFLRCLREYSQRERRFGQ

SEQ ID NO: 120755 - protein, 134 aa, Unknown
  Bacterial polypetide isolated from the Sargasso Sea
MNLLNHVAIIMDGNGRWGVKYKNSRNAGHKAGLKIVEKIIKQSIKNKIKYLTLYAFSTENWKRPKKEINYLFNLLEEFLLNKIEDIHKQNVKLKIIGKMNFSKKLNKLLKLSETKTSKNTKLQINLALNYGSKI

SEQ ID NO: 120756 - protein, 245 aa, Unknown
  Bacterial polypetide isolated from the Sargasso Sea
MTSKKNGAVPRHIAVIMDGNGRWAKRRLLPRLAGHKQGVESLRRCARACVERGVQVLTVFAFSSENWNRPQEEVSGLMSLLANALAKEVAQLSRDGVRLYFVGDRQGLSDKVREGLAEAERITAHNTRLVLNVCFNYGGRWDIAQAAQKLVAQGLELSPENLDRAMALAHVPDPDLMIRTGGETRISNFLLWQAAYTELFFSNALWPDFDEAALDEAIAVFGGRERRFGQTSEQIQPSSAVTLTA

SEQ ID NO: 120757 - protein, 177 aa, Unknown
  Bacterial polypetide isolated from the Sargasso Sea
WSRPGDEVNFLMTLFERVLQKELRTLEEEQVRIRFLGDLDALPLKLQELISDATERTAANGGIHFNVCTNYGGRRELVRAAQRLARQAANGDLMPEDIDENSLAAELFTAGEQDPDLLIRTSGEHRISNFLLWQLAYAEIHVTDVFWPDFNAEALKRALLDFQSRSRRFGGLDPLTP

SEQ ID NO: 120758 - protein, 267 aa, Unknown
  Bacterial polypetide isolated from the Sargasso Sea
MSLGKIIDKKNNDLSKRLDMQKVPQHIAIIMDGNGRWATKKGLPRTYGHKRGVNVLKEILKASKKLGCKVLTVYAFSTENWTRPIKEVDFLINLFREVLRNEIEEINEESIKIKFIGDLTPFPENLKKIISSSESLTRNNNEFLLNVCVNYGGRQEIVKVAKELAIKTFSGEIKPSEVNEELFNSKLLTRGIKDPELLIRTSGEKRISNFLLWQLAYSEIYISDVLWPDFNEIEFLKAIIDYQSRNRRFGGIESLPNESLEASQYSS

SEQ ID NO: 120759 - protein, 247 aa, Unknown
  Bacterial polypetide isolated from the Sargasso Sea
MINHSSKNEVKKEISHIALIMDGNGRWASSRGLPRYEGHVKGLRTLRKLLRDLKDSKLDYLTLFTFSIDNWKRPKEETSKLMQLLRKFISNDLSELHNNNVRIRVIGSRAEIPRDIVDLIKGAETLTANNTGLYLQIAFNYSGRQEIINATKKIAIASSKGEIDPNKINNTIFENNLYSAGVPDPDLIIRTGSEKRISNFLLWQLSYSEVYFEECLWPDFDKNKLDIAISDYKSRSRRFGDILNEYR

SEQ ID NO: 120760 - protein, 223 aa, Unknown
  Bacterial polypetide isolated from the Sargasso Sea
MSEPKTVAIIMDGNRRWAKKNNLPIPSGHRKGIESLIEIVKTAKKLKIERLIVYAFSTENWSRDNFEVNALMNLINFGVDVKLNEIKENGIKLDFIGNLADLPEKAKKGIDKCINETKDLSELTLTVALNYGAISDILEAARTINKNNIELNEENFLNATQIGGQEVDIFIRTGGDRRLSNFLLANIGYTELFFSDKLWPEFSNNDFIKILDEFRERQRRFGK

SEQ ID NO: 120761 - protein, 232 aa, Unknown
  Bacterial polypetide isolated from the Sargasso Sea
MNLKDINLNHIAIIMDGNGRWATNQGLERTAGHAAGEFSLSRSIDWALKNNLQWLTVYAFSTENWSRSDDEVDFLMFFNRDILIRRREEFNDKGVRFHFIGDLEDNRIPDENKFLMNETEQLTKNNKKLNLVFAFNYGSRKEIHDAYTKLNKNSIDQLDEKSFRANLLLPEMPDPDLLIRTAGEKRVSNFLLYQLSYTELMFVDTLWPDFDEKELDSAVDEFQNRVRKYGNA

SEQ ID NO: 120762 - protein, 241 aa, Unknown
  Bacterial polypetide isolated from the Sargasso Sea
MEGSQTESLPKHVAIIMDGNNRWASEKNLPGVAGHKKGVERARESVEYAVQRGLSTLTLFAFSSENWGRSSEEVNLLMQLLNTALHEEVPNLVKNSVQLSFIGDLSQFDQELIEQMKESERLTYCDNERKKLDLVVAASYGGRWDIVNAINKHLDSGSNEELTEESFDEFLSTSKFTDPDLCIRTGNELRISNFLLWQLAYSELYFPDVLWPDFDDQHFDNALKEFSKRSRRFGDKSNFQL

SEQ ID NO: 120763 - protein, 229 aa, Unknown
  Bacterial polypetide isolated from the Sargasso Sea
MIMDGNGRWASSRGLPRYEGHAQGLRTLRKLLRDLKDSKLDYLTLFTFSIDNWKRPKEETSKLMQLLRKFISNDLSELHNNNVRIRVIGSRSEIPKDIVDLINGAELLTVNNTGLYLQIAFNYSGRQEIINATKKIAIASSKGEIDPNKINNTIFESNLYSAGVPDPDLIIRTGFEKRISNFLLWQLSYSEVYFEECLWPDFDKNKLDIAINDYKSRSRRFGNVLNEYR

SEQ ID NO: 120764 - protein, 236 aa, Unknown
  Bacterial polypetide isolated from the Sargasso Sea
MNTPNHIAIIMDGNGRWAEQKGMPREFGHQNGVRSVKKIVEEANKHKVKYLTLFAFSVENWERPSYEVETLMRLLVETLRDEFEDLFSNNIRLNAIGDVKSLPNEVKYELDKIINNTKENSGMILTLALSYGGKQEIFKAVKEISEKVKNETICLDNFDDSIINDHLYTKNLPDVDLLIRTSGEQRISNFLLWQIAYAELYFTETYWPDFSEEDFTDAIIEYQKRERRFGKTSKQL

SEQ ID NO: 120765 - protein, 241 aa, Unknown
  Bacterial polypetide isolated from the Sargasso Sea
MADSQNNNKYYPKNIGIIMDGNGRWAIRNSLKISEGHKKGVGVVRDIVEEAVKRGIQSLTLYAFSSENWQRPKREINAIKRLVIEAINEQVPELKEKKVKLKFFGHLDDFGEKIQNKIFFAENETCFEEAKLNLNVALGYGGQQDIVDIVHKVSEEVSSGNLNSKDISKETINSYSSVPVDEIDLLIRTGGDKRISNFLLYQIAYAEIMFIDKFWPDFTNNDFVNCLDNFKNVSRRFGKRI

SEQ ID NO: 120766 - protein, 243 aa, Unknown
  Bacterial polypetide isolated from the Sargasso Sea
MAESKNPTLKLPGINAAIIMDGNGRWAKKNALSVTSGHERGVEVVKKIVESAAKAKLESLSLYAFSTENWSRPKKEILGIKKLIIKAIDSQLSELIQQEVRLNFFGDYSSFGKTVIEAIFKAERSTAFEDPRLKLNIALGYGGRADIIQATKLIAQEIKLDKLSLEEVSDETIFKFLKAPISDLDLLIRTGGDQRISNFLLYHLAYSEIQFTDTLWPDFTEEEFLQCLEAFFNTERRFGKRTI

SEQ ID NO: 120767 - protein, 245 aa, Unknown
  Bacterial polypetide isolated from the Sargasso Sea
MADQAPDFIPRNLTLPKHIGFIMDGNGRWANSHGLQREDGHKYGVDSIENLIQHMSDVGIQYVTLYAFSTENWNRPKSEVTSIFSLLRSTLSNKLERLIEANIQVRHIGNLKGINNTTRIAIERAIDATISNTGMTVIVAINYGGRKEIVDAVKTIIAADIKPEEITETTIEEHLYTSSIPHPDLIIRTGGEFRTSNFLLWQSAYSEYYITDTLWPDFTVEHLKQAILSYQTRQRRFGRVKSDED

SEQ ID NO: 120768 - protein, 125 aa, Unknown
  Bacterial polypetide isolated from the Sargasso Sea
ETINKLQEVRAGGEKTITIALGYGGRQEILDAIKSLVIENKEKDLEELVEEINDEQIREHLYLPDAPDIDLIIRTSGESRLSGFLLWQSAYSEFVFQDVYWPEFRKIDFLRCLREYIQRERRFGK

SEQ ID NO: 120769 - protein, 87 aa, Unknown
  Bacterial polypetide isolated from the Sargasso Sea
MLLKPLKKIKPNSLLKDLEKNLYTKGIPDPDLLIRTGGKKRLSNFLLWQLSYSEIYFINKLWPDFNVKDFNKILNHFKKVRRNFGNI

SEQ ID NO: 120770 - protein, 176 aa, Unknown
  Bacterial polypetide isolated from the Sargasso Sea
RPKTEVNALMSLLLSTIKKEVAELHKNNVRFSTIGDLSFLPKNTENGLKEGMDLTKNNTGLNLILALNYGSRQEIIDSVIKISKKVKLGELNSNEIDEALFSSFLYTKSYPDPDLLIRTSGELRISNFLLWQCAYTEMYLTNTYWPSFREDDLFKAILDYQNRERRYGKISEQFSS

SEQ ID NO: 120771 - protein, 234 aa, Unknown
  Bacterial polypetide isolated from the Sargasso Sea
NDKSLRHLAIIMDGNGRWALNKDLPRTAGHAAGEHSLSKTIDWAIANKLEWLTVYAFSTENWLRSEEEVDFLMFFNRDILIRRREEFNQKGVRFKFLGDLTDSKIPEENKDLMKETEEITKNNNTLNLVFAFNYGSHNEIHNAVLNLHNENINENLELGDIESNFYNFFQYPEVPFPDALLRTAGEKRISNFLLYQLSYSELIFIDALWPDVNEDILDDVLLEFNKRNRTYGRN

SEQ ID NO: 120772 - protein, 241 aa, Unknown
  Bacterial polypetide isolated from the Sargasso Sea
MSIQNLPIHVSIIMDGNNRWAAKKGLPGVSGHEQGVKKARLAIELAVEKKIKTLTLFTFSSENWNRSQEEVDLLMKLLSKALKEEVPNLIENKVSLKFIGDLSKFTIELQDEMKESEIQTHQEEKDKQLDLLIAASYGGRWEILETVNKLRSLELNKEVDEELFSLHTSLSGFSDPDLCIRTGGEKRISNFLLWHLAYTELFFTDILWPDFDEEEFDRALEDYSIRKRNFGDKSNFQGSNG

SEQ ID NO: 120773 - protein, 164 aa, Unknown
  Bacterial polypetide isolated from the Sargasso Sea
MEGSQTETLPKHVAIIMDGNNRWALDKNLPGVAGHKKGVERARESVEYAVQRGLSTLTLFAFSSENWGRSSEEVNLLMQLLNSALQDEVPNLIKNSVQLSFIGDMSKFDQKLIEQMKESEKLTYCDSERKNLDLVVAASYGGRWDIIKCINKHLDSGSKKDLLR

SEQ ID NO: 120774 - protein, 235 aa, Unknown
  Bacterial polypetide isolated from the Sargasso Sea
MIPKHIAIIMDGNGRWAEERGMTRIFGHQSGVSAVRKIVEAANKFNIKYLTLFTFSLENWNRPQSEIDTLMGLLVQTLKDEFEDILKNNIKLNAIGELNTLPDEVRNELHSIIHGTKDNTGMVLTLALSYGGKQEIFKAVKEISDKVKNDVICLDNFDDSLINDHLYTSNLPDVDLLIRTSGEQRISNFLLWQIAYAELYFTDVYWPDFTEEDLEKAIVEYQNRERRFGKTSKQL

SEQ ID NO: 120775 - protein, 63 aa, Unknown
  Bacterial polypetide isolated from the Sargasso Sea
PDLCIRTGNELRISNFLLWQLAYSELYFPDVLWPDFDDKHFDNALKEYSKRSRRFGDKSNFQL

SEQ ID NO: 120776 - protein, 228 aa, Unknown
  Bacterial polypetide isolated from the Sargasso Sea
MIKNSINHLAIIMDGNGRWAKHKNQPRTFGHKYGAQTAKKIINDCVKKEIPFLTLYTFSKENWSRPKEEIDTLMILLSTMLKNETENMLRNNIKFNIVGRIEDLPEKTRDWVLTTIEKTKNNTGLTLTLALSYGGRQEIVDAFNAIMNKEIKIINEEILKNHLYCPDLPDPDIIIRTGGEYRLSNFLLWQSAYAEIYICQKNWPDFDENDLEKALEEYENRNRTFGKV

SEQ ID NO: 120777 - protein, 275 aa, Unknown
  Bacterial polypetide isolated from the Sargasso Sea
MSSTVEFDPQSRPTEADACAQTSLPEILPELVKQSLPKHVAIIMDGNGRWAQIQGKPRVMGHKAGVKAVRRAVSAASQLGIQSLTLFAFSSENWRRPDKEVSLLMELFFTVLQREIKLLDKNQVKLNIIGDISRFSARLQKQIRAAEAKTASNTGLILNVAANYGGRWDILQAAQKLAEKVETGEMTSSQFTEEALSEHLCMQNQSEVDLMIRTGGDYRISNFVLWQAAYAELVFLDTLWPDFDEQAFHEAIATFASRQRRFGLTGSQIDEMRAL

SEQ ID NO: 120778 - protein, 228 aa, Unknown
  Bacterial polypetide isolated from the Sargasso Sea
MVENTIPKHVAIIMDGNGRWASEKNLHRSKGHIKGYQNIKPITLHAKKLGIKYLTLFAFSTENWKRSKEEVGFIMNLALEVIIKESNELNQNNINITHLGSNENLPNEMLAKINKSEKLTENNDDFFLSVAFNYGGRNEIINTVNKLLESNIQKINEDIFSSNLMTKNYPDPDIIIRTGGQKRLSNFLLWQSAYSELFFHEKFWPDFSTDDLDMIIKNYSLRERNFGN

SEQ ID NO: 120779 - protein, 243 aa, Unknown
  Bacterial polypetide isolated from the Sargasso Sea
VYVINYSTKAYLNHIGLIHDGHRRYARKEGLLSFKVSYKIGMTRLKECIGWCDEVGIDFITSWLLSRENLSRPQEELESYFQVLNELFEELLIDDVVDNFRVEFIGSTDLLPDFLQETIKKLKEVRGGGQKTLTIALGYGGRQEILDAIKGLIDQNRNEHNDFDELLENVTDEQLRKHLYSPKTPDIDLIIRTSGESRLSGFLLWQSAYSEVIFQDVYWPEFRKIDFLRCLREYSQRERRFGQ

SEQ ID NO: 120780 - protein, 246 aa, Unknown
  Bacterial polypetide isolated from the Sargasso Sea
MSTKELDTDNIPNHIAIIMDGNGRWAKAKGLPRIAGHKEGINSVRDITRICGEIGVNYLTLYTFSTENWNRPKKEVNALMSLLFNTIKKEVRALHENNVKFSTIGNLAFLPNNTENGLKEGIDLTKNNTGLNLILALNYGSRQEIIDSVINIANKVKSGEIDSNHIDETLFSSFLYTKNFPDPDLLIRTSGELRISNFLLWQCAYTEMYLTNTYWPSFREDELFKAILDFQNRERRYGKISEQVNS

SEQ ID NO: 120781 - protein, 232 aa, Unknown
  Bacterial polypetide isolated from the Sargasso Sea
MNLKDIDLNHIAIIMDGNGRWATNQGLDRTAGHAAGEFSLSRSIDWSLDNNLEWLTVFAFSTENWSRSKEEVDFLMFFNRDILIRRREEFNDKGVKFHFIGDLADERIPDENKRLMSETEEITKNNSNLNLVFAFNYGSRKEIYDAITKVIKNDIDAINEESFRSNLLLPEMPDPDLLIRTAGEKRVSNFLLYQLSYTELMFVDTLWPDFDENQLDLAVKEFENRVRKFGNA

SEQ ID NO: 120782 - protein, 242 aa, Unknown
  Bacterial polypetide isolated from the Sargasso Sea
MEGEHFDIIPQHVAIIMDGNNRWASERNLPGVAGHQKGVERAREAVEFAVKKGISTLTIFAFSSENWGRSNEEVNLLMKLLNTALKEQVPNLVKNSVQLSFIGDLSQFDKDLLDQMKKSEEMTICRHEEKKLDLVVAASYGGRWDIINAVNKLRADNKFISEADMTSALSTSNFEDPDLCIRTGREKRISNFLLWQLAYTELYFPDLLWPDFNDDEFEKALLEYSTRNRRFGDKSNFSSNND

SEQ ID NO: 120783 - protein, 260 aa, Unknown
  Bacterial polypetide isolated from the Sargasso Sea
MTYTSSTVRVPDVGVVPRHIAIIMDGNGRWATERRLPRVAGHTRGVDAVRAVVEGCARAGVEYLTLFAFSSENWRRPNDEVSFLMRLFITALEREVGKLHANGIRLRVVGDLDRFEPRIRELIRRAETKTARNTRLTLTIAANYGGRWDILQATKKLVEQAVREGREVEVTEDAFAPHLAMAYAPEPDLFIRTGGEQRVSNFLLWQLAYAEFYFTDKYWPDFDGAALADAMASYTERERRFGRTSAQLEPQSQNADSLSC

SEQ ID NO: 120784 - protein, 226 aa, Unknown
  Bacterial polypetide isolated from the Sargasso Sea
MDGNGRWAKSHSFKRISGHKEGINSVREIVRVCGEIGVKYLTLYTFSSENWTRPKSEVSSIMNLLFSTIKKEIENLHKNNVRLSAIGELDDLPNKSYKEIMEGINKTKDNTGLNLILALSYGSRQELLMAVRRIVDRFKEKEINIKDISENMISKELYTSKIPDPDLLIRTGGENRISNFLLWQSAYTEFYMTDIHWPDFREKELLDSIIDYQMRQRRFGKISEQI

SEQ ID NO: 120785 - protein, 239 aa, Unknown
  Bacterial polypetide isolated from the Sargasso Sea
MANSSKINTPKHVGIIMDGNGRWAIKNSLKISEGHKKGVSIVKDIVEESVKQDLSSLTIYAFSTENWKRPKAEVTAIKKLVIDAINDQVPELKEQRVRLKFFGHTYDFGKKVIDKIDYAEQETHIKKSKLDLNVALGYGGKQDIVDITKKIASSVSAKQIKIEDINEKVIHNASSVPVENIDLLIRTGGDKRISNFLLYQIAYAEIMFVDKYWPDFNRKDFLKCIDNFKKINRRFGKRK

SEQ ID NO: 120786 - protein, 106 aa, Unknown
  Bacterial polypetide isolated from the Sargasso Sea
MKHVAIIMDGNGRWGIKNKKSRNLGHRQGLKTVEMVIEETIKNKIKFLTLYAFSTENWKRPRIEIRFLLNLLETFLKENIDKLDKNNIRLKVIGNLVRFPTKIQNL

SEQ ID NO: 120787 - protein, 213 aa, Unknown
  Bacterial polypetide isolated from the Sargasso Sea
MDGNRRWARQNNLPFSLGHRKGVETLVEITKEAKKKKVKKLIVYAFSSENWSREKFEVNSLMNLISFGTEVKLDEIIKNEVRMEFIGDLDSIPKKAKEEVDRCVRSTKNFSDFTLVIALNYGGVWDIVNALKKISEKGETINAKNFLKFTELKGEEVEIFIRTGGEKRVSNFLLPNIGYSELFFSDKLWPDFNAEDFNAVLDDFKKRQRRFGK

SEQ ID NO: 120788 - protein, 235 aa, Unknown
  Bacterial polypetide isolated from the Sargasso Sea
MIPKHVAIIMDGNGRWAKDKGLPREFGHQNGVNSVKSIVQEAYKSGIEYLTLYAFSIENWDRPSDEVSSLMSLLVSTLRDEFDEIFDKDIKLNAVGEINSLPKEVVSELEFIINKTKNNRKMNLTLALSYGGKQEIFNAVKMIADKVKNNLIELNNFDDSIINSHLYTKNLPDVDLLIRTSGEQRISNFLLWQIAYAELYFTDVYWPDFSKDDFNLALENYKSRERRFGKTSEQI

SEQ ID NO: 120789 - protein, 130 aa, Unknown
  Bacterial polypetide isolated from the Sargasso Sea
MKDFNLDHKRIPKHVAIIMDGNGRWAKKKGELRIFGHTNGVDSVREALTAAVEIGVQYLTLYAFSTENWNRPKEEIAALMDLLVKSIYDEVDELNSKGVKITTIGDVEILPKSCQNALIEAKEKLKIIIK

SEQ ID NO: 120790 - protein, 66 aa, Unknown
  Bacterial polypetide isolated from the Sargasso Sea
MNQIQHVAIIMDGNGRWGLKHKNSRNLGHKAGLNTVEKILKETIKNKIKFLTLFAFSTENWKRPQK

SEQ ID NO: 120791 - protein, 89 aa, Unknown
  Bacterial polypetide isolated from the Sargasso Sea
MKIDKQKLPKHVAIIMDGNGRWATRKGLPRSFGHKQGVSVLKKILKAAKNLGCEVITVYAFSTENWARPTKEVDFLINLFSEVLKNEIK

SEQ ID NO: 120792 - protein, 223 aa, Unknown
  Bacterial polypetide isolated from the Sargasso Sea
MNHLAIIMDGNGRWAINQEKPRVFGHQVGAQTAKKIIDACVQKKIPYLTLYTFSKENWSRPKDEVETLMDLLSIMLEGELENMLRNNIRFNVVGKIEDLPKKTREFTLYTIEKTKNNTGLVLTLALSYGGRQEIIDAINSIIESGEKIINEDILKNHLYCPELPDPDLIIRTGGEYRLSNFLLWQSAYTEIYTSAKNWPEFDSEDLKKAFNEYENRNRTYGKV

SEQ ID NO: 120793 - protein, 171 aa, Unknown
  Bacterial polypetide isolated from the Sargasso Sea
MPVNLKNNPLNHVAIIMDGNGRWAQARSHSRVWGHIRGVRTVSKIVEEADECGVKALTLYAFSTENWSRPLTEVKTLFSLLKKFLQREKERIIRNRIKFKIIGDLTSLPSSTYELVKDLEEITREHEGLKLTFAFSYGSRSEIISAFNSHIKERPGEPISEEKLDCLLSNL

SEQ ID NO: 120794 - protein, 212 aa, Unknown
  Bacterial polypetide isolated from the Sargasso Sea
GRWAKQKNHPRAFGHETGAQTAKTIINDCVKKEIPHLTLYTFSKENWSRPKEEIDILMVLLSTMLEKETENMLRNNIRFNIVGKIEDLPDKTRDWVLSTIEKTKNNTGLILTLALSYGGRQEIVDAFNSLIKSDVKIINEEILKNHLYCPELPDPDMIIRTGGEYRLSNFLLWQSAYAEIYVCNKNWPDFDIAELEKALKEYDNRNRTFGKV

SEQ ID NO: 120795 - protein, 250 aa, Unknown
  Bacterial polypetide isolated from the Sargasso Sea
MYKKLRDKVKNNGNLPKHIAIIMDGNGRWAKLKNLPRAAGHHEGINSVREIVRVCGEIGVSYLTLYTFSSENWSRPKTEVSAIMKLLFSTIKKEIENLHKNNVKLSTIGNLEDLPADTKKHILEGIAKTKNNTGLNLILALSYGSRQELIRAIKRIGKKIELSDLKSDDISEELFVEELYSSGIPDPDLLIRTGGEYRLSNFLLWQAAYSELLISEKFWPDFREKELLNGIYDYQNRQRRFGQTGEQISA

SEQ ID NO: 120796 - protein, 254 aa, Unknown
  Bacterial polypetide isolated from the Sargasso Sea
MVTPRFVYSVYENRLQNKIKNENLPQHIGLIHDGHRRYARRENLLTYEVSYRIGMVRFKECLAWCDELGINHVTSWLLSKENLSRPEEELNSYYLVLNELFQELLIDDLVDNFKINFVGSIDLLPEYLQNSIKQLQEIRGGGEKILTIALGYGGRQEIVDAIKSLLKENKELEIDDLIKSINDEQIRDHLYSPDSPDIDLIIRTSGESRLSGFLLWQSAYSEVVFQDVYWPEFRKIDFLRCLREYVQRDRRFGK

SEQ ID NO: 120797 - protein, 260 aa, Unknown
  Bacterial polypetide isolated from the Sargasso Sea
MTYTSSTVRVPDVAAVPRHIAIIMDGNGRWATQRRLPRVAGHTRGVDAVRAAVEACARQGVEYLTLFAFSSENWRRPNDEVSFLMRLFVTALEREIGKLHANGIRLRVVGDLSRFDTRIRDLIKRAETKTARNTRLTLTIAANYGGRWDIMQATRKLAEQSALAGKAVEVNEDSFAEHLSMAYAPEPDLFIRTGGERRVSNFLLWQLAYTEFYFTDTFWPDFDADALGHAIASYAERERRFGRTSAQLEPQSQNVDSLPC

SEQ ID NO: 120798 - protein, 223 aa, Unknown
  Bacterial polypetide isolated from the Sargasso Sea
MPEPKTVAIIMDGNRRWAKKNNLPIPSGHRKGIESLIEIVKTAKKSKIERLIVYAFSTENWSRDNFEVNALMNLINFGVDVKLNEIKENGIKLDFIGNLDDLPEKAQKGIGKCIKETKDLTELTLTVALNYGAISDILKAAKTINEKNIELNEENFLKATQIGEQEVDIFIRTGGDKRLSNFLLANIGYSELFFSDKLWPEFSRNDFIQILDEFKERQRRFGK

SEQ ID NO: 120799 - protein, 241 aa, Unknown
  Bacterial polypetide isolated from the Sargasso Sea
MANKNTKKNNYPKNVGIIMDGNGRWALKNSLKISQGHKQGVEIVKKIVEESVKQNIKSLTLYAFSSENWKRPKAEINAIKKLVIEAINEQVPELKEQKVSLKFFGHLNDFGKKILQKIAYAENKTKCKSSKLDLNIALGYGGQQDIVDVVKNISSMVLSKKIKIEDINEKTINKNSSVPVDEIDLLIRTGGDNRISNFLLFQIAYAEIMFVDKYWPDFTTNDYMKCLNNFKKVSRRFGRRI

SEQ ID NO: 120800 - protein, 215 aa, Unknown
  Bacterial polypetide isolated from the Sargasso Sea
RAYGHRAGIKSINRFVSACSVRQIQELTLFAFSSENWKRPDYEVKFLLSLFEESIDLYVKKLHDNNVQINFIGNLSEFNQKLLKKIHAAERLTKNNTNLKLNFAINYGGKWDIIDSINRMITSKSLDGKIVTPDNFEPFLSLQGSSPDLLIRTAGHQRLSNFMLWQHAYTELYFTDCLWPDFNEDELDLGIKHYLKTTRKFGAIEEYDIISEEDA

SEQ ID NO: 120801 - protein, 279 aa, Unknown
  Bacterial polypetide isolated from the Sargasso Sea
TGYQATSLGQAVREVNRMLAWRLSDEPVTEETDPDERDEAYRAGVRTKIFLGWTSNLTSSGTRETIKYLVKNKMIDVLCTTAGGVEEDFIKCMKPTYLGDFALRGKDLRKQGLNRIGNLIQPNDNYCDFEDWIMPVLDAMLKEQNEQGVKWTCSSVIKRLGLEINHEDSIFYWAAKNDIPCYCPALTDGSIGDMLYFHSYKNPGLVIDVVADVRAMNDESIKVKRPRKTGIIILGGGVAKHHICNSNLMRNGADYAVFINTAQEFDGSDSGARPDEAVS

SEQ ID NO: 120802 - protein, 215 aa, Unknown
  Bacterial polypetide isolated from the Sargasso Sea
MAAAIKGYKMKLIMPDNMTDERKASMRAYGAELILVSKEQGMEYARDLAKQMQAEGTGLVLDQFNNTDNPAAHYASTGPEIWQQSFGKVTHFVSSMGTTGTIMGVSRYLKQQKPEIQIIGLQPAEGSSIPGIRRWPEAYLPGFYEKQRVDQIIDITADHALATMRQLAQQEGIFCGVSSGGAVYAALRLAEQLDNAVIVAIICDRGDRYLSSGIY

SEQ ID NO: 120803 - protein, 46 aa, Unknown
  Bacterial polypetide isolated from the Sargasso Sea
MSKIFEEHSQTIGNTPLVRLNRVTKGRVLAKIESRNPSFSVQCRIG

SEQ ID NO: 120804 - protein, 234 aa, Unknown
  Bacterial polypetide isolated from the Sargasso Sea
MILNNILEAIGNTPIVRLDKVGSELKCNLFAKCEYFNPGGSVKDRIGFRMIDEAEKSGQIKPGDTLIEPSSGNTGIGLALAAAVKGYKLIITMPEKMSLEKEVVLEALGAKIIRTPTEVSHDDPKSLFGVAKRLQEETPNSHILDQYSNNNNPDAHYNGTAQEILDEFGDNLDMVVISAGTGGTITGIAKKLKESITNIEIVGVDPIGSILGGGSEVLPYHVEGIGYDFFPDVL

SEQ ID NO: 120805 - protein, 74 aa, Unknown
  Bacterial polypetide isolated from the Sargasso Sea
MNNTQNDFISGIGNTPLIKLRAASEITGCNIYGKAEFLNPGGSVKDRAALALIKDAQEKKLIAKGGTVVEGTAG

SEQ ID NO: 120806 - protein, 316 aa, Unknown
  Bacterial polypetide isolated from the Sargasso Sea
MVGINIFVKAEYFNPGGSVKDRLALSIIEKAEKDGELSPGQTVVEATSGNTGIGLAMVCATKGYPCVVTMPDSTSIERRKLMRFLGAQVLLTPASEGTTAAYDLAKKLSDKNNWFYAQQFENKANADIHEKTTAIEILNDFKDIGLDYWVSGYGTGGTFSGVSRVLKDKSPNTKLIITEPDNAQLINSKISQERNSENAPVSTHDAWNPHPIQGWTPDFIPFVLQETIDNNYFDQNIPVSGDDGIFWAKELASKEGIITGVSGGSTFAIAMEVAKQASKNSNILCMIPDTAERYMSSVLFEDIEAEMNIKEQEIYN

SEQ ID NO: 120807 - protein, 125 aa, Unknown
  Bacterial polypetide isolated from the Sargasso Sea
MKTLQNNFVEAIGNTPLFKLKAASEVTGCNIYGKAEYLNPGGSVKDRAALALIRDAEEKKLISKGGTIVEGTAGNTGIGLCLLGNSIGYKTIIVMNDNQTQEKKDLLRNIGADLRLVPPKTLIKM

SEQ ID NO: 120808 - protein, 174 aa, Unknown
  Bacterial polypetide isolated from the Sargasso Sea
MPIAPDITALIGGTPLVRLNRLPQACGCRAEILAKLESFNPSASVKDRIASAMVLEAELAGTISPGRTVLVEPTSGNTGIALAMVAAARGYRLILTMPDSMSTERRAMLRAYGAELQLTDGALGMNGAIALARELVAEIPEAYLLQQFDNPANPAVHERTTAEEIWRDTAGQID

SEQ ID NO: 120809 - protein, 104 aa, Unknown
  Bacterial polypetide isolated from the Sargasso Sea
MKNSQSNFIEGIGNTPLIKLKSASELTGCNIYGKAEYLNPGGSVKDRAALALIKDAEDKKLISKGGTIVEGTAGNTGIGLCLIGNSVGYKTIIVMNDNQTQRKK

SEQ ID NO: 120810 - protein, 261 aa, Unknown
  Bacterial polypetide isolated from the Sargasso Sea
GTIVKGTSGNTGMGLALASIVKGYKLICVSNDKQSKEKLDVLRAMGAKVVVCPTDVEADDPRSYYSVSKKIAEDTPNSWYVNQYDNLSNSKAHYENTGPEIWNQTEGKITHFVVGVGTGGTISGVGRFLKEKNKLVKIWGIDTYGSVFKKYHETGIFDKNEIYPYKTEGIGEDILPKNVDFKIIDHFEKVTDKDAAVFTRRLAREEGIFGGYSCGAAISGIAQLKNKLSKDDIVVVLLHDSGSRYIGKVYNDEWMKDNGFI

SEQ ID NO: 120811 - protein, 225 aa, Unknown
  Bacterial polypetide isolated from the Sargasso Sea
MTSAPVRSDTLDLIGNTPLVLLSGPSEAAGCEIWGKCEFANPGASVKDRAALWIVRDAEARGELKPGGTVVEGTAGNTGIGIALVANALGYQTVIVMPDNQSQEKMDTLRALGAQLVTVPPTKFADPNHFVHTSRRIAEETDNAIWANQFDNVANRRAHIEGTAEEIWDQLEGRVDGFTCAVGTGGTLAGVGMGLKAQDENVRIALTDPHGAALYNYYANGELKS

SEQ ID NO: 120812 - protein, 113 aa, Unknown
  Bacterial polypetide isolated from the Sargasso Sea
MKNNQEDFTSGIGNTPLIKLRSASEITGCNIYGKAEFLNPGGSVKDRAALALIKDAQEKKLISKGGIIVEGTAGNTGIGLGLLGNSLGYKTIIVMNDNQTQEKKDTLRNLGAE

SEQ ID NO: 120813 - protein, 126 aa, Unknown
  Bacterial polypetide isolated from the Sargasso Sea
MENNNIISQIGNTPLVKLKQASELTGCNIYGKAEYLNPGESVKDRAALFIVKDAIDRKLISKGGTIVEGTAGNTGIGLAIVCKEYGLNLKIVIPNTQSIEKKETLKKLGAELIEVEAVPYSNPNNY

SEQ ID NO: 120814 - protein, 248 aa, Unknown
  Bacterial polypetide isolated from the Sargasso Sea
NTGMGLALASIVKGYKLICVSNDKQSKEKLDVLRAMGAKVVVCPTDVEADDPRSYYSVSKKIAEDTPNSWYVNQYDNLSNSKAHYENTGPEIWNQTEGKITHFVVGVGTGGTISGVGRFLKEKNKLVKIWGIDTYGSVFKKYHETGIFDKNEIYPYKTEGIGEDILPKNVDFKIIDHFEKVTDKDAAVFTRRLAREEGIFGGYSCGAAISGIAQLKNKLSKDDIVVVLLHDSGSRYIGKVYNDEWMKD

SEQ ID NO: 120815 - protein, 232 aa, Unknown
  Bacterial polypetide isolated from the Sargasso Sea
MIFRNFLESIGNTPLIKLRKASELTGCNILGKAEFLNPGGSVKDRAAKAIILDAEERGLLRPGGLVVEGTAGNTGIGLALVGNSLGYRTLIVIPDTQSQEKKDMLRLCGAELREVPAVPYRNENNYVKVSGRIADELSKTEPNGVIWANQFDNIANRKGHYETTGPEIFEQTDGKVDGFICAVGTGGTLAGTGLYLKERNPEFVIGLADPLGAALHSFYKTGELSSCGDSIT

SEQ ID NO: 120816 - protein, 56 aa, Unknown
  Bacterial polypetide isolated from the Sargasso Sea
GCKIAETVEDGSVILAMLPDTGERYLSTMLFDKINEEMNEEEIKIMKSTPGFHLNN

SEQ ID NO: 120817 - protein, 138 aa, Unknown
  Bacterial polypetide isolated from the Sargasso Sea
MKTLQNNFVEAIGNTPLFKLKAASEITGCNIYGKAEYLNPGGSVKDRAALALIRDAEEKKLISKGGTIVEGTAGNTGIGLCLLGNSIGYKTIIVMNDNQTQEKKDLLRNIGADLRLVPPKPYKDENNFVKYAGRLADE

SEQ ID NO: 120818 - protein, 195 aa, Unknown
  Bacterial polypetide isolated from the Sargasso Sea
KRLSLEIENSWYVNQYDNLSNSEAHYLSTGPEIWEQMSGHIHHFVVGVGTGGTISGVGKFLKEKNNKIKIWGIDSYGSVFKKYHETGKFDKNEIYPYLTEGIGEDILPENVDFKIIDHFEKVTDEDAAVFARRLAKKEGILAGYSCGAAIAGLHQLKSNFKKNENVVVLLHDSGTRYIGKVYNDEWMKKQGFKLD

SEQ ID NO: 120819 - protein, 292 aa, Unknown
  Bacterial polypetide isolated from the Sargasso Sea
MIFSNFLESIGNTPLIKLRKASERTGCNILGKAEFLNPGGSVKDRAAKAIILDAEERGLLRPGGLVIEGTAGNTGIGLALVGNSLGYRTLIVIPDTQSQEKKDMLRLCGAELREVPAVPYRDENNYVKVSGRIADELSKTEPNGVIWANQFDNIANRKGHYETTGPEIFEQTDGKVDGFICSVGTGGTLAGTGLYLKECNPKVVIGLADPLGAALHSFYTTGKLSSCGDSITEGIGQGRITANLEGANVDYSFQIPDDEALPICFDLLKEEGLCLGGSSKINVAGAIRLADE

SEQ ID NO: 120820 - protein, 68 aa, Unknown
  Bacterial polypetide isolated from the Sargasso Sea
MGITRGFVGAVGQTPLIRLEHLSELSGCEILGKAEFMNPGGSVKDRAALGILQSAEASGDLKPGGTVV

SEQ ID NO: 120821 - protein, 181 aa, Unknown
  Bacterial polypetide isolated from the Sargasso Sea
MIYSDFLESVGNTPLIKLRKASELTGCNILGKAEFLNPGGSVKDRAAKAIILDAEERGLLRPGGLIVEGTAGNTGIGLALVGNSLGYRTLIVIPDTQSQEKKDMLKLCGAELREVPAVPYRDENNYVKVSGRIADELSKTEPNGAIWANQFDNVVNRKGHYETTGPEIFGQTDGKVDGFIA

SEQ ID NO: 120822 - protein, 57 aa, Unknown
  Bacterial polypetide isolated from the Sargasso Sea
MSKIFEDNSLTIGHTPLVRLNRIGNGRILAKVESRNPSFSVKCRIGANMIWDAEKRG

SEQ ID NO: 120823 - protein, 53 aa, Unknown
  Bacterial polypetide isolated from the Sargasso Sea
ARFEGIPCGISSGAALAAALEVSKRDEMTGQSIVVILPSFAERYLSTSLFEGI

SEQ ID NO: 120824 - protein, 215 aa, Unknown
  Bacterial polypetide isolated from the Sargasso Sea
MDTNSVIAQIGNTPLVRLKQASELTGCNIYGKAEYFNPGESVKDRAALFIVEDAIKRKLISKGGTIVEGTAGNTGIGLAVVCKEYDLKLKIVIPNTQSIEKKETLKKLGAELIEVDAVPYSSPKNYIKQSKKIAEDLNKKSKNGVYWANQFDNIINTEAHIKTTAEEIWNQTAGSVDGFTCAVGTGGTLAGVSIGLKNKNKDIQIALSDPMGSSL

SEQ ID NO: 120825 - protein, 231 aa, Unknown
  Bacterial polypetide isolated from the Sargasso Sea
MSSKTSNKIYDSIDETIGKTPMVRLNRIKKHFKLYGNIIAKLEFFNPLGSVKDRIGLAMIESAEKSGKLKPNATIVEPTSGNTGIALAFICAARGYKLVLTMPTSMSVERQKMLKFFNAKLVLTPKEEGMKGAMKKALDLKKEIPNSIILNQFENESNPKIHFETTAKEIWDDCEGNIDYLISGVGTGGTISGVGSFLKAKNNNIQIVAVEPEDSSVIAGGEAGAHSIQGI

SEQ ID NO: 120826 - protein, 166 aa, Unknown
  Bacterial polypetide isolated from the Sargasso Sea
MTTPSAYPTIEHTVGLTPLVRLQRIPGDTSNNVLGKLEGNNPAGSVKDRPAMSMINEAESEGVIAPGDTLIEATSGNTGIALAMAAAVKGYRLKLIMPSNQSEERKGAMRAYGAELIDVSPDEGMEGARDLALQMQAGGEGLVLNQFANRDNPGGHFATTGPEIGS

SEQ ID NO: 120827 - protein, 219 aa, Unknown
  Bacterial polypetide isolated from the Sargasso Sea
MKYFNNILETIGNTPLIKLNSITQSIKSDVFVKVESFNPGNSVKDRMAIKMIEDAEKEGKLKPGGTIVEGTSGNTGMGLALAAIVKGYKLICVSNDKQSKEKFDVLKAMGAKVVVCPTDVEASDPKSYYSVSKRISEETKNSWYVNQYDNPSNTIAHYESTGPEIWEQTNGRIDHFVVGVGTGGTISGVGKFLKEKKSSVKNWGIDTYGSVFKKYHETG

SEQ ID NO: 120828 - protein, 126 aa, Unknown
  Bacterial polypetide isolated from the Sargasso Sea
MIFDSILDTIGDTPVVKVNKIGSDLDCNLFAKCEYFNPGGSVKDRIGWKMVEDAEKSGRIKPGDTLIEPTSGNTGQGMALAAAVKGYRCIITMPKKMSQEKQITLEALGAELLEHRRKLPGMILRV

SEQ ID NO: 120829 - protein, 77 aa, Unknown
  Bacterial polypetide isolated from the Sargasso Sea
MNNTQNDFISGIGNTPLIKLRAASEITGCNIYGKAEFLNPGGSVKDRAALALIKDAQEKKLIAKGGTVVKEQQVTLE

SEQ ID NO: 120830 - protein, 269 aa, Unknown
  Bacterial polypetide isolated from the Sargasso Sea
METNSVIAQIGNTPLVKLKQASELTGCHIYGKAEYFNPGESVKDRAALFIVQDAINRKLISKGGTIVEGTAGNTGIGLAVVCKEYDLKLKIVIPKTQSIEKKNTLKKLGAELIEVDAVPYSNPKNYIKQSKQIAEDLNKRSSNGVFWANQFDNVINTEAHIKTTAEEIWSQTAGSIDGFTCAVGTGGTLAGVSIGLKNKNKDIKIALSDPMGSSLYSYIKNDKLESSGESITEGIGTGRITNNFEKALVDEAFQTNDAEALNIVYDLID

SEQ ID NO: 120831 - protein, 179 aa, Unknown
  Bacterial polypetide isolated from the Sargasso Sea
MIDLIGNTPLIKLKYPSEITGCNIYGKAEFMNPGGSVKDRAAMGIILDAEKNKLIEKGGTVVEGTFGNTGISLTMINNSRGYKTIIVMPDGASLEKREILTNLGAELRVVETKPYSDPGNYQHVSRRLVEELKDKSKGSVIWANQFDNTSNYLIHAKTTAKEIYNQLDGKIDGFTCAIG

SEQ ID NO: 120832 - protein, 142 aa, Unknown
  Bacterial polypetide isolated from the Sargasso Sea
VDILVAGVGTGATLTGMTQVLKQQKPDLRSYAVEPAESAVLSGGEAGPHKIQGIGAGFVPPLLDQSLVDGIVKITNEEAIQMAREAASIEGLACGLSSGAALAAAIKVAQIADNAGKQIVTVLASPAERYLSTALFDGLEIS

SEQ ID NO: 120833 - protein, 113 aa, Unknown
  Bacterial polypetide isolated from the Sargasso Sea
MTIEACIGQTPLVRLQRLDCGSSTVLLKLEGNNPAGSVKDRAALNMINQAELRQEIAPGDTLIEATSGNTGIALAMAAAIKGYKMILIMPSNSTQERKDAMQAYGAELLLVTI

SEQ ID NO: 120834 - protein, 73 aa, Unknown
  Bacterial polypetide isolated from the Sargasso Sea
IQGIGAGFVPKVLNTKLIDEIIKIDDDEAFYYGRLLSRLEGLLSGISSGAALAATIKIGKRKELMNKRLIVIL

SEQ ID NO: 120835 - protein, 197 aa, Unknown
  Bacterial polypetide isolated from the Sargasso Sea
YSVSKKIGEETPNSWYVNQYDNPSNSVAHYEQTGPEIWNQTMGKITHFVVGVGTGGTISGVSRYLKEKNKNIKIWGIDTYGSVFKKYHETGIFDEEEIYPYSTEGIGEDILPKNVNFDLIDLFEKVTDKDAAIYTRKLAREEGIFAGNSCGAAIKGIIQLKNKLKKDDVVVVLLHDSGSRYIGKIYNDDWMKKMKFI

SEQ ID NO: 120836 - protein, 81 aa, Unknown
  Bacterial polypetide isolated from the Sargasso Sea
MSVKNGFIDCIGNTPLIRLNKASDETGCTILGKAEFLNPGGSVKDRAALGIIRDAERNGFLEPGGTIVEGTAGNTGIGLTL

SEQ ID NO: 120837 - protein, 143 aa, Unknown
  Bacterial polypetide isolated from the Sargasso Sea
MKNNQEDFISGIGNTPLIKLRAASEITGCNIYGKAEFLNPGGSVKDRAALALIKDAQQKKLISKGGIVIEGTAGNTGIGLGLLGNSLGYKTIIVMNDNQTQEKKDTLRNLGAELRLVPAKPYKDDNNFVKVAARLADELRPTN

SEQ ID NO: 120838 - protein, 97 aa, Unknown
  Bacterial polypetide isolated from the Sargasso Sea
MKNYSNDFIESIGNTPLIKLRAASEITGCDIYGKAEYLNPGGSVKDRAALALIKDAQEKKLISKGGTVVEGTAGNTGIGLCLLGNSLGYKTIIVMND

SEQ ID NO: 120839 - protein, 112 aa, Unknown
  Bacterial polypetide isolated from the Sargasso Sea
MKNTKNNFIDSIGNTPLIKLKAASEITGCNIYGKAEYLNPGGSVKDRAALALIKDAQEKKLISEGGIVVEGTAGNTGIGLCLLGNSLGYKTIIVMNDNQTQEKKDTLRNIGA

SEQ ID NO: 120840 - protein, 207 aa, Unknown
  Bacterial polypetide isolated from the Sargasso Sea
MAAAVTIVAVAACGVVCAYQRAWRRLEARDENAPGGRKEGAGWDRAPETAESVSRGHEDVLGVIGNTPVMRIESLSTLTGCEIYVKCEFLNPGGSVKDRVALRIVADALASGALRRGGLCTEGTAGSTGVSLAMVCKALGVECFVAMPDDAAKEKSALVEAYGARVARVRPVSIANRGHFVNVARREAENARTERGEGGGYFADQFE

SEQ ID NO: 120841 - protein, 93 aa, Unknown
  Bacterial polypetide isolated from the Sargasso Sea
TAFRGLALALFRTTTKASLVDEVLQVDDAEAMAMGRRLARVEGLLCGVSSGAAMAAALTLGQRPEMEGKLIVVVLASFGERYLSTPMFTEIGS

SEQ ID NO: 120842 - protein, 135 aa, Unknown
  Bacterial polypetide isolated from the Sargasso Sea
MKNYSDNFIQSIGNTPLIKLKAASEITGCNIYGKAEYLNPGGSVKDRAALALIKDAQEKKLISKGGTVVEGTAGNTGIGLCLLGNSLGYKTIIVMNDNQTQEKKDILKNIGADLRLVPPKPYKDDGNYVKFAGRL

SEQ ID NO: 120843 - protein, 97 aa, Unknown
  Bacterial polypetide isolated from the Sargasso Sea
MKNFQNNFIEGIGNTPLIKLKAASEISGCNIYGKAEFLNPGGSVKDRAALALIKDAEEKKLISKGGTIVEGTAGNTGIGLCLIGNSVGYKTVIVMND

SEQ ID NO: 120844 - protein, 172 aa, Unknown
  Bacterial polypetide isolated from the Sargasso Sea
MIHENILSTIGNTPVVKINKIAKNLDCNVFAKCEFFNPGGSVKDRIGWNMVKEAELSGRIKPGDTLIEPTSGNTGQGIALAAAVKGYKCIITMPEKMSQEKQIALEALGAEIIRTPTEAKSSDPESHISVAKKLNKELENSHILDQYSNPSNPEAHYYGTAEEIIKDFNNNL

SEQ ID NO: 120845 - protein, 116 aa, Unknown
  Bacterial polypetide isolated from the Sargasso Sea
MKNILDTIGNTPLVKLQKIVPEGSGDVYVKLEAYNPTGSKKDRMALSMIEGAEKKGLLTKGMSVVEYSGGSTGAGLAFVCGIKGYQFRLITADVFGKEKIGLMKALGADLEIIKSD

SEQ ID NO: 120846 - protein, 160 aa, Unknown
  Bacterial polypetide isolated from the Sargasso Sea
MLHDTILSAIGNTPHVKLQRVGAELDCELYAKCEFMNPGGSVKDRIGYHMVTQAEQAGTITPGDTLIEPTSGNTGIGIAMAGAVKGYNVIITMPEKMSHEKQVVLEALGATIYRTPTEAAFDDPDSHISLAIRLQQELPRAHILDQYANPNNPDAHYAFT

SEQ ID NO: 120847 - protein, 63 aa, Unknown
  Bacterial polypetide isolated from the Sargasso Sea
MPAGRPAGGGIGLGFFLPARTSIMSRIFADNAQAIGNTPLVMINRLGPKGVTILAKIEGRNPA

SEQ ID NO: 120848 - protein, 294 aa, Unknown
  Bacterial polypetide isolated from the Sargasso Sea
AEFLNPGGSVKDRAAKAIILDAEERGLLSAGGLVVEGTAGNTGIGLALVGNSLGYRTLIVIPDTQSQEKKDMLRLCGVELREVPAVPYRNENNYVKVSGRIADELSKTEPNGVIWANQFDNIANRKGHYETTGPEIFDQTDGKVDGFICAVGTGGTLAGTGLYLKERNPEFIIGLADPLGAALHSFYTTGELSSCGDSITEGIGQGRITANLEGANVDYSFQIPDEEALPICFDLLKEEGLCLGGSSGINVAGAIRLAEEIGPGKTIVTILCDSGVRYQSRLFNPLFLKEKGLP

SEQ ID NO: 120849 - protein, 122 aa, Unknown
  Bacterial polypetide isolated from the Sargasso Sea
MKILQNNFVEAIGNTPLFKLKAASEITGCNIYGKAEYLNPGGSVKDRAALALIRDAEEKKLISKGGTIVEGTAGNTGIGLCLLGNSIGYKTIIVMNDNQTQEKKDLLRNIGADLRLVPPKTL

SEQ ID NO: 120850 - protein, 159 aa, Unknown
  Bacterial polypetide isolated from the Sargasso Sea
MSNIKNNFIDSIGNTPLIKLKAASEITGCNIYGKAEFLNPGGSVKDRAALALLKDAQEKKLISKGGIVVEGTAGNTGIGLGLLGNSLGYKTIIVMNDNQTQEKKDTLRNLGAELRLVAPKPYKDENNFVKIAGRLADELRPTNNNGVVWANQFLIIQHF

SEQ ID NO: 120851 - protein, 308 aa, Unknown
  Bacterial polypetide isolated from the Sargasso Sea
MSRVLKSVAEAIGNTPLVRLDRLTRLHGVKGTILAKLEYLNPGFSKKDRAAQGIIEEAESLGILSPGQTVVELTSGNMGTGLAIVCGLKGYPFVAVMSKGNSEERAQMMRSLGAEVVLVDQLPASSPGQVSGGDLDLVDKAAKKITKQRQAFRADQFYRDGNWQAHYDNTAPEIWEATNGDLDGFADFLGSGGTYKGIAKALKERDSDIQCFVVEPEGAAVAAGQTVTKPYHPIQGGGYVIPELKFLDKVPVDGFIQISGDEAQKTTKELAKYEGIFGGYSSGANVAAALKLLSGIMSGKNIAVVICD

SEQ ID NO: 120852 - protein, 51 aa, Unknown
  Bacterial polypetide isolated from the Sargasso Sea
MKNAQNNFVEGIGNTPLIKLKAASEITGCNIYGKAEYLNPGGSVKDRAALA

SEQ ID NO: 120853 - protein, 204 aa, Unknown
  Bacterial polypetide isolated from the Sargasso Sea
MRDLDVADSVLDLVGNTPLVNLPRIGEQSPCPIVAKLETTNPGGSSKDRPALTMIDEAEKAGLLKPGGTIIEPTSGNTGVGLAIVAAQRGYDCIFVMTDKVSSEKVTLLEAYGAEVVVCPVAVAPDDPRSYYSTAERLVKEVPNAYRPNQYHNQANPKAHYESTGPEIWEQTKGRVTHFVAGAGTGGTITGVGKFLKEQNPEVQ

SEQ ID NO: 120854 - protein, 87 aa, Unknown
  Bacterial polypetide isolated from the Sargasso Sea
MTQIKNNFIESIGNTPLIKLKAASEITGCNIYGKAEYLNPGGSVKDRAALALIKDAQEKKLISEGGIVVEGTAGNTGIGLCLLGNSL

SEQ ID NO: 120855 - protein, 123 aa, Unknown
  Bacterial polypetide isolated from the Sargasso Sea
MSIDNKAYNNILELIGNTPLVRLNKICDGFPGKYFTKYEGYNPGHSNKDRIALHILNQAEKKKILKKGSTIIETTSGNTGFSLAMVSLLKGYKCILAVSSKASKDKINMLKCLGAEIYVCPSN

SEQ ID NO: 120856 - protein, 111 aa, Unknown
  Bacterial polypetide isolated from the Sargasso Sea
MKTLQNNFVEAIGNTPLFKLKAASEITGCNIYGKAEYLNPGGSVKDRAALALIRDAEEKKLISKGGTIVEGTAGNTGIGLCLLGNSIGYKTIIVMNDNQTQDKKDLLRNIG

SEQ ID NO: 120857 - protein, 102 aa, Unknown
  Bacterial polypetide isolated from the Sargasso Sea
MKTLQNNFVEAIGNTPLFKLKAASEITGCNIYGKAEYLNPGGSVKDRAALALIRDAEEKKLISKGGTIVEGTAGNTGIGLCLLGNSIGYKTIIVMNDNQTQE

SEQ ID NO: 120858 - protein, 159 aa, Unknown
  Bacterial polypetide isolated from the Sargasso Sea
MNNTQNDFISGIGNTPLIKLRAASEITGCNIYGKAEFLNPGGSVKDRAALALIKDAQEKKLIAKGGTVVEGTAGNTGIGLGLLGNSLGYKTIIVMNDNQTQEKKDLLRNLGAELRLVPPKPYKDDNNFVKVAARLADELRPSNNNGVIWANQFDNTANA

SEQ ID NO: 120859 - protein, 233 aa, Unknown
  Bacterial polypetide isolated from the Sargasso Sea
MDTNSVISQIGNTPLVKLKQASELTGCHIYGKAEYFNPGESVKDRAALFIVQDAIKRKLISKGGIIVEGTAGNTGIGLAVVCKEYGLKLKIVIPNTQSKEKKETLKELGADLIEVDAVPYSNPKNYIKQSKQIAEELNKTSFNGVYWANQFDNVINTEAHIKTTAEEIWNQTAGTINGFTCAVGTGGTLAGVSIGLKNKNKDIKIALSDPMGSSLYSHIKNNKLESKGSSITE

SEQ ID NO: 120860 - protein, 296 aa, Unknown
  Bacterial polypetide isolated from the Sargasso Sea
VKINNMGPKNQDIFVKCEAFNPLASVKDRLALAIINDAEKSGKLKPGQTVIEATSGNTGIALAMVCAARGYPFVAVMVETFSIERRKVMKALGAKLILTPAAERGTGMVKKATELAEKHGWFLADQFRNPANPEYHKNTTAVEILSDFRNRELDYFVSGWGTGGTITGVGTVLKTARPEIKIIAVEPESAPLLSKNEWQPHKIQGWTPDFVPEVLDQNVIDQYLPVNDDASIKTSMELARKEGIFTGISGGATMLAALMIAKEAPKNSTFCVMLPDTGERYLSSPLFEDISEDSDD

SEQ ID NO: 120861 - protein, 121 aa, Unknown
  Bacterial polypetide isolated from the Sargasso Sea
MDTVLNQIGNTPLVKLKQASELTGCHIYGKAEYFNPGESVKDRAALFIVQDAIKRKLISKGGTIVEGTAGNTGIGLAVVCKQYDLNLKIVIPKTQSIEKKDTLKKMGAELIEVDAVPYSDP

SEQ ID NO: 120862 - protein, 164 aa, Unknown
  Bacterial polypetide isolated from the Sargasso Sea
MNSSSIRENLVQSIGNTPLIRLQRASEETGCTILGKAEFMNPGGSVKDRAAKAIVLDAEKQGVLQPGGLIVEGTAGNTGIGLALVGNSRGYRTLIVIPETQSQEKKDMLRLSGAELKEVPAVPYRDPQNYIKISGRLAEEIIRTILMVPFGQTSSTMWPNGRHI

SEQ ID NO: 120863 - protein, 218 aa, Unknown
  Bacterial polypetide isolated from the Sargasso Sea
KINSIGKDLSCNIFAKCEFFNPGGSVKDRIGWKMVEDAEKAGKIKPGDTLIEPTSGNTGQGLALASAVKGYKCIITMPEKMSQEKQIVLEALGAKIVRTPTEALSSDPESHISVAKKLQKEIKNSHILDQYSNPSNPDAHYHNTAEEILKDFGENIDMVVISVGTGGTITGVAKRLKEAIPKIKVVGADPVGSILGGGDEISSYLVEGIGYDFIPEVL

SEQ ID NO: 120864 - protein, 146 aa, Unknown
  Bacterial polypetide isolated from the Sargasso Sea
MKTLQNNFVEAIGNTPLFKLKAASEITGCNIYGKAEYLNPGGSVKDRAALALIRDAEEKKLISKGGTIVEGTAGNTGIGLCLLGNSIGYKTIIVMNDNQTQEKKDLLRNIGADLRLVPPKPYKDENNFVKYAGRLADELKSSNNHG

SEQ ID NO: 120865 - protein, 254 aa, Unknown
  Bacterial polypetide isolated from the Sargasso Sea
EILRKGSTIIEPTSGNTGIALAMISKVKGYNMIAVMPDNVSDERKSLLSSLGAEIIFSNGKDGTNGAIRLAQEIDKNNENYFMPYQYGNEANPRAHYETTGPEIIKQMPEINVFVAGLGTGGTLMGVGKALKEYNQDIKVVAAAPHPEEVVPALRSIEHGFIPPILDLEKLDSRILVGEEESFYWTKALMDKCGVFAGVSCGAVTAAAIKVAKKIETGNIVLIIADSGERYLSSKLWEMEYKEIKEIGDQKIWW

SEQ ID NO: 120866 - protein, 73 aa, Unknown
  Bacterial polypetide isolated from the Sargasso Sea
MIFSNFLDSIGNTPLIKLRKASEHTGCNILGKAEFLNPGGSVKDRAAKAIILDAEERGLLSPGGLVVEGTAGN

SEQ ID NO: 120867 - protein, 82 aa, Unknown
  Bacterial polypetide isolated from the Sargasso Sea
MDLSGLDIAGSVLELIGKTPMVRLPRVDAGLSCPIIAKLEATNPGGSVKDRPAVTMIEAAEAEGLLKPGGTIVEPTSGNTGV

SEQ ID NO: 120868 - protein, 102 aa, Unknown
  Bacterial polypetide isolated from the Sargasso Sea
MKNNQEDFISGIGNTPLIKLRAASEITGCNIYGKAEFLNPGGSVKDRAALALIKDAQQKKLISKGGIVVEGTAGNTGIGLGLLGNSLGYKTIIVMNDNQTQE

SEQ ID NO: 120869 - protein, 110 aa, Unknown
  Bacterial polypetide isolated from the Sargasso Sea
MGITRGFVGAVGNTPLIRLEHLSERTGCEILGKAEFMNPGGSVKDRAALGILLAAEASGELKSGGTVVEGTAGNTGIGLAHLCNARGYRCVIVIPETQSAEKIELLRSLG

SEQ ID NO: 120870 - protein, 56 aa, Unknown
  Bacterial polypetide isolated from the Sargasso Sea
MINKNILELIGNTPLIKLKYPSEITNCNIYGKAEFLNPGGSVKDRTALGIILDAEK

SEQ ID NO: 120871 - protein, 242 aa, Unknown
  Bacterial polypetide isolated from the Sargasso Sea
RRSKRSNISWRYLDEATSGNTGIALAMAAAIKGYRMVLIMPAHMSDERKAAMSAYGAELILVSKEAGMETARDMALQMQEEGKGFVLDQFANEDNPVSHYEGTGPELLDQTEGEITHFISSMGTTGTIMGVSRFFREVKPEVEIIGLQPLEGSVIPGIRRWPDAYMPKIYDRSQVDRVIDVSQSLAESTMRELAELEGILCGVSSGGNVAAALQISREIENATIVAIICDRGDRYLSTGVFS

SEQ ID NO: 120872 - protein, 142 aa, Unknown
  Bacterial polypetide isolated from the Sargasso Sea
MKNIKNNFIESIGNTPLIKLKAASEMTGCNIYGKAEFLNPGGSVKDRAALALIKDAQEKKLISKGGIVVEGTAGNTGIGLGLLGNSLGYKTIIVMNDNQTQEKKDLLRNLGAELRLVPAKPYKDDNNYIKVASRLADELKSS

SEQ ID NO: 120873 - protein, 114 aa, Unknown
  Bacterial polypetide isolated from the Sargasso Sea
MTDIRNNFTESIGNTPLIKLKAASEITGCNIFGKAEYLNPGGSVKDRAALALIKDAQEKKLISEGGIIVEGTAGNTGIGLCLLGNSLGYKTIIVMNDNQTQEKKDTLRNIGADF

SEQ ID NO: 120874 - protein, 158 aa, Unknown
  Bacterial polypetide isolated from the Sargasso Sea
MNNTQNDFISGIGNTPLIKLRAASEITGCNIYGKAEFLNPGGSVKDRAALALIKDAQEKKLISKGGTVVEGTAGNTGIGLGLLGNSLGYKTIIVMNDNQTQEKKDLLRNLGAELKLVPPKPYKDDNNFVKVAARLADELRPTNNNGVIWANQFDNTAN

SEQ ID NO: 120875 - protein, 63 aa, Unknown
  Bacterial polypetide isolated from the Sargasso Sea
MKTLQNNFVEAIGNTPLFKLKAASEITGCNIYGKAEYLNPGGSVKDRAALALIRDAEEKKLIS

SEQ ID NO: 120876 - protein, 130 aa, Unknown
  Bacterial polypetide isolated from the Sargasso Sea
MIYKDLLSSIGNTPIIKIKNIAPKNINIFVKAEYFNPGGSVKDRLALSIIEKAEKEGLLKPRQTVVEATSGNTGIGLAMVCASKGYPCVMTMPDSTSIERRKLMRFLGAKVLLTPASEGTTAAYNLAKKI

SEQ ID NO: 120877 - protein, 139 aa, Unknown
  Bacterial polypetide isolated from the Sargasso Sea
MGITRGFVGAVGNTPLIRLEHLSERTGCEILGKAEFMNPGGSVKDRAALGILLAAEASGELKPGGTVVEGTAGNTGIGLAHLCNARGYRCVIVIPETQSAEKIELLRSLGAEVRTVPAVPYRDPSNYVKLSGRIAEEIS

SEQ ID NO: 120878 - protein, 85 aa, Unknown
  Bacterial polypetide isolated from the Sargasso Sea
EIWSQSNNNLDGLVTGVGTGGTITGCARFLKKVNPNCKIYAVEPKKSAVISGEKARSHSIQGIGAGFVPKVLNTKLIDEIIKIDD

SEQ ID NO: 120879 - protein, 277 aa, Unknown
  Bacterial polypetide isolated from the Sargasso Sea
MDSNSIISQIGNTPLVKLKQASELTGCNIYGKAEYFNPGESVKDRAALFIVEDALNRKLISKGGTIVEGTAGNTGIGLAVVCKEYGLKLKIVIPNTQSIEKKETLKKLGAELIEVEAVPYSNPKNYIKQSKKIAEDLNKKSKNGVYWANQFDNLINAEAHIKTTAEEIWYQTAGLIDGFTCAVGTGGTLAGVSIGLKNKNKNIKIALSDPMGSSLFSYIKNNKLESSGNSITEGIGTARITKNFDKALIDDAFQTDDTEALNLVYDLIEKQKIILGG

SEQ ID NO: 120880 - protein, 153 aa, Unknown
  Bacterial polypetide isolated from the Sargasso Sea
MNDIQNDFISGIGNTPLIKLRAASEITGCNIFGKAEFLNPGGSVKDRAALALIKDAQEKKLIAKGGTVVEGTAGNTGIGLGLLGNSLGYKTIIVMNDNQTQEKKDLLRNLGAELKLVPAKPYKDDNNFVKVAARLADELRPTNNNGVIWANQF

SEQ ID NO: 120881 - protein, 92 aa, Unknown
  Bacterial polypetide isolated from the Sargasso Sea
MIYDTILETIGNTPVVRINSIGKDLSCNIFAKCEFFNPGGSVKDRIGWKMVEDAEKAGKIKPGDTLIEPTSGNTGQGLALAAAVKGYKCIIT

SEQ ID NO: 120882 - protein, 125 aa, Unknown
  Bacterial polypetide isolated from the Sargasso Sea
MIYNDILETIGSTPVVKLNSIGKDLECNLYAKIEMVNPGGSVKDRTAFRMIDHAEKEGRIKPGDTLIEATSGNTGIGLALAAAVRGYKLIICMPEKMSMEKELTINALGAKIVRTPTEAAHDDPE

SEQ ID NO: 120883 - protein, 138 aa, Unknown
  Bacterial polypetide isolated from the Sargasso Sea
MSQIKNNFIESVGNTPLIKLKAASEITGCNIYGKAEYLNPGGSVKDRAALALIKDAQEKKLISEGGIVVEGTAGNTGIGLCLLGNSLGYKTIIVMNDNQTQEKKDTLKNIGADLRLVPPKPYKDNGNYVKVAGRLAEE

SEQ ID NO: 120884 - protein, 295 aa, Unknown
  Bacterial polypetide isolated from the Sargasso Sea
MILNNILENIGNTPIVKLDKVGSALKCNLFAKCEYLNPGGSVKDRIGLRMINEAEKSGQIKPGDTLIEPSSGNTGIGLALAAAVKGYKLIITMPEKMSMEKEVVLKALGATIVRTPTEVSHDDPKSLFGVAKKLQSEIPNSHILDQYSNNNNPDAHYNSTAQEILDEFGTDLNMVVISTGTGGTITGIAKKLKESIPDIHIVGIDPIGSILGGGTDISSYQVEGIGYDFFPNVLDNSLVDKYIKTNDEDSFSMARRLIKEEGLLIGGSCGATVWGAIEATKDLDKNKNVLVILPD

SEQ ID NO: 120885 - protein, 205 aa, Unknown
  Bacterial polypetide isolated from the Sargasso Sea
LRSYGAELVLTQGVLDMQGAVDRAKEICDATPHATFTPQQFDNPANPQVHRETTGPEILDACEGRVDAFVSGVGTGGTVTGAGEAIRDACPDALIVAVEPARSNVLSGGSQGLHDIQGIGAGFVPPVLDRGIYDEVVCVEDEEAIAAARRLSREEGILAGISAGANVHVSIQVASRLGEGKRVVTVICDSGERYFSLPGFIDSDS

SEQ ID NO: 120886 - protein, 317 aa, Unknown
  Bacterial polypetide isolated from the Sargasso Sea
MIYNNIIETIGNTPIVKINKMGPKNQDIFVKCEAFNPLASVKDRLALAIINDAEKSGKLKPGKTVIEATSGNTGIALAMVCAARGYPFVAVMVETFSIERRKVMKALGAKVILTPAAERGTGMVKRATELAEKHGWFLADQFRNPANPEYHKNTTAVEILSDFRNRDLDYFVSGWGTGGTITGVGMVLKTARPEIKIIAVEPEMAPLLSKNEWQPHKIQGWTPDFVPEVLDQNVIDQYLPVNDDASIETSMELARKEGIFTGISGGATMLAALMIAKEAPKNSTFCVMLPDTGERYLSSPLFEDISEDSDDEWLAEQ

SEQ ID NO: 120887 - protein, 317 aa, Unknown
  Bacterial polypetide isolated from the Sargasso Sea
MKYENILQTIGETPVIKINRLAPEHVDLYVKMESFNPMASVKDRLAFAIINDARKSGKLKEGQTVIEATSGNTGIALAMVCAVLGHPFVATMVETFSIERRKIMRALGAKVILTPAAERGSGMVKRAEQLADQHGWFLARQFQNPANPEYHANTTGPEILRDFAGERLDFWVTGWGTGGTLTGAGKTLKSARPDLKIIATEPEQAALLSGGDWSPHKIQGWTPDFIPEVLEKDIADQVIPVNDDESIKTSLALAKAEGIFVGISAGATVNAALKVAETAGPGSVLLAMLPDTAERYLSTPLFAEINEGSDDEWLESL

SEQ ID NO: 120888 - protein, 301 aa, Unknown
  Bacterial polypetide isolated from the Sargasso Sea
MIDSNVFVKVESFNPGNSVKDRMAVKMIEDAEKDGRLKPGGTIVEGTSGNTGMGLALAAIVKGYKLICVSNDKQSKEKFDVLRAMGAEVVVCPTDVEADDPRSYYSVSKRISEETKNSWYVNQYDNPSNTKAHYESTGPEIWKQTNGKIDHFVVGVGTGGTISGVGKYLKEMKPSVKIWGIDTYGSVFKKYHETGIFDEKEIYPYSTEGIGEDILPKNVDFEVIDHFEKVTDKDAALYTRKLAKEEGIFAGNSCGAAIAGMIQLSSNFKKGQVVVVLLHDSGSRYIGKIYNDEWMKDKGFI

SEQ ID NO: 120889 - protein, 320 aa, Unknown
  Bacterial polypetide isolated from the Sargasso Sea
MNYFDNILGTIGNTPLIKLNKVTSEIEATVLAKVEYFNPGNSVKDRMAIKMVEDAEKDGRLKPGGTIVEGTSGNTGMGLALAAIVKGYKLICVTNDKQSKGKIDVLKAVGAKVIICPTNVDPDDPSSYYSTAKRISDETENSWYVNQYNNLSNREAHYLSTGPEIWNQTKGKITHFVVGVGTGGTISGVAKYLKEKNSDIKIWGIDTFGSVFKKYHETGVFDKSEIYPYLTEGIGEDIIPDNVDFSLIDHFEKVNDEDAAIYGRRLAKEEGIFAGYSCGAAIKGVLQLKKYFSKNDVVVVLLHDSGSRYIEKIYNDEWMK

SEQ ID NO: 120890 - protein, 325 aa, Unknown
  Bacterial polypetide isolated from the Sargasso Sea
MKYYKNILETIGNTPLIKLNKISKSIDSNVFVKVESFNPGNSVKDRMAVKMIEDAEKDGRLKPGGTIVEGTSGNTGMGLALAAIVKGYKLICVSNDKQSKEKFDVLRAMGAEVIVCPTDVEADDPSSYYSVSKRISDETKNSWYVNQYDNPSNTIAHYESTGPEIWKQTNGKIDHFVVGVGTGGTISGVGKYLKEMKPSVKIWGIDTYGSVFKKYHETGIFDEKEIYPYSTEGIGEDILPKNVDFEVIDHFEKVTDKDAALYTRKLAKEEGIFAGNSCGAAIAGMIQLKSNFKKGQVVVVLLHDSGSRYIGKIYNDGWMKDKGFI

SEQ ID NO: 120891 - protein, 321 aa, Unknown
  Bacterial polypetide isolated from the Sargasso Sea
MSQVLKSAAEAIGNTPLVRLDRLTSLHGVKGTILAKLEYFNPGFSKKDRAALGIIDEAENLGILSPGQTVVELTSGNMGTGLAIVCGLKRYPFVAVMSKGNSEERARMMRSLGAEVVLVDQLPTSSPGQVSGGDLDLVDKAAKKITKQRQAFRADQFYRDGNWQAHYYNTAPEIWEATNGDLDGFADFLGSGGTYKGIAKALKERNSDIKCFVVEPEGAAVAAGQRVTNPNHPIQGGGYIIPELKFLDKVPVDGFIQISGDEAQKTTKELAKYEGIFGGYSSGANVAAALKLLSGNMSGKTIAVVICDSGLKYLSTKLWDD

SEQ ID NO: 120892 - protein, 306 aa, Unknown
  Bacterial polypetide isolated from the Sargasso Sea
MIYDTILETIGNTPVVRINSIGKNLSCNIFAKCEFFNPGGSVKDRIGWKMVEDAEKAGKIKPGDTLIEPTSGNTGQGLALAAAVKGYKCIITMPEKMSQEKQIVLEALGAKIVRTPTEALSSDPESHISVAKKLQKEIKNSHILDQYSNPSNPDAHYHNTAEEILKDFGENLDMVVISVGTGGTITGVAKRLKEAIPNIKIVGADPVGSILGGGDEISSYLVEGIGYDFIPEVLDNSIVDQYIKTHDEESFIMARRLIKEEGLLCGGSCGATMVAALQAASILESGQNCLVILADSIRNYMTKFPS

SEQ ID NO: 120893 - protein, 131 aa, Unknown
  Bacterial polypetide isolated from the Sargasso Sea
MKTLQNNFVEAIGNTPLFKLKAASEITGCNIYGKAEYLNPGGSVKDRAALALIRDAEEKKLISKGGTIVEGTAGNTGIGLCLLGNSIGYKTIIVMNDNQTQEKKDLLKNIGADLRLVPPKPYKDENNFVKY

SEQ ID NO: 120894 - protein, 41 aa, Unknown
  Bacterial polypetide isolated from the Sargasso Sea
MAKIYEDNSFAIGNTPLVKLRSVTKNAKATVLAKIEGRNPA

SEQ ID NO: 120895 - protein, 62 aa, Unknown
  Bacterial polypetide isolated from the Sargasso Sea
MKNSQNNFIEGIGNTPLIKLKAASEITGCNIYGKAEYLNPGGSVKDRAALALIKDAQEKKLI

SEQ ID NO: 120896 - protein, 59 aa, Unknown
  Bacterial polypetide isolated from the Sargasso Sea
MKNSQNSFIEGIGNTPLIKLKAASEITGCNIYGKAEYLNPGGSVKDRAALALIKDAQDK

SEQ ID NO: 120897 - protein, 72 aa, Unknown
  Bacterial polypetide isolated from the Sargasso Sea
AMDVGRRLRGQEGLLCGVSSGAAVAAALRFGQRSELQGRRVLVMLASYGERYLSTPMFSGVASSPAAQDPML

SEQ ID NO: 120898 - protein, 317 aa, Unknown
  Bacterial polypetide isolated from the Sargasso Sea
MIYNNIIETIGNTPVVKVNNMGPKDQNIFVKCEAFNPLASVKDRLALAIVNDAEKSGKLKPGQTVIEATSGNTGIALAMVCAARGYPFVAVMVETFSIERRKVMKALGAKVILTPAAERGTGMVNKATELADKHGWFLADQFRNPANPEYHKNTTAVEILSDFRNQELDYFVSGWGTGGTITGVGTVLKTARPEIKIIAVEPELAPLLSKNKWEPHKIQGWTPDFVPEVLDQEVIDQYIPVNDEASIETSKELARKEGIFTGISGGATMLAALLIAEEAPKNSTFCVMLPDTGERYLSSPLFADITEDSDDEWLAEQ

SEQ ID NO: 120899 - protein, 120 aa, Unknown
  Bacterial polypetide isolated from the Sargasso Sea
MDTNSIISQIGNTPLVKLKQASELTGCNIYGKAEYFNPGESVKDRAALFIVQDAFNRKLISKGGTIVEGTAGNTGIGLAVVCKEYGLKLKIVIPNTQSIEKKETLKKLGAEVIEVDAVLY

SEQ ID NO: 120900 - protein, 63 aa, Unknown
  Bacterial polypetide isolated from the Sargasso Sea
MAHIRNTFIDSIGNTPLIKLKAASELTGCNIYGKAEFMNPGGSVKDRAALSLLKDAQEKKLIS

SEQ ID NO: 120901 - protein, 65 aa, Unknown
  Bacterial polypetide isolated from the Sargasso Sea
MSDIENYIGNTPLVLIDEVGTNQIYGKLEGNNPAGSIKDRPAIRMIKDAESSGLIKKGDTLIEAT

SEQ ID NO: 120902 - protein, 211 aa, Unknown
  Bacterial polypetide isolated from the Sargasso Sea
LFVHNVEADDPRSYYSVSKRISEETKNSWYVNQYDNPSNTIAHYESTGPEIWKQTNGKIDHFVVGVGTGGTISGVGKYLKKMKPSVKIWGIDTYGSVFKKYHETGIFDEKEIYPYSTEGIGEDILPNNVDFEVIDHFEKVTDKDAALYTRKLAREEGIFAGNSCGAAIAGMIQLKSNFKKGQFVVALLHDSGSRYIGKIYNDDWMKEKGFI

SEQ ID NO: 120903 - protein, 28 aa, Unknown
  Bacterial polypetide isolated from the Sargasso Sea
MSRIYDDNSLAIGNTPLVKLNSVTKNCK

SEQ ID NO: 120904 - protein, 310 aa, Unknown
  Bacterial polypetide isolated from the Sargasso Sea
ETIGNTPVVRINSIGKDLSCNIFAKCEFFNPGGSVKDRIGWKMVEDAEKAGKIKPGDTLIEPTSGNTGQGLALAAAVKGYKCIITMPEKMSQEKQIVLEALGAKIVRTPTEALSSDPESHISVAKKLQQKIKNSHILDQYSNPSNPDAHYHNTAEEILKDFGENLDMVVISVGTGGTITGVAKRLKEAIPNVKVVGADPVGSILGGGDEISSYLVEGIGYDFIPEVLDNSIVDQYIKTHDEESFIMARRLIKEEGLLCGGSCGATMVAALQAASILESGQNCLVILADSIRNYMTKFPSDNWMNENGFKV

SEQ ID NO: 120905 - protein, 93 aa, Unknown
  Bacterial polypetide isolated from the Sargasso Sea
MKNYSNNFIDAIGNTPLIKLKAASEITGCNIYGKAEYLNPGGSVKDRAALALIKDAQKKNLISKGGTVVEGTAGNTGIGLCLIGNSLGYKTII

SEQ ID NO: 120906 - protein, 150 aa, Unknown
  Bacterial polypetide isolated from the Sargasso Sea
MNNTQNDFISGIGNTPLIKLRAASEITGCNIYGKAEFLNPGGSVKDRAALALIKDAQEKKLIAKGGTVVEGTAGNTGIGLGLLGNSLGYKTIIVMNDNQTQEKKDLLRNLGAELRLVPAKPYKDDNNFVKVAARLADELRPTNNNGVIWA

SEQ ID NO: 120907 - protein, 318 aa, Unknown
  Bacterial polypetide isolated from the Sargasso Sea
MIYKDLLSSIGNTPIIKIKNIAPKNINIFVKAEYFNPGGSVKDRLALSIIEKAEKEGLLKPRQTVVEATSGNTGIGLAMVCACKGYPCVMTMPDSTSIERRKLMRFLGAKVLLTPASEGTTAAYNLAKKLCKKNKWFYAKQFENDANADIHEKTTAIEILNDFKELGLDYWVSGYGTGGTFSGVSRVLRDQSPKTKLVITEPENAQLVNSLIAQKRNQDGSPASAHDSWNPHPIQGWTPDFIPLVLQESIDNNYFDINIPVTGEDGIYWSHQLATNEGIITGISGGSTFAVAMKIADEAPNGSNILCMLADTAEKVFN

SEQ ID NO: 120908 - protein, 128 aa, Unknown
  Bacterial polypetide isolated from the Sargasso Sea
MNNTQNDFISGIGNTPLIKLRAASEITGCNIYGKAEFLNPGGSVKDRAALALIKDAQDKKLITKGGTVVEGTAGNTGIGLGLLGNSLGYKTIIVMNDNQTQEKKDLLRNLGAELRLVPPKPYKDDNKM

SEQ ID NO: 120909 - protein, 50 aa, Unknown
  Bacterial polypetide isolated from the Sargasso Sea
MGITRGFVGAVGHTPLIRLEHLSELSGCEILGKAEFMNPGGSVKDRAALG

SEQ ID NO: 120910 - protein, 80 aa, Unknown
  Bacterial polypetide isolated from the Sargasso Sea
MIYKDLLSSIGDTPIIKIKNIGPKNINLFVKAEYFNPGGSVKDRLALNIIEKAEKEGLLEPNQTVVEATSGNTGIGLAMV

SEQ ID NO: 120911 - protein, 65 aa, Unknown
  Bacterial polypetide isolated from the Sargasso Sea
MIYNDILETIGSTPVVKLNSIGKDLECNLYAKIEMVNPGGSVKDRTAFRMIDHAEKEGRIKPGDT

SEQ ID NO: 120912 - protein, 288 aa, Unknown
  Bacterial polypetide isolated from the Sargasso Sea
PNEVKIFAKLENFNPAGSIKDRVAKYLIESAEEQGLLSKGATIIEPTSGNTGIALAMLSKAKGYKLKAVMPDNVSDERKSMLLSLGAEIIFSDGEQGTNGAIRLAEKIAEENPSYFMPYQYGNEANPRAHYETTGPEIIKQLPDIDVFVAGLGTGGTLMGAGKALKEHNENIKIVAAAPHPEEVVPGLRSIEHGFIPPILDLEKLDSRILVGEEESFYWTKMLMEKCGVFAGVSCGAVTAAAIKVAKKIKEGNIVIIIADSGERYLSSRLWELSYEEIKETVEQKIWW

SEQ ID NO: 120913 - protein, 308 aa, Unknown
  Bacterial polypetide isolated from the Sargasso Sea
MNEIQNDFISGIGNTPLIKLRAASEITGCNIFGKAEFLNPGGSVKDRAALALIKDAQEKKLITKGGTVVEGTAGNTGIGLGLLGNSLGYKTIIVMNDNQTQEKKDLLRNLGAELKLVPAKPYKDDNNFVKVAARLADELRPTNNNGVIWANQFDNTANAKGHYEGTGKEIWDQTEGKVDGFVCSSGTGGTISGVSNALKEKNKDIKIHLSDPKGSALYNYIKNGELKSEGGSITEGIGSSRITANFKDAKIDDAYSIDDKEALPILYDLIQNEGLSLGTSCGINIAGAIRMGKELGPGKTIVTILCDR

SEQ ID NO: 120914 - protein, 194 aa, Unknown
  Bacterial polypetide isolated from the Sargasso Sea
MKNYKDDFIQSIGNTPLIKLKAASEITGCNIYGKAEYLNPGGSVKDRAALALIRDAEQKKLISKGGIIVEGTAGNTGIGLCLIGNSLGYKTIIVMNDNQTQEKKDTLRNIGADLKLVPPKPYKDENNFVKVAARMAEELKSSNNHGVVWANQFDNTANSKGHYDTTGPEIWEQTEGKVDGFVCSSGTGGTIGGV

SEQ ID NO: 120915 - protein, 320 aa, Unknown
  Bacterial polypetide isolated from the Sargasso Sea
MSNIKNDFISSIGNTPLIKLRAASEITGCNIYGKAEYLNPGGSVKDRAALALIKDAQEKKLISNGGTVVEGTAGNTGIGLCLLGNSLGYKTIIVMNENQTQEKKDTLVNIGADLRLVPAKPYKDDGNYVKVAGKLAEELKSSNNHGVVWANQFDNTANAKGHYETTGPEIWNQTEGKIDGFVCSSGTGGTIGGISSYLKEKNKDIKIFLSDPAGSALYNYIKNGELKSEGGSITEGIGSSRITANFAEAKIDGAFSISDHESLPILYDLIQNEGLSLGTSCGVNIAGAIRLGKELGPGKTIVTILCDKSDKYNSKMFNKT

SEQ ID NO: 120916 - protein, 296 aa, Unknown
  Bacterial polypetide isolated from the Sargasso Sea
LNPGGSVKDRAALALIKDAQEKKLIAKGGTVVEGTAGNTGIGLGLLGNSLGYKTIIVMNDNQTQEKKDILKNLGAELKLVPAKPYKDDNNFVKVAARLADELRPTNNNGVIWANQFDNTANAKGHYEGTGKEIWDQTEGKVDGFVCSSGTGGTISGVSNALKEKNKDIKIHLSDPKGSALYNYIKNGELKSEGGSITEGIGSSRITANFKDAKIDDAYSIDDKEALPILYDLIQNEGLSLGTSCGINIAGAIRMGKELGPGKTIVTILCDRSDKYATKMFNKKFLEEKGLPIPNWF

SEQ ID NO: 120917 - protein, 273 aa, Unknown
  Bacterial polypetide isolated from the Sargasso Sea
MGKIYNNIVETVGGTPLVRLNKVTEGVDATVLLKCEFFNPLSSVKDRIGMSMIETAESDGTLTQDTVIIEPTSGNTGIALAFIAAAKGYRLILTMPESMSLERRTLLAMLGAELVLTPAPKGMKGAIAMAEKLAAETENAWVPQQFENPANPAIHRKTTAVEIWEDTEGAVDIVVAGVGTGGTLTGCVEVIKPQKESFQAVAVEPADSPVISQTLAGEELTPGPHKIQGTGAGFVPGNLHLKGEDGSDQVGECIKVSNDDAFAMARELALKEG

SEQ ID NO: 120918 - protein, 213 aa, Unknown
  Bacterial polypetide isolated from the Sargasso Sea
MPKQGLPGFVEAIGKTPLIRLRGVSNMTGCNIFGKAEFMNPGGSVKDRAAKAIIEDAEARGNLAPGGLIVEGTAGNTGIGLTMVGNSKGYRSVIVMPETQSEEKKEVLRICGADLRLVPAVPYKNPNNYIRYSQVLAKELAKTHDGGVLWANQFDNTANLQGHYQSTGPEIWEQTDHKIDGFICAVGSGGTIAGVGKFLKEQNQLIKIGLADP

SEQ ID NO: 120919 - protein, 163 aa, Unknown
  Bacterial polypetide isolated from the Sargasso Sea
KFWNDTDGMIDIFVAGVGTGGTITGVSRYIKQEKKHPLISVAVEPVDSPVITQARAGQEIKPGPHKIQGIGAGFIPGNLDLSIIDAVETVSNDEAIAMAHRLMKEEGILAGISSGAAVVAAKRLAEKPENAGKNIVVIIPSSTERYLSSALFADFFTESELQA

SEQ ID NO: 120920 - protein, 268 aa, Unknown
  Bacterial polypetide isolated from the Sargasso Sea
MRNNQEDFISGIGNTPLIKLRAASEITGCNIYGKAEFLNPGGSVKDRAALALIKDAQQKKLISKGGIVIEGTAGNTGIGLGLLGNSLGYKTIIVMNDNQTQEKKDTLRNLGAELRLVPAKPYKDDNNFVKVAARLADELRPTNNNGVVWANQFDNTANAKGHYEGTGKEIWDQTEGKVDGFVCSSGTGGTISGVSNFLKEKNKDVKIYLSDPKGSSLYNYIKNGELKSDGNSITEGIGSSRITKNFENAKIDDAYSIDDKEALPILYD

SEQ ID NO: 120921 - protein, 165 aa, Unknown
  Bacterial polypetide isolated from the Sargasso Sea
MKNAQNNFIEGIGNTPLVKLRAASEITGCNIYGKAEYLNPGGSVKDRAALALIKDAQEKKLISKGGTIVEGTAGNTGIGLCLIGNSIGYKTIIVMNDNQTQEKKDMLKNMGADLRLVPPKPYKDEGNYVKVAGRLADELKSSNNHGVVWANQFDNTANSKGHYET

SEQ ID NO: 120922 - protein, 210 aa, Unknown
  Bacterial polypetide isolated from the Sargasso Sea
MTQIKNSFLESIGNTPLIKLKAASEITGCHIFGKAEYLNPGGSVKDRAALALIKDAQEKKLISEGGIIVEGTAGNTGIGLCLLGNSLGYKTIIVMNDNQTQEKKDTLKNIGADLRLVPPKPYKDDGNYVKVAGRLAEELKSTNNNGVVWANQFDNTANAKGHYETTGPEIWEQTDGKVDGFVCASGTGGTIGGVSKFLKEKNKDIKIYLS

SEQ ID NO: 120923 - protein, 288 aa, Unknown
  Bacterial polypetide isolated from the Sargasso Sea
RAASEITGCNIFGKAEFLNPGGSVKDRAALALIKDAQEKKLIAKGGTVVEGTAGNTGIGLGLLGNSLGYKTIIVMNDNQTQEKKDILKNLGAELKLVPAKPYKDDNNFVKVAARLADELRPTNNNGVIWANQFDNTANAKGHYEGTGKEIWDQTEGKVDGFVCSSGTGGTISGVSNALKEKNKDIKIHLSDPKGSALYNYIKNGELKSEGGSITEGIGSSRITANFKDAKIDDAYSIDDKEALPILYDLIQNEGLSLGTSCGINIAGAIRMGKELGPGKTIVTILCDR

SEQ ID NO: 120924 - protein, 128 aa, Unknown
  Bacterial polypetide isolated from the Sargasso Sea
MAKIYEDNSFAIGNTPLVKLKSVTKNAKATVLAKIEGRNPAYSVKCRIGANMIWDAEKSGKLTKDKTIVEPTSGNTGIALAFTASARGYKLILTMPESMSIERRRVMAVLGAENCFNRRLLKVCQEQS

SEQ ID NO: 120925 - protein, 194 aa, Unknown
  Bacterial polypetide isolated from the Sargasso Sea
MKILQNNFVEAIGNTPLFKLKAASEITGCNIYGKAEYLNPGGSVKDRAALALIRDAEEKKLISKGGTIVEGTAGNTGIGLCLLGNSIGYKTIIVMNDNQTQEKKDLLRNIGADLRLVPPKPYKDENNFVKYAGRLADELKSSNNHGVVWANQFDNTANSKGHYETTGPEIWEQTNGKIDGFVCSSGTGGTIAGV

SEQ ID NO: 120926 - protein, 309 aa, Unknown
  Bacterial polypetide isolated from the Sargasso Sea
MKNSQNNFIDGIGNTPLVKLKAASEITGCNIYGKAEYLNPGGSVKDRAALALIRDAEEKKLISKGGTIVEGTAGNTGIGLCLIGNSIGYKTVIVMNDNQTQEKKDMLKNIGADLRLVPPKPYKDDGNYVKVAGRLADELRSSNNHGVVWANQFDNTANLKGHYETTGPEIYDQTDGKVDAFICASGTGGTIAGVSSYLKEKNKDIKIYLSDPAGSSLCNYINNGELKSEGNSITEGIGSSRVTANFAEAKIDGAFSISDNESLPVLFDLIQNEGLSLGTSCGVNIAGAIRLGKELGTRKNNRNYTLRQE

SEQ ID NO: 120927 - protein, 222 aa, Unknown
  Bacterial polypetide isolated from the Sargasso Sea
MNDIQNDFISGIGNTPLIKLRAASEITGCNIFGKAEFLNPGGSVKDRAALALIKDAQEKKLIAKGGTVVEGTAGNTGIGLGLLGNSLGYKTIIVMNDNQTQEKKDILKNLGAELKLVPAKPYKDDNNFVKVAARLADELRPTNNNGVIWANQFDNTANAKGHYEGTGKEIWDQTEGKVDGFVCSSGTGGTISGVSNALKEKNKDIKIHLSDPKGSALYNYIK

SEQ ID NO: 120928 - protein, 119 aa, Unknown
  Bacterial polypetide isolated from the Sargasso Sea
MDYFEDNSLSIGVTPLVKLNRVVRSDRTLVLAKIEGRNPAYSVKCRIGASMIWAAEKSGDLKPGIEVVEPTSGNTGIALAFVCAAKGYKLTLTMPDSMSLERRKVLKAFGANLVLTPRC

SEQ ID NO: 120929 - protein, 257 aa, Unknown
  Bacterial polypetide isolated from the Sargasso Sea
SQIKNNFIESVGNTPLIKLKAASEITGCNIYGKAEYLNPGGSVKDRAALALIKDAQEKKLISEGGIVVEGTAGNTGIGLCLLGNSLGYKTIIVMNDNQTQEKKDTLKNIGADLRLVPPKPYKDDGNYVKVAGRLAEELKSTNNKGVVWANQFDNTANAKGHYETTGPEIWEQTDGKVDGFVCASGTGGTIGGVSKFLKEKNKNIKIYLSDPTGSALYNHIMNGELKAEGGSITEGIGSSRITKNFAEAKIDGAFSIE

SEQ ID NO: 120930 - protein, 225 aa, Unknown
  Bacterial polypetide isolated from the Sargasso Sea
MKNYSDSFIQSIGNTPLIKLKAASEITGCNIFGKAEYLNPGGSVKDRAALALIKDAEEKKLISKGGTIVEGTAGNTGIGLCLLGNSLGYKTIIVMNDNQTQEKKDTLRNIGADLRLVPPKPYKDDGNYVKVAGRLAEELKSSNNHGVVWANQFDNTANAKGHYETTGPEIWEQTEGKIDGFVCSSGTGGTIGGVSSYLKEKNKDVNIFLSDPTGSALYNYIQNGE

SEQ ID NO: 120931 - protein, 303 aa, Unknown
  Bacterial polypetide isolated from the Sargasso Sea
MKNIQSNFISGIGNTPLFKLRAASEVTGCNIYGKAEYLNPGGSVKDRAALALIKDAEEKKLISKGGTIVEGTAGNTGIGLCLIGNSIGYKTIIVMNDNQTQEKKDMLKNMGADLKLVPPKPYKDDGNYVKVAGRLAAELKSSNNHGVVWANQFDNTANMKGHYETTGPEIWEQTDGKVDGFVCSSGTGGTIAGVSSFLKEKNKDIKIYLSDPAGSSLYNYIENGELKSEGGSITEGIGSSRITANFAEAKIDGAFSISDQESLPIIYDLIQNEGLSLGTSCGVNIAGAIRLGKLLGPGKTIVT

SEQ ID NO: 120932 - protein, 295 aa, Unknown
  Bacterial polypetide isolated from the Sargasso Sea
LLGCNIYGKAEYLNPGGSVKDRAALALIKDAEEKKLISRGGTIVEGTAGNTGIGLCLIGNSIGYKTIIVMNDSQTQEKKDMLKNIGADLRLVPPKPYKDDGNYVKVAGRLAEKLKSTNNHGVVWANQFDNTANSKGHYETTGPEIWDQTDGKVDGFVCSSGTGGTIAGVSKYLKEKNKNIKIYLSDPAGSSLYNYIQNGELKSEGGSITEGIGSSRITANFAEAKIDGAFSVSDQESLPILYNLIQNEGLSLGTSCGVNIAGAIRLGKELGPGKTIVTILCDKSDKYNSKLFNKS

SEQ ID NO: 120933 - protein, 103 aa, Unknown
  Bacterial polypetide isolated from the Sargasso Sea
MAKIYEDNSFAIGNTPLVKLKSVTKNAKATVLAKIEGRNPAYSVKCRIGANMIWDAEKSGKLTKDKTIVEPTSGNTGIALAFTASARGYKLILTMPESMSMKE

SEQ ID NO: 120934 - protein, 260 aa, Unknown
  Bacterial polypetide isolated from the Sargasso Sea
MKRLSDNVGNTPLIAMNTPFGKIWGKAEFMNPGGSVKDRMATFILNNAEREGLIKPGDTLCEATSGNTGISFAMLAAERGYTIYIVMPSNMSEERKKIFNFYGARLIEVDEGDFDGAIALRDEMCDKKGWFNCNQFHNPLNIQAHYQSTGPEIWNQYKNENGERNSPDVLILGTGTGGTIMGTGKFLKEHWPNIKIVAVEPAESPVMSGGEPGLHGIQGIGDGSKFLVDLDFVDEVVTIPNMGSKRTSKTPRKKIRVICR

SEQ ID NO: 120935 - protein, 270 aa, Unknown
  Bacterial polypetide isolated from the Sargasso Sea
MNNTQNDFISGIGNTPLIKLRAASEITGCNIYGKAEFLNPGGSVKDRAALALIKDAQEKKLIAKGGTVVEGTAGNTGIGLGLLGNSLGYKTIIVMNDNQTQEKKDLLRNLGAELRLVPPKPYKDDNNFVKVAARLADELRPTNNNGVIWANQFDNTANAKGHYEGTGQEIWEQTEGKVDGFVCSSGTGGTISGVSNALKEKNKDIKIYLSDPKGSALYNYIKNGELKSEGGSITEGIGSSRVTANFGEAKIDDAYSIDDHEALPILYDLI

SEQ ID NO: 120936 - protein, 201 aa, Unknown
  Bacterial polypetide isolated from the Sargasso Sea
MNDLQNDFVSGIGNTPLIKLRAASEITGCNIFGKAEFLNPGGSVKDRAALALIKDAQEKKLIAKGGTVVEGTAGNTGIGLGLLGNSLGYKTIIVMNDNQTQEKKDLLRNLGAELKLVPAKPYKDDNNFVKVAARLADELRPTNNNGVIWANQFDNTANAKGHYEGTGKEIWDQTEGKVDGFVCSSGTGGTISGVSNALKEK

SEQ ID NO: 120937 - protein, 246 aa, Unknown
  Bacterial polypetide isolated from the Sargasso Sea
MNDIQNDFISGIGNTPLIKLRAASEITGCNIFGKAEFLNPGGSVKDRAALALIKDAQEKKLITKGGTVVEGTAGNTGIGLGLLGNSLGYKTIIVMNDNQTQEKKDLLRNLGAELKLVPAKPYKDDNNFVKVAARLADELRPSNNNGVIWANQFDNTANARGHYEGTGKEIWDQTNGKVDGFVCSSGTGGTISGVSNALKEKNKDIKIFLSDPKGSALYNYIKNGELKSEGGSITEGIGSSRITANL

SEQ ID NO: 120938 - protein, 185 aa, Unknown
  Bacterial polypetide isolated from the Sargasso Sea
EIPEAYLLQQFDNPANPAVHECTTAEELWNDCDGHLDALVAGVGTGGTITGCARLLKQRNPQLQVVAVEPAGSAVLSGRPPGAHRIQGIGAGFVPAVLERDLIDEVMTVSDEEAMDVGRRLARQEGLLCGVSSGAAVAAALRLGQRAEWQGRRVLVMLASYGERYLSTPMFSGAASSPARQDPML

SEQ ID NO: 120939 - protein, 305 aa, Unknown
  Bacterial polypetide isolated from the Sargasso Sea
MNNTQNDFISGIGNTPLIKLRAASEITGCNIYGKAEFLNPGGSVKDRAALALIKDAQEKKLITKGGTVVEGTAGNTGIGLGLLGNSLGYKTIIVMNDNQTQEKKDLLRNLGAELRLVPPKPYKDDNNFVKVAARLADELRPTNNNGVIWANQFDNTANAKGHYEGTGQEIWEQTEGKVDGFVCSSGTGGTISGVSNALKEKNKDIKIYLSDPKGSALYNYIKNGELKSEGGSITEGIGSSRVTANFGEAKIDDAYSIDDHEALPILYDLIQNEGLSLGTSCGINIAGSIKMGKELGPGKTIVTIL

SEQ ID NO: 120940 - protein, 186 aa, Unknown
  Bacterial polypetide isolated from the Sargasso Sea
LIKLKAASEITGCNIYGKAEYLNPGGSVKDRAALALIKDAQEKKLISEGGIVVEGTAGNTGIGLCLLGNSLGYKTIIVMNDNQTQEKKDTLKNIGADLRLVPPKPYKDDGNYVKVAGRLAEELKSTNNNGVVWANQFDNTANAKGHYETTGPEIWGQTDGKVDGFVCASGTGGTIGGVSKLFKREK

SEQ ID NO: 120941 - protein, 297 aa, Unknown
  Bacterial polypetide isolated from the Sargasso Sea
TPLIKLKAASEITGCNIYGKAEYLNPGGSVKDRAALALIKDAQEKKLISEGGIVVEGTAGNTGIGLCLLGNSLGYKTIIVMNDNQTQEKKDTLKNIGADLRLVPPKPYKDDGNYVKVAGRLAEELKSTNNNGVVWANQFDNTANAKGHYETTGPEIWEQTDGKIDGFVCASGTGGTIGGVSKYLKEKNKNIKIYLSDPTGSALYNHIVNGELKAEGGSITEGIGSSRITKNFAEAKIDGAFSISDQESLPILYDLIQNEGLSLGTSCGVNIAGAIRLGKELGPGKTIVTILCDRSDK

SEQ ID NO: 120942 - protein, 213 aa, Unknown
  Bacterial polypetide isolated from the Sargasso Sea
MINIKNDFISSIGNTPLIKLRAASEITGCNIYGKAEYLNPGGSVKDRAALALIRDAQEKKLISNGGTVVEGTAGNTGIGLCLLGNSLGYKTIIVMNENQTQEKKDTLVNIGADLRLVPAKPYKDDGNYVKVAGKLAEELKSSNNHGVVWANQFDNTANAKGHYETTGPEIWNQTEGKIDGFICSSGTGGTIGGISSYLKEKNKDIKIFYQTLR

SEQ ID NO: 120943 - protein, 183 aa, Unknown
  Bacterial polypetide isolated from the Sargasso Sea
MNEIQNDFISGIGNTPLIKLRAASEITGCNIFGKAEFLNPGGSVKDRAALALIKDAQEKKLIAKGGTVVEGTAGNTGIGLGLLGNSLGYKTIIVMNDNQTQEKKDLLRNLGAELKLVPAKPYKDDNNFVKVAARLADELRPTNNNGVIWANQFDNVANAKGHYEGTGKEIWDQTEGKVDGFVC

SEQ ID NO: 120944 - protein, 264 aa, Unknown
  Bacterial polypetide isolated from the Sargasso Sea
MDIRDLDIAESVLDLIGNTPLVKLGRVGSGVPCTVVAKLEITNPGGSSKDRPAVTMIDEAEAAGLLKPGGTIIEPTSGNTGVGLAIVAAQRGYKCVFVMTDKVSSEKVSLLEAYGAEVVVCPVAVAPDDPRSYYSTAERLVQERPNAYRPNQYHNQSNPKSHYESTGPEIWQQTQGCVTHFVAGAGTGGTISGVGKYLKERNDAVQIIAADPANSVYSGGSGRPYLVEGVGEDFWPDTYDPKVVDVTVPISDAESFEMAHRGNG

SEQ ID NO: 120945 - protein, 169 aa, Unknown
  Bacterial polypetide isolated from the Sargasso Sea
MNNTQNDFISGIGNTPLIKLRAASEITGCNIYGKAEFLNPGGSVKDRAALALIKDAQEKKLIAKGGTVVEGTAGNTGIGLGLLGNSLGYKTIIVMNDNQTQEKKDLLRNLGAELRLVPPKPYKDDNNFVKVAARLADELRPTNNNGVIWANQFDNTANAKGHYEGTGQE

SEQ ID NO: 120946 - protein, 261 aa, Unknown
  Bacterial polypetide isolated from the Sargasso Sea
MKNNQESFISGIGNTPLIKLKAASEITGCNIYGKAEFLNPGGSVKDRAALALIKDAQDKKLISKGGTIVEGTAGNTGIGLGLIGNSLGYKTIIVMNDNQTQEKKDALRNLGAELRLVPAKPYKDENNFVKVASRLADELRPTNNNGVVWANQFDNTANAKGHYEGTGREIWEQTEGKIDGFVCSSGTGGTISGVSNALKEKNKNIKIYLSDPKGSALFNYIKNGELKTEGSSITEGIGSSRITKNFENAKIDDAFSIEDNE

SEQ ID NO: 120947 - protein, 277 aa, Unknown
  Bacterial polypetide isolated from the Sargasso Sea
LNPGGSVKDRAALALIKDAESKKLISKGGTIVEGTAGNTGIGLCLLGNSLGYKTIIVMNDNQTQEKKDTLKNIGADLRLVPAKPYKDDGNYVKVAGRLAEELSSSNNHGVVWANQFDNTANAKGHYETTGPEIWEQTDGKIDGFVCASGTGGTIGGISSYLKEKNNKIKIYLSDPTGSALYNYIQNGELKSEGGSITEGIGSSRITKNFAEAKIDGAFSISDHESLPILYNLIQNEGLSLGTSCGVNIAGAIRLGKELGPGKTIVTILCDKSDKYNS

SEQ ID NO: 120948 - protein, 61 aa, Unknown
  Bacterial polypetide isolated from the Sargasso Sea
EGLLSGISSGAALAATIKISKRKELMNKRLIVILPSFGERYLSTAMFESNTSIQARKDGYL

SEQ ID NO: 120949 - protein, 283 aa, Unknown
  Bacterial polypetide isolated from the Sargasso Sea
MGITRGFVGAVGNTPLIRLEHLSERTGCEILGKAEFMNPGGSVKDRAALGILLAAEASGDLKAGGTVVEGTAGNTGIGLAHLCNARGYRCVIVIPETQSAEKIDLLRSLGAEVRTVPAVPYRDPNNYVKLSGRIAEEIPGAVWANQFDNRANRQAHADTTGPEIWQQCEGRLDGWVAATGTGGTYAGVALYLKQQSEAVRCVLADPHGSALHSWASTGELASEGSSVTEGIGNSRITANLDGAPVDEAIRIDDQTAIDVLYDLLWHEGLFLGGSVGINVAAAV

SEQ ID NO: 120950 - protein, 115 aa, Unknown
  Bacterial polypetide isolated from the Sargasso Sea
MTADRSTTQPKLISNVSELIGNTPLIQLNKMSPIDGASILAKLEFLNPGGSVKDRIALAMLVSAEQEGALQDGVTVVEATSGNTGIALAMLCAERDYKLILTMPETMSFERRSLV

SEQ ID NO: 120951 - protein, 160 aa, Unknown
  Bacterial polypetide isolated from the Sargasso Sea
MEIASDITSLVGNTPLVKLDRIKNHCKCHPEIIAKLESFNPSASVKDRIAYSMINSAEKEGLISPNETTLIEATSGNTGIALAMVAAAKGYRLILTMPDTMSIERRAMLRAYGAELQLTPGKEGMQGALHLANELSSSISHSFQFNQFENLANPDIHERT

SEQ ID NO: 120952 - protein, 93 aa, Unknown
  Bacterial polypetide isolated from the Sargasso Sea
MNKIQNNFIEGIGNTPLVKLRAASEITGCNIYGKAEYLNPGGSVKDRAALALIKDAQEKKLISKGGTIVEGTAGNTGIGLCLIGNSIGYKTNY

SEQ ID NO: 120953 - protein, 132 aa, Unknown
  Bacterial polypetide isolated from the Sargasso Sea
MTQHYPTIADCIGNTPLVRLQRLPGQTSNTILVKLEGNNPAGSVKDRPALSMIERAEARGDIQPGDTLIEATSGNTGIALAMAAAIKGYRMVLIMPDNMSAERKAAMTAYGAQLIEVTQAQGMEGARDLALR

SEQ ID NO: 120954 - protein, 262 aa, Unknown
  Bacterial polypetide isolated from the Sargasso Sea
MKQIKNNFIESIGNTPLIKLKKASEITGCNIYGKAEYLNPGGSVKDRAALALIKDAQEKKLISEGGIVVEGTAGNTGIGLCLLGNSLGYKTIIVMNDNQTQEKKDTLKNIGADLRLVPPKPYKDAGNYVKVAGRLAEELKNTNNKGVVWANQFDNTANAKGHYETTGPEIWDQTDGKVDAFICASGTGGTIGGVSKFLKEKNENIKIYLSDPTGSALYNYISNGELKAEGGSITEGIGSSRITKNFAEAKIDGAYSISDEES

SEQ ID NO: 120955 - protein, 248 aa, Unknown
  Bacterial polypetide isolated from the Sargasso Sea
EITGCNIYGKAEYLNPGGSVKDRAALALIKDAEEKKLISKGGTIVEGTAGNTGIGLCLIGNSIGYKTIIVMNEDQTQEKKDMLRNMGADLRLVPPKPYKDDGNFVKVAAKLADDLKSSNNHGVVWANQFDNTANSKGHYETTGPEIWMQTDGKVDGFVCSSGTGGTIGGVSSFLKEKNKDIKIFLADPDGSSLFDHIENGELKSSGSSITEGIGSSRVTANFAKAKIDGAFKVTDKEALPVLYDLIQN

SEQ ID NO: 120956 - protein, 201 aa, Unknown
  Bacterial polypetide isolated from the Sargasso Sea
MPIAPDITALIGGTPLVRLNRLPQACGCRAEILAKLESFNPSASVKDRIASAMVLEAELAGTISPGRTVLVEPTSGNTGIALAMVAAARGYRLILTMPDSMSTERRAMLRAYGAELQLTDGALGMNGAIALARELVAAIPEAYLLQQFDNPANPAVHERTTAEEIWRDTAGQIDAFVAGVGTGGTITGCARLLKQRQPQLQ

SEQ ID NO: 120957 - protein, 222 aa, Unknown
  Bacterial polypetide isolated from the Sargasso Sea
MKNYNDNFIDAIGNTPLIKLKAASEITGCNIYGKAEFLNPGGSVKDRAALALIKDAQEKKLISKGGTVVEGTAGNTGIGLCLLGNSLGYKTIIVMNENQTQEKKDTLVNIGADLRLVPVKPYKDEGNYVKVAGRLAEELKSSNNHGVVWANQFDNTANAKGHYETTGPEIWDQTEGKVDGFVCSSGTGGTITGVSSFLKEKNKDKKIFLSDPTGSALYNYIE

SEQ ID NO: 120958 - protein, 218 aa, Unknown
  Bacterial polypetide isolated from the Sargasso Sea
MQNSQNNFIEGIGNTPLIKLKAASEITGCNIFGKAEYLNPGGSVKDRAALALIKDAQEKKLISKGGIVVEGTAGNTGIGLCLIGNSLGYKTIIVMNENQTQEKKDILINIGADLRLVPPKPYKDDGNYVKVASRLVEELKSSNNNGVIWANQFDNTANAKGHYETTGPEIWEQTEGKVDGFVCSSGTGGTIGGVSKYLKEKNENVKIYLSDPTRICSL

SEQ ID NO: 120959 - protein, 197 aa, Unknown
  Bacterial polypetide isolated from the Sargasso Sea
MKTLQNNFVEAIGNTPLFKLKAASEITGCNIYGKAEYLNPGGSVKDRAALALIRDAEEKKLISKGGTIVEGTAGNTGIGLCLLGNSIGYKTIIVMNDNQTQEKKDLLRNIGADLRLVPPKPYKDENNFVKYAGRLADELKSSNNHGVVWANQFDNTANSKGHYETTGPEIWEQTDGKIDGFVCSSGTGGTIAGVSSF

SEQ ID NO: 120960 - protein, 104 aa, Unknown
  Bacterial polypetide isolated from the Sargasso Sea
MKNIQENFIAGIGNTPLVKLRKASELTGCHIYGKAEYLNPGGSVKDRAALALIRDAEEKKLITKGGIIVEGTAGNTGIGLCHIGNSLGYKTIIVMNNNQTQEKK

SEQ ID NO: 120961 - protein, 231 aa, Unknown
  Bacterial polypetide isolated from the Sargasso Sea
IIEATSGNTGIALAMAAAIKGYRMVLIMPDNATSERKASMQAYGAELILVSKKDGMEGARDLALKMQAEGKGKVLDQFNNPDNPAAHVASTGPEIWLQSRGLITHFVCSMGTTGTIMGVSTYLKQQNPNIQIIGLQPSEGSAIPGIRRWPEAYLPGFYDKSRVDLVLDVSEADAVATTRRLAREEGICAGVSSGGAVFAAIKLAEQQPGAVIVAIVCDRGDRYLSSGLFND

SEQ ID NO: 120962 - protein, 155 aa, Unknown
  Bacterial polypetide isolated from the Sargasso Sea
KVDIFVAGVGTGGTITGVSRYIKHEKKHPLISVAVEPVDSPVITQALAGQEIKPGPHKIQGIGAGFIPGNLDLSIIDAVERVSNDDAIAMAHRLMKEEGILAGISSGAAVVAAKRLAELPENAGKNIVVIIPSSTERYLSSALFADFFTESELQA

SEQ ID NO: 120963 - protein, 207 aa, Unknown
  Bacterial polypetide isolated from the Sargasso Sea
MSNIKNDFISSIGNTPLIKLRAASEITGCNIYGKAEYLNPGGSVKDRAALALIKDAQEKKLISNGGTVVEGTAGNTGIGLCLLGNSLGYKTIIVMNENQTQEKKDTLVNIGADLRLVPAKPYKDDGNYVKVAGRLAEELKSSNNHGVVWANQFDNTANAKGHYETTGPEIWNQTEGKIDGFVCSSGTGGTIGGISSYLKEKNKDVKI

SEQ ID NO: 120964 - protein, 187 aa, Unknown
  Bacterial polypetide isolated from the Sargasso Sea
MGGAIARAKELSEEIDGAVMLQQFDNPSNPSVHERTTALEIWEDTDGQADILISGVGTGGTLTGISRVLKEKKAGFQTVAVEPEDSPVLSGGDPGPHKIQGIGAGFVPSILDTDLIDEIVKITNDTAFATARMLAKTEGIPVGISSGAAVAAAIEVAKKPENEGKTLVVIIPSFAERYLSTALFEDL

SEQ ID NO: 120965 - protein, 256 aa, Unknown
  Bacterial polypetide isolated from the Sargasso Sea
ASEITGCNIYGKAEYLNPGGSVKDRAALALIKDAEEKKLISKGGTIVEGTAGNTGIGLCLIGNSIGYKTIIVMNDNQTQEKKDMLKNMGADLKLVPPKPYKDDGNYVKVAGRLADELKSSNNHGVVWANQFDNTANMKGHYETTGPEIWGQTDGKVDGFVCSSGTGGTIAGVSSFLKEKNKDIKIYLSDPAGSSLYNYIENGELKSEGGSITEGIGSSRVTANFAEAKIDGAFSISDQESLPIIYDLIQNEGLSLG

SEQ ID NO: 120966 - protein, 181 aa, Unknown
  Bacterial polypetide isolated from the Sargasso Sea
MKNYSDSFIQSIGNTPLIKLKAASEITGCKIYGKAEYLNPGGSVKDRAALALIKDAEEKKLISKGGTIVEGTAGNTGIGLCLIGNSLGYKTVIVMNDNQTQEKKDTLRNIGADLRLVPPKPYKDDGNYVKFAGRLAEELKSSNNHGVVWANQFDNTANAKGHYETTGPEIWDQTDGKIDGF

SEQ ID NO: 120967 - protein, 221 aa, Unknown
  Bacterial polypetide isolated from the Sargasso Sea
MKTLQNNFVEAIGNTPLFKLKVASEITGCNIYGKAEYLNPGGSVKDRAALALIRDAEEKKLISKGGTIVEGTAGNTGIGLCLLGNSIGYKTIIVMNDNQTQEKKDLLRNIGADLRLVPPKPYKDENNFVKYAGRLADELKSSNNHGVVWANQFDNTANSKGHYETTGPEIWEQTDGKIDGFVCSSGTGGTIAGVSSFLKEKNKDIKIYLSDPTGSSLYNYM

SEQ ID NO: 120968 - protein, 178 aa, Unknown
  Bacterial polypetide isolated from the Sargasso Sea
MDIANDITSLVGNTPLVKLNRIRKYFNCYPEIIAKLESFNPSASVKDRIAYSMLRKAEEQGLIKPDKTTLIEATSGNTGIALAMVAAAKGYKLILTMPDTMSIERRAMLRAYGAELQLTPGKEGMKGALELANELSKSIANSYQFNQFENFANPDIHERTTAQEIWAQSNNNLDGLVQ

SEQ ID NO: 120969 - protein, 259 aa, Unknown
  Bacterial polypetide isolated from the Sargasso Sea
NTPLVKLNRIKKYFDCYPEIIAKLESFNPSASVKDRIAYSMLRKAEEEGLITPDKTTLIEATSGNTGIALAMVAAAKGYNLILTMPDTMSIERRAMLRAYGAELQLTPGKDGMKGALDLANELSSTIENSYQFNQFENFANPDIHERTTAQEIWSQSNNNLDGLVTGVGTGGTITGCARFLKKVNPNCKIYAVEPKKSAVISGEKAGSHSIQGIGAGFVPKVLNTKLIDEIIKIDDDEAFYYGRLLNRLEGLLSGISSG

SEQ ID NO: 120970 - protein, 249 aa, Unknown
  Bacterial polypetide isolated from the Sargasso Sea
MKNYKDDFIQSIGNTPLIKLKAASEITGCNIYGKAEYLNPGGSVKDRAALALIRDAEQKKLISKGGIIVEGTAGNTGIGLCLIGNSLGYKTIIVMNDNQTQEKKDTLRNIGADLKLVPPKPYKDENNFVKVAARMTEELKSSNNHGVVWANQFDNTANSKGHYDTTGPEIWEQTEGKVDGFVCSSGTGGTIGGVSSFLKEKNKDIQIYLSDPKGSSLYNHIENGELKAEGGSITEGIGSSRVTANLQKQ

SEQ ID NO: 120971 - protein, 232 aa, Unknown
  Bacterial polypetide isolated from the Sargasso Sea
PRVIPLIEATSGNTGIALAMAAAIKGYKMILIMPSNSTQERKDAMQAYGAELLLVDNMEAARDLALDLQAQGKGKVLDQFNNQDNANAHFQTTGPEIWQQSQGKLTHFVSSMGTTGTIMGVSKYLKSRNPDITIVGLQPADGSSIPGIRRWPQEYLPGIFDAARVDAVMDIEEQDAKSMARTLAREEGICAGVSSGGAVFAALEIARLNPGSVVVAIVCDRGDRYLSSGLFS

SEQ ID NO: 120972 - protein, 186 aa, Unknown
  Bacterial polypetide isolated from the Sargasso Sea
MNEIQNDFISGIGNTPLIKLRAASEITGCNIFGKAEFLNPGGSVKDRAALALIKDAQEKKLIAKGGTVVEGTAGNTGIGLGLLGNSLGYKTIIVMNDNQTQEKKDLLRNLGAELKLVPAKPYKDDNNFVKVASRLADELRPSNNNGVIWANQFDNVANAKGHYEGTGKEIWDQTNGKVDGFVCSSG

SEQ ID NO: 120973 - protein, 250 aa, Unknown
  Bacterial polypetide isolated from the Sargasso Sea
MKNYSDSFIQSIGNTPLIKLKAASEITGCNIFGKAEYLNPGGSVKDRAALALIKDAEEKKLISKGGTIVEGTAGNTGIGLCLLGNSLGYKTIIVMNDNQTQEKKDTLRNIGADLRLVPPKPYKDDGNYVKVAGRLAEELKSSNNHGVVWANQFDNTANAKGHYETTGPEIWEQTEGKIDGFVCSSGTGGTIGGVSSYLKEKNKDVNIFLSDPTGSALYNYIQNGELKSEGGSITEGIGSSRVTANFAEAK

SEQ ID NO: 120974 - protein, 218 aa, Unknown
  Bacterial polypetide isolated from the Sargasso Sea
MNSTQNDFISGIGNTPLIKLRAASEITGCNIYGKAEFLNPGGSVKDRAALALIKDAQEKKLIAKGGTVVEGTAGNTGIGLGLLGNSLGYKTIIVMNDNQTQEKKDLLRNLGAELRLVPAKPYKDDNNFVKVAARLADELRPSNNNGVIWANQFDNTANAKGHYEGTGQEIWEQTEGKIDGFVCSSGTGGTISGVSNALKEKNKDIKIYLSDPKRFCAL

SEQ ID NO: 120975 - protein, 187 aa, Unknown
  Bacterial polypetide isolated from the Sargasso Sea
MKNTKNNFIESIGNTPLIKLKAASEITGCNIYGKAEYLNPGGSVKDRAALALIKDAQEKKLISEGGIVIEGTAGNTGIGLCLLGNSLGYKTIIVMNDNQTQEKKDTLKNIGADLRLVPPKPYKDDGNYVKVAGRLAEELRSTNNNGVVWANQFDNTANAKGHYETTGPEIWEQTDGKVDGFVCASGT

SEQ ID NO: 120976 - protein, 178 aa, Unknown
  Bacterial polypetide isolated from the Sargasso Sea
MSRIYEDNSFAIGHTPLVKLNSITKNAKATVLAKIEGRNPAYSVKCRIGANMIWDAEKKGLLNKDKVIIEPTSGNTGIALAYTAAARGYKLILTMPESMSIERRRMMAVLGAELILTEAAKGMPGAIAKAKEIADGDPQKYFMPGQFDNPANPEIHFKTTGPEIWDDTDGQIDVLVSG

SEQ ID NO: 120977 - protein, 164 aa, Unknown
  Bacterial polypetide isolated from the Sargasso Sea
MYKSIEECIGNTPLVKANRINNSPVELYLKLEGDNPAGSIKDRAAMNMLNAAEKSNLLSKNKKIVEPTSGNTGIALAMACAIKGYELILVMPENMSIERRAAMYAYGAEIILVSTDEGMEGARDKALEIAKEQDAIFLDQFANSANPEVHYHTTGPEIWNDTEG

SEQ ID NO: 120978 - protein, 242 aa, Unknown
  Bacterial polypetide isolated from the Sargasso Sea
MKNTKNNFIDSIGNTPLIKLKAASEITGCNIYGKAEYLNPGGSVKDRAALALIKDAQDKKLISEGGIVVEGTAGNTGIGLCLLGNSLGYKTIIVMNDNQTQEKKDTLRNIGADLRLVPPKPYKDDGNYVKVAGRLAEELKSTNNNGVVWANQFDNTANAKGHYETTGPEIWEQTDGKVDGFVCASGTGGTIGGVSKYLKEKNKDIKIYLSDPTGSALYNYIMNGELKAEGGSVTESIGSSRI

SEQ ID NO: 120979 - protein, 269 aa, Unknown
  Bacterial polypetide isolated from the Sargasso Sea
SEAHFKVHTINGLSESIGNTPLIRIESLSKETGCNILGKAEFMNPGGSVKDRAALWMVKDAEAKGLLKPKGIVVEGTAGNTGIGLALVCNSRGYQTIIYMPDNQSEEKVNMLRTLGAEVRVVETVPYANDMNYQKQAGRFAETLDNAVWVNQFDNTANRQAHFESTGPEIWQQTNGDIDAFTCAVGTGGTLAGVSRFLKAKNKDIKIVLADPFGSALYNYVTTGEASMTPGPSITEGIGNSRVTDNLADTQIDDAVQIADQNMVDLVYR

SEQ ID NO: 120980 - protein, 207 aa, Unknown
  Bacterial polypetide isolated from the Sargasso Sea
MKNSQNNFIDGIGNTPLVKLKAASEITGCNIYGKAEYLNPGGSVKDRAALALIRDAEEKKLISKGGTIVEGTAGNTGIGLCLIGNSIGYKTVIVMNDNQTQEKKDMLKNIGADLRLVPPKPYKDDGNYVKVAGRLADELRSSNNHGVVWANQFDNTANLKGHYETTGPEIYDQTDGKVDAFICASGTGGTIAGVSSYLKEKNKDIKI

SEQ ID NO: 120981 - protein, 293 aa, Unknown
  Bacterial polypetide isolated from the Sargasso Sea
MKNYSNSFIESIGNTPLIKLKAASEITGCNIYGKAEYLNPGGSVKDRAALALIKDAQEKNLISKGGTVVEGTAGNTGIGLCLIGNSLGYKTIIVMNENQTQEKKDTLINIGADLRLVPVKPYKDDGNYVKVAGRLAEELKSSNNHGVVWANQFDNTANAKGHYETTGPEIWDQTEGKVDGFICSSGTGGTIGGVSSYLKEKNKDIKIFLSDPTGSALYNYIKNGELKSEGGSITEGIGSSRVTANFKEAKIDGAFSISDHESLPILYDLIQNEGLSLGTSCGVNIAGAIRLGK

SEQ ID NO: 120982 - protein, 61 aa, Unknown
  Bacterial polypetide isolated from the Sargasso Sea
MGHKKIANNALELIGNTPLVRLNKVVPNGVEILGKCEFMTPGGSVKDRAGSAMLAAAELSG

SEQ ID NO: 120983 - protein, 223 aa, Unknown
  Bacterial polypetide isolated from the Sargasso Sea
MSNTQSDFISGIGNTPLIKLRAASEITGCNIYGKAEFLNPGGSVKDRAALALIKDAQEKKLIAKGGTVVEGTAGNTGIGLGLLGNSLGYKTIIVMNDNQTQEKKDLLRNLGAELRLVPPKPYKDDKNFVKVAARLADELRPTNNNGVIWANQFDNTANAKGHYEGTGQEIWEQTEGNVDGFVCSSGTGGTISGVSNALKEKNKDIKIYLSDPKGIRSLQLYKE

SEQ ID NO: 120984 - protein, 219 aa, Unknown
  Bacterial polypetide isolated from the Sargasso Sea
MTNFQNNFIEGIGNTPLIKLKAASEITGCNIYGKAEYLNPGGSVKDRAALALIKDAEEKKLISKGGIIVEGTAGNTGIGLCLIGNSVGYKTIIVMNDNQTQEKKDMLRNIGADLRLVPPKPYKDDGNYVKVAGRLAEELKSTNNHGVVWANQFDNTANSKGHYESTGPEIWNQTDGKVDGFVCSSGTGGTIAGVSSFLKEKNKNIKIYLSDPAGSLFII

SEQ ID NO: 120985 - protein, 260 aa, Unknown
  Bacterial polypetide isolated from the Sargasso Sea
IVKNYKNNFIESIGNTPLIKLKAASEITGCNIYGKAEYLNPGGSVKDRAAHALIKDAQEKKLISKGGIIVEGTAGNTGIGLCLLGNSLGYKTIIVMNDNQTQEKKDTLKNIGADLRLVPPKPYKDDGNYVKVAGRLAEELKSTNNYGVVWANQFDNTANAKGHYETTGPEIWEQTDGKIDGFICASGTGGTIGGVSSYLKNKNKDVKIYLSDPSGSSLYNYITNGELKSEGGSITEGIGSSRVTANFAQAKIDGAFSIDD

SEQ ID NO: 120986 - protein, 106 aa, Unknown
  Bacterial polypetide isolated from the Sargasso Sea
MEIANDITSLVGNTPLVKLNRIRKHFNCYPEIIAKLESFNPSASVKDRIAYSMLCKAEEEGLITPDKTTLIEATSGNTGIALAMVAAAKGYKLILTMPDTMSMREG

SEQ ID NO: 120987 - protein, 112 aa, Unknown
  Bacterial polypetide isolated from the Sargasso Sea
PVLSGGNPGSHAIQGIGAGFIPNVLDMNQIDEVIRINDNEAMDIGRRLAKEEGLLSGVSSGAAVAAALKVGNQPEFANKRLVVILPSFGERYLSTTMFTSIPAKPVKGNEYL

SEQ ID NO: 120988 - protein, 175 aa, Unknown
  Bacterial polypetide isolated from the Sargasso Sea
IKKKYKDVFIPSQFSNPNNPDTHKRTTAEEIWRDTDGNVDIFIAGVGTGGTISGVSEVLKERKPSTQIIAVEPALSPVISGGSPGLHNIQGIGAGFVPDNLNKKFIDEILTITDQEALDMAKRLVREEGLFVGISAGANVAAALKVGARPENKGKLIVTILCDYGERYLSTEMFV

SEQ ID NO: 120989 - protein, 79 aa, Unknown
  Bacterial polypetide isolated from the Sargasso Sea
MAKIYEDNSFAIGNTPLVKLKSVTKNAKATVLAKIEGRNPAYSVKCRIGANMIWDAEKSGKLTKDKTIVEPTSGNTGMP

SEQ ID NO: 120990 - protein, 288 aa, Unknown
  Bacterial polypetide isolated from the Sargasso Sea
MTIEACIGQTPLVRLQRLDCGSSTVLLKLEGNNPAGSVKDRAALNMINQAELRQEIAPGDTLIEATSGNTGIALAMAAAIKGYKMILIMPSNSTQERKDAMQAYGAELLLVDNMEAARDLALDLQAQGKGKVLDQFNNQDNANAHFLTTGPEIWQQSQGKITHFVSSMGTTGTIMGVSKYLKSRNPDITIVGLQPADGSSIPGIRRWPQEYLPGIFDAARVDAVMDIEEQDAKAMARTLAREEGICAGVSSGGAVFAALEIARQNPGAVVVAIVCDRGDRYLSSGLFS

SEQ ID NO: 120991 - protein, 336 aa, Unknown
  Bacterial polypetide isolated from the Sargasso Sea
MNSSSIRENLIQSIGNTPLIRLHRASEETGCTILGKAEFMNPGGSVKDRAAKAIVLDAEKQGVLQPGGLIVEGTAGNTGIGLALVGNSRGYRTLIVIPETQSQEKKNMLRLSGAELKEVPAVPYRDPQNYIKISGRLAEELNQNNPNGAIWANQFDNVANRQAHYETTGPEIWEQTEGKVDAFICAVGTGGTLAGTGAFLKEKNPEIQIGLADPMGAALYSYYTEGELSSWGDSITEGIGQGRITANLEDAVVDHPFQIPDDEALPVCFQLLQEEGLCLGSSSGINVAGAIRLAKELGPGITIVTILCDSGTRYQSKLFNPQFLKKKGLPIPEWLS

SEQ ID NO: 120992 - protein, 345 aa, Unknown
  Bacterial polypetide isolated from the Sargasso Sea
MKNKINAHENILSLIGNTPLVKLNKVTKNFEGDYYAKYEAMNPGQSNKDRIALHIIESAEKKGLIDKNTTIIETTSGNTGFSLSMVSMVKGYKCIVAVSSKSSPDKIDMLKAMGAKVYVCPANVPADDKRSYYQVAKRLNEEIKDSFYVNQYFNELNIDAHYKTTGPEIWKQTNGSITHLVASSGTGGTISGIGRFLKEKNPNIQIIGVDAYGSVLKKFHETGEFDSNEIYPYRIEGLGKNLIPTSTDFDVIDFYEKVNDEDSAHSSREIAKKEGVFVGYTSGACLQAIKQLNKRKVFTKNSIVVTIFCDHGSRYMSKIFSDKWMNEQGFDQKSIEQESSIEHIR

SEQ ID NO: 120993 - protein, 330 aa, Unknown
  Bacterial polypetide isolated from the Sargasso Sea
MSRENKAYNNILELIGNTPLVRLNKICDGFPGKYFTKYEGYNPGHSNKDRIALHILNQAEKKKILKKGSTIIETTSGNTGFSLAMVSLLKGYKCILAVSSKASKDKINMLKCLGAEIYVCPSNVPSDDPRSYYEVAKRLNNEIKDSVYINQYFNDLNVQAHYETTGPEIWNQTDGDITHLIACSGTGGTISGIGRYLKEQNKNIKIIGVDAYGSILKKYHETGEIDKNEIYSYRIEGLGKNIVPSATDFKIIDKFVKVTDSDSAHMSREITLKEGLFVGYTSGAAFQAVNILNGENEFNDESCVVIVFPDHGSRYLSKIYSDEWMNNQGF

SEQ ID NO: 120994 - protein, 226 aa, Unknown
  Bacterial polypetide isolated from the Sargasso Sea
MKNIQNNFISGIGNTPLFKLRAASEITGCNIYGKAEYLNPGGSVKDRAALALIKDAEEKKLITRGGTIVEGTAGNTGIGLCLIGNSVGYKTIIVMNDNQTQEKKDMLKNMGADLKLVPPKPYKDDGNYVKVAGRIADELKNSNNHGVVWANQFDNTANMKGHYKTTGPEIWDQTDGKIDGFVCSSGTGGTIAGVSSFLKEKNKNIKIYLSDPTGSSLFEYVETWRN

SEQ ID NO: 120995 - protein, 453 aa, Unknown
  Bacterial polypetide isolated from the Sargasso Sea
MKVFNNILETIGNTPLVKLNKVTKDVDATVLAKVEYFNPGSSVKDRMAVKMVEDAEADGRLQPGGTIVEGTSGNTGMGLALAAIVKGYKLICVSTDKQSKEKFDILRAVGAEVIVCPTDVAPEDPRSYYSTSKRIAEETPNSWYVNQYDNPSNAIAHYEQTGPEIWDQTDGKITHFVVGVGTGGTISGVGKYLKEKNPNIKIWGIDTYGSVFKKYHETGIFDENEIYSYITEGIGEDILPENVNFDVIDGFEKVTDKDAAVYTRRMALEEGIFAGNSCGAAVKGLIQLKHHFKSDDVVVVLLHDSGSRYVGKMYNDDWMRERGFLDEKIICAGDLIKNHKDKPLVTLFAEELVSHAISKMRKFGISQIPVMKEGENVGSVDDRHMYELLVEKPELKDTPISSIMQAPFPMVDEKTSIDELCKLIDKDTSAALVELSNGNKHIITRYDIIQAMS

SEQ ID NO: 120996 - protein, 333 aa, Unknown
  Bacterial polypetide isolated from the Sargasso Sea
MNNFQNNFVEGIGNTPLIKLKGASEITGCNIYGKAEYLNPGGSVKDRAALALIKDAEEKKLISKGGIIVEGTAGNTGIGLCLIGNAIGYKTIIVMNDNQTQEKKDMLRNIGADLRLVSPKPYKDDGNYVKVAGRLAEELKSKNNHGVVWANQFDNTANTKGHYETTGPEIWKQTEGKVDGFVCSSGTGGTIGGVSSYLKEKNKNIKIYLSDPTGSALYNYIKNGELKSDGGSITEGIGSSRITANFAEAKIDGAFSISDHESLPILYNLIQNEGLSLGTSCGVNIAGAIRLAKELGPGKTIVTILCDKSDKYNSKMFNKKFLQEKGLPFPSWI

SEQ ID NO: 120997 - protein, 333 aa, Unknown
  Bacterial polypetide isolated from the Sargasso Sea
MKTLQNNFVEAIGNTPLFKLKAASEITGCNIYGKAEYLNPGGSVKDRAALALIRDAEEKKLISKGGTIVEGTAGNTGIGLCLLGNSIGYKTIIVMNDNQTQEKKDLLRNIGADLRLVPPKPYKDENNFVKYAGRLADELKSSNNHGVVWANQFDNTANSKGHYETTGPEIWEQTDGKIDGFVCSSGTGGTIAGVSSFLKEKNKDIKIYLSDPTGSSLYSYIENGELKSEGGSITEGIGSSRVTANFAKAKIDGAFSISDHESLPVLFDLIEKEGLSLGTSCGVNIAGAIRLGKLLGPGKTIVTILCDKSDKYNSKMFNRSFLQEKGLPYPHWI

SEQ ID NO: 120998 - protein, 333 aa, Unknown
  Bacterial polypetide isolated from the Sargasso Sea
MSQIKNNFIESVGNTPLIKLKAASEITGCNIYGKAEYLNPGGSVKDRAALALVKDAQEKKLISEGGIVVEGTAGNTGIGLCLLGNSLGYKTIIVMNDNQTQEKKDTLKNIGADLRLVPPKPYKDDGNYVKVAGRLAEELKSTNNKGVVWANQFDNTANAKGHYETTGPEIWEQTNGKVDGFVCASGTGGTIGGVSKFLKEKNKDIKIYLSDPTGSALYNHVMNGELKAEGGSITEGIGSSRITKNFAEAKIDGAFSISDQESLPVLYDLIQHEGLSLGTSCGVNIAGAIRLGKELGPGKTIVTILCDRSDKYNSKMFNKSFLKEKNLPIPSWL

SEQ ID NO: 120999 - protein, 231 aa, Unknown
  Bacterial polypetide isolated from the Sargasso Sea
MKNSQTSFVEGIGNTPLIKLKAASEVTGCNIYGKAEYLNPGGSVKDRAALALIRDAQEKKLISKGGIIVEGTAGNTGIGLCLIGNSIGYKTIIVMNDNQTQEKKDMLRNIGADLKLVPPKPYKDDGNYVKVAKRVAEELKSTNNHGVVWANQFDNTANAKGHYETTGPEIWEQTDGKVDGFICSSGTGGTIGGVSSYLKEKNKDIKIYLSDPTGSALYNYIKNGELKSEGG

SEQ ID NO: 121000 - protein, 305 aa, Unknown
  Bacterial polypetide isolated from the Sargasso Sea
MKYDNILQTIGHTPTIRLHSFDSGHAHSLWVKLESFNPGGSVKDRPALNMIEDAEARGVLKPGDTLIEPTSGNTGIGLAMVAAVKGYPAIFVMSADMSEERKAILRAFGAELILTPADKGTVGAIKEARRLEKEEGYFFVGQHYNPANPQSHRQTAKEIIGDFDGDLGAVICTTGTGGTISGLSAVLREEIPGIRIVATEPDNSPILSKGIACKHRIMGTAPGFIPDTLDQGAYDDIIAVNADHAMAVARQLAQQEGIFCGISCGAAVVGMLEYAKREEARERQLLAILADTGERYLSTELWAST

SEQ ID NO: 121001 - protein, 333 aa, Unknown
  Bacterial polypetide isolated from the Sargasso Sea
MNNTQNDFISGIGNTPLIKLRAASEITRCNIYGKAEFLNPGGSVKDRAALALIKDAQEKKLIAKGGTVVEGTAGNTGIGLGLLGNSLGYKTIIVMNDNQTQEKKDLLRNLGAELRLVPPKPYKDDNNFVKVAARLADELRPTNNNGVIWANQFDNTANAKGHYEGTGQEIWEQTEGKVDGFVCSSGTGGTISGVSNALKEKNKDIKIYLSDPKGSALYNYIKNGELKSEGGSITEGIGSSRVTANFGEARIDDAYSIDDHEALPILYDLIQNEGLSLGTSCGINIAGAIRMGKELGPGKTIVTILCDRSDKYATKMFNKKFLEEKGLPVPNWF

SEQ ID NO: 121002 - protein, 333 aa, Unknown
  Bacterial polypetide isolated from the Sargasso Sea
MKNYKDDFIQSIGNTPLIKLKAASEITGCNIYGKAEYLNPGGSVKDRAALALIRDAEQKKLISKGGIIVEGTAGNTGIGLCLIGNSLGYKTIIVMNDNQTQEKKDTLRNIGADLKLVPPKPYKDENNFVKVAARMAEELKSSNNHGVVWANQFDNTANSKGHYNTTGPEIWEQTEGKVDGFVCSSGTGGTIGGVSSFLKEKNKDIQIYLSDPKGSSLYNHIENGELKAEGGSITEGIGSSRVTANFAEAKIDGAFSIEDKESLPILYDLIKNEGLSLGTSCGVNIAGAIRLGKKLGPGKTIVTILCDKSDRYNSKMFNKPFLIEKGLPYPDWI

SEQ ID NO: 121003 - protein, 281 aa, Unknown
  Bacterial polypetide isolated from the Sargasso Sea
MIGRTPLVKVFSNQGSVVLAKLEGNNPGGSVKDRAALKMITDAENSKIIKPGDTIIEATSGNTGIALAMVAAMKNYKIKLIMPETASEERVKTMKAYGADVILVTKEEDMEGARDLAMKLKNSGEGIVLDQFSNDSNYMSHFEGTGPEIFDQTNGKVTHFVSAMGTTGTITGVSMYLKSKNPNIRIIGVQPEEGSRIPGIRRWKTGYEPAIKKHALIDSTIDINQSTAEDSCEELAKKNGIFCGISAAANIFISKKIARENRNSVVVTIICDRGDRYLSKI

SEQ ID NO: 121004 - protein, 312 aa, Unknown
  Bacterial polypetide isolated from the Sargasso Sea
MKNYSNNFIESIGNTPLIKLKAASDITGCNIYGKAEYLNPGGSVKDRAALALIKDAQENKLISKGGTVVEGTAGNTGIGLCLLGNSLGYKTIIVMNENQTQEKKDTLKNIGADLRLVPVKPYKDDGNYVKVAGRLAEELKSSNNHGVVWANQFDNTANAKGHYDTTGPEIWQQTEGKIDGFVCSSGTGGTIGGVSSYLKEKNKNIKIYLSDPTGSALYNYIKNGELKSEGGSITEGIGSSRITANFAEAKIDGAFSISDHESLPIIYDLIQNEGLSLGTSCGVNIAGAIRLAKELGPGKTIVTILCDKSDKY

SEQ ID NO: 121005 - protein, 333 aa, Unknown
  Bacterial polypetide isolated from the Sargasso Sea
MKNYQTNFIEGIGNTPLIRLKTASEITGCNIYGKAEYLNPGGSVKDRAALALIKDAEDKKLISKGGTIVEGTAGNTGIGLCLIGNSIGYKTIIVMNDNQTQEKKDMLKNIGADLRLVPPKPYKDDGNYVKVAGRLADELKSTNNHGVVWANQFDNTANAKGHYETTGPEIWEQTDGKVDGFVCSSGTGGTIGGVSSYLKEKNKDIKIYLSDPTGSALYNYIKNGELKSEGGSITEGIGSSRVTANFAEAKIDGAFSISDHESLPILYDLIQNEGLSLGTSCGVNIAGAIRLGKELGPGKTIVTILCDKSDKYNSKMFNKKFLEEKGLPFPSWI

SEQ ID NO: 121006 - protein, 282 aa, Unknown
  Bacterial polypetide isolated from the Sargasso Sea
MNNTQNDFISGIGNTPLIKLRAASEITGCNIYGKAEFLNPGGSVKDRAALALIKDAQEKKLIAKGGTVVEGTAGNTGIGLGLLGNSLGYKTIIVMNDNQTQEKKDLLRNLGAELRLVPPKPYKDDNNFVKVAARLADELRPTNNNGVIWANQFDNTANAKGHYEGTGQEIWEQTEGNVDGFVCSSGTGGTISGVSNALKEKNKDIKIYLSDPKGSALYNYIKNGELKSEGGSITEGIGSSRVTANFGEAKIDDAYSIDDHEALPILYDIIQNEGLSLGTSCE

SEQ ID NO: 121007 - protein, 325 aa, Unknown
  Bacterial polypetide isolated from the Sargasso Sea
MDVRQGFVDCVGRTPLIRLTKLSAETGCEILGKAEFMNPGGSVKDRAALYIIRDAERRGVLKPGGTVVEGTAGNTGIGFAHICAARGYRCVIVIPDTQSPDKLAILRTLGADVRPVPAAPYRDPNNYQKIAGRLADELDGAVWANQFDNVVNRQAHYETTGPEIWRDTAGTIDAFVCATGTGGTLAGVSRFLKEQNPDVRIVLADPHGSGLYGYVKTGDLGAEGSSITEGIGSTRVTMNLAGTPIDDAVRIDDQQCVTMVYRLLREEGLYVGGSSGINVAAAAWLARRMGPGHTIVTLLCDRGDIYRTRLFNREWLREKGLDPGD

SEQ ID NO: 121008 - protein, 300 aa, Unknown
  Bacterial polypetide isolated from the Sargasso Sea
MAYKTIEDTIGNTPLVQLVRLPDDEIRARNNVLLAKLEGNNPAGSVKDRPALSMISKAEARGRIKPGDTLIEATSGNTGIALAMAAAIRGYKMVLIMPEDLSVERRQSMAAYGAEIILTPVKGGMELARDLADQMQREGKGVILDQFANPDNPIAHYEATGPEIWRDTEGRITHFVSAMGTTGTIMGTSHYLKEQNPAIEIVGAQPEDGSRIPGIRKWPEAYMPTIFDRSRVDRVESVSQAAAETMARRLASVEGIFAGISSGGACDVAMRIARQVENATIVFIICDRGDRYLSTGVFPA

SEQ ID NO: 121009 - protein, 298 aa, Unknown
  Bacterial polypetide isolated from the Sargasso Sea
MKTLQNNFVEAIGNTPLFKLKAASEITGCNIYGKAEYLNPGGSVKDRAALALIRDAEEKKLISKGGTIVEGTAGNTGIGLCLLGNSIGYKTIIVMNDNQTQEKKDLLRNIGADLRLVPPKPYKDENNFVKYAGRLADKLKSSNNHGVVWANQFDNTANSKGHYETTGPEIWEQTDGKIDGFVCSSGTGGTIAGVSSFLKEKNKDIKIYLSDPTGSSLYSYVENGELKSEGGSITEGIGSSRVTANFAKARIDGAFSISDHESLPVLFDLIEKEGLSLGTSCGVNIAGAIRLGKLLGPR

SEQ ID NO: 121010 - protein, 303 aa, Unknown
  Bacterial polypetide isolated from the Sargasso Sea
MKKYHNDFLQSIGNTPLIKLKAASEITGCNIFGKAEYLNPGGSVKDRAALALIKDAENKKLISKGGTIVEGTAGNTGIGLCLLGNSLGYKTIIVMNDNQTQEKKDTLKNIGADLRLVPAKPYKDDGNYVKVAGRLAEELKSSNNHGVVWANQFDNTANAKGHYETTGPEIWDQTDGKIDGFVCASGTGGTIGGISSYLKEKNKNIKIYLSDPTGSALYNYIQNGELKSEGASITEGIGSSRITKNFAEAKIDGAFSISDHESLPILYDLIQNEGLSLGTSCGVNIAGAIKLGKELGPGKTIVT

SEQ ID NO: 121011 - protein, 266 aa, Unknown
  Bacterial polypetide isolated from the Sargasso Sea
MSIREGFVDLVGNTPLVRLHKASEATGCEILGKAEFLNPGSSVKDRAALFMIKDAVEKNLLAPGGLIVEATAGNTGIGLALCANALGFETLIVIPDTQSQEKKDMLRLAGAKLVENPAYPFSNPKNYQHVARKMAEDLKKTSKNGVVFADQWNNLANRRAHYETTGPEIWDQTRGRIDAFICSIGTGGTISGASTFLKEKKSNIFIGVADPYGAAMYSYFTCGEIKSEGNSVTEGIGLGRVTPIIEDISIDKAYRIPDSEALEITF

SEQ ID NO: 121012 - protein, 128 aa, Unknown
  Bacterial polypetide isolated from the Sargasso Sea
KAITSIAVEPTDSPVITQALAGEELTPGPHKIQGIGAGFIPGNLDLDLIDEVEQVTNEECMDMARKLMTDEGILAGISSGAAVVAAKRFAERPENKDKVVVVLLASGTERYLSSPLFAGAFDEQEEVQ

SEQ ID NO: 121013 - protein, 300 aa, Unknown
  Bacterial polypetide isolated from the Sargasso Sea
MKYPTIEDAVGNTPLVALQRIGAQDNAARGNVVLGKLEGNNPAGSVKDRPALSMIRRAEERGDIRPGDTLIEATSGNTGIALAMAAAIKGYRMVLVMPEDLSIERAQTMKAFGAELVLTPKSGGMEHARDLAEAMQKRGEGKVLDQFGNPDNPRIHYETTGPEIWEQTGGRITHFVSAMGTTGTITGVSRFLKEKNPSIQIIGAQPEEGSRIPGIRKWPQEYLPKIYDASTVDELVYVSQDNAEDMCRRLAREEGIFAGISAAGACWVAQQIAARDSNATIVFIVCDRGDRYLSTGVFPA

SEQ ID NO: 121014 - protein, 333 aa, Unknown
  Bacterial polypetide isolated from the Sargasso Sea
MKNFQNNFISGIGNTPLIKLRAASEVTGCNIYGKAEYLNPGGSVKDRAALALIKDAEEKKLISKGGTIVEGTAGNTGIGLCLIGNSVGYKTVIVMNDNQTQEKKDMLKNMGAELKLVPPKPYKDDGNYVKVAGRLADELKSSNNHGVVWANQFDNTANLKGHYESTGPEIWDQTDGKVDGFVCASGTGGTIAGVSSYLKEKNKDVKIYLSDPTGSSLYNYIENGELKSEGGSITEGIGSSRVTANFAEAKIDGAFSISDNESLPVLFDLIENEGLSLGTSCGVNIAGAIRLGKILGPGKTIVTILCDKSDKYNSKMFNKKFLLEKGLPVPSWI

SEQ ID NO: 121015 - protein, 333 aa, Unknown
  Bacterial polypetide isolated from the Sargasso Sea
MGITRGFVGAVGNTPLIRLEHLSERTGCEILGKAEFMNPGGSVKDRAALGMLLAAEASGDLQPGGTVVEGTAGNTGIGLAHLCNARGYRCVIVIPETQSAEKIDLLRSLGAEVRTVPAVPYRDPNNYVKLSGRIAEEIPGAVWANQFDNRANRQAHADTTGPEIWKQCEGRLDGWVAATGTGGTYAGVALYLKQQSEAVRCVLADPHGSALHSWASTGELASEGSSVTEGIGNSRITANLEGAPVDEAIRIDDQTAIDVLYDLLWHEGLFMGGSVGINVAAAVELAKRLGPGHRIVTVLCDGGDRYRSRIWNKEWLQSRGLRQPERQGAGSVA

SEQ ID NO: 121016 - protein, 333 aa, Unknown
  Bacterial polypetide isolated from the Sargasso Sea
MNSTQNDFISGIGNTPLFKLRAASEITGCNIYGKAEFLNPGGSVKDRAALALIKDAQEKKLIAKGGTVVEGTAGNTGIGLGLLGNSLGYKTIIVMNDNQTQEKKDLLRNLGAELRLVPPKPYKDDNNFVKVAARLADELRPTNNNGVIWANQFDNTANAKGHYEGTGQEIWEQTEGKVDGFVCSSGTGGTISGVSNALKEKNKDIKIYLSDPKGSALYNYIKHGELKSEGGSITEGIGSSRVTANFGEAKIDDAYSIDDHEALPILYDLIQNEGLSLGTSCGINIAGAIRMGKELGPGKTIVTILCDRSDKYATKMFNKKFLEEKGLPIPNWF

SEQ ID NO: 121017 - protein, 166 aa, Unknown
  Bacterial polypetide isolated from the Sargasso Sea
MEIANDITSLVGNTPLVKLNRIRKYFDCYPEIIAKLESFNPSASVKDRIAYSMLCKAEEEGLITPDKTTLIEATSGNTGIALAMVAAAKGYKLILTMPDTMSIERRAMLRAYGAELQLTPGKDGMKGALDLANELSSTIANSYQFNQFENFANPDIHERTTAQEIW

SEQ ID NO: 121018 - protein, 336 aa, Unknown
  Bacterial polypetide isolated from the Sargasso Sea
MNSSSICENLIQSIGKTPLIRLRRASEETGCTILGKAEFMNPGGSVKDRAAKAIVLDAEKQEVLKPGGLIVEGTAGNTGIGLALVGNSRGYRTLIVIPETQSQEKKDMLRLSGAELKEVPAVPYRDPLNYIKISGRLAEELNQNDPNGAIWANQFDNVANRQAHYETTGPEIWEQTEGKVDAFICAVGTGGTLAGTGAFLKEKNPEIQIGLADPMGAALYAYYTEGELSSWGDSITEGIGQGRITANLEDAVVDHPFQIPDEEALPVCFQLLQEEGLCLGSSSGINVAGAILLAKELGPGKTIVTILCDSGTRYQSKLFNPQFLKKKGLPIPEWLS

SEQ ID NO: 121019 - protein, 330 aa, Unknown
  Bacterial polypetide isolated from the Sargasso Sea
MSQIKNNFIESVGNTPLIKLKAASEITGCNIYGKAEYLNPGGSVKDRAALALIKDAQEKKLISEGGIVVEGTAGNTGIGLCLLGNSLGYKTIIVMNDNQTQEKKDTLKNIGADLRLVPPKPYKDDGNYVKVAGRLAEELKSTNNKGVVWANQFDNTANAKGHYETTGPEIWEQTDGKVDGFVCASGTGGTIGGVSKFLKEKNKNIKIYLSDPTGSALYNHIMNGELKAEGGSITEGIGSSRITKNFAEAKIDGAFSISDQESLPVLYDLIQHEGLSLGTSCGVNIAGAIRLGKELGPGKTIVTILCDRSDKYNSKMFNKSFLRGKKPPHS

SEQ ID NO: 121020 - protein, 314 aa, Unknown
  Bacterial polypetide isolated from the Sargasso Sea
MNDFQNDFISGIGNTPLIKLRAASEITGCNIFGKAEFLNPGGSVKDRAALALIKDAQEKKLIAKGGTVVEGTAGNTGIGLGLLGNSLGYKTIIVMNDNQTQEKKDILKNLGAELKLVPAKPYKDDNNFVKVAARLADELRPTNNNGVIWANQFDNTANAKGHYEGTGKEIWDQTEGKVDGFVCSSGTGGTISGVSNALKEKNKDIKIHLSDPKGSALYNYIKNGELKSEGGSITEGIGSSRITANFKDAKIDDAYSIDDKEALPILYDLIQNEGLSLGTSCGINIAGAIRMGKELGPGKTIVTILCDRSDKYAT

SEQ ID NO: 121021 - protein, 220 aa, Unknown
  Bacterial polypetide isolated from the Sargasso Sea
MINTKNNFIDSIGNTPLIKLRAASEITGCNIYGKAEYLNPGGSVKDRAALALVKDAQEKKLISEGGIIVEGTAGNTGIGLCLLGNSLGYKTIIVMNDNQTQEKKDALRNIGAELRLVAPKPYKDEGNYVKVAQRLAEELKNTNNKGVVWANQFDNIANAKGHYQTTGPEIWEQTEGKVDGFVCSSGTGGTISGVSNALKEKNKDIKIYLSDPKGSALYII

SEQ ID NO: 121022 - protein, 303 aa, Unknown
  Bacterial polypetide isolated from the Sargasso Sea
MSRFYQIKDNRVSDFPTIEACIGQTPLVRLQRLDCGSSTVLLKLEGNNPAGSVKDRAALNMIIQAELRQEIAPGDTLIEATSGNTGIALAMAAAIKGYKMILIMPSNSTQERKDAMQAYGAELLLVDNMEAARDLALDLQAQGKGKVLDQFNNQDNANAHFQTTGPEIWQQSQGKLTHFVSSMGTTGTIMGVSKYLKSRNPDITIVGLQPADGSSIPGIRRWPQEYLPGIFDAARVDAVMDIEEQDAKSMARTLAREEGICAGVSSGGAVFAALEIARLNPGSVVVAIVCDRGDRYLSSGLFS

SEQ ID NO: 121023 - protein, 333 aa, Unknown
  Bacterial polypetide isolated from the Sargasso Sea
MKNYSDSFIQSIGNTPLIKLKSASEITGCNIYGKAEYLNPGGSVKDRAALALIKDAEEKKLISKGGTIVEGTAGNTGIGLCLIGNSLGYKTVIVMNDNQTQEKKDTLRNIGADLRLVPPKPYKDDGNYVKFAGRLAEELKSSNNHGVVWANQFDNTANAKGHYETTGPEIWNQTDGKIDGFVCSSGTGGTISGTSSYLKEKNKDIKIYLSDPTGSALYNYIKNGELKSEGGSITEGIGSSRVTANFAEAKIDGAFSISDHESLPIIYSLIQNEGLSLGTSCGVNIAGAIRLGKELGPGKTIVTILCDKSDKYNSKLFNKDFLKEKGLPFPDWI

SEQ ID NO: 121024 - protein, 333 aa, Unknown
  Bacterial polypetide isolated from the Sargasso Sea
MVNIKDNFLQSIGNTPLIKLKAASEITGCNIYGKAEYLNPGGSVKDRAALALIKDAEEKKLISKGGMIVEGTAGNTGIGLCLLGNSLGYKTTIVMNDNQTQEKKDTLINIGADLRLVPPKPYSDDGNYVKVAGRLAEELKNSNNYGVVWANQFDNTANAKGHYETTGPEIWDQTEGKVDGFVCASGTGGTIGGISSFLKEKNKDIKIYLSDPAGSALYNFIENGELKSEGGSITEGIGSSRVTANFAEAKIDGAFSIDDHESLPLLYNLIKEEGLSLGTSCGVNIAGAIRLGKLIGPGKTIVTILCDKSDKYNSKMFNKKFLLEKGLPTPSWI

SEQ ID NO: 121025 - protein, 177 aa, Unknown
  Bacterial polypetide isolated from the Sargasso Sea
MNDLQNDFISGIGNTPLIKLRAASEITGCNIYGKAEFLNPGGSVKDRAALALIKDAQDKKLITKGGTIVEGTAGNTGIGLGFIGNSLGYKTIIVMNDNQTQEKKDILRNLGAELKLVPAKPYSDENNFVKVAARLADELRPSNNNGVIWANQFDNTANAKGHYEGTGKEIWDQTNGK

SEQ ID NO: 121026 - protein, 333 aa, Unknown
  Bacterial polypetide isolated from the Sargasso Sea
MKTLQNNFVEAIGNTPLFKLKAASEITGCNIYGKAEYLNPGGSVKDRAALALIRDAEEKKLISKGGTIVEGTAGNTGIGLCLLGNSIGYKTIIVMNDNQTQEKKDLLRNIGADLRLVPPKPYKDENNFVKYAGRLADELKSSNNYGVVWANQFDNTANSKGHYETTGPEIWEQTDGKIDGFVCSSGTGGTIAGVSSFLKEKNKDIKIYLSDPTGSSLYSYIENGELKSEGGSITEGIGSSRVTANFAKANIDGAFSISDHESLPVLFDLIEKEGLSLGTSCGVNIAGAIRLGKLLGPGKTIVTILCDKSDKYNSKMFNKSFLKEKGLPYPHWI

SEQ ID NO: 121027 - protein, 307 aa, Unknown
  Bacterial polypetide isolated from the Sargasso Sea
MGCNIYGKAEFLNPGGSVKDRAALALIKDAEEKKLISKGGIIVEGTAGNTGIGLCLLGNSLGYKTIIVMNDNQTQEKKDTLRNIGADLKLVPPKPYKDENNFVKIAARMAEELKSSNNHGVVWANQFDNTANSKGHYYTTGPEIWEQTEGKVDGFVCSSGTGGTIGGVSSFLKEKNKDIKIYLSDPKGSSLYNHIENGELKAEGGSITEGIGSSRVTANFAEAKIDGAFSIEDKESLPILYDLIKNEGLSLGTSCGVNIAGAIRLGKKLGPGKTIVTILCDKSDRYNSKMFNKPFLIEKGLPYPDWI

SEQ ID NO: 121028 - protein, 138 aa, Unknown
  Bacterial polypetide isolated from the Sargasso Sea
MAYKTIEDTIGNTPLVQLVRLTDDEIRSRNNVILAKLEGNNPAGSVKDRPALSMIKKAEARGRIKPGDTLIESTSGNTGIALAMAAAIRGYKMVLIMPEDLSVERRQSMAAYGAQIVLTPVTGGMEYARDLAEQMQRE

SEQ ID NO: 121029 - protein, 146 aa, Unknown
  Bacterial polypetide isolated from the Sargasso Sea
MSKIFEDNSQTIGHTPLVRLNRVTKGRVLAKIESRNPSFSVKCRIGANLIWDAEKRGVLTKGKEIIEPTSGNTGIALAFVAAARGYPITLTMPATMSLERRKLLKALGANLVLTEGPLGMKGAIAKANEILESEPGKYVLLQQFEN

SEQ ID NO: 121030 - protein, 192 aa, Unknown
  Bacterial polypetide isolated from the Sargasso Sea
MNNTQTDFISGIGNTPLIKLRAASEITGCNIYGKAEFLNPGGSVKDRAALALIKDAQDKKLIAKGGTVVEGTAGNTGIGLGLLGNSLGYKTIIVMNDNQTQEKKDLLRNLGAELKLVPPKPYKDDNNFVKVAARLADELRPTNNNGVIWANQFDNTANAKGHYEGTGQEIWEQTGGKVDGFVCSSGTGGIIS

SEQ ID NO: 121031 - protein, 333 aa, Unknown
  Bacterial polypetide isolated from the Sargasso Sea
MKNAQNNFIEGIGNTPLIKLKAASEITGCNIYGKAEYLNPGGSVKDRAALALIKDAEEKKLISKGGTIVEGTAGNTGIGLCLIGNSIGYKTIIVMNDNQTQEKKDMLRNIGADLRLVPPKPYKDDGNYVKVAGKLAEELKSTNNHGVVWANQFDNTANAKGHYESTGPEIWEQTDRKVDAFVCSSGTGGTIAGVSSYLKEKNKNIKIYLSDPAGSSLYNYIQNGELKSEGGSITEGIGSSRITANFAEAKIDGAFSISDHESLPVIFDLIQNEGLSLGTSCGVNIAGAIKLGKELGPGKTIVTILCDKSDKYNSKLFNKKFLKEKGLPYPNWI

SEQ ID NO: 121032 - protein, 326 aa, Unknown
  Bacterial polypetide isolated from the Sargasso Sea
FISGIGNTPLIKLRAASEITGCNIYGKAEFLNPGGSVKDRAALALIKDAQEKKLIARGGTVVEGTAGNTGIGLGLLGNSLGYKTIIVMNDNQTQEKKDLLRNLGAELRLVPPKPYKDDNNFVKVAARLADELRPTNNNGVIWANQFDNTANAKGHYEGTGQEIWDQTEGKVDGFICSSGTGGTISGVSNALKEKNKDIKIYLSDPKGSALYNYIKNGELKSEGGSITEGIGSSRVTANFGEAKIDDAYSIDDHEALPILYDLIQNEGLSLGTSCGINIAGAIRMGKELGPGKTIVTILCDRSDKYATKMFNKKFLEEKGLPVPNWF

SEQ ID NO: 121033 - protein, 272 aa, Unknown
  Bacterial polypetide isolated from the Sargasso Sea
MNNTQNDFISGIGNTPLIKLRAASEITGCNIYGKAEFLNPGGSVKDRAALALIKDAQEKKLIAKGGTVVEGTAGNTGIGLGLLGNSLGYKTIIVMNDNQTQEKKDLLRNLGAELRLVPPKPYKDDNNFVKVAARLADELRPTNNNGVIWANQFDNTANAKGHYEGTGQEIWEQTEGKVDGFICSSGTGGTISGVSNALKEKSKDIKIYLSDPKGSALYNYIKNGELKSEGGSITEGIGSSRVTANFGEAKIDDAYSIDDHEALPILYDLIQK

SEQ ID NO: 121034 - protein, 284 aa, Unknown
  Bacterial polypetide isolated from the Sargasso Sea
MTQIKNNFLESIGNTPLIKLKAASEITGCHIFGKAEYLNPGGSVKDRAALALIKDAQEKKLISEGGIVVEGTAGNTGIGLCLLGNSLGYKTIIVMNDNQTQEKKDTLKNIGADLRLVPPKPYRDDGNYVKVAGRLAEELKSTNNNGVVWANQFDNTANAKGHYETTGPEIWEQTDGKVDGFVCASGTGGTIGGVSKFLKEKNKDVKIYLSDPTGSALYNYITNGELKAEGGSITEGIGSSRVTKNFAEAKIDGAYSISDEESLPILYDLIQNEGLSLGTSCGVN

SEQ ID NO: 121035 - protein, 333 aa, Unknown
  Bacterial polypetide isolated from the Sargasso Sea
MKNYSDNFIQSIGNTPLIKLRAASEITGCNIYGKAEYLNPGGSVKDRAALALIKDAQKKKLISKGGTVVEGTAGNTGIGLCLLGNSLGYKTIIVMNENQTQEKKDTLINIGADLRLVPVKPYKDDGNYVKVAGRLADELKSSNNYGVVWANQFDNTANAKGHYETTGPEIWDQTDGKVDGFICSSGTGGTIGGVSSYLKEKNKNIKIYLSDPAGSALYNYIKNGELKSEGGSITEGIGSSRVTANFAEAKIDGAFSISDQESLPILYDLIQNEGLSLGTSCGVNIAGAIRLGKELGPGKTIVTILCDKSDKYNSKMFNKKFLQDKGLPYPNWI

SEQ ID NO: 121036 - protein, 318 aa, Unknown
  Bacterial polypetide isolated from the Sargasso Sea
MIYNDILETIGSTPVVKLNSIGKDLECNLYAKIEMVNPGGSVKDRTAFRMIDHAEKEGRIKPGDTLIEATSGNTGIGLALAAAVRGYKLIICMPEKMSMEKELTINALGAKIVRTPTEAAHDDPKSNFGVAKKLNEEISNSHILDQWNNCCNPDAHYFDTAQEILNDFGTDLHMVVMGVGTGGTATGVGKRLKEEIEDIKIIGADPYGSILGGEDEYKGQPYKVEGIGYDFIPKTCDHNYIDDFVKVNDKEAFNTARALIREEGLLIGGSCGSAMFAALKAAKSLKNGQNCLVILPDSIRNYMRKFLSDDWMKENDLI

SEQ ID NO: 121037 - protein, 333 aa, Unknown
  Bacterial polypetide isolated from the Sargasso Sea
MSQIKNNFIESVGNTPLIKLKAASEITGCNIYGKAEYLNPGGSVKDRAALALIKDAQEKKLISKGGIVVEGTAGNTGIGLCLLGNSLGYKTIIVMNDNQTQEKKDTLKNIGADLRLVPPKPYKDDGNYVKVAGRLAEELKSTNNNGVVWANQFDNTANAKGHYETTGPEIWDQTDGKVDGFVCASGTGGTIGGVSKFLKEKNKDIKIYLSDPSGSALYNHIMNGELKAEGGSITEGIGSSRITKNFAEAKIDGAFSISDQESLPVLYDLIQNEGLSLGTSCGVNIAGAIRLGKELGPGKTIVTILCDRSDKYNSKMFNKSFLKEKNLPIPSWL

SEQ ID NO: 121038 - protein, 297 aa, Unknown
  Bacterial polypetide isolated from the Sargasso Sea
MAFATLEELIGNTPLLALRRINPHPGVTLLVKLEGNNPAGSVKDRPALNLIKCAEASGHLAPGARLIEATSGNTGIALAMVAAARGYRMRLIMPNTMSQERRDAMQAYGAELVLVEGGMEAARDLALAMQARGEGLVLDQFNNPANPDAHYLSTGPEIWRQSEGAVTHFVSAMGTTGTIMGVSRYLKEQNPAVQVIGLQPAEGSQIPGIRRWPAAYLPAIFEPARVDRVLDVTQQEALAMMRRLAREEGICCGVSSGGAVAGALRVAAEIKQGVVVAIICDRGDRYLSTGVFSDEQA

SEQ ID NO: 121039 - protein, 184 aa, Unknown
  Bacterial polypetide isolated from the Sargasso Sea
MTIKSGFVDCIGNTPLIRLNKASEETGCNILGKAEFLNPGGSVKDRAALGIITEAEKKGVLKPGGTIVEGTAGNTGIGLSLLAQVLGYKSVIVMPETQSQEKKDMLRLCGADLKLVPAVPYKDPNNYVKYSERLAKELSNSNEKSVIWADQFDNVANAMAHYQTTGPEIWEQTEKSIDGVICAV

SEQ ID NO: 121040 - protein, 329 aa, Unknown
  Bacterial polypetide isolated from the Sargasso Sea
MKTLQNNFVEAIGNTPLFKLKAASEITGCNIYGKAEYLNPGGSVKDRAALALIRDAEEKKLISKGGTIVEGTAGNTGIGLCLLGNSIGYKTIIVMNDNQTQEKKDLLRNIGADLRLVPPKPYKDENNFVKYAGRLADELKSSNNHGVVWANQFDNTANSKGHYETTGPEIWEQTDGKIDGFVCSSGTGGTIAGVSSFLKEKNKDIKIYLSDPTGSSLYSYIENGELKSEGGSITEGIGSSRVTANFAKAKIDGAFSISDHESLPVLFDLIEKEGLSLGTSCGVNIAGAIRLGKLLGPGKTIVTILCDKSDKYNSKMFNKSFLKEKGSSL

SEQ ID NO: 121041 - protein, 299 aa, Unknown
  Bacterial polypetide isolated from the Sargasso Sea
AEYLNPGGSVKDRAALALIRDAEEKKLISKGGTIVEGTAGNTGIGLCLLGNSIGYKTIIVMNDNQTQEKKDLLRNIGADLRLVPPKPYKDENNFVKYAGRLADELKSSNNHGVVWANQFDNTANSKGHYETTGPEIWEQTDGKIDGFVCSSGTGGTIAGVSSFLKEKNKDIKIYLSDPTGSSLYNYIENGELKSEGGSITEGIGSSRVTANFAKANIDGAFSISDHESLPVLFDLIEKEGLSLGTSCGVNIAGAIRLGKLLGPGKTIVTILCDKSDKYNSKMFNKSFLKEKGLPFPHWI

SEQ ID NO: 121042 - protein, 276 aa, Unknown
  Bacterial polypetide isolated from the Sargasso Sea
ANLIWDAEKRGVLTKGKEIIEPTSGNTGIALAFVAAARGYPITLTMPATMSLERRKLLKALGANLVLTEGPLGMKGAIAKANEILESEPGKYVLLQQFENPANPEIHEQTTGPEIWDATDGEVDVFVAGVGTGGTITGVSRYIKKTKGKAIVSVAVEPSESPVISQKLAGEEIKPGPHKIQGIGAGFIPGNLDLSLLDRVEQVSSDEAIEMARRLMEEEGILAGISSGAAVVAANRLAEQPEFEGKTIVVILPSAAERYLSSALFAGVFSEQELQQ

SEQ ID NO: 121043 - protein, 212 aa, Unknown
  Bacterial polypetide isolated from the Sargasso Sea
MAKIYEDNSFAIGNTPLVKLKSVTKNAKATVLAKIEGRNPAYSVKCRIGANMIWDAEKSGKLTKDKTIVEPTSGNTGIALAFTASARGYKLILTMPESMSIERRRVMAVLGAEIVLTEASKGMPGAIAKAKEIAESNPSQYFMPGQFDNPANPEIHFKTTGPEIWDDCDGEIDVLVAGVGTGGTITGVSRYIKQEKGKNITSVAVEPSHSPV

SEQ ID NO: 121044 - protein, 234 aa, Unknown
  Bacterial polypetide isolated from the Sargasso Sea
MPESMSIERRRVMAVLGAEIVLTEASKGMPGAIAKAKEIAESNPSQYFMPGQFDNPANPEIHFKTTGPEIWDDCDGEIDVLVAGVGTGGTITGVSRYIKQEKGKNITSVAVEPSHSPVITQTMNGEEVKSGPHKIQGIGAGFIPKNLDLSIVDKVEQVTNDESIEMALRLAKEEGLLVGISCGAAAAAAVRLAEQDEYAGKTIVVVLPDLAERYLSSIMFTEVPSGIIQEPVKA

SEQ ID NO: 121045 - protein, 221 aa, Unknown
  Bacterial polypetide isolated from the Sargasso Sea
MKNAQNNFIEGIGNTPLVKLRAASEITGCNIYGKAEYLNPGGSVKDRAALALIKDAQEKKLISKGGTIVEGTAGNTGIGLCLIGNSIGYKTIIVMNDNQTQEKKDMLKNMGADLRLVPPKPYKDDGNYVKVAGRLADELKSSNNHGVVWANQFDNTANSKGHYETTGPEIWMQTDGKVDGFVCSSGTGGTIAGVSSFLKEKNKNIEIYLSDPAGSSLYNYI

SEQ ID NO: 121046 - protein, 291 aa, Unknown
  Bacterial polypetide isolated from the Sargasso Sea
EKSDLKIDPPGRGRIYNNVLETFGNTPLVRLGRLAEQHEAKADVLVKLEFFNPLASVKDRIGVSMIEALERDGKIGPGSTIVEPTSGNTGIALAFACAAKGYRCILTMPDSFSIERRKMLVYLGAELHLTPREKGINAAIEKAEELVADIDGAIMPMQFSNESNPSVHYYTTGPEIWRDTNGTVDMFISGVGTGGTATGTGTYLKEQKPSVQLVVVEPELSQVISGGEHSPHMIQGIGAGFIPENLYTDLIDEVIAIGNDTAIETARHLSLLEGIPGGISAGAMTAAALQI

SEQ ID NO: 121047 - protein, 166 aa, Unknown
  Bacterial polypetide isolated from the Sargasso Sea
LPNPDVHRKTTAEEIWADTDGQVDIIVCGVGTGGTITGCGEALKAKNPAIRVVAVEPLNSPVISQELAGEVIKPGKHMIQGIGAGFIPDILNLDIIDEVVKVDDEDAMETARQLAKREGLMCGISCGAAAWGALEVAKRPENAGKMVVVVLPDLGERYLSTRLFPE

SEQ ID NO: 121048 - protein, 254 aa, Unknown
  Bacterial polypetide isolated from the Sargasso Sea
MAKIYEDNSFAIGNTPLVKLKSVTKNAKATVLAKIEGRNPAYSVKCRIGANMIWDAEKSGKLTKDKTIVEPTSGNTGIALAFTASARGYKLILTMPESMSIERRRVMAVLGAEIVLTEASKGMPGAIAKAKEIAESNPSQYFMPGQFDNPANPEIHFKTTGPEIWDDCDGEIDVLVAGVGTGGTITGVSRYIKQEKGKNITSVAVEPSHSPVITQTMNGEEVKSGPHKIQGIGAGFIPKNLDLSIVDKVEQVTK

SEQ ID NO: 121049 - protein, 281 aa, Unknown
  Bacterial polypetide isolated from the Sargasso Sea
MEIANNITSLVGNTPLVKLNRIKKYFDCYPEIIAKLESFNPSASVKDRIAYSMLCKAEEEGLITPDKTTLIEATSGNTGIALAMVAAAKGYKLILTMPDTMSIERRAMLRAYGAELQLTPGEEGMKGALDLANELSSTIANSYQFNQFENFANPDIHERTTAKEIWSQSNNNLDGLVTGVGTGGTITGCARFLKKVNPNCKIYAVEPKKSAVISGEKAGSHSIQGIGAGFIPKVLNTKLIDEIIKIDDDEAFYYGRSLARLESLLSGISSGAALAAAIKIG

SEQ ID NO: 121050 - protein, 204 aa, Unknown
  Bacterial polypetide isolated from the Sargasso Sea
MKIYNDLTDLIGNTPLVRINKLNKTKVDIIAKLEYYNPANSVKDRIGVNMIESAEKQGKIDPRKTTLIEPTSGNTGIALAFAGAIKGYRLILTMPESMSIERRKLLKAYGAELVLTEAKKGMKGAVEKAEEIQRATPNSIILQQFSNKANVEIHQRTTAEEIWRDTDGKVDILVSGVGTGGTITGVASVLQERNPNFKAIAVEP

SEQ ID NO: 121051 - protein, 259 aa, Unknown
  Bacterial polypetide isolated from the Sargasso Sea
MEIANDITSLVGNTPLVKLNRIRKYFDCYPEIIAKLESFNPSASVKDRIAYSMLCKAEEEGLITPDKTTLIEATSGNTGIALAMVAAAKGYKLILTMPDTMSIERRAMLRAYGAELQLTPGKDGMKGALDLANELSSTIANSYQFNQFENFANPDIHERTTAQEIWSQSNNNLDGLVTGVGTGGTITGCARFLKKVNPNCKIYAVEPKKSAVISGEKAGSHSIQGIGAGFVPKVLNTKLIDEIIKIDDDEAFYYGRLLA

SEQ ID NO: 121052 - protein, 277 aa, Unknown
  Bacterial polypetide isolated from the Sargasso Sea
TKKMKNFQNNFISGIGNTPLVKLKAASEITGCNIYGKAEYLNPGGSVKDRAALALIKDAEEKKLISKGGTIVEGTAGNTGIGLCLIGNSVGYKTVIVMNDNQTQEKKDMLKNIGADLRLVQPKPYKDDGNYVKVAGRLADELKSSNNHGVVWANQFDNTANSKGHYESTGPEIWDQTEGKVDAFVCASGTGGTIAGVSSYLKEKSKDVKIYLSDPAGSSLYNYIENGELKGDGNSITEGIGSSRVTANFAEAKIDGAFSISDQESLPILYDLIQNEG

SEQ ID NO: 121053 - protein, 176 aa, Unknown
  Bacterial polypetide isolated from the Sargasso Sea
MKNFQDNFITGIGNTPLVKLRAASELTGCNIYGKAEYLNPGGSVKDRAALALIRDAEDKKLIEKGGTIVEGTAGNTGIGLCLIGNSVGYKTVIVMNDNQTQEKKDMLKNMGAELKLVPPKPYKDDGNYVKVAGRLAEELKSTNNQGVVWANQFDNTANLKGHYPSTGPEIWDQTDG

SEQ ID NO: 121054 - protein, 301 aa, Unknown
  Bacterial polypetide isolated from the Sargasso Sea
MEIANDITSLVGNTPLVKLNRIRKYFDCYPEIIAKLESFNPSASVKDRIAYSMLCKAEEEGLITPDETTLIEATSGNTGIALAMVAAAKGYKLILTMPDTMSIERRAMLRAYGAELQLTPGKDGMKGALDLANELSSTIANSYQFNQFENFANPDIHERTTAQEIWSQSNNNLDGLVTGVGTGGTITGCARFLKKVNPNCKIYAVEPKKSAVISGEKAGSHSIQGIGAGFVPKVLNTKLIDEIIKIDDDEAFYYGRLLARLEGLLSGISSGAALAATIKIGKRKELMNKRLIVILPKFWRK

SEQ ID NO: 121055 - protein, 237 aa, Unknown
  Bacterial polypetide isolated from the Sargasso Sea
AAAKGYKLILTMSDTMSIERRAMLRAYGAELQLTPGKDGMKGALDLANELSSTITNSYQFNQFENFANPDIHERTTAQEIWSQSNNNLDGLVTGVGTGGTITGCARFLKKVNPNCKIYAVEPKKSAVISGEKAGSHSIQGIGAGFVPKVLNTKLIDEIIKIDDDEAFYYGRLLAKLEGLLSGISSGAALAATIKIGKRKELMNKRLIVILPSFGERYLSTAMFESNTSIQARKDGYL

SEQ ID NO: 121056 - protein, 240 aa, Unknown
  Bacterial polypetide isolated from the Sargasso Sea
LAFVCASRNYKLTLTMPDSMSLERRKVLKAFGATLVLTEGPKGMKGAIQKAEEIVATNPNKYFMPQQFENPSNPAIHESTTGPEIWKATEGKIDALVAGVGTGGTITGVSRYIKNVEGKNICSVAVEPASSPVISQTLSGQQPTPAPHKIQGIGAGFIPGALDLSVVDRVEPVTNEQAVNMARRLATEEGILCGISCGAAVVAAARLVEEDDFKGKTIVVVLPDGGERYLSSVLFEDIEV

SEQ ID NO: 121057 - protein, 268 aa, Unknown
  Bacterial polypetide isolated from the Sargasso Sea
CKAEEEGLISPNKTTLIEATSGNTGIALAMVAAAKGYKLILTMPDTMSIERRAMLRAYGAELQLTPGKEGMKGALDLAKELSTSIADSYQFNQFENFANPDIHERTTAQEIWAQSNNNLDGLVTGVGTGGTITGCARFLKKVNPSCKIYAVEPKKSAVISGETAGSHSIQGIGAGFVPKVLNTKLIDEIIKIDDDEAFYYGRLLARLEGLLSGISSGAALAATIKIGERKELINKRLIVILPSFGERYLSTAMFESNTSIQARKDGYL

SEQ ID NO: 121058 - protein, 252 aa, Unknown
  Bacterial polypetide isolated from the Sargasso Sea
MEIANDITSLVGNTPLVKLNRIRKYFDCYPEIIAKLESFNPSASVKDRIAYSMLCKAEEEGLITPDNTTLIEATSGNTGIALAMVAAAKGYKLILTMPDTMSIERRAMLRAYGAELQLTPGKEGMKGALDLANELSSTITNSYQFNQFENFANPDIHERTTAQEIWSQSNNNLDGLVTGVGTGGTITGCASFLKKVNPNCKIYAVEPKKSAVISGEKAGSHSIQGIGAGFVPKVLNTKLIDEIIKIDDDEAF

SEQ ID NO: 121059 - protein, 255 aa, Unknown
  Bacterial polypetide isolated from the Sargasso Sea
GNTGIALAFTASARGYKLILTMPESMSIERRRVMAVLGAEIVLTEASKGMPGAIAKAKEIAESNPSQYFMPGQFDNPANPEIHFKTTGPEIWDDCDGEIDVLVAGVGTGGTITGVSRYIKQEKGKNITSVAVEPSHSPVITQTINGEEVKSGPHKIQGIGAGFIPKNLDLSIVDKVEQVTNDESIEMALRLAKEEGLLVGISCGAAAAAAVRLAEQDEYAGKTIVVVLPDLAERYLSSIMFTEVPSGIIQEPVKA

SEQ ID NO: 121060 - protein, 88 aa, Unknown
  Bacterial polypetide isolated from the Sargasso Sea
MQVFEDNSLAIGNTPLVKLKRVTGGNVYAKIESRNPSFSVKCRIGANMIWDAEKRGVLTEGKEIVEPTSGNTGIALAFVAAARGYKSP

SEQ ID NO: 121061 - protein, 253 aa, Unknown
  Bacterial polypetide isolated from the Sargasso Sea
MIWDAEKSGKLTKDKTIVEPTSGNTGIALAFTASARGYKLILTMPESMSIERRRVMAVLGAEIVLTEASKGMPGAIAKAKEIAESNPSQYFMPGQFDNPANPEIHFKTTGPEIWDDCDGEIDVLVAGVGTGGTITGVSRYIKQEKGKNITSVAVEPSHSPVITQTMNGEEVKSGPHKIQGIGAGFIPKNLDLSIVDKVEQVTNDESIEMALRLAKEEGLLVGISCGAAAAAAVRLAEQDEYAGKTIVVVLPDL

SEQ ID NO: 121062 - protein, 255 aa, Unknown
  Bacterial polypetide isolated from the Sargasso Sea
MKVDNILQTIGKTPHVRINRLFGPGANVWVKSERSNPGGSIKDRIALAMVEDAEKSGALKPGGTIIEPTSGNTGIGLALVAAVKGYRLILVMPDSMSIERRRLMLAYGAQFDLTPREKGMKGAIARAQELQAQTPGSWIPQQFENPANIDIHVRTTAQEILADFPDGLDAVITGVGTGGHLTGTARVLKAKFPQLKVFAVEPTASPVISGGAPSPHPIQGIGAGFIPKNLDTSVLDGVIQVDAEPAREYARRSAR

SEQ ID NO: 121063 - protein, 237 aa, Unknown
  Bacterial polypetide isolated from the Sargasso Sea
MEIANDITSLVGNTPLVKLNRIRKYFDCYPEIIAKLESFNPSASVKDRIAYSMLCKAEEEGLITPDKTTLIEATSGNTGIALAMVAAAKGYKLILTMPDTMSIERRAMLRAYGAELQLTPGKEGMKGALDLANELSSTIANSYQFNQFENFANPDIHERTTAQEIWSQSNNNLDGLVTGVGTGGTITGCARFLKKVNPNCKIYAVEPKKSAVISGEKAGSHSIQGIGAGFVPKVLNT

SEQ ID NO: 121064 - protein, 240 aa, Unknown
  Bacterial polypetide isolated from the Sargasso Sea
MKNFQNNFISGIGNTPLVKLRAASEVTGCNIYGKAEYLNPGGSVKDRAALALIRNAEENKLISKGGTIVEGTAGNTGIGLCLIGNSIGYKTVIVMNDNQTQEKKDMLKNMGAELRLVPPKPYKDDGNYVKVAGRLANELKSSNNHGVVWANQFDNTANLKGHYESTGPEIWEQTDGKIDGFVCASGTGGTIAGVSSYLKEKNKSVKIYLSDPAGSSLLHYIENGELKGEGGSITEGIGSS

SEQ ID NO: 121065 - protein, 289 aa, Unknown
  Bacterial polypetide isolated from the Sargasso Sea
FIDGIGNTPLVKLKAASEITKCNIYGKAEYLNPGGSVKDRAALALIKDAEEKNLINKGGIVVEGTAGNTGIGLCLIGNSKGYKTVIVMNDNQTQEKKDTLKNIGADLRLVPPKPYKDEGNYVKIAGRLAEELKKTNNNGVVWANQFDNTANAKGHYETTGPEIWNQTEGKIDGFVCSSGTGGTISGVSRYLKEKNKNIKIYLSDPTGSALYNYIQNGELKSEGGSITEGIGSSRITANFGEAKIDGAFSISDQESLPILYDLILNEGLSLGTSCGVNIAGAIRLGKEIG

SEQ ID NO: 121066 - protein, 203 aa, Unknown
  Bacterial polypetide isolated from the Sargasso Sea
PYGAELELTPGSEGMKGAISRARELAEDLPNAFLLQQFSNAANPAIHAATTAEELWDDTDGRIDALVAGVGTGGTISGCAELIKQRKPEFQAFAVEPSSSPVLSGGVAGPHRIQGIGAGFIPENYHASLVDEVLLVDDAEAMAMGRRLAREEGLLSGVSSGAAVAAALRLGQRPEWSGKLIVVVLASFGERYLSTPMFTDLQS

SEQ ID NO: 121067 - protein, 291 aa, Unknown
  Bacterial polypetide isolated from the Sargasso Sea
IIAKLESFNPSASVKDRIAYSMLCKAEKEGLITPDKTTLIEATSGNTGIALAMVAAAKGYKLILTMPDTMSIERRAMLRAYGAELQLTPGKDGMKGALDLANELSSTIANSYQFNQFENFANPDIHERTTAQEIWSQSNNNLDGLVTGVGTGGTITGCARFLKKVNPNCKIYAVEPKKSAVISGEKAGSHSIQGIGAGFVPKVLNTKLIDEIIKIDDDEAFYYGRLLARLEGLLSGISSGAALAATIKIGKRKELINKRLIVILPSFGERYLSTAMFESNTSIEARKDGYL

SEQ ID NO: 121068 - protein, 239 aa, Unknown
  Bacterial polypetide isolated from the Sargasso Sea
MVAAAKGYKLILTMPDTMSIERRAMLRAYGAELQLTPGKEGMKGALDLANELSSSISNSYQFNQFENFANPDIHERTTAQEIWTQSNNNLDGLVTGVGTGGTITGCARFLKKVNPNCKIYAVEPKKSAVISGEKAGSHSIQGIGAGFVPKVLNTKLIDEIIKIDDDEAFYYGRLLARLEGLLSGISSGAALAATIKLGAREELMNKRLIVILPSFGERYLSTAMFESNTSIKARKDGYL

SEQ ID NO: 121069 - protein, 179 aa, Unknown
  Bacterial polypetide isolated from the Sargasso Sea
MSRIYDDNSQAIGNTPLVKLNNVTKNCKATVLAKVEGRNPAYSVKCRIGANMIWDAEKSGKLTKGKVIVEPTSGNTGIALAFTAAARGYKLILTMPESMSIERRRVMAVLGAELILTEAAKGMPGAIAKAKEIAESDPAKYFMPGQFDNPANPEIHFQNTGPEIWNDCDGAIDVLVAGV

SEQ ID NO: 121070 - protein, 211 aa, Unknown
  Bacterial polypetide isolated from the Sargasso Sea
MSRIYEDNSFAIGHTPLVKLNSITKNAKATVLAKIEGRNPAYSVKCRIGANMIWDAEKKGLLNKDKVIIEPTSGNTGIALAYTAAARGYKLILTMPESMSVERRRMMAVLGAELILTEAAKGMPGAIAKAKEIADSDPKKYFMPGQFDNPANPEIHFKTTGPEIWDDTDGQIDVLVSGVGTGGTITGVSRFIKQEKNHSLLSVAVEPTHSP

SEQ ID NO: 121071 - protein, 184 aa, Unknown
  Bacterial polypetide isolated from the Sargasso Sea
MEIANDITSLVGNTPLVKLNRIRKYFNSYPEIIAKLESFNPSASVKDRIAYSMLRKAEEEGLITPDKTTLIEATSGNTGIALAMVAAAKGYKLILTMPDTMSIERRAMLRAYGAQLQLTPGKEGMKGALDLANELSSSITNSYQFNQFENFANPDIHERTTGPEIWAQSNNNLDGLVTGVGTGG

SEQ ID NO: 121072 - protein, 171 aa, Unknown
  Bacterial polypetide isolated from the Sargasso Sea
MSRIYDDNSLAIGNTPLVKLNSVTKNCKATVLAKVEGRNPAYSVKCRIGANMIWDAEKSGKLTKDKVIVEPTSGNTGIALAFTAAARGYKLILTMPESMSIERRRMMAVLGAELILTEAAKGMPGAIAKAKEIADSDPAKYFMPGQFDNPANPEIHFKTTGPEIWNDCDGA

SEQ ID NO: 121073 - protein, 216 aa, Unknown
  Bacterial polypetide isolated from the Sargasso Sea
MSRIYDDNSLAIGNTPLVKLNSVTKNCKATVLAKVEGRNPAYSVKCRIGASMIWDAEKSGKLTKDKVIVEPTSGNTGIALAFTAAARGYKLILTMPESMSIERRRMMAVLGAELILTEAAKGMPGAIAKAKEIADSDPGKYFMPGQFDNPANPEIHFKTTGPEIWNDCDGAIDVLVAGVGTGGTITGVSRYIKNEAGKAIESVAVKPSHSPVITQT

SEQ ID NO: 121074 - protein, 275 aa, Unknown
  Bacterial polypetide isolated from the Sargasso Sea
RIASAMVLAAEQEGTIQPGRTVLVEPTSGNTGIALAMVAAARGYRLILTMPDTMSTERRSMLRAYGAELQLTDGAQGMAGAIALAKELVEEIPEAYLLQQFDNPANPAVHERTTAEEIWHDCDGQLDALVAGVGTGGTITGCARLLKQRQPDLQVVAVEPAGSAVLSGQAPGAHRIQGIGAGFVPAVLDLDLIDAVMTVSDEEAMDVGRRLAREEGLLCGISSGAAVAAALRLGQRPELQGRRVVVMLASYGERYLSTPMFSGAAPMPARQDPML

SEQ ID NO: 121075 - protein, 333 aa, Unknown
  Bacterial polypetide isolated from the Sargasso Sea
MKNFQNNFISGIGNTPLVKLKAASEITGCNIYGKAEYLNPGGSVKDRAALALIKDAEEKKLISKGGTIVEGTAGNTGIGLCLIGNSVGYKTVIVMNDNQTQEKKDMLKNIGADLRLVPPKPYKDDGNYVKVAGRLADELKSSNNHGVVWANQFDNTANSKGHYESTGPEIWDQTEGKVDAFVCASGTGGTIAGVSSYLKEKSKDVKIYLSDPAGSSLYNYIENGELKGDGNSITEGIGSSRVTANFAEAKIDGAFSISDQESLPILYDLIQNEGLSLGTSCGVNIAGAIRLGKKLGPGKTIVTILCDRSDKYNSKLFNKKFLQEKGLPFPSWI

SEQ ID NO: 121076 - protein, 322 aa, Unknown
  Bacterial polypetide isolated from the Sargasso Sea
MSKIFEDNSYTIGNTPLVRLNRVSQGKVLAKVEARNPSFSVKCRIGANMIWDAEKKGLLTKDHELIEPTSGNTGIALAYVAAARGYKLTLTMPNTMSLERRKLLKALGANLVLTEGAKGMKGAIDKAEEIRQSAPEKYIMLQQFNNPANPEIHEKTTGPEIWNDTDGAVDVFVAGVGTGGTITGVSRYLKKVAGKAITSVAVEPADSPVITQTLAGLPVQPGPHKIQGIGAGFIPGNLDLELIDRVETVTNDEAIDMARRLMQEEGILVGISSGAAVVAANRIAALPEFADKNIVVILPSAAERYLSSVLFQGQFGDEENIQ

SEQ ID NO: 121077 - protein, 215 aa, Unknown
  Bacterial polypetide isolated from the Sargasso Sea
MRARAVTPRTRGGVPRREVVRTSTPARAVTTKASVNIADNVTQLVGNTPMVYLNKTSEGCGAEIAAKLEIMEPCCSVKDRIGWSMIQAAEEEGKITPGKTMLVEPTSGNTGIGLAFIAAAKGYKLTLTMPASMSLERRILLKAFGANLVLTDPAKGMKGAVQKAEEIAAATNDSFVLQQFENPANPKVHFETTGPEIWEDTAGQIDIFIAGVGTG

SEQ ID NO: 121078 - protein, 322 aa, Unknown
  Bacterial polypetide isolated from the Sargasso Sea
MAIASDITGLIGGTPLVRLNRLPLQSGCGAEVIAKLESFNPSASVKDRIASAMVLAAEQEGTIQPGRTVLVEPTSGNTGIALAMVAAARGYRLILTMPDTMSTERRSMLRAYGAELQLTDGAQGMAGAIALATELVEEIPEAYLLQQFDNPANPSVHECTTAEELWNDCDGQLDALVAGVGTGGTITGCARLLKQRNPQLQVVAVEPAGSAVLSGSPPGAHRIQGIGAGFVPAVLERDLIDEVMTVSDEEAMDVGRRLARQEGLLCGVSSGAAVAAALRLGQRSEWQGRRVLVMLASYGERYLSTPMFSGVASSPARQDPML

SEQ ID NO: 121079 - protein, 322 aa, Unknown
  Bacterial polypetide isolated from the Sargasso Sea
MEIANDITSLVGNTPLVKLNRIKKYFDCYPEIIAKLESFNPSASVKDRIAYSMLCKAEEEGLITPDKTTLIEATSGNTGIALAMVAAAKGYKLILTMPDTMSIERRAMLRAYGAELQLTPGKDGMKGALDLANELSSTITNSYQFNQFENFANPDIHERTTAQEIWSQSNNNLDGLVTGVGTGGTITGCARFLKKVNPNCKIYAVEPKKSAVISGEKAGSHSIQGIGAGFVPKVLNTKLIDEIIKIDDDEAFYYGRLLARLEGLLSGISSGAALAATIKIGKRKELMNKRLIVILPSFGERYLSTAMFESNTSIQARKDGYL

SEQ ID NO: 121080 - protein, 328 aa, Unknown
  Bacterial polypetide isolated from the Sargasso Sea
MAKIYEDNSFAIGNTPLVKLKSVTKNAKATVLAKIEGRNPAYSVKCRIGANMIWDAEKSGKLTKDKTIVEPTSGNTGIALAFTASARGYKLILTMPESMSIERRRVMAVLGAEIVLTEASKGMPGAIAKAKEIAESNPSQYFMPGQFDNPANPEIHFKTTGPEIWDDCDGEIDVLVAGVGTGGTITGVSRYIKQEKGKNITSVAVEPSHSPVITQTMNGEEVKSGPHKIQGIGAGFIPKNLDLSIVDKVEQVTNDESIEMALRLAKEEGLLVGISCGAAAAAAVRLAEQDEYAGKTIVVVLPDLAERYLSSIMFTEVPSGIIQEPVKA

SEQ ID NO: 121081 - protein, 173 aa, Unknown
  Bacterial polypetide isolated from the Sargasso Sea
MPQQFKNPANPDVHRKTTAEEIWADTDGQVDIIVCGVGTGGTITGCGEALKAKKPEIRVVAVEPLNSPVISQQLAGEVIKPGKHMIQGIGAGFIPDILNLDIIDEVVKVDDEDAMETARQLAKREGLMCGISCGAAAWGALEVAKRPENAGKMVVVVLPDLGERYLSTRLFPE

SEQ ID NO: 121082 - protein, 323 aa, Unknown
  Bacterial polypetide isolated from the Sargasso Sea
MSKIYEDNSLSIGNTPLVRLKRVTSGANVFAKIESRNPSFSVKCRLGAALIWDAEKKGLLGPGKEIIEPTSGNTGIALAFVAASRGYALTLTMPATMSLERRKLLKALGANLVLTEGAKGMKGAIEKAKEILASDPDKYVFLQQFENPANPQIHFDTTGPEIWNDTDGKVDIFVAGVGTGGTITGVSRYIKHEKKHPLISVAVEPVDSPVITQALAGQEIKPGPHKIQGIGAGFIPGNLDLSIIDAVERVSNDDAIAMAHRLMKEEGILAGISSGAAVVAAKRLAELPENAGKNIVVIIPSSTERYLSSALFADFFTESELQA

SEQ ID NO: 121083 - protein, 196 aa, Unknown
  Bacterial polypetide isolated from the Sargasso Sea
GALDLANELSSSISNSFQFNQFENLANPDIHERTTAREIWEQSNQNVDGLVTGVGTGGTITGCARFLKKVNPNCKIYAVEPAKSAVISGEKAGSHSIQGIGAGFIPKVLNTELIDEIIKIDDDDAFYYGRLLARLEGLLSGISSGAALAATIKISQREELINKRLIVILPSFGERYLSTAMFESNSLIKARQDGYL

SEQ ID NO: 121084 - protein, 322 aa, Unknown; identical to SEQ ID NO: 121076
  Bacterial polypetide isolated from the Sargasso Sea

SEQ ID NO: 121085 - protein, 333 aa, Unknown
  Bacterial polypetide isolated from the Sargasso Sea
MNKPQNNFIEGIGNTPLVKLRAASEITGCNIYGKAEYLNPGGSVKDRAALALIKDAEEKKLISKGGTIVEGTAGNTGIGLCLIGNSIGYKTIIVMNEDQTQEKKDMLRNMGADLRLVPPKPYKDDGNFVKVAAKLADDLKSSNNYGVVWANQFDNTANSKGHYETTGPEIWMQTDGKVDGFVCSSGTGGTIGGVSSFLKEKNKDIKIFLADPDGSSLFDHIENGELKSSGSSITEGIGSSRVTANFAKAKIDGAFKVTDKEALPVLYDLIQNEGLSLGTSCAINVTGAIKLGKKLGPGKTIVTILCDRSDKYNSKLFNKKFLQEKGLPVPSWI

SEQ ID NO: 121086 - protein, 280 aa, Unknown
  Bacterial polypetide isolated from the Sargasso Sea
ASVKDRIAYSMLCKAEEDGLIKPDKTTLIEATSGNTGIALAMVAAAKGYKLILTMPDTMSIERRAMLRAYGAELQLTPGKEGMKGALDLANELSSTIANSYQFNQFENFANPDIHERTTAQEIWSQSNKNLDGLVTGVGTGGTITGCARFLKKVNPNCKIYAVEPKKSAVISGEKAGSHSIQGIGAGFLPKVLNTKLIDEIIKIDDDEAFYYGRLLARLEGLLSGISSGAALAATIKIGERKELINKRLIVILPSFGERYLSTAMFESNTSIQARKDGYL

SEQ ID NO: 121087 - protein, 315 aa, Unknown
  Bacterial polypetide isolated from the Sargasso Sea
MLFKNKKVFESIDQTIGNTPMVRLKNLKKKFNLNGQIIAKLEFFNPLGSVKDRIGLAMIDQAEKEKKINSETTIIEPTSGNTGIALAFVCATRGYKLILTMPSSMSLERRKMLNFFGAKIILTPKEMGMFGAINKAKEINKNIPNSIILDQFSNKANPSIHYNTTAKEIWDGVDGKINNLISGVGTGGTISGVGTFLKEKNKNIKIIAVEPEDSAVISGREAGSHSIQGIGAGFIPKNLDVSIIDETLSISNNSAFFFSRELAKCEGIPGGISTGAAIAAAIEIHERKEMQNLCSVIIIPSFAERYLSTELFNES

SEQ ID NO: 121088 - protein, 328 aa, Unknown; identical to SEQ ID NO: 121080
  Bacterial polypetide isolated from the Sargasso Sea

SEQ ID NO: 121089 - protein, 391 aa, Unknown
  Bacterial polypetide isolated from the Sargasso Sea
MADKKNKQGFDTRAIHAGQEPDPTTGAIMTPIYTSSTYVQESPGVHKGYDYSRSINPTRKALEACVADLEGSSYGYAFSSGMAACSTVLEVLNSGDHVIAMDDLYGGTYRLFEDVRKRSAGLEFTFSDLSDFSTVESSIRNNTKMIWVETPTNPLLKIVDLKKIAKFAKENNLISVCDNTFCSPYIQNPLELGFDIVVHSATKYLNGHSDLIGGIVVCSNHKTELADQILYLQNAIGSIMNPFDSFLLLRSLKTLAVRMERHCENAMQIASFLDSHEAIEKVIYPGLQSHPQHDLAKKQMKHYGGMLTLILKGGLDSARLFLERTEIFSLAESLGGVESLIEHPAIMTHASIPPDVREEIGITDGLVRLSVGIESLDDLIQDLKVALKGLV

SEQ ID NO: 121090 - protein, 388 aa, Unknown
  Bacterial polypetide isolated from the Sargasso Sea
MSKNDQFQTRAIHVGNEPDNETGAIVAPIHLTSTYEQEEVGKDKGYDYSRGGNPTRKRLEENLASLENGDHCLAFSSGMAATTTLFQTLSAGDHIIIGRNVYGGTYRMSVEVLSRHGLEFEFVDTRSQENVEAVIKPNTKLIFIETPTNPLLELTDIKQTAALCQQHNIKLAVDNTFMSPYGQRPLDLGADVVMHSATKFIGGHSDLIAGALVTNDANLAEELHFIQRSGGAIPSPFDCWILLRSTKTMALRVQKQSDNALELAQRLDASSFVNEVIYPGLENHVQHELAKKQQSTPDGNCIFGSMISLRCGSIEKRDSFLSNLRLFSLAESLGGVESLVCVPYGMTHASVPPDMKISMGLTEDLVRLSVGIEHIEDLYADIERAFKE

SEQ ID NO: 121091 - protein, 427 aa, Unknown
  Bacterial polypetide isolated from the Sargasso Sea
MAYRNYHKRKIADRELHPETQMMSYGYDPFLSEGSVKPPVFLTSTFAFRTAEDGAEFFDVVAGRKPSPEGEGAGLVYSRFNHPNLEIVEDRLALLDDSEAAVVTSSGMSAIAAILLTFLRPGDCVVQSVPLYGGTETLISKFLPEWGIRSEVIADGLSTHAIRAALEAAAQKGNVRMCYIETPANPTNALFDLEGLRSEIDAFEARHGYRPLSVCDNTLLGPLYQKPSRQGIDLSVYSLTKYIGGHSDLVAGGVTGDRALITKIRSVRSTLGSQLDPHSSWMITRSMETLVLRMQQAARSGSAVARWLADNPHRPVRVLHPELIDDPAYQAVYQRQCTGPGSTFAFILDGGREQAFRFINHLTLFKSAVSLGGTESLICHPASTTHSGVPADARAAAGVSEGLIRVSVGLEHPDDLIADLSYALEHC

SEQ ID NO: 121092 - protein, 388 aa, Unknown
  Bacterial polypetide isolated from the Sargasso Sea
TTNSWRKYPVKHIPKYEDDKELNLVLNKLKSFPPLVFAGETTHLKNQLAEVVDGKAFLLQGGDCAESFAEFNPDNIRDYFKVFLQMSLVLTYSASLPVVKLGRIAGQFSKPRSAPTEKQGDKELPSYLGDNINAIEFTEKARRPDPKRLFKAYSQSASTLNLIRAFCHGGFADLKKVHLWNLGYIKKSPQAKKFKELEDKIADALAFMDACGINAEFNRRLKTVNFWTSHEALLLPFEEAMTRIDSTSGQYHDTSAHFVWIGDRTRQIDGGHVEFCRGIENPIGIKCGPTSKADEIAKICELINPDNEKGKITLISRFGHDKVEKFLPKLIRGIKKEGLNVIWSCDPMHGNTLVSSTGFKTRPFNNVLNEVKNVFQVHQSEGSYAGGL

SEQ ID NO: 121093 - protein, 204 aa, Unknown
  Bacterial polypetide isolated from the Sargasso Sea
MKKWKANSWRNYPVKHIPEYQDEDELNIVLGKLKNFPPLVFAGETRHLKDQLANVVDGKAFLLQGGDCAESFAEFHPDNIRDYFKLMLQMSLVLTYSASLPVVKLGRIAGQFSKPRSAPTEKIGDVELPSYLGDNINSIEFTKKGRAYDPKRLFRAYSQSASTLNLLRAFSNGGFADLKNVHMWNLGYIKSAAQAKKFKELEDK

SEQ ID NO: 121094 - protein, 236 aa, Unknown
  Bacterial polypetide isolated from the Sargasso Sea
MSTWSPKSWRSKDALHMPNYNNEDHLNKTLNEISKYPPLVFAGEARLLKKKLGEVSNGNAFLLQGGDCAESFADFHPDNIRDTFKVILQMAVVLTFGASCPIVKVGRIAGQFAKPRSSATEVINNLELESYKGDIINGIDFNQKDRDPNPDRLIQAYNQSASTLNLLRAFSQGGFANLNKIHQWNLNFVKGENAAKFREISSRIDECLSFMEACGINGNSVRQLNETDFFTSHEAL

SEQ ID NO: 121095 - protein, 302 aa, Unknown
  Bacterial polypetide isolated from the Sargasso Sea
MHQHQFPVVKVGRIAGQFSKPRSAPTEKKDGVELPSYLGDNINGMEFTEKARMPDAKRLFRAYSQSASTLNLLRAFSQGGFADLRQVHLWNLGFIKDKTKGKYKEIEDKISDALSFMNACGINSDNNRRLRTVNFYTSHEALLLPFEESMTRIDSTTGEYHDTSAHLVWIGDRTRQPDGAHVEFCRGIKNPLGLKCGPNLKSEELIKLCNILNPDNEPGRMTLISRFGANNVEKHLPKLIKTVKKEGLNVVWSCDPMHGNTIKAATGFKTRTFDSVVAEVKNFFAVHQSEGSYAGGLHIEMT

SEQ ID NO: 121096 - protein, 314 aa, Unknown
  Bacterial polypetide isolated from the Sargasso Sea
MNKNWKPSSWREKKAKHLPNYSDEKELKLVTNKLTAYPPLVFAGESRNLLKQLGDVANGKAFLLQGGDCAESFADFNPNNIRDSFKVMLQMAVVLTYGASCPVVKVGRIAGQFAKPRSQDTEKLDNLELESYKGDIINGIDFNEKSRTADPKRLIQAYNQSAATLNLLRAFAQGGFANLKQIHQWNLSFADDNQYKKRFEDMANRIDECLTFMEACGINDENVRQMNETDFYTSHEALLLPYEEALTRVDSTTGLWYDVSAHMLWVGDRTRQLDGAHIEFIKGIENPIGIKVGPSTEVSELLKIIEVVNPNNIP

SEQ ID NO: 121097 - protein, 300 aa, Unknown
  Bacterial polypetide isolated from the Sargasso Sea
KYPPLVFAGEARLLKKKLGEVSSGNAFLLQGGDCAESFADFHPDNIRDTFKVILQMAVVLTFGASCPIVKVGRIAGQFAKPRSSATEVINDLELESYKGDIINGIDFNQKDRDPNPDRLIQAYNQSASTLNLLRAFSQGGFANLNKIHQWNLNFVKGENAAKFREISSRIDECLSFMEACGINGNSVRQLNETDFFTSHEALLLQYEEALTRIDSTSGKWYDVSAHMLWVGDRTRQLDGAHIEFLRGIENPIGIKVGPSTKTEELLKILDVLNPNNEAGKITLICRMGHEKVIGILPKNN

SEQ ID NO: 121098 - protein, 174 aa, Unknown
  Bacterial polypetide isolated from the Sargasso Sea
MKKWKANSWRNYPVKHIPEYKDEKELNIVLNKLKNFPPLVFAGETRHLKDQLANVVDGKAFLLQGGDCAESFAEFHPDNIRDYFKLMLQMSLVLTYSASLPVVKLGRIAGQFSKPRSAPTEKIGDVELPSYLGDNINSIEFTEKGRAYDPKRLFRAYSQSASTLNLLRAFSNGG

SEQ ID NO: 121099 - protein, 273 aa, Unknown
  Bacterial polypetide isolated from the Sargasso Sea
GFLLQGGDCAESFDEFNAPKIRDTFKVILQMAIVLTFAGRCPVTKVARMAGQYAKPRSSDFETRDGVTLPSYRGDIINNFEFTEAARRPDPDRLLEAYHRSASTLNLLRAFAQGGLADLHEVNRWNMAFVENNPLKERYSDMANRIQDTLEFMDVIGINAQTSSTLHETSLFTSHEALLLNYEQALTRIDTLTGKPYDCSAHMVWIGERTRQLDHAHVEFFRGIHNPIGVKVGPSMQEDELIRLIDALNPLNDPGRLTLITRMGADNLADNLP

SEQ ID NO: 121100 - protein, 306 aa, Unknown
  Bacterial polypetide isolated from the Sargasso Sea
QGGDCAESFAEFHPDNIRDTFKVILQMALVMTYSASLPIVKLGRIAGQFSKPRSAPTEKQGDKELPSYLGDNINAIDFNEKARRPDPKRMFKAYSQSASTLNLLRAFSKGGFADLNKVHLWNLDYIKKSPQAKKFKELEDKIADALAFMDACGITSDFNNRLYTVNFWTSHEALHLPFEESMTRVDSTTGEYHDTSAHFVWIGDRTRQLDGGHVEFCKGIENPIGIKCGPTSKPDEIAKICEVINPKNEKGKITLISRFGHQNVEKFLPKLIRGIKKEGLNVVWSCDPMHGNTIKSTTGFKTRPFN

SEQ ID NO: 121101 - protein, 252 aa, Unknown
  Bacterial polypetide isolated from the Sargasso Sea
MSDKWSPKSWINKDALHMPNYQNEDHLNKTLNEISKYPPLVFAGEARLLKEKLGEVANGNAFLLQGGDCAESFADFHPDNIRDTFKVILQMAVVLTFGASCPIIKVGRIAGQFAKPRSSATEVINDLELESYKGDIINGIDFNQKDRDPDPNRLIQAYNQSASTLNLLRAFSQGGFANLNKIHQWNLNFVKGENAAKFREISSRIDECLSFMEACGINGNSVRQLNETDFFTSHEALLLQYEEALTRIDSTS

SEQ ID NO: 121102 - protein, 275 aa, Unknown
  Bacterial polypetide isolated from the Sargasso Sea
LPIIKVGRMAGQFAKPRSSPSEINNGQELPSYAGDIINGIEFDINKRKPEPSRMLTAYSQAASTLNLLRAFADGGYADLRHVQSWNMGFVKSGPQGERYRYLAEEIQKSLHFMDALGISSENTPQLRTVQYYTSHEALLLPFEEALTRVDSTSGMIYNTSAHFLWIGDRTRFIDSAHVEFCRGIQNPLGIKCGPSSDPDELVKIIDILNPMNESGKITLITRFGNGSVEKFLPKLIRKITEEGKNVIWSCDPMHGNTMKSNSGKKTRKFENILGE

SEQ ID NO: 121103 - protein, 272 aa, Unknown
  Bacterial polypetide isolated from the Sargasso Sea
EEARKPDAKRLFRAYSQSASTLNLLRAFSQGGFADLRQVHLWNLSFVKGSPQGKKYKEVEDKISDAISFMEACGINADNNRRLRTVNFYTSHEALLLPFEQAMTRVDSTTGEYHDTSAHFVWIGDRTRQLDGGHVEFCRGIKNPIGLKCGPTLKPEELLKLCNKLNPQNEPGRLTLISRFGADNVDKFLPKLIRSVKKEGLNVIWSCDPMHGNTLVSTTGFKTRPFNNIVKEIKKVFAVHQSEGSYAGGLHIEMTGQDGQNALVELKKYLKK

SEQ ID NO: 121104 - protein, 236 aa, Unknown
  Bacterial polypetide isolated from the Sargasso Sea
FKIDKGLSIARQLLRDINDLGLPAGTEFLDVITPQYIADLISWGAIGARTTESQVHRELASGSSCPIGFKNTTNGGIQVAADAIGSAQNPHKFLSVTKEGRAAIFYSSGNKDCHVILRGGNEPNYSKEDIERTANILKNNNLAESIMVDMSHGNSSKQHEKQLIVCEDIAKQISLGEDRITGVMIESNIEEGNQSAKDLENLVYGQSITDACINWEDTKSCLNQLAEAVSTRENKT

SEQ ID NO: 121105 - protein, 127 aa, Unknown
  Bacterial polypetide isolated from the Sargasso Sea
MAATSDLHVVETRPLVAPALLHAELSIDASATETVASARQRIQAILRGEDQRLLVIVGPCSVHDVEAAREYARRLAPLRQTHAAELEVVMRVYFEKPRTTVGWKGLIHDPHLDGSYDIHSGMRRARG

SEQ ID NO: 121106 - protein, 261 aa, Unknown
  Bacterial polypetide isolated from the Sargasso Sea
MIDWKIDSWRKLPIKQVPEYNDLTKVNSVEKELSIRPPLVFAEEARRLRKRMANVAEGNAFLLQGGDCAESFAEHNANNIRDSFRVLLQMAVVLTFGSALPVVKIGRLAGQYSKPRSSPFEEIDNVSLPSYRGDMVNDMAFDKKAREPDPERLLQVYDKSASTLNLLRAFASGGMADLTKLHEWNLEFVRGTKEAEKYKELAAQITSSLEFMNACGMTPENTAQLRETEFYTSHEGLLLNYEEALTRKDTITEEKGWFATS

SEQ ID NO: 121107 - protein, 296 aa, Unknown
  Bacterial polypetide isolated from the Sargasso Sea
LGSALPVVKIGRLAGQYSKPRSSPFEEINNVSLPSYRGDMVNDMAFDKKARDPDPDRLIQVYDKSASTLNLLRAFASGGMADLTKLHEWNLEFVRGTKEAEKYKELASQITASLEFMKACGMTPGNTVQLRETEFYTSHEGLLLNYEEALTRKDTITEEKGWFATSAHMLWIGDRTRSIDEAHVEYMRGIANPIGLKCGPSTEPDDLLRLIEKLNPLNQAGRLTLIARMGSSEIHKKLRPLISAVKRSGLVVGWCSDPMHGNTVKASSGFKTRKMDDIMMEVKGFFEVHNEMNTIP

SEQ ID NO: 121108 - protein, 304 aa, Unknown
  Bacterial polypetide isolated from the Sargasso Sea
LELTPSASTLNLLRAFSQGGFADLRQVHLWNLGFIKDRTKGKYREIEDKISDALAFMEACGINSDNNRRLRTVNFYTSHEALHLPFEQAMTRVDSTTGEYHDTSAHFVWIGDRTRQLDGAHVEFCKGIKNPIGLKCGPTLKADELIKLCNILNPNNEPGRMTLISRFGADNVEKYLPKLIKSVKKEGLNVVWSCDPMHGNTIKAATGFKTRTFDSVVKEVKNFFAISQSEGSYAGGLHIEMTGQDVTECTGGAQKISEKDLSNRYRTHCDPRLNANQALELAFLISEEIKKNSKISNKIIQAAS

SEQ ID NO: 121109 - protein, 301 aa, Unknown
  Bacterial polypetide isolated from the Sargasso Sea
EARDLKRNLAKVSEGKAFLLQGGDCAESFDDFNADYIRDTFKVLLQMSVTLTAAGNCPVVKVGRMAGQFAKPRSAPKEEIDGVELDSYKGDIINDMDFTENARVPDPDRMIKAYTQSAATLNLLRAFAKGGFSDLNKVHQWNMGFVDESPQGKKFRELANKISDTLSFMEAIGISSRNTKRLRSVDFFTSHEALLLPYEECLTRLDSTSGEVYDTSAHMVWIGDRTRQPDGAHVEFCRGIKNPIGIKCGPSLDPEELKKLLDILNPENEAGKITLICRFGSDTINEKLPKLIQPFLNSDHN

SEQ ID NO: 121110 - protein, 276 aa, Unknown
  Bacterial polypetide isolated from the Sargasso Sea
MSLVLTYSASLPVVKIGRIAGQFSKPRSSPTENQNGKELPSYLGDNINGIEFTAKARKPDPKRLFKAYSQAASTLNLLRAFSHGGFADLKNVHLWNLGYIKKSLQHKKFKELEDKIADALAFMEACGINSDFNRRLKTVNFWTSHEALLLPFEESMTRVDSTTGECHDTSAHFVWIGDRTRQLDGGHVEFCRGIENPIGIKCGPTSKPDEISKIINVINPKNQKGKITLISRFGHDKVEKFLPKLIRGIKKEGLNVIWSCDPMHGNTIKSATGFKT

SEQ ID NO: 121111 - protein, 172 aa, Unknown
  Bacterial polypetide isolated from the Sargasso Sea
MKEQWSPNSWRLKPAKHLPIYKDEDVLNDSLDKIKKFPPLVFAGEARSLKSRLSDVSKGKAFLLQGGDCAESFADFHPDNIKNTFKVILQMAVVLTFGASCPIVKVGRIAGQFAKPRSSDKETINGVELESYKGDIINGINFTKVDRSPDPARLIQAYNQSASTLNLLRAFS

SEQ ID NO: 121112 - protein, 306 aa, Unknown
  Bacterial polypetide isolated from the Sargasso Sea
MPHAWSPESWRAKPIQQQPEYPDASHLARVEQTLAGYPPLVFAGEARELRRQFAEVTQGRAFLLQGGDCAESFAEFSAAKIRDTFKVLLQMAIVMTFAAGCPVVKVGRMAGQFAKPRSAGSETIDDVTLPAYRGDIVNGIGFDATSRVPDPERLLQAYHQATASLNLLRAFAQGGFADLHQVHQWNLDFIANSALSEKYHQLAGRIDETLSFMRAVGMDSAPQLRETSFFTAHEALLLNYEQAFVRKDSLTGRWYDCSAHMLWIGDRTRQLDGAHVEFMRGIENPIGVKVGPSMDPDELIRLIDTL

SEQ ID NO: 121113 - protein, 185 aa, Unknown
  Bacterial polypetide isolated from the Sargasso Sea
MKKWKLNSWRNYPVKHIPTYEDEKELNMVLGKIKNFPPLVFAGETRHLKQQLAEVVDGKAFLLQGGDCAESFAEFNPDNIRDYFKVILQMSLVLTYSASLPVVKLGRIAGQFSKPRSASTEKQGDKELPSYLGDNINGIDFTEKSRKPDPKRLFKAYSQSASTLNLLRAFCHGGFADLQKYTYGI

SEQ ID NO: 121114 - protein, 148 aa, Unknown
  Bacterial polypetide isolated from the Sargasso Sea
MQSASKSHHFLGVNENGMASIVNTTGNPDGHIVLRGGSKGPNFESQYVQRISAELKQCNLPHKVMIDCSHGNSNKDFRKQSEVLKNIASQISNGEKNILGVMLESHLKEGNQKLLKKEDLEFGRSITDACIDIETTKELLAILYKSVN

SEQ ID NO: 121115 - protein, 305 aa, Unknown
  Bacterial polypetide isolated from the Sargasso Sea
LQMSLVLTASASVPVVKVGRIAGQFSKPRSAPTEKKDGKELPSYLGDNINGMEFTEKSRIPDAKRLFRAYSQSASTLNLLRAFSQGGFADLRQVHLWNLGFIKDKTKGKYKEIEDKISEALAFMEACGINSDNNRRLRSVNFYTSHEALLLPFEESMTRIDSTTGEYHDTSAHFVWIGDRTRQPDGAHVEFCRGIKNPIGLKCGPSLKPEELVNLCKILNPENEPGRVTLIARFGADNVEKFLPKLIKSVKKEGLNVVWSCDPMHGNTIKAATGFKTRTFDSIIKEVKDFFRIHQAEGTYAGGLH

SEQ ID NO: 121116 - protein, 217 aa, Unknown
  Bacterial polypetide isolated from the Sargasso Sea
MKNWKTNSWKKYPVKHIPSYDDEKQLNMVLNKLKSSPPLVFAGETRHLKEQLANVVDGKAFLLQGGDCAESFAEFHPDNIRDTFKVILQMSLVLTYSASLPVVKLGRIAGQFSKPRSAPTEKQGDKELPSYLGDNINAIEFDEKSRRPDPKRLFRAYSQSASTLNLLRAFSNGGFADLKKVHLWNLGYIKTSPQAKKFKELEDKIADALAFMEACGI

SEQ ID NO: 121117 - protein, 307 aa, Unknown
  Bacterial polypetide isolated from the Sargasso Sea
FTNGCCLTFGASCPIVKVGRIAGQFAKPRSSATEVINDLELESYKGDIINGIDFNQKDRDPNPDRLIQAYNQSASTLNLLRAFSQGGFANLNKIHQWNLNFVKGENAAKFREISSRIDECLSFMEACGINGNSVRQLNETDFFTSHEALLLQYEEALTRIDSTSGKWYDVSAHMLWVGDRTRQLDGAHIEFLRGIENPIGIKVGPSTNTEELLKILDVLNPNNEAGKITLICRMGHEKVSVILPKIIRSVNLTRKNVVWTCDPMHGNTIKSNTGFKTRPLKDIISEIQQFFQIHRSEGTYPGGVHLE

SEQ ID NO: 121118 - protein, 172 aa, Unknown
  Bacterial polypetide isolated from the Sargasso Sea
MSKKWSPKSWRNKDALHMPNYKNEDHLNKTLNEISKYPPLVFAGEARLLKNKLGEVANGNAFLLQGGDCAESFADFHPDNIRDTFKVILQMAVVLTFGASCPIVKVGRIAGQFAKPRSSATEVINDLELESYKGDIINGIDFNQKDRDPDPDRLIKAYNRSASTLNLLRAFS

SEQ ID NO: 121119 - protein, 228 aa, Unknown
  Bacterial polypetide isolated from the Sargasso Sea
MKNWKVNSWRKYPVKHIPSYDDEKELNMVLNKLKSSPPLVFAGETRHLKDQLAEVVDGKAFLLQGGDCAESFAEFHPDNIRDTFKLILQMSLVLTYSASLPVVKLGRIAGQFSKPRSAPTEKQGGKELPSYLGDNINSIEFNEKARRPDPKRLFRAYSQSASTLNLLRAFSNGGFADLKKVHLWNLGYIKNSPQAKKFKELEDKIADALGFMAACGITPEFNRRLYTV

SEQ ID NO: 121120 - protein, 251 aa, Unknown
  Bacterial polypetide isolated from the Sargasso Sea
MWQNNSWRKYRAKHIPEYPDKHGLKIVEETLKGFPPLVFAGEVRSLRKALSEVAEGNGFLLQGGDCAESFTEFSADNIRDTFRVLLQMAVILTSGINVPVTKVGRMAGQFAKPRSSATETIEGKALPSYAGDIINDIEFIDEKRIPDPQRLLKAYSQAASTLNLLRAFADGGYADLRHVNSWNMGFVKSGPQGERYRHLAHQIQESLNFMEALGVTSDNTPQLRKVSFYTSHEALLLPYEEALTRIDSTSG

SEQ ID NO: 121121 - protein, 281 aa, Unknown
  Bacterial polypetide isolated from the Sargasso Sea
SALEYAHLLKEARDSLSTNLLVIMRVYFEKPRTTVGWKGLINDPDINESYDANKGLMLARKILRDVTAIGLPVGTEFLDPISPQYVADLISWGAIGARTAESQSHRELASGLSCPIGIKNGTTGALKPAIDGIQAANHPHVFFSNTKDGRVSIYKTSGNSDSHIILRGGKEPNFGSEAIQQTLTALVEADVNDSIMVDASHGNSQKQFKKQINVVNDLATQISAGNQSLRGLMIESHLVEGNQSITESLTYGQSITDACMNWDDTLNCLNVISEAVEKRRG

SEQ ID NO: 121122 - protein, 126 aa, Unknown
  Bacterial polypetide isolated from the Sargasso Sea
MIQTEDLNVTGVNPLTAPKFIKAEYPISDKASETVFKFRKQIKDVLDEKDSRQLVIVGPCSIHHADIAIDYADKLTKLIPEVEDKLLVVMRVYFEKPRTTVGWKGLINDPDLDGSHKIEKGIKLPE

SEQ ID NO: 121123 - protein, 233 aa, Unknown
  Bacterial polypetide isolated from the Sargasso Sea
MKNWKVNSWRKYPVKHIPTYGDEKELNSVLNKLKTFPPLVFAGETRHLKDQLAKVVDGNAFLLQGGDCAESFAEFHPDNIRDTFKVILQMALVMTYSASLPIVKVGRIAGQFSKPRSAPTEKQGNIELPSYLGDNINAIDFNEKARRPDPKRMFKAYSQSASTLNLLRAFSKGGFADLNKVHLWNLDYIKKSPQAKKFKDLEDKIADALAFMEACGITSDFNNRLYTVNFWTS

SEQ ID NO: 121124 - protein, 299 aa, Unknown
  Bacterial polypetide isolated from the Sargasso Sea
LGDNINSIEFNEKARRPDPKRLFRAYSQSAATLNLLRAFSHGGFADLKKVHLWNLGYIKNSPQAKKFKELEDKIADALGFMAACGITPEFNRRLYTVNFWTSHEALHLPFEESMTRTDSTTGEYHNTSAHFVWIGDRTRQLDGGHVEFCRGIENPIGIKCGPTSKADEIAKICEVINPKNEKGKITLISRFGHDKVEKFLPKLIRGIKQEGLNVVWSCDPMHGNTLVSTTGFKTRPFNNVVKEVKNVFEVHQSEGSYAGGLHIEMTGQNVTECTGGAKNISDQDLSSRYHTHCDPRLMQ

SEQ ID NO: 121125 - protein, 108 aa, Unknown
  Bacterial polypetide isolated from the Sargasso Sea
MTKNWSKDSWRSKPILQVPEYDDLDQLKKVESRLTSYPPLVFAGEARRLKENLAKVSRGEAFLLQGGDCAESFAEHNPDNIRDTFRVILQMAIVFTFGAGCPVIKVGR

SEQ ID NO: 121126 - protein, 190 aa, Unknown
  Bacterial polypetide isolated from the Sargasso Sea
MKKWKVNSWKNYPVKHIPEYQDEKELNLVLNKLRNFPPLVFAGETRHLKDQLANVVDGKAFLLQGGDCAESFAEFHPDNIRDYFKLMLQMSLVLTYSASLPVVKLGRIAGQFSKPRSAPTEKIGEKELPSYLGDNINSIEFTEKARIPDPKRLFRAYSQSASTLNLLRAFSNGGFADLKNVHMWNLGYIK

SEQ ID NO: 121127 - protein, 257 aa, Unknown
  Bacterial polypetide isolated from the Sargasso Sea
MKKWKINSWRNYPVKHIPVYEDEKELNMVLGKIKNFPPLVFAGETRHLKQQLAEVVDGKAFLLQGGDCAESFVEFNPDNIRDYFKVILQMSLVLTYSASLPVVKLGRIAGQFSKPRSAPTEKQGDKELPSYLGDNINGIDFTEKSRKPDPKRLFKAYSQSASTLNLLRAFCHGGFADLQKVHLWNTGYIKKSPQAKKFKELEDKIADALAFMDACGINSDFNRRLKTVNFWTSHEALLLPFEESMTRVDSTTGEYHD

SEQ ID NO: 121128 - protein, 253 aa, Unknown
  Bacterial polypetide isolated from the Sargasso Sea
TEKQGDVELPSYLGDNINAIDFNEKARRPDPKRLYKAYSQSASTLNLLRAFSKGGFADLNKVHLWNLDYIKKSPQAKKFKDLEDKIADALAFMEACGITSDFNNRLYTVNFWTSHEALHLPFEESMTRVDSTTGEYHDTSAHFVWIGDRTRQLDGGHVEFCRGIENPIGIKCGPTSKPEEIAKICELINPKNEKGKITLISRFGHQNVEKFLPKLIRGIKKEGLNVVWSCDPMHGNTIKSTTGFKTRPFNDVV

SEQ ID NO: 121129 - protein, 51 aa, Unknown
  Bacterial polypetide isolated from the Sargasso Sea
MIESNLEEGNQKADDLDNLTYGKSITDACINWKDTKDCLYRLAESVRDRNK

SEQ ID NO: 121130 - protein, 302 aa, Unknown
  Bacterial polypetide isolated from the Sargasso Sea
YEDEKELNMVLNKIKNFPPLVFAGETRHLKEQLSNVVDGKAFLLQGGDCAESFAEFNPDNIRDYFKVMLQMSLVLTYSASLPVVKLGRVAGQFSKPRSAPTEKQGNTELPSYLGDNINGIEFTEKARRPDPKRLFKAYSQSASTLNLLRAFCHGGFADLKKVHLWNLGYIKKSPQAKKFKELEDKIADALAFMDACGINSDFNRRLKTVNFWTSHEALLLPFEENMTRVDSTTGEYHDTSAHFVWIGDRTRQLDGGHVEFCRGIENPIGIKCGPTSKPDEIAKICNVINPKNEKGKITLISR

SEQ ID NO: 121131 - protein, 137 aa, Unknown
  Bacterial polypetide isolated from the Sargasso Sea
QGHASIVSTTGNPDGHLVLRGGGGSTNYHAESINAVSEILQAAGLPHRVMVDCSHGNSNKDYRRQSEVLESVAQQVRGGSRSVLGVMLESNIVAGNQKLPADLSQLTYGQSITDACIDLSTTESLLEQLAAAVPVMV

SEQ ID NO: 121132 - protein, 240 aa, Unknown
  Bacterial polypetide isolated from the Sargasso Sea
MKKWNLNSWTKYPAKHLPVYKDKKELDLVLGKVKKYPPLVFAGETRSLKKSLADVVKGKAFLLQGGDCAESFAEFHPDNIRDTLKVILQMSLVLTASASVPVVKVGRIAGQFSKPRSAPTEKKDGKELPSYLGDNINGMDFNEKARIPDAKRLFRAYSQSASTLNLLRAFSQGGFADLRQVHLWNLGFIKDKTKGKYKEIEDKISDALAFMQACGINSDNNRRLRTVNVYTSHGSSFVTL

SEQ ID NO: 121133 - protein, 121 aa, Unknown
  Bacterial polypetide isolated from the Sargasso Sea
MIQTEDLNVTHVNPLTAPKFIKAEYPISDKASETVFKFRKQIKDVLDEKDSRQLVIVGPCSIHHADIAMDYADKLTKLIPEVEDKLLVVMRVYFEKPRTTVGWKGLINDRDLDGSHKIEKG

SEQ ID NO: 121134 - protein, 243 aa, Unknown
  Bacterial polypetide isolated from the Sargasso Sea
MKNWKINSWRKYPVKHIPKYQDEKELEMVLNKLKTFPPLVFAGETRHLKDQLAMVNDGKAFLLQGGDCAESFAEFHPDNIRDTFKVILQMALVMTYSASLPIVKLGRIAGQFSKPRSAPTEKQGDKELPSYLGDNINAIDFNEKARRPDPKRMFKAYSQSASTLNLLRAFSKGGFADLNKVHLWNLDYIKKSPQAKKFKELEDKIADALAFMEACGITSDFNNRLYTVNFWTSHEALYTYPFE

SEQ ID NO: 121135 - protein, 184 aa, Unknown
  Bacterial polypetide isolated from the Sargasso Sea
REMASGLSMPVGFKNGTDGNLNIALNALQSAASGHSFIGINQKGQVSLVQTAGNPDGHVILRGGSKPNYDEESVQAALAALRKHGLPEGLVIDCSHGNSSKDHTRQGIVAQSVIEQRVKGNKAIIGIMLESHIHAGRQDLVDGKAELYGVSVTDACIDWATTAELLAALEQQLSLTESSSEVAA

SEQ ID NO: 121136 - protein, 120 aa, Unknown
  Bacterial polypetide isolated from the Sargasso Sea
DGHIVLRGGSKGPNFESDHVQRISEELRQCNLPHKVMIDCSHGNSNKDFRKQSEVLKNVAYQISNGEKNILGVMLESHLKEGNQKLLKKEDLEFGRSITDACINIETTKKLLAILYNSFN

SEQ ID NO: 121137 - protein, 224 aa, Unknown
  Bacterial polypetide isolated from the Sargasso Sea
MEKNWKPNSWRDKPAKHLPKYKDVNSLDLMTKKLSNFPPLVFAGESRKLEKQLAEVANGKAFLLQGGDCAESFSEFHPNNIRDSFKVMLQMAVVLTFGASCPVVKVGRMAGQFAKPRSQETEIIDNLELESYKGDIINGIDFNKESREPNPDRLLQAYNQSASTLNLLRAFAQGGFANLKQIHQWNLSYIEEGQTKKKFEEMANRIDECLVFMEACGINDQNVH

SEQ ID NO: 121138 - protein, 260 aa, Unknown
  Bacterial polypetide isolated from the Sargasso Sea
MKKWTLNSWKNYPVKHIPTYEDEKKLNMVLKKLNSFPPLVFAGETRSLKKSLAQVVEGKAFLLQGGDCAESFAEFHPDNIRDTFKVILQMALVLTFSASLPVVKIGRIAGQFSKPRSSPVEVKNGKELPTYLGDNINGIEFNEKARKPDPMRLFKAYSQAASTLNLLRAFSQGGFADLRKVHLWNLGFVNKSPQGKKYKEIEDKISDSLAFMEACGVNPENHRRLRMVNFYTSHEALLLPFEQSMTRIDSTSGKYHDTSA

SEQ ID NO: 121139 - protein, 154 aa, Unknown
  Bacterial polypetide isolated from the Sargasso Sea
ADAIGSAHNPHKFLSVTKEGRAAIFYSSGNKDCHVILRGGTEPNYSKEDIDKTAKILKKNNLVESIMVDMSHGNSSKQHKKQLVVCEDIANQISSGEDRITGVMIESNIEEGNQSAKDLDNLVYGKSITDACINWEDTKQCLSQLAKSVSLRNN

SEQ ID NO: 121140 - protein, 201 aa, Unknown
  Bacterial polypetide isolated from the Sargasso Sea
MSKNWTIDSWRNLSIKHQPVYKDKQKLEDVENRLKSLPPLVFAGEARTLKEKLSEVCEGKAFLLQGGDCAESFAEFNADNLRDTFRVLLQMAAVLTYGASLPIIKVGRLAGQFAKPRSAPTEIKEGKELPSYLGDIINGIDFTEEEREPDPERMLNAYSQAASALNLLRAFATGGYADLHEVHRWNLEFLEGSIQDDKYRN

SEQ ID NO: 121141 - protein, 102 aa, Unknown
  Bacterial polypetide isolated from the Sargasso Sea
MFKEISSELQQCNLPHKVMIDCSHGNSNKDFRKQSEVLKNIASQISNGEKNILGVMLESHLKEGNQKLSKKEDLEFGRSITDACIDIETTKELLAILYRSVS

SEQ ID NO: 121142 - protein, 312 aa, Unknown
  Bacterial polypetide isolated from the Sargasso Sea
MKKWSVNSWRNYEAKHLPEYPDVKKLENTEGQLRSYPPLVFAGEARDLKRNLAKVSEGKAFLLQGGDCAESFDDFNADYIRDTFKVLLQMSVTLTAAGNCPVVKVGRMAGQFAKPRSAPKEEIDGVELDSYKGDIINDMDFTEDARVPDPDRMIRAYTQSAATLNLLRAFAKGGFSDLNKVHQWNMGFVDESPQGKKFRELANKISDTLSFMEAIGISSRNTKRLRSVDFFTSHEALLLPYEECLTRLDSTSGEVYDTSAHMVWIGDRTRQPDGAHVEFCRGIKNPIGIKCGPSLDPEELKKLLDILNPENE

SEQ ID NO: 121143 - protein, 268 aa, Unknown
  Bacterial polypetide isolated from the Sargasso Sea
AVVLTFGASCLIVKVGRIAGQFAKPRSSATEVINDLELESYKGDIINGIDFNQKDRDPNPDRLIQAYNQSASTLNLLRAFSQGGFANLNKIHQWNLNFVKGENAAKFREISSRIDECLSFMEACGINGNSVRQLNETDFFTSHEALLLQYEEALTRIDSTSGKWYDVSAHMLWVGDRTRQIDGAHIEFLRGIENPIGIKVGPSTKTDELLKILDVLNPNNEAGKITLICRMGHEKVSGILPKIIRSVNSAGKNVVWTCDPMHGNTIKS

SEQ ID NO: 121144 - protein, 182 aa, Unknown
  Bacterial polypetide isolated from the Sargasso Sea
MKKWKANSWRNYPVKHIPEYKDQEELNVVLGKLKNFPPLVFAGETRHLKDQLANVVDGKAFLLQGGDCAESFAEFHPDNIRDYFKLMLQMSLVLTYSASLPVVKLGRIAGQFSKPRSAPTEKIGDVELPSYLGDNINSIEFTEKGRAYDPKRLFRAYSQSASTLNLLRAFSNGGFADLKNVH

SEQ ID NO: 121145 - protein, 312 aa, Unknown
  Bacterial polypetide isolated from the Sargasso Sea
VVDGKAFLLQGGDCAESFAEFHPDKIRDYFKVFLQMSLVLTYSASLPVVKLGRIAGQFSKPRSAPTEKIGDKELPSYLGDNINSIEFTEKARRPDPRRLFKAYSQSASTLNLIRAFCHGGFADLKKVHLWNLGYIKKSPQAKKFKELEDKIADALAFMDACGINSEFNRRLKTVNFWTSHEALLLPFEEAMTRVDSTSGQYHDTSAHFVWIGDRTRQLDGGHVEFCRGIENPIGIKCGPTSKPEEIAKICELINPKNEKGKITLISRFGHDKVEKFLPKLIRGIKKEGLNVIWSCDPMHGNTLVSSTGFKTD

SEQ ID NO: 121146 - protein, 210 aa, Unknown
  Bacterial polypetide isolated from the Sargasso Sea
MSDKWSPKSWRNKDALHMPNYQNEDHLNKTLNEISKYPPLVFAGEARLLKEKLGEVANGNAFLLQGGDCAESFADFHPDNIRDTFKVILQMAVVLTFGASCPIVKVGRIAGQFAKPRSSATEVINDLELESYKGDIINGIDFNQKDRDPNPDRLIQAYNQSASTLNLLRAFSQGGFANLNKIHQWNLNFVKGENAAKFREISSRIDECLS

SEQ ID NO: 121147 - protein, 259 aa, Unknown
  Bacterial polypetide isolated from the Sargasso Sea
MTQEWSKSGWRKFPRTQMPSYLNNTTLSSIEKKLATYPPLVFAGEARRLKLQLSNVVQGKAFLLQGGDCAESFEEFSADLIRDSYKVLLQMAVVLTFGGKCPIVKIGRMAGQFAKPRSADFEIIDGIKVPSYRGDIINGMGVDEREPDPYRMLQAYTQAAASLNLLRAFSQGGFADIKRVHSWTLESAMGGPEYSKFHDLADKISDSLEFMRAAGVSSSENEVLNKVDFYTSHEALLLEYEEALCRVDSTSGAYVAGSG

SEQ ID NO: 121148 - protein, 243 aa, Unknown
  Bacterial polypetide isolated from the Sargasso Sea
MKKWNLNSWKKLPAKHLPVYQDKEELDLVLSKIKKYPPLVFAGESRSLKKALSEVAEGKAFLLQGGDCAESFAEFHPDNIRDTFKVLLQMSLVLTASASVPVVKVGRIAGQFSKPRSAPTEKKDGKELPSYLGDNINGMEFTEKARIPDAKRLFRAYSQSASTLNLLRAFSQGGFADLRQVHLWNLGFIKDKTKGKYKEIEDKISDALAFMEACGINSDNNRRLRTVNFILRMKLYFYHLKNL

SEQ ID NO: 121149 - protein, 210 aa, Unknown
  Bacterial polypetide isolated from the Sargasso Sea
LGVATEALDPIMPQYLGDLTSWTAIGARTAESQTHREMASGLSTPVGFKNGTDGSLAVAVNAIKSSRQSHHFLGLDDGGRITVYKTKGNKYSHVVLRGGVKPNYDSRSIKSCEKQLTDSELPMKIMVDCSHGNTNKDFRLQPKVAKSIVNQVKKGNQSIMGIMLESNINAGNQKITENLNDLKYGVSLTDACIDWETTEDLLMNLRTSLI

SEQ ID NO: 121150 - protein, 294 aa, Unknown
  Bacterial polypetide isolated from the Sargasso Sea
IKSILLNHASTLNLLRSFAQGGFANLRKVNSWNMGFVKASKEGKKYEKIAAKINEYLDFMDAVGVNTSTVIDLNTVEFFTSHEGLHLPYESALTRVDSLTNEVYCTSAHFIWIGDRTRFIDSAHVEFCRGISNPIGIKCGPSLDPDELVKIIETINPANEAGKISLIFRYGEDNIDKHLPGLVETITKNNKNVLWISDPMHGNTVKSSSGLKTRDFNSLLNETSKAIKILKERGCHLGGIHLEMTGQNVTECTGGIYKVSDDDLNSRYHTHCDPRLNANQALELSFNIAEELQG

SEQ ID NO: 121151 - protein, 292 aa, Unknown
  Bacterial polypetide isolated from the Sargasso Sea
MKTQWGHLVLGRSKTAKHQPIYKDEAQLNDSLDKIKNFPPLVFAGESRSLKSKLAKVSNGKAFLLQGGDCAESFADFHPDNIKNSFKVILQMAVVLTFGASCPVVKVGRIAGQFAKPRSSNKEIINGIELESYKGDIINGIEFTKADRLPDPKRLIQAYNQSASTLNLLRAFSQGGYANLNKIHQWNLNFVEEENAIKFTEIADRIDECIAFMKACGINDTNVRQIYETEFFTSHEALLLDYEEALTRIDSTTGKWYDVSAHMLWVGDRTRQLDGAHIEFVRGIENPVGIKV

SEQ ID NO: 121152 - protein, 190 aa, Unknown
  Bacterial polypetide isolated from the Sargasso Sea
MKKWNLNSWKKLPAKHLPVYQDKQELDLVLSKIKKYPPLVFAGESRSLKKALSEVAEGKAFLLQGGDCAESFAEFHPDNIRDTFKVLLQMSLVLTASASVPVVKVGRIAGQFSKPRSAPTEKKDGKELPSYLGDNINGMEFTEKARIPDAKRLFRAYSQSASTLNLLRAFSQGGFADLRQVHLWNLGFIK

SEQ ID NO: 121153 - protein, 214 aa, Unknown
  Bacterial polypetide isolated from the Sargasso Sea
MSEKWSPKSWRNKEALHMPNYQNEDHLNQTLNEISKYPPLVFAGEARLLKKKLGDVAKGNAFLLQGGDCAESFADFHPDNIRDTFKVILQMAVVLTFGASCPIVKVGRIAGQFAKPRSSATEVINGLELESYKGDIINGIDFNQKDRDPNPDRLIQAYNQSASTLNLLRAFSQGGFANLNKIHQWNLNFVKGENAAKFREISSRIDECLSFMEA

SEQ ID NO: 121154 - protein, 302 aa, Unknown
  Bacterial polypetide isolated from the Sargasso Sea
DFFKVVLQMSLILTVSSKLPVIKVGRVAGQFSKPRSAPVEVKDGKELPSYLGDNINSMDFTKDGREPQPERLLKAYSQSAATLNLLRAFSQGGFADLNKVHFWNMSFVNETAQKKYKEIAEKVSDALAFMEACGINSENNRRLRTVNFYTSHEALLLPVEEAMTRVDSTTGEYHNTSAHFLWIGDRTRQLDGAHVEYCKGIKNPLGIKCGPSSDPKEIVKLTEVLNPDNEAGRITLIARFGHDQVTKFLPKLIKEIKKAGRNVIWSCDPMHGNTIKSSTGFKTRPFDNVLNEVKNFFKVHQN

SEQ ID NO: 121155 - protein, 326 aa, Unknown
  Bacterial polypetide isolated from the Sargasso Sea
VKLGRMEGQFAKPRSSDLKEKDDLKLPSYRGDIINSYEFTKESREPDPQRMMQAYNHSASTLNLLRAFAQGGFASLTQLNKWNLDFASNFNSTQKYKLISQKIEESINFMNACGINENNTRELRETDFYTSHEALLLPYEEAFTRVDSTTGDWYNVNSHFLWVGDRTRDPDGAHIHYLSGIKNPLGLKVGPSTNIDDLKKNIEILNPENEGGRLTLIVRMGAEKIQSTFPNLLKEIDKLGLNITWVCDPMHGNTSTSNSGYKTRATDNIFNEIKSFFEIHHSQGSIPGGVHLELTGLNVTECVGGPEDIKDENLGDRYHTFCDPKT

SEQ ID NO: 121156 - protein, 293 aa, Unknown
  Bacterial polypetide isolated from the Sargasso Sea
QGDMELPSYLGDNINGIEFSKKARKPDPKRLFKAYSQAASTLNLLRAFCHGGFADLKKVHLWNLGYIKKSPQAKKFRELEDKIADALAFMDACGINSDFNRRLKTVNFWTSHEALLLPFEESMTRIDSTTGEYHDTSAHFVWIGDRTRQLDGGHVEFCRGIENPIGIKCGPTSKPEEIVKICNVINPKNEKGKITLISRFGHENVGKFLPKLVRTIKKEGLNVIWSCDPMHGNTVKSSTGFKTRPFNNVLKEVKNVFAVHQSEGSYAGGLHIEMTGQNVTECTGGTQKILIKT

SEQ ID NO: 121157 - protein, 260 aa, Unknown
  Bacterial polypetide isolated from the Sargasso Sea
FAKPRSSATEVINDLELESYKGDIINGIDFNQKDRDPNPDRLIQAYNQSASTLNLLRAFSQGGFANLNKIHQWNLNFVKGENAVKFREISSRIDECLSFMQACGINGNSVRQLNETDFFTSHEALLLQYEEALTRIDSTSGKWYDVSAHMLWVGDRTRQLDGAHIEFLRGIENPIGIKVGPSTKTEELLKILDVLNPNNEAGKITLICRMGHEKVSGILPKIIKSVNSAGKNVVWTCDPMHGNTIKSNTGFKTRPLKDII

SEQ ID NO: 121158 - protein, 273 aa, Unknown
  Bacterial polypetide isolated from the Sargasso Sea
IVNDPDFNAGSRAANPRRLLQAYHQSSSTLNLLRAFTRGGFANLAQVHSWNQEFVASSPAGEQYREIADGITNALAFMKACGITSLNNSALNEVDFYTSHEALLLGYEEALTRIDSTSGKWYDCSAHMLWIGERTRQVEGAHLEFLRGVENPLGCKIGPSATPEDVLKICEVLNPESTPGRLTLISRFGAGNVEDCLPPIVDAVTTAGHPVVWACDPMHGNTFTSSSGHKTRHLDDVLAELSQFFSVHQSLGTWAGGIHVELTGGNVTECLGG

SEQ ID NO: 121159 - protein, 170 aa, Unknown
  Bacterial polypetide isolated from the Sargasso Sea
MKKWKTNSWRNYPVKHIPQYENEKELNMVLNKIKNFPPLVFAGETRHLKQQLSDVVDGKAFLLQGGDCAESFAEFNPDNIRDYFKVILQMSLVLTYSASLPVVKLGRIAGQFSKPRSAPTEKQGNKELPSYLGDNINGIEFNEKARRPDPKRLFKAYSQAASTLNLLRAF

SEQ ID NO: 121160 - protein, 100 aa, Unknown
  Bacterial polypetide isolated from the Sargasso Sea
MDYLTDNTRIIERHDLITPIELIERYPISNDVAKLIYGTRNEISNILHGKDDRLLIVCGPCSIHDEKSALEYAKKLKSENFKHQENLLIVMRVYLKNPEL

SEQ ID NO: 121161 - protein, 137 aa, Unknown
  Bacterial polypetide isolated from the Sargasso Sea
MTHAHRSATPISTHDTTRIDDTRIKAVRPLITPALLQEWLPTPDAALTLVESSRAAISRILHGQDDRLIVVVGPCSIHDHGQAMDYARQLKAQADALQDDLLIVMRVYFEKPRTTVGWKGYINDPHLDGSFAINEGL

SEQ ID NO: 121162 - protein, 107 aa, Unknown
  Bacterial polypetide isolated from the Sargasso Sea
MTTSSNNPALEKTSDLHVVETRPLIPPSRLHNDIPLDHKSAMTVANTRRSIQNILHNNDPKLLVIVGPCSIHDLEAAKQYSKYIQNFREIYKDKLEIVMRVYFEKPR

SEQ ID NO: 121163 - protein, 277 aa, Unknown
  Bacterial polypetide isolated from the Sargasso Sea
MLRLLKGARDSLSADLLIIMRVYFEKPRTTVGWKGLINDPDINESYDVNKGLMLARKILRDITALGLPIGTEFLDPISPQYVADLVSWGAIGARTAESQSHRELASGLSCPIGIKNGTTGALKPAIDGIQAANHPHVFFSNTKDGRVSIYKTSGNSDAHIILRGGKEPNFSSDSIQQTLTALTEADVNDSIMVDASHGNSQKQFKKQIDVVENLAVQIAEGNNSLRGLMLESHLVEGNQSITDNLVYGQSITDACMNWDDTLNCLKLFSEAVQKRRG

SEQ ID NO: 121164 - protein, 170 aa, Unknown
  Bacterial polypetide isolated from the Sargasso Sea
ESFAEFSADNIRDTFRVLLQMALVLTFGGGLPVVKVGRLAGQFAKPRSSSVEKQGDQELPSYRGDIVNSIEFEPEKRTPDPGRLLKAYNQSASTLNLLRAFAQGGFANLEEIHRWTLGFVSNSPQGERYEKLSHRLDETLRFMQACGLTSDSIRQLRETDFYTSHEALLL

SEQ ID NO: 121165 - protein, 301 aa, Unknown
  Bacterial polypetide isolated from the Sargasso Sea
LLQGGDCAESFAEFHPDNIRDTFKVLLQMSLVLTASASVPVVKVGRIAGQFSKPRSAPTEKKDGKELPSYLGDNINGMEFTEKARVPDPKRLFRAYSQSASTLNLLRAFSQGGFADLRQVHLWNLGFIKDKTKGKYKEIEDKISDALAFMESCGINSDNNRRLRTVNFYTSHEALLLPFEESMTRVDSTTGEYHDTSAHFVWIGDRTRQPDGAHVEFCRGIKNPIGLKCGPSLKPEELINLCNILNPNNEPGRMTLISRFGADNVEKFLPKLIKEVTKEGLNVVWSCDPMHGNTIKAATGL

SEQ ID NO: 121166 - protein, 299 aa, Unknown
  Bacterial polypetide isolated from the Sargasso Sea
KPRSAPTEKKDGKELPSYLGDNINGMEFTEKARIPDAKRLFRAYSQSASTLNLLRAFSQGGFADLRQVHLWNLGFIKDKTKGKYKEIEDKISDALAFMEACGINSDNNRRLRTVNFYTSHEALHLPFEESMTRIDSTTGEYHDTSAHFVWIGDRTRQPDGAHVEFCRGIKNPLGLKCGPTLNPDELINLCNILNPNNEAGRLTLISRFGADSVEKYLPKLTRAIKKEGLKVIWSCDPMHGNTIKAATGFKTRPFESVLKEVKNFFAVSQAEGSYAGGLHIEMTGQDVTECTGGAQKISE

SEQ ID NO: 121167 - protein, 258 aa, Unknown
  Bacterial polypetide isolated from the Sargasso Sea
EKHGNKELPSYLGDNINGIDFTEKSRKPDPKRLFKAYSQSASTLNLLRAFCHGGFADLQKVHLWNTGYIKKSPQAKKFKELEDKIADALAFMEACGINSDFNRRLKTVNFWTSHEALLLPFEESMTRIDSTTGEHHDTSAHFVWIGDRTRQLDGGHVEFCRGIENPIGIKCGPTSKPEEIVKICNVINPKNEKGKITLISRFGHQNVEKFLPKLIRSIKKEGLNVIWSCDPMHGNTIKSTTGLKTRPFNNVLNEVKNV

SEQ ID NO: 121168 - protein, 209 aa, Unknown
  Bacterial polypetide isolated from the Sargasso Sea
MKKWKINSWRNYPVKHIPKYEDEKDLNLVLNKLKSFPPLVFAGETRHLKDQLANVVDGKAFLLQGGDCAESFAEFNPDNIRDTFKVILQMALVMTYSASLPIVKVGRIAGQFSKPRSAPTEKQGNKVLPSYLGDNINAIDFTEKARRPDPKRMFKAYSQSASTLNLLRAFSKGGFADLNKVHLWNLDYIKKSPQAKKFKELEDKIADAL

SEQ ID NO: 121169 - protein, 273 aa, Unknown
  Bacterial polypetide isolated from the Sargasso Sea
MKKWNLNSWTKLPAKHLPVYQNKEELELVLSKIKKYPPLVFAGESRSLKKALADVAEGKAFLLQGGDCAESFAEFHPDNIRDTFKVLLQMSLVLTASASMPVVKVGRIAGQFSKPRSAPTEKKDGKELPSYLGDNINGMEFTEKARIPDAKRLFRAYSQSASTLNLLRAFSQGGFADLRQVHLWNLGFIKDKTKGKYKEIEDKISDALAFMEACGINSDNNRRLRSVNFYTSHEALLLPFEESMTRVDSTTGEYHDTSAHFVWIGDRTRQPDG

SEQ ID NO: 121170 - protein, 253 aa, Unknown
  Bacterial polypetide isolated from the Sargasso Sea
MKNWKVNSWRKYPVKHIPTYGDEKELNSVLNKLKTFPPLVFAGETRHLKDQLAKVVDGKAFLLQGGDCAESFAEFHPDNIRDTFKVILQMALVMTYSASLPIVKLGRIAGQFSKPRSAPTEKQGSVELPSYLGDNINAIDFNEKARRPDPKRMFKAYSQSASTLNLLRAFSKGGFADLNKVHLWNLDYIKKSPQAKKFKDLEDKIADALAFMEACGITSDFNNRLYTVNFWTSHEALHLPFEESMTRVDSTTG

SEQ ID NO: 121171 - protein, 225 aa, Unknown
  Bacterial polypetide isolated from the Sargasso Sea
MKNWKVNSWRKYPVKHIPTYDDEKELNNVLNKLKTFPPLVFAGETRHLKEQLAKVVDGKAFLLQGGDCAESFAEFHPDNIRDTFKVILQMALVMTYSASVPIVKLGRIAGQFSKPRSAPTEKIGDKELPSYLGDNINAIDFTEKARRYDPKRMFRAYSQSASTLNLLRAFSKGGFADLNKVHLWNLDYIKKSPQAKKFKDLEDKIADALAFMDACGITSDFNNRM

SEQ ID NO: 121172 - protein, 283 aa, Unknown
  Bacterial polypetide isolated from the Sargasso Sea
MALVLSSSASLPVVKVGRIAGQFSKPRSSPIENKNGKELPTYLGDNINGIEFTEEARKPDAKRLFRAYSQSASTLNLLRAFSQGGFADLRQVHLWNLGFVKGSPQGKKYKEVEDKISDALSFMEACGINADNNRRLRTVNFYTSHEALLLPFEQAMTRIDSTTGEYHDTSAHFVWIGDRTRQLDGGHVEFCRGIKNPIGLKCGPTLKPEELIKLCNKLNPQNEPGRLTLISRFGADNVDKFLPKLIRSVKKEGLNVIWSCDPMHGNTLVSTTGFKTRPFNNIV

SEQ ID NO: 121173 - protein, 300 aa, Unknown
  Bacterial polypetide isolated from the Sargasso Sea
SFSNQEVHQQKNKETKNYQVTWGDNINAIEFNEKARRPDPKRLFKAYSQSASTLNLLRAFCHGGFADLKKVHLWNLGYIKKSPQAKKFKELEDKIADALAFMDACGINADFNRRLKTVNFWTSHEALLLPFEESMTRVDSTTGEYHDTSAHFVWIGDRTRQLDGGHVEFCRGIENPIGIKCGPTSKPDEIVKICNLINPKNEKGKITLISRFGHENVEKFLPKLIRIIKKEGINVIWSCDPMHGNTIKSTTGFKTRPFNNVLKEVKNVFGVHQSEGSYAGGLHIEMTGQNVTECTGGTQK

SEQ ID NO: 121174 - protein, 176 aa, Unknown
  Bacterial polypetide isolated from the Sargasso Sea
MKNWKVNSWRKYPVKHIPEYPDKKELDQVLNKIKTFPPLVFAGETRHLKQQLAEVVDGKAFLLQGGDCAESFAEFHPDNIRDTFKLMLQMSLVLTYSASLPVVKLGRIAGQFSKPRSSPVETKDGVELPSYLGDNINGIEFKEKARVPDPKRLYKAYSQSASTLNLLRAFSHGGFA

SEQ ID NO: 121175 - protein, 251 aa, Unknown
  Bacterial polypetide isolated from the Sargasso Sea
QFAKPRSAPKEEINGVELDSYKGDIINDMDFTEDARVPDPDRMIRAYTQSAATLNLLRAFAKGGFSDLNKVHQWNMGFVDESSQGKKFRELANKISDTLSFMEAIGISSRNTKRLRSVDFFTSHEALLLPYEECLTRLDSTSGEVYDTSAHMVWIGDRTRQPDGAHVEFCRGIKNPIGIKCGPSLDPQELKKLLDILNPENEAGKITLICRFGSETINEKLPKLIQPFLNSDHNLVWSCDPMHGNTMKANS

SEQ ID NO: 121176 - protein, 266 aa, Unknown
  Bacterial polypetide isolated from the Sargasso Sea
MKTQWSPSSWRSKPAKHLPIYNDEVFLKKSLDKIKNFPPLVFAGEARSLKSKLAEVSKGKAFLLQGGDCAESFAEFHPDNIKNTFKVILQMAVVLTFGASCPVVKVGRIAGQFAKPRSSDKETINGVELESYKGDIINGIDFTEAQRLPDPSRLIQAYNQSASTLNLLRAFSQGGYANLNKIHQWNLNFLEEENANKFSEIADRIDECLGFMKACGINDKNVRQINETEFFTSHEALLLEYEEALTRIDSTSGKWYDVSAHMVMGG

SEQ ID NO: 121177 - protein, 273 aa, Unknown
  Bacterial polypetide isolated from the Sargasso Sea
MPEYKDKKELDLVLSKVSKYPPLVFAGETRSLKKSLADVVEGKAFLLQGGDCAESFAEFHPDNIRDTLKVILQMSLVLTASASVPVVKVGRIAGQFSKPRSSPTEKKDGKELPSYLGDNINGMEFSEKARLPDAKRLFRAYSQSASTLNLLRAFSQGGFADLRQVHLWNLGFIKDKTKGKYKEIEDKISDALSFMEACGINSDNNRRLRTVNFYTSHEALLLPFEEAMTRVDSTTGEYHDTSAHFVWIGDRTRQLEGAHVEFCRGIKNPLGLK

SEQ ID NO: 121178 - protein, 204 aa, Unknown
  Bacterial polypetide isolated from the Sargasso Sea
MKNWKINSWRKHPVKHIPEYEDKNELEMVLNKLKTFPPLVFAGETRHLKDQLAMVNDGKAFLLQGGDCAESFAEFHPDNIRDTFKVILQMSLVMTYSASLPIVKLGRIAGQFSKPRSAPTEKQGDKELPSYLGDNINAIDFNEKARRPDPKRMFKAYSQSASTLNLLRAFSKGGFADLNKVHLWNLDYIKKSPQSKKFRELEDK

SEQ ID NO: 121179 - protein, 189 aa, Unknown
  Bacterial polypetide isolated from the Sargasso Sea
CCWCRTTESQSHRELASGLSCPVGFKNGTDGGIQIAIDAIKAASKKHNFLSVTKEGKSAIFSTTGNRDCHIILRGGKSTNYQSKDVSIVSDALIKNDLPVNIMIDASHANSQKDHTKQSVVVRDIADQIINNNQSICGVMLESNLVAGRQDIAKPADLTYGQSITDACIGWDETEELIMMLNNAIEDKS

SEQ ID NO: 121180 - protein, 259 aa, Unknown
  Bacterial polypetide isolated from the Sargasso Sea
MIDWKIDSWRKLPIKQVPEYSDLTKVTKIEKELCIRPPLVFAEEARRLRKRMADVAEGNAFLLQGGDCAESFAEHNANNIRDSFRVLLQMAVVLTFGSALPVVKIGRLAGQYSKPRSSPFEEINNISLPSYRGDMVNDMEFDRKAREPDPERLLQVYDKSASTLNLLRAFASGGMADLTKLHEWNLEFVRGTKEAEKYKELAAQITSSLEFMNACGMTPENTAQLRETEFYTSHEGLLLNYEEALTRKDTITEEKGWFA

SEQ ID NO: 121181 - protein, 284 aa, Unknown
  Bacterial polypetide isolated from the Sargasso Sea
HLPDYPDAQKLEDTEKQLRSYPPLVFAGEARDLKRNLAKVSEGKAFLLQGGDCAESFDDFNADYIRDTFKVLLQMSVTLTAAGNCPVVKVGRMAGQFAKPRSAPKEEINGIELDSYKGDIINDMDFTEQARVPDPNRMIRAYTQSAASLNLLRAFAKGGFSDLNKVHQWNMGFVDESPQGKKFRELADKISDTISFMEAIGISSRNTKRLRSVDFFTSHEALLLPYEECLTRLDSTTGEVYDTSAHMVWIGDRTRQPDGAHVEFCRGIKNPIGIKCGPSLDPEE

SEQ ID NO: 121182 - protein, 313 aa, Unknown
  Bacterial polypetide isolated from the Sargasso Sea
MYEDEKELNSVLSKLKTFPPLVFAGETRHLKDQLAKVVDGKAFLLQGGDCAESFAEFHPDNIRDTFKVILQMSLILTYSASLPVVKLGRIAGQFSKPRSAPTEKQGNKELPSYLGDNINAIEFTEKARRPDPKRLFKAYSQSASTLNLLRAFSKGGFADLNKVHLWNLDYIKKSPQAKKFKDLEDKIADALAFMEACGITSDFNNRLYTVNFWTSHEALHLPFEESMTRVDSTTGEYHDTSAHFVWIGDRTRQLDGGHVEFCKGIENPIGIKCGPTSKPDEIAKICEVINPKNEKGKITLISRFGHKNVEKFL

SEQ ID NO: 121183 - protein, 299 aa, Unknown
  Bacterial polypetide isolated from the Sargasso Sea
ASTLNLLRAFSKGGFADLNKVHLWNLDYIKKSPQAKKFKDLEDKIADALAFMSACGITSDFNNRLYTVNFWTSHEALHLPFEESMTRIDSTTGEYHDTSAHFVWIGDRTRQLDGGHVEFCRGIENPIGIKCGPTSKPEEIVKICNLINPKNEKGKITLISRFGHDSVEKFLPKLVRTIKKEGLNVIWSCDPMHGNTIKSTTGFKTRPFNRVLKEVRDVFAVHQSEGTYAGGLHIEMTGQNVTECTGGARKISDADLSSRYHTHCDPRLNADQALELAFLISDEIKKNSSYSKNSIQVAS

SEQ ID NO: 121184 - protein, 190 aa, Unknown
  Bacterial polypetide isolated from the Sargasso Sea
MKNWKPNSWRKYPVKHVPSYESEKELNQVLSKIKSFPPLVFAGETRHLKDQLSQVVDGKAFLLQGGDCAESFAEFNPDNIRDTFKVILQMSLVLTYSASLPIIKLGRIAGQFAKPRSAPTEKQGNKELPSYLGDNVNGIDFTEKSRRHDPKRLFKAYSQSASTLNLLRAFSNGGFADLKNVHLWNLGYIK

SEQ ID NO: 121185 - protein, 308 aa, Unknown
  Bacterial polypetide isolated from the Sargasso Sea
RKYPVKHIPTYGDEKELNSVLNKLKTFPPLVFAGETRHLKDQLSKVVDGKAFLLQGGDCAESFAEFHPDNIRDTFKVILQMALVMTYSASLPIVKLGRIAGQFSKPRSAPTEKQGDVELPSYLGDNINAIDFNEKARRPDPKRMYKAYSQSASTLNLLRAFSKGGFADLNKVHLWNLDYIKKSPQAKKFKDLEDKIADALAFMEACGITSDFNNRLYTVNFWTSHEALHLPFEESMTRVDSTTGEYHDTSAHFVWIGDRTRQLDGGHVEFCRGIENPIGIKCGPTSKPEEIAKICEVLNPKNEKGKIT

SEQ ID NO: 121186 - protein, 143 aa, Unknown
  Bacterial polypetide isolated from the Sargasso Sea
MWTLNSWKNYKAKHLPEYKNQKHLDKVLTSLRDFPPLVFAGEVRSLRNSLAKASEGEAFLLQGGDCAESFSEFNADNIRDTFRVILQMAIILTSGTNLPIIKVGRMAGQFAKPRSSPTEKINDVELESYKGDIINGIEFDKSQ

SEQ ID NO: 121187 - protein, 294 aa, Unknown
  Bacterial polypetide isolated from the Sargasso Sea
GGDCAESFEHFSADGIRDTFKVMLQMAMVLTYGAKVPVVKVGRMAGQFAKPRSAPTETINDVELPSYRGDIINELDFTPEARIPDPSKMLQAYTQAAATLNLLRAFSKGGYADVHLVHGWTLGFIEGEKASKYREMANRISDALDFMKAAGLNSHLSNELRTVDFYTSHEGLLLEYEEALTRLDSTSGNWLAGSGHMIWIGDRTRQPDGAHVNFCSGVLNPIGLKCGPTMTEDDLKKLLDKLNPENEAGKLTLIARFGAGKVGDHLPRLIKVVKESGSNVVWTCDPMHGNTFKS

SEQ ID NO: 121188 - protein, 241 aa, Unknown
  Bacterial polypetide isolated from the Sargasso Sea
GDIINGIDFNEKDRNPDPDRLIQAYNQSAATLNLLRAFSQGGFANLNKIHQWNLNFVKDENATKFREISSRIDECLSFMEACGINGKSVRQLNETDFFTSHEALLLEYEEALTRIDSTSGKWYDVSAHMLWVGDRTRQLEGAHIEFLKGIENPLGIKVGPSTDTDELLKILDLLNPNNESGKITLICRMGHEKVAGILPKIIQSTKGSGKNVVWTCDPMHGNTIKSKKGFKTRPLKDIISE

SEQ ID NO: 121189 - protein, 303 aa, Unknown
  Bacterial polypetide isolated from the Sargasso Sea
KVILQMSLILTYSASLPVVKLGRIAGQFSKPRSAPTEIQGGKELPSYLGDNINGIEFTEKARKPDPKRLFKAYSQAASTLNLLRAFAKGGFADLNKVHLWNLDYIKKSPQAKKFKDLEDKIADALAFMEACGITSDFNNRLYTVNFWTSHEALLLPFEESMTRVDSTTGEYHDTSAHFVWIGDRTRQLDGGHVEFCKGIQNPIGIKCGPTSKPDEIAKICNVLNPNNEKGKITLISRFGHEKVEKFLPKLIRGIKKEGLNVIWSCDPMHGNTIKSTSGFKTRPFNNVVSEVKNVFAVHQSEGS

SEQ ID NO: 121190 - protein, 240 aa, Unknown
  Bacterial polypetide isolated from the Sargasso Sea
MSLEVWQTDSWRNYTAKHIPDYPDKDDLNTVEDTLKGFPPLVFAGEVRSLRKALSEVSEGNGFLLQGGDCAESFSEFSADNIRDTFRVILQMAVILTSGINTPVTKVGRMAGQFAKPRSKPTETINGKALPSYAGDIINDIQFNDEKRIPDPQRLLKAYSQAASTLNLLRAFADGGYADLRHVNSWNMGFVKSGPQGERYRHLANQIQDSLNFMQALGVTSNNTPQLRKVSFYTSHEALL

SEQ ID NO: 121191 - protein, 260 aa, Unknown
  Bacterial polypetide isolated from the Sargasso Sea
NIHIADITPIISPDELKSTVKISSETSEFVINSRNEISNILTNKDNRLMVIVGPCSIHNPDAALDYAKKLAPLKQKYQDKLMIIMRTYFEKPRTNIGWKGLINDPELNGKNNIQQGLKDARKLMLEILKLGLPTGSELLDPILPQYYADLICWASIGARTSESQTHREMASGLSMPIGFKNATDGNIDVAIHAIQAAQHPHAFIGVTQDGTIARVESNGNPHAHLIIRGGANGPNYSSVQMEEHKEKIEQSKIDTRILVD

SEQ ID NO: 121192 - protein, 290 aa, Unknown
  Bacterial polypetide isolated from the Sargasso Sea
EFTEKARIPDAKRLFRAYSQSASTLNLLRAFSQGGFADLRQVHLWNLGFIKDKTKGKYKEVEDKISDALAFMEACGINSDNNRRLRSVNFYTSHEALLLPFEESMTRIDSTTGEYHDTSAHFVWIGDRTRQPDGAHVEFCRGIKNPIGLKCGPTLKPEELINLCNILNPDNEPGRLTLISRFGADNVEKYLPKLIKVVKKEGLKVVWSCDPMHGNTIKAATGFKTRPFESVLKEVKNFFAVSQTEGSYAGGLHIEMTGQDVTECTGGAQKISENDLSNRYRTHCDPKIKC

SEQ ID NO: 121193 - protein, 184 aa, Unknown
  Bacterial polypetide isolated from the Sargasso Sea
MDYRTDNTRIVERLEIVSPNKLLGELPITNDVSSLVYGTRNEISSILHGRDDRILVVCGPCSIHDPKSAKEYALRLKEQYEVLGKELLIVMRVYFEKPRTTVGWKGMINDPDINETYDINKGIHLARSLLLEFGKMGLPCGTEFLDLISPQYVADLISWGAIGARTAESQTHRELASGMSCPIG

SEQ ID NO: 121194 - protein, 306 aa, Unknown
  Bacterial polypetide isolated from the Sargasso Sea
NQEILITPEELKRQLPATEEVKRGISQNREIVRSIIDGTDRRLLLVVGPCSIHNPREAIDYAERLKALSESVNDKLFIVMRAYFEKPRSTVGWKGLINDPHLDDSFKIAEGLAMARKLLLEISKLGLPLANEALDPITPQYLQELFSWTAIGARTSESQTHREMASGLSCPVGFKNGTDGSLDVALNALQSVKSPHRFLGISPDGKVSIVTTKGNAHAHVVLRGGTNGPNYYPENIAVCEEELESIGATQAIMVDCSHANSNKDHTKQGSVLEAVAEQISVGNKSIRGVMLESNLNPGNQKVDSLK

SEQ ID NO: 121195 - protein, 225 aa, Unknown
  Bacterial polypetide isolated from the Sargasso Sea
MKNWKVNSWRKYPVKHIPTYGDEKELNSVLNKLKTFPPLVFAGETRHLKDQLSKVVDGKAFLLQGGDCAESFAEFHPDNIRDTFKVILQMALVMTYSASLPIVKLGRIAGQFSKPRSAPTEKQGNVELPSYLGDNINAIDFNEKARRPDPKRMYKAYSQSASTLNLLRAFSKGGFADLNKVHLWNLDYIKKSPQAKKFKDLEDKIADALAFMEACGITSDFNNRL

SEQ ID NO: 121196 - protein, 227 aa, Unknown
  Bacterial polypetide isolated from the Sargasso Sea
MKNWKINSWRKYPVKHIPQYDDEKELEMVLSKLKTFPPLVFAGETRHLKDQLAMVNDGKAFLLQGGDCAESFAEFHPDNIRDTFKVILQMALVMTYSASLPIVKLGRIAGQFSKPRSASTEKQGDKELPSYLGDNINAIDFNEKARRPDPKRMFKAYSQSASTLNLLRAFSKGGFADLNKVHLWNLDYIKKSPQAKKFKELEDKIADALAFMDACGITSDFNIDYIL

SEQ ID NO: 121197 - protein, 230 aa, Unknown
  Bacterial polypetide isolated from the Sargasso Sea
MKKWKINSWRNYPVKHIPEYEDQGELDLVLSKLKNFPPLVFAGETRHLKDQLANVTDGKAFLLQGGDCAESFAEFNPDNIRDYFKLMLQMSLVLTYSASLPVVKLGRIAGQFSKPRSAPTEKIGDTELPSYLGDNINSIEFTKKARVPDPKRLFRAYSQSASTLNLLRAFSNGGFADLKNVHMWNLGYIKSATQAKKFKELEDKIADALAFMEACGITSDFNRRLYTVNF

SEQ ID NO: 121198 - protein, 361 aa, Unknown
  Bacterial polypetide isolated from the Sargasso Sea
MDEVWKKSSWRIKKKHQMPDYEDKDQLNKVVNSLCSLPPLVFAGEVRNLKNDLAKVESGKAFLLQGGDCAESFEEFSADLIRDTFKVLLKMAVVLTFGGKKPVVKIGRMAGQFAKPRSSDFEIINGQKLPSYRGDIINDISPTVKDRIPNPERMLKAYTQSSASLNLLRAFSQGGFADISRVHSWVLESTKGEDGYKKFFELATKITNALEFMSAAGVNSNNSDSLSKVDFYTSHEALLLEYEEALCREDSTTGLPLAGSGHMIWIGDRTRQIDGAHVEFCKGVQNPIGLKCGPSLDPDELVHLCQILNPKNEPGRLTLITRFGSDKIADHLPKIIKAVNNAKLRTVWCCDPNAWKHNQIS

SEQ ID NO: 121199 - protein, 245 aa, Unknown
  Bacterial polypetide isolated from the Sargasso Sea
GITPENARPLTETELYTSHEALLLGYEESLTRRDTITEQHGWYATSAHMVWIGDRTRQPDGAHVEYMRGISNPIGLKCGPSLDPDELVRLTEILNPDNIAGRLTLIVRMGADKVRTGLPPLLKAVQKSGANVVWCCDPMHGNTIKASSGYKTRRVDDVMAEVTGFFDAHDDVGTYPGGVHFEMTGQNVTECVGGVVDVTEASLGDRYHTHCDPRMNGAQALELAFLLADLLKRRRGGRSVLSEAV

SEQ ID NO: 121200 - protein, 314 aa, Unknown
  Bacterial polypetide isolated from the Sargasso Sea
MKKWSVNSWRNYEAKHLPEYPDVKKLEKTEDQLRSYPPLVFAGEARDLKRNLAKVSEGKAFLLQGGDCAESFDDFNADYIRDTFKVLLQMSVTLTAAGNCPVVKVGRMAGQFAKPRSAPKEEIDGVELDSYKGDIINDMDFTEDARVPDPDRMIRAYTQSAATLNLLRAFAKGGFSDLNKVHQWNMGFVDESSQGKKFRELANKISDTLSFMEAIGISSRNTKRLRSVDFFTSHEALLLPYEECLTRLDSTSGEVYDTSAHMVWIGDRTRQLDGAHVEFCRGIKNPIGIKCGPSLDPEELKKLLDILNPENEAG

SEQ ID NO: 121201 - protein, 457 aa, Unknown
  Bacterial polypetide isolated from the Sargasso Sea
MKDWTPSSWRQRKALQQPMYEDEAELAEALATIQNRPPLVFAGESRDLQEKLANAAAGNAFVLFGGDCAESFKEFKADNVRDTYRVLLQMSVVLMYGSGVPVVKLGRMAGQFAKPRSEDFETIDGVSLPSYRGDNINSCEFTPEARLPDPERLIKGYDQSCATLNLLRAFSNGGYAAMTRVSDWNLDFMTNTSEGHQYEDLAQRVDAAIDFMAACGIDEHHPTMQETSFYTAHEALHLGYEEALTRQDSTTEDYYGCSAHFLWCGERTRQPEGAHMEYFRGISNPIGIKISDKSDGEGVVSLVKTLNPDNIPGRITLVSRMGAAKLREHLPRLISAIEDAGLNVLWVTDPMHGNTVKTDNGYKTRPFEAVRDEIMAFFEVHEKMGTHPGGVHLEMTGQNVTECTGGYMDVSVEDLEKRYLTHCDPRLNASQAIELAFLMANELNDMRRRRANGTTPR

SEQ ID NO: 121202 - protein, 373 aa, Unknown
  Bacterial polypetide isolated from the Sargasso Sea
MKKWKTNSWRNYPVKHIPTYEDEKELNMVLGKIKNFPPLVFAGETRHLKQQLADVVDGKAFLLQGGDCAESFVEFNPDNIRDYFKVMLQMSLVLTYSASLPVVKLGRVAGQFSKPRSAPTEKQGDIELPSYLGDNINGIEFTEKARKPDPKRLFKAYSQSASTLNLIRAFCHGGFADLKKVHLWNLGYIKKSPQAKKFKELEDKIADALAFMDACGINSDFNRRLKTVNFWTSHEALLLPFEESMTRIDSTTGEYHDTSAHFVWIGDRTRQLDGGHVEFCRGIENPIGIKCGPTSKPEEIVKICNAINPKNEKGKITLISRFGHENVGKFLPKLVRTIKKEGLNVIWSCDPMHGNTVKSSTGFKTRPFNNVLK

SEQ ID NO: 121203 - protein, 409 aa, Unknown
  Bacterial polypetide isolated from the Sargasso Sea
ENKKELNMVLDKIRNFPPLVFAGETRTLKNHLADVVDGKAFLLQGGDCAESFAEFHPDNIRDTFKVILQMSLVMTYSASVPVVKVGRIAGQFSKPRSSPTEIKNGKELPSYLGDNINGIEFSEKLRKPDAKRLFKAYSQSASTLNLLRALSQGGFADLNKVHLWNLGFLKKSPEGKKFKELEDKIADALSFMDACGINSDFNRRLKTVNCFTSHEALLLPFEEAMTRIDSTTGKYHDTSAHFVWIGDRTRQPSGGHVEFCRGIENPIGIKCGPSLKTDELIKLCNILNPKNEKGRITLISRFGHDNVEKFLPKLIRAIKKEGHNVVWSCDPMHGNTIKSANGFKTRPFNNVVKEVKKVFAVHKAEGSYAGGLHIEMTGKNVTECTGGAQKISEKDLSHRYHTHCDPRLN

SEQ ID NO: 121204 - protein, 459 aa, Unknown
  Bacterial polypetide isolated from the Sargasso Sea
MKKWKTNSWRNYPVKHIPAYEDEKELNMVLGKIKNFPPLVFAGETRHLKQQLADVVDGKAFLLQGGDCAESFAEFNPDNIRDYFKVMLQMSLVLTYSASLPVVKLGRIAGQFSKPRSAPTEKQGDIELPSYLGDNINGIEFNKKARRPDPKRLFKAYSQAASTLNLIRAFCHGGFADLKKVHLWNLGYIKKSPQAKKFKELEDKIADALAFMDACGINSDFNRRLKTVNFWTSHEALLLPFEESMTRIDSTTGEYHDTSAHFVWIGDRTRQLDGGHVEFCRGIENPIGIKCGPTSKPEEIVKICNAINPKNEKGKITLISRFGCENVGKFLPKLVRNIKKEGLNVIWSCDPMHGNTVKSSTGFKTRPFNNVLKEVKNVFAVHQSEGSYAGGLHIEMTGQNVTECTGGTQKISDKDLSSRYRTHCDPRLNANQALELSFLISDEIKKNSIYARSGIRAVS

SEQ ID NO: 121205 - protein, 237 aa, Unknown
  Bacterial polypetide isolated from the Sargasso Sea
MKNWKVNSWRKYPVKHVPKYDDEKELNNVLDKLKTFPPLVFAGETRHLKDQLAKVVDGKAFLLQGGDCAESFAEFHPDNIRDTFKVILQMSLILTYSASLPVVKLGRIAGQFSKPRSAPTEKQGNKELPSYLGDNINAIEFSEKGRRADPKRLFKAYSQSASTLNLLRAFSKGGFADLNKVHLWNLDYIKKSPQAKKFKDLEDKIADALAFMEACGITSDFNNRLYTVNFWTSHEAL

SEQ ID NO: 121206 - protein, 340 aa, Unknown
  Bacterial polypetide isolated from the Sargasso Sea
EESLAEVVKGKAFLLQGGDCAESFEEFNPDNIRDTFKAILQMSLVLTHSASMPVIKVGRIAGQFSKPRSSPVEKKDGKELPSYLGDNINGMEFSEKARIPDAKRLFRAYAQSASTLNLIRAFSQGGFADLRQVHLWNLGFINKKTKGKYKEIEDKISDALSFMEACGITPENNRRLRTVNFYTSHEALLLPFEEAMTRVDSTTGEYHDTSAHFVWIGDRTRQPDGAHVEFCRGIKNPIGLKCGPSLKPDELIKLCNILNPDNEAGRLTLISRFGANKAEEFLPKLIKAVKKEGLNVIWSCDPMHGNTIKATSGLKTRPFDNVLKEVKNVFGIHQAEGTYA

SEQ ID NO: 121207 - protein, 179 aa, Unknown
  Bacterial polypetide isolated from the Sargasso Sea
MSKIVDDLRIVSEQLLSPPAVLKQALPLSSAGSDFIQKSRQEIADIVHGRDPRLLVITGPCSIHDPVSAMDYARRLKQLQLQYKDTLYIVMRVYFEKPRTTVGWKGFINDPHLDDSFDLETGLTKGRRLLLDLVEMELPAATEALDPISPQYLSDLISWAAVGARTVESQTHREMASGL

SEQ ID NO: 121208 - protein, 151 aa, Unknown
  Bacterial polypetide isolated from the Sargasso Sea
INAMQSASKSHHFLGVNENGMASIVNTTGNPDGHIVLRGGSKGPNFESDHVQRISAELRQCNLPHKVMIDCSHGNSNKDFRKQSEVLKNVASQISNGEKNILGVMLESHLKEGNQKLLKKEDLQFGRSITDACIDIETTKELMAILYDSLS

SEQ ID NO: 121209 - protein, 446 aa, Unknown
  Bacterial polypetide isolated from the Sargasso Sea
MSKWSKDSWKNFKIKHIPQYNDPDQLEKALKKLEGFPPLVFAGECRNLKQDLAKASKGDAFLVQGGDCAESFKEFNANNIRDTFRVILQMSAVITAKLKVPVIKLGRIAGQFAKPRSSDLETKDGKTLNSYYGDSINSIEFSEEKREPNPARLLRAYSQSASTLNLLRSFAQGGFANLRKVNSWNMGFVKASKEGKKYEKIAAKINEYLDFMDAVGVNTSTVIDLNTVEFFTSHEGLHLPYEAALTRVDSLTNEVYCTSAHFIWIGDRTRFIDSAHVEFCRGISNPIGIKCGPSLDPDELVKIIETINPANEPGKISLIFRYGEESIDKHLPGLVETITKNNKNVLWISDPMHGNTVKSSSGLKTRDFNSLLNETSKAIKILKDRGCHLGGIHLEMTGQNVTECTGGIYKVSDDDLNSRYHTHCDPRLNANQALELSFNIAEELQG

SEQ ID NO: 121210 - protein, 409 aa, Unknown
  Bacterial polypetide isolated from the Sargasso Sea
MKKWKLNSWRNYPVKHIPTYEDEKELNSVLNKLKSFPPLVFAGETRHLKQQLAEVVDGKAFLLQGGDCAESFAEFNPDNIRDYFKAMLQMSLVLTYSASLPVVKLGRIAGQFSKPRSAPTEKQGDLELPSYLGDNINGIEFSEKSRRPDPKRLFKAYSQAASTLNLIRAFCHGGFADLKKVHLWNLGYIKNSPQAAKFKELEDKIADALAFMEACGITAEFNRRLKTVNFWTSHEALLLPFEESMTRVDSTTGEHHDTSAHFVWIGDRTRQLNGGHVEFCRGIENPIGIKCGPTSDPEEIVKICNVINPKNEKGKITLISRFGHDKVEKFLPKLIRKVKKEGIHVVWSCDPMHGNTIKSTTGFKTRPFNKVLSEVKNVFAVHQAEGTFAGGIHIEMTGQNVTECTGEHK

SEQ ID NO: 121211 - protein, 349 aa, Unknown
  Bacterial polypetide isolated from the Sargasso Sea
MIDWKIDSWRKLPIKQVPEYSDLTKVISVEKELSIRPPLVFAEEARRLRKRMADVAEGNAFLLQGGDCAESFAEHNANNIRDSFRVLLQMAVVLTFGSALPVVKIGRLAGQYSKPRSSPFEEINNVSLPSYRGDMVNDMAFDKKAREPDPVRLIQVYDKSASTLNLLRAFASGGMADLTKLHEWNLEFVRGTKEADKYKELASQITASLEFMNACGMTPENTVQLRETEFYTSHEGLLLNYEEALTRKDTITEEKGWFATSAHMLWIGDRTRSIDEAHVEYMRGIANPIGLKCGPSTEPDDLLRLIEKLNPLNQAGRLTLIARMGSSEIHKKLKPLISAVKRSGLVVGW

SEQ ID NO: 121212 - protein, 282 aa, Unknown
  Bacterial polypetide isolated from the Sargasso Sea
MNKTQQDNPDLYDANVIQTQPLPAPTELIEEFPVSNELSNFITTGRNELHNILAGEDDRFVIITGPCSIHDTDAGLDYAKKLKPLVDKYKDKLLVMMRVYFEKPRTTVGWKGLVYDPDLNGTFDMISGLKKARKFLLDVANLGLWSGTEFLDPITPQYFGDLISWGAIGARTSESQTHRQLASGLSMPVGFKNGTGGSIQLAVDGIISSNSKHGFLGVDRSGKASIVTTRGNQDAHLILRGGSDKPNYDAQSVSDAVNKLQDSGANTSIIKNCSHANSFKDH

SEQ ID NO: 121213 - protein, 322 aa, Unknown
  Bacterial polypetide isolated from the Sargasso Sea
NGMDFNEKARVPDAKRLFRAYSQSASTLNLLRAFSQGGFADLRQVHLWNLGFIKDKTKGKYKEIEDKISDALAFMQACGINSDNNRRLRTVNFYTSHEALLLPFEEAMTRVDSTTGEYHDTSAHFVWIGDRTRQPDGAHVEFCRGIKNPLGLKCGPTLKPEELVKLCNILNPKNEPGRMTLISRFGADNVEKYLPKLIKVIKKEGLNVIWSCDPMHGNTIKAATGFKTRPFDNVLKEVKNFFGVHQSEGSYAGGLHVEMTGQDVTECTGGAQKISENELSSRYRTHCDPRLNADQALELAFLISEEIKKNSKYSKKIIQAAS

SEQ ID NO: 121214 - protein, 236 aa, Unknown
  Bacterial polypetide isolated from the Sargasso Sea
MKNWKVNSWRKYPVKHIPTYGDEKELNSVLNKLKTFPPLVFAGETRHLKDQLSKVVDGKAFLLQGGDCAESFAEFHPDNIRDTFKVILQMALVMTYSASLPIVKLGRIAGQFSKPRSAPTEKQGDIELPSYLGDNINAIDFNEKARRPDPKRMYKAYSQSASTLNLLRAFSKGGFADLNKVHLWNLDYIKKSPQAKKFKDLEDKIADALAFMESCGITSDFNNRLYTVNFWTSHEA

SEQ ID NO: 121215 - protein, 286 aa, Unknown
  Bacterial polypetide isolated from the Sargasso Sea
MDKNWTPSSWRKKDASHMPKYMDQKHLNKTLEEISKFPPLVFAGEARLLKEKLKDVSEGNAFLLQGGDCAESFADFHPDNIRDTFKVILQMAVVLTFGASCPIVKVGRIAGQFAKPRSSATETIDNLELESYKGDIINGINFNQKERNPDPDRLIQAYNQSASTLNLLRAFSQGGFANLSKIHQWNLNFVKDENATKFREISNRIDECLSFMEACGINGNSVRQLNETDFFTSHEALLLQYEEALTRIDSTSGKWYDVSAHMLWVGDRTRQLNGAHIEFLKGIENP

SEQ ID NO: 121216 - protein, 344 aa, Unknown
  Bacterial polypetide isolated from the Sargasso Sea
PRSAPTEKKNGKELPSYLGDNINGMDFTEKARVPDAKRLFRAYSQSASTLNLLRAFSQGGFADLRQVHLWNLGFIKDKTKGKYKEIEDKISDALAFMEACGINSDNNRRLRTVNFYTSHEALLLPFEEAMTRVDSTTGEYHDTSAHFVWIGDRTRQPDGAHVEFCRGIKNPLGLKCGPTLKPEELVELCNILNPENEPGRMTLISRFGADNVDKHLPKLIKTVKKEGLNVIWSCDPMHGNTIKAATGFKTRPFDSILKEVKNFFSVHQSEGSYAGGLHIEMTGQNVTECTGGAQKITETDLSNRYRTHCDPRLNADQALELAFLISDEIKKNSKYSKKIIQAAS

SEQ ID NO: 121217 - protein, 336 aa, Unknown
  Bacterial polypetide isolated from the Sargasso Sea
MESELESYKGDIINDMEFTQSSRVPDPQRMIRAYTQSAATLNLLRAFAKGGFSDLNKVHQWNMGFVDESPQGKKFRDLADKISDTLSFMDAIGISSGNTKRLRNVDFFTSHEALLLPYEECLTRTDSTTGEVYDTSAHMVWIGDRTRQLDGAHVEFCRGIKNPIGIKCGPTLDPDELKKLIDVLNPENEAGKITLICRFGVDNVEEKLPKLIGPFANSDYNLVWSCDPMHGNTMKANSGFKTRPFERVIQEVESFFDIHHSLGTYPGGVHLEMTGQNVTECIGGAQAIKDEDLSARYHTHCDPRLNANQALELAFLISDKLRESQEPHKSKIIIAK

SEQ ID NO: 121218 - protein, 356 aa, Unknown
  Bacterial polypetide isolated from the Sargasso Sea
MTKWSANSWRKYKALHIPEYPDQEKLSQVEKQLASFPPLVFAGEARELKRNLGKVSDRKAFLLQGGDCAESFDDFNADYIRDSFKVLLQMSVTLIAAGNCPVVKVGRMAGQFAKPRSAPKEEINGIELDSYKGDIINGMDFDEASRVPDPNRMIQAYTQAAATLNLLRAFAKGGFSDLSKVHQWNMGFVDDSLQGQKYREIANRISDTLEFMEAIGISSKNTKRLRSVDFYTSHEALLLPYEEAMTRLDSTSGEMYDTSAHMVWIGDRTRQPDGAHVEFCRGIKNPIGIKCGPSLDPDELKKLIDIINPENEAGKITLICRFGHDKIRDALPKLVKPFINSDHKLIWSCDPMQEIR

SEQ ID NO: 121219 - protein, 312 aa, Unknown
  Bacterial polypetide isolated from the Sargasso Sea
ERNPDPDRLIQAYNQSASTLNLLRAFSQGGFANLSKIHQWNLNFVKGENATKFQEISNRIDECLSFMEACGINDNTVRQLNETDFFTSHEALLLQFEEALTRIDSTSGKWYDVSAHMLWVGDRTRQIDGAHIEFLRGIENPIGIKVGPSTKTDELLKILDALNPSNEGGKITLICRMGHEKVGNILPNIIKSIQKAGKNVVWTCDPMHGNTIKSNTGYKTRPLKDIISEIHQFFQIHRTEGTYPGGVHLEMTGQDVTECMGGLQEITDEDLQNRYHTYCDPRLNASQSLELAFLLSDFLKEEKLLSKQSSNL

SEQ ID NO: 121220 - protein, 101 aa, Unknown
  Bacterial polypetide isolated from the Sargasso Sea
MQRDPLNNIHIQSEQVMITPAQLKEKLPISDRALAFVQGARNTIADIIHRRDHRLLVICGPCSIHDMDAAKEYATRLKALHDAYQDSLYIVMRVYFEKPRT

SEQ ID NO: 121221 - protein, 379 aa, Unknown
  Bacterial polypetide isolated from the Sargasso Sea
RDYFKVMLQMSLVLTFSASLPVVKLGRVAGQFSKPRSAPTEIKGDKELPSYLGDNINGIEFTEKARTPDPKRLFKAYSQAASTLNLLRAFCHGGFADLKKVHLWNLGYIKKSPQAKKFKELEDKIADALAFMDACGINSDFNRRLKTVNFWTSHEALLLPFEESMTRVDSTTGEYHDTSAHFVWIGDRTRQLDGGHVEFCRGIENPIGIKCGPTSKPDEIVKICNVLNPTNEKGKITLISRFGHSNVEKFLPKLIKAIKKEGLNVIWSCDPMHGNTIKSTTGFKTRPFNNVLKEVKNVFAVHQSEGSYAGGLHIEMTGQNVTECTGGTQRISDNDLSSRYRTHCDPRLNANQALELAFLISDEIKKNSIYAKSGIRAVS

SEQ ID NO: 121222 - protein, 130 aa, Unknown
  Bacterial polypetide isolated from the Sargasso Sea
FYSSGNKDCHVILRGGTEPNYSKEDIDKTAKILKKNNLVESIMVDMSHGNSSKQHKKQLVVCEDIANQISSGEDRITGVMIESNIEEGNQSAKDLDNLVYGKSITDACINWEDTKQCLSQLAKSVSLRNN

SEQ ID NO: 121223 - protein, 213 aa, Unknown
  Bacterial polypetide isolated from the Sargasso Sea
MKNWKVNSWRKYPVKHIPTYDDEKELNDVLDKLKTFPPMVFAGETRHLKEQLAKVVDGKAFLLQGGDCAESFAEFHPDNIRDTFKVILQMSLVLTYSASLPVVKLGRIAGQFSKPRSAPTEKQGDKELPSYLGDNINAIDFTEKARRPDPKRLFKAYSQSASTLNLLRAFSKGGFADLNKVHLWNLDYIKKSPQAKKFKELEDKIADALGFMD

SEQ ID NO: 121224 - protein, 459 aa, Unknown
  Bacterial polypetide isolated from the Sargasso Sea
MKKWKINSWRNYPVKHIPNYGDEKELNMVLGKIKNFPPLVFAGETRHLKQQLAEVAEGKAFLLQGGDCAESFVEFNPDNIRDYFKVILQMSLVLTYSASLPVVKLGRIAGQFSKPRSAPTEKQGDKELPSYLGDNINGIEFTEKSRRPDPKRLFKAYSQSASTLNLIRAFCHGGFADLKKVHLWNLGYIKKSPQAKKFKELEDKISDALAFMDACGINSDFNRRLKTVNFWTSHEALLLPFEESMTRVDSTTGEYHDTSAHFVWIGDRTRQLDGGHVEFCRGIENPIGIKCGPTSKPDEIVKICNLINPRNEKGKITLISRFGHENVEKFLPKLIRIIKKEGINVIWSCDPMHGNTIKSTTGFKTRPFNNVLKEVKNVFGVHQSEGSYAGGLHIEMTGQNVTECTGGTQKISDKDLSSRYRTHCDPRLNANQALELAFMISDEIKKNSIYARNGIKAAS

SEQ ID NO: 121225 - protein, 459 aa, Unknown
  Bacterial polypetide isolated from the Sargasso Sea
MKKWKINSWRNYPVKHIPVYEDEKELNMVLGKIKDFPPLVFAGETRHLKQQLAEVVDGKAFLLQGGDCAESFAEFSPDNIRDYFKVMLQMSLVLTYSASLPVVKLGRIAGQFSKPRSAPTEKKGDVELPSYLGDNINGIEFTNKSRKPDPKRLFKAYSQAASTLNLIRAFCHGGFADLKKVHLWNLGYIKKSPQAKKFKELEDKIADALAFMDACGINSEFNRRLKTVNFWTSHEALLLPFEESMTRIDSTTGEYHDTSAHFVWIGDRTRQLDGGHVEFCRGIENPIGIKCGPTSKPDEIAKIINVINPKNEKGKITLISRFGHDKVEKFLPKLIRGIKKEGHNVVWSCDPMHGNTIKSATGFKTRPFNNVLNEVKKVFAIHQSEGSYAGGLHIEMTGQNVTECTGGTQKISEQDLSSRYRTHCDPRLNANQAIELAFLISDEIKKNSNNAKSGIRAVS

SEQ ID NO: 121226 - protein, 281 aa, Unknown
  Bacterial polypetide isolated from the Sargasso Sea
AIEYAERLSIENKKFSENILLVMRVYFEKPRTTVGWKGLINDPDINETYNIAKGLEMARKLLIEIAELGLPAGTEFLDPISPQYVTDIISWGAIGARTAESQIHRELASGLSCPIGIKNGTDGGLKAAIDGIQAANHSHVFLGATKEADIAMLKTAGNNDAHIILRGGKVPNFDKESVENTLTALKEAEVNESIMIDASHGNSQKKFKQQIPVIDSICEQISDGNKNIKGVMIESHLNEGNQKITEKLNYGQSITDACMGWDDTVMCLSKLNDAINLKRGK

SEQ ID NO: 121227 - protein, 315 aa, Unknown
  Bacterial polypetide isolated from the Sargasso Sea
MKKWKINSWRNYPVKHIPTYEDENELNLVLNKLKKFPPLVFAEETRHLKRQLSDVADGKAFLLQGGDCAESFAEFNPDNIRDTFKVILQMSLILTYSASLPVVKLGRIAGQFSKPRSAPTEKQGDKELPSYLGDNINGIQFNEKSRRPDPKRLFKAYSQSASTLNLLRAFSKGGFADLNKVHLWNLDYIKKSPQAKKFKDLEDKIADALAFMKACGITSDFNNRLYTVNFWTSHEALLLPFEETMTRVDSTTGEYHDTSAHFVWIGDRTRQLDGGHVEFCKGIENPIGIKCGPTSKPDEIAKICNAINPRKKKEK

SEQ ID NO: 121228 - protein, 255 aa, Unknown
  Bacterial polypetide isolated from the Sargasso Sea
MKKWTLNSWTKYPAKHLPNYVDKKELELVLSKIQKYPPLVFAGETRSLKKALSEVVEGKAFLLQGGDCAESFAEFHPDNIRDTLKVILQMSLVLTASASVPVVKVGRIAGQFSKPRSAPTEKKDGKELPSYLGDNINGMDFNEKSRVPDAKRLFRAYSQSASTLNLLRAFSQGGFADLRQVHLWNLGFIKDKTKGKYKEIEDKISDALAFMQACGINSDNNRRLRTVNFYTSHEALLLPFEEAMTRIDSTTERVP

SEQ ID NO: 121229 - protein, 380 aa, Unknown
  Bacterial polypetide isolated from the Sargasso Sea
FEEFSADLIRDTFKVLLKMAVVLTFGGKKPVIKIGRMAGQFAKPRSSDFEIINGQKLPSYRGDIINDIKPTIEHRLPKPERMLKAYTQSSSTLNLLRAFSQGGFADISRVHSWVLESTKGQVGYQKFFDLATKITNSLEFMSAAGVNSENSDSLRKVDFYTSHEALLLEYEEALCRLDSTTGLPVAGSGHMIWIGDRTRQIDGAHVEFCKGVQNPIGLKCGPSTDPDELIQLCKILNPENESGRLTLITRFGSDLISDHLPKIINSVKNAKLRVVWSCDPMHGNTIKSSNGYKTRPFEKILAEVKTFFKIHMSEGTFPGGVHVEMTGKDVTECTGGIKSIDDEDLHSRYHTACDPRLNASQSLELAFLIAEELEAFFQNS

SEQ ID NO: 121230 - protein, 100 aa, Unknown
  Bacterial polypetide isolated from the Sargasso Sea
GSGITPNIIIDCSHGNSNKDHTKQATAFKDVVSQKARGNSSIVGSMLESNINEGNQKLTSDPSELLHGVSITDACINWDENTELLHWAFDALGEANKVTA

SEQ ID NO: 121231 - protein, 154 aa, Unknown
  Bacterial polypetide isolated from the Sargasso Sea
MTKIVDDLRIVSEQLLSPPAVLKQALPLSGAGSDFIQKSRQEIADIVHGRDPRLLVITGPCSIHDPVSAMDYARRLKQLQLQYKDTLYIVMRVYFEKPRTTVGWKGFINDPHLDDSFDLETGLTKGRRLLLDLVEMELPAATEALDPISPQYLS

SEQ ID NO: 121232 - protein, 240 aa, Unknown
  Bacterial polypetide isolated from the Sargasso Sea
YDINTGLRRARGLLLDLAREGMPAATELLDPVVPQYIADLISWTAIGARTTESQTHREMASGLSMPIGYKNSTDGSATIAINAMQAASKPHHFLGINHDGHASIVSTTGNPDGHLVLRGGYQGSNYHLEAVQAAAAELSKAGLKDRLMVDCSHANSNKDFRRQADVLATVADQLKAGSAHVMGVMIESHLVEGNQKLTADLSQLTYGQSITDACISLETTDALLSQLAAAVAERSSVVTA

SEQ ID NO: 121233 - protein, 455 aa, Unknown
  Bacterial polypetide isolated from the Sargasso Sea
MKNWKINSWRKYPVKHQPIYDDEKELDVVLNKLKTFPPLVFAGETRHLKNQLSEVVDGKAFLLQGGDCAESFAEFHPDNIRDTFKVILQMSLVLTYSASLPVVKLGRIAGQFSKPRSAPTEKQGDKELPSYLGDNINAIDFNEKARRPDPKRLFKAYSQSASTLNLLRAFSKGGFADLNKVHLWNLDYIKKSPQSKKFKELEDKIADALAFMEACGITSDFNNRLYTVNFWTSHEALHLPFEESMTRIDSTTGEYHDTSAHFVWIGDRTRQLDGGHVEFCRGIENPIGIKCGPTSKPDEIAKICEAINPKNEKGKITLISRFGHQNVEKFLPKLIRGIKKEGLNVLWSCDPCHGNTIKASTGFKTRPFNDVVKEVKNVFAVHQAEGSYAGGLHVEMTGQDVTECTGGAKKISDTDLSSRYHTHCDPRLNSDQAIELAFLISDEIKKNSLYSRICN

SEQ ID NO: 121234 - protein, 86 aa, Unknown
  Bacterial polypetide isolated from the Sargasso Sea
KVMIDCSHGNSNKDFRKQSEVLKNIASQISNGEKNILGVMLESHLKEGNQKLLKKEDLQFGRSITDACIDIETTKELLAILYNSLS

SEQ ID NO: 121235 - protein, 61 aa, Unknown
  Bacterial polypetide isolated from the Sargasso Sea
KSGETRITGVMIESNLEEGNQKADDLDNLTYGKSITDACINWKDTKDCLYRLAESVRDRNK

SEQ ID NO: 121236 - protein, 446 aa, Unknown
  Bacterial polypetide isolated from the Sargasso Sea
MSKWTKNSWENFTVKHIPEYKDKDALKKALKKIEKFPPLVFAGECNSLKQKLASAVEGKAFLIQGGDCAESFKEFNANNIRDTFRVILQMSAIFTAKMKVPIIKVGRIAGQFAKPRSSDFETVNDKTLPSYFGDSINSIEFSEEKREPNPSRLLRAYSQSASTLNLIRSFAQGGFANLRKVNSWNMGFVKATPEGRKYEKIANQINEYLDFIEAIGVNTSSVDYLNSVDFYTSHEALHLPFESALTRTDSISGKTFATSSHMVWIGDRTRFLDSAHVEYCSGIDNPIGIKCGPSLDPVELIKIIDKINPDNEVGKISLIFRYGENKVQEHLPSLIDEIIKNGKKVLWISDPMHGNTVKSSSGLKTRDFSSLLNETSQAISILKDKGCHLGGIHLEMTGQNVTECTGGIYKLSDEDLNSRYHTHCDPRLNANQALELSFNIAEELKK

SEQ ID NO: 121237 - protein, 342 aa, Unknown
  Bacterial polypetide isolated from the Sargasso Sea
MKKWNLNSWTNFPAKHLPVYKDKEELDLVLSKIKKYPPLVFAGESRSLKKSLAEVAEGKAFLLQGGDCAESFAEFHPDNIRDTFKVLLQMSLVLTASASVPVVKVGRIAGQFSKPRSAPTEKKDGKELPSYLGDNINGMEFTEKARIPDAKRLFRAYSQSASTLNLLRAFSQGGFADLRQVHLWNLGFIKDKTKGKYKEIEDKISDALSFMEACGINSDNNRRLRTVNFYTSHEALHLPFEESMTRVDSTTGEYHDTSAHFVWIGDRTRQTDGAHVEFCRGIKNPIGLKCGPTLKPEELINLCNILNPENEAGRLTLISRFGADNVQKYLPKLMQAIKKGGS

SEQ ID NO: 121238 - protein, 230 aa, Unknown
  Bacterial polypetide isolated from the Sargasso Sea
MKKWKLNSWRNYPVKHIPTYEDEKELNMVLNKIRNFPPLVFAGETRHLKQQLADVVDGKAFLLQGGDCAESFAEFNPDNIRDYFKVMLQMSLVLTYSASLPVVKLGRIAGQFSKPRSAPTEKQSDKELPSYLGDNINGIEFNAKARKPDPKRLFKAYSQAASTLNLLRAFCHGGFADLKKVHLWNLGYIKKSPQAKKFKELEDKIADALAFMDACGINSDFNRRLKTVNF

SEQ ID NO: 121239 - protein, 117 aa, Unknown
  Bacterial polypetide isolated from the Sargasso Sea
IVLRGGSKGPNFESQYVQRISAELKQCNLPHKVMIDCSHGNSNKDFRKQSEVLKNIASQISNGEKNILGVMLESHLKEGNQKLLKKEDLEFGRSITDACIDIETTKELLAILYKSVN

SEQ ID NO: 121240 - protein, 306 aa, Unknown
  Bacterial polypetide isolated from the Sargasso Sea
FKAYSQSASTLNLLRAFSKGGFADLNKVHLWNLDYIKKSPQSKKFKELEDKIADALAFMDACGITSDFNNRLYTVNFWTSHEALHLPFEESMTRVDSTTGEYHDTSAHFVWIGDRTRQLDGGHVEFCKGIENPIGIKCGPTSKPDEIAKICEVINPKNEKGKITLISRFGHQNVEKFLPKLIRGIKKEGLNVVWSCDPMHGNTIKSTTGFKTRPFNDVVSEVKNVFAVHQAEGSYAGGLHVEMTGQDVTECTGGAKKISDADLSSRYHTHCDPRLNSDQAIELAFLISDEIKKNSLYSKTAIKAAS

SEQ ID NO: 121241 - protein, 263 aa, Unknown
  Bacterial polypetide isolated from the Sargasso Sea
MHNTSDLRISGRQEVISASSLLDKQPISDLSSQTVFNSRKEFSEILSKKDKRLAVVVGPCSIHDTESAMEYANLLLKEKKALEKELLIIMRVYFEKPRTTVGWKGLINDPDLDNSFNIDKGLSVSRQLLRDINDLGMPAGTEFLDVITPQYIADLISWGAIGARTTESQIHRELASGSSCPIGFKNATNGGIQVAADAIGSALHPHKFLSVTKEGKAAIFSSSGNKDCHVILRGGKDPNYEKEFIDQTSEILKSNSLLRFNHG

SEQ ID NO: 121242 - protein, 242 aa, Unknown
  Bacterial polypetide isolated from the Sargasso Sea
GTFDVELGLHRARELLCWLAELELPLATEALDPISPQYLAELFSWSAIGARTTESQTHREMASGLSMPVGFKNGTDGNLGTAINALQAASSPHAFMGINQQGQVALLQTQGNPDGHVILRGGKHPNYDSVNVSLAEEALEKAGLLPGLVVDCSHGNSSKDHRLQPKVADNVIHQIQEGNRSIIGVMLESNLFEGNQSSEQPKCEMRYGVSITDACIDWETTDALLARCHSQLAAPLLARTKV

SEQ ID NO: 121243 - protein, 154 aa, Unknown
  Bacterial polypetide isolated from the Sargasso Sea
MKSKIHNINVVAKEKLPSPKALKDTLPLSNKARKTVLSKRKELMSILDGKDSRLVVVVGPCSIHDTDLAKDYASRLKDLSKEVEDAFLILMRVYFEKPRTTTGWKGLINDPNIDDTFQIDKGIHIARSLLIDLNEMGLGVATEALDPIMPQYLG

SEQ ID NO: 121244 - protein, 177 aa, Unknown
  Bacterial polypetide isolated from the Sargasso Sea
HRVKDLSERVAGNLYLVMRVYFEKPRTTVGWKGLINDPNLDDSFEIENGLTIGRTLLRDILTLGLPTATEALDPITPQYLHDLISWSAIGARTTESQTHREMASGLSSPVGFKNGTDGGLAVAVNALQSVANPHRFLGINSEGKVSVFETSGNRYGHIVLRGGQSWPELSRRADRSM

SEQ ID NO: 121245 - protein, 295 aa, Unknown
  Bacterial polypetide isolated from the Sargasso Sea
MNYSTDNTRIVDRKKVPAPYELVNKYPINDEISKLVYGTRNEISQILHHKDDRIFVVVGPCSIHDPQSAIEYAERLSIENKKFSENILLVMRVYFEKPRTTVGWKGLINDPDINETYNIAKGLEMARKLLIEIAELGLPAGTEFLDPISPQYVTDIISWGAIGARTAESQIHRELASGLSCPIGIKNGTDGGLKAAIDGIQAANHSHVFLGATKEADIAMLKTAGNNDAHIILRGGKVPNFNKESIENTLTALKEAEVNESIMIDASHGNSQKKFKQQIPVIDSICEQISDGNKI

SEQ ID NO: 121246 - protein, 314 aa, Unknown
  Bacterial polypetide isolated from the Sargasso Sea
DKVDLVTPNDVISKYPLTDEISKLVYGTRNEVSQILHGKDDRLIAVVGPCSIHDPDSAEEYAKLLIDEKKKYEEDILLIMRVYFEKPRTSIGWKGLINDPDMDNTFDANKGLFLARSILHKISQLGLPVGTEFLDPISPQFVADLISWGAIGARTAESQIHRELASGLSCPIGFKNGTTGDLNPAIFGMKASNHSHVFFSNTKEGMVSIYKTSGNSDTHIILRGGTKPNLYPDDIRETIDALNEAKANDSIMIDVSHGNSQKVFKRQLENIGVVSKQISDGMNEIRGVMIESHLREGNQKIGEDLEYGASVTDA

SEQ ID NO: 121247 - protein, 176 aa, Unknown
  Bacterial polypetide isolated from the Sargasso Sea
MNYSTDNTRIIDRRKVPAPYELVNKHPIDDQIAKLVYGTRNEVSQILHDKDDRVFVVVGPCSIHDPESALEYAQKLVTESQKYSENLLIIMRVYFEKPRTTVGWKGLINDPDINETFNISKGIEMARKLLINIAKLGLPAGTEFLDPISPQYVTDVISWGAIGARTAESQIHRELA

SEQ ID NO: 121248 - protein, 202 aa, Unknown
  Bacterial polypetide isolated from the Sargasso Sea
MNYSTDNTRIIDKVDLVTPNDVISKYPLTDEISKLVYGTRNEVSQILHGKDDRLIAVVGPCSIHDPDSAEEYAKLLIDEKKKYEEDILLIMRVYFEKPRTSIGWKGLINDPDMNNTFDANKGLFLARSILHKISQLGLPVGTEFLDPISPQFVADLISWGAIGARTAESQIHRELASGLSCPIGFKNGTTGDLNPAIYGMKA

SEQ ID NO: 121249 - protein, 321 aa, Unknown
  Bacterial polypetide isolated from the Sargasso Sea
NKHPINDEISKLVYGTRNEISQILHDKDDRLFVVVGPCSIHDPESAIEYAERLNEESKKFNENLLLIMRVYFEKPRTTVGWKGLINDPDINETFNIAKGVEIARKLLIDIANLGLPAGTEFLDPISPQYVTDVISWGAIGARTAESQIHRELASGLSCPIGIKNGTDGGLKAAIDGIQAANHSHVFLGATKEADIAMLKTAGNIDTHIILRGGKTPNYDKDSVENTLIALREAEVNESIMIDASHGNSQKKFKKQIPVIDSISNQIIEGNKNIKGIMIESHLNEGNQKISDNLKYGQSITDACMGWEDTIKCLENLNTAVD

SEQ ID NO: 121250 - protein, 166 aa, Unknown
  Bacterial polypetide isolated from the Sargasso Sea
MNYLTDNTRIVDRKKVPAPYELVNKYPINDEISKLVYGTRNEISQILHDKDDRIFVVVGPCSIHDPQSAIEYAERLSIENKKFSENILIVMRVYFEKPRTTVGWKGLINDPDINETYNIAKGVEMARKMLIEIAELGLPAGTEFLDPISPQYVTDIISWGAIGART

SEQ ID NO: 121251 - protein, 295 aa, Unknown
  Bacterial polypetide isolated from the Sargasso Sea
AIVGPCSIHDPDSAEEYAKLLIDEKKKYEEDILLIMRVYFEKPRTSIGWKGLINDPDMDNTFDANKGLFLARSILHKISELGLPVGTEFLDPISPQFVADLISWGAIGARTAESQIHRELASGLSCPIGFKNGTTGDLNPAIYGIKASNHSHVFFSNTKEGMVSIYKTSGNSDTHIILRGGTEPNLHPEDIRETINALQEAEANDSIMIDVSHGNSQKVFKRQLENIGIVSKQVSDGMNEIRGVMIESHLKEGNQKIGNDLQYGQSITDACINFEDTKQCLSELSSAVPARRSKS

SEQ ID NO: 121252 - protein, 141 aa, Unknown
  Bacterial polypetide isolated from the Sargasso Sea
MESIYHTDNTRIVEKFDLITPNNVISEYPLTDEISKLVYGTRNEASQILHGKDDRVLVICGPCSIHDPISAMEYAQLLKEARDSLSADLLIIMRVYFEKPRTTVGWKGLINDPDINESYDANKGLMLARKILRDITALGLP

SEQ ID NO: 121253 - protein, 212 aa, Unknown
  Bacterial polypetide isolated from the Sargasso Sea
MIKDTVNNVHVSTEDVLITPEALSAELPVSDKALAAISESRKIVSDIIHRRDHRLLVVCGPCSIHDVEAAKEYALKLKELHESCKDTLFIVMRVYFEKPRTTTGWKGLINDPHIDGTFDIETGLRKARELLIWLAELELPVATEALDPISPQYLAELFSWAAIGARTSESQTHREMASGLSMPVGFKNGTDGSLDIAINALKSAASGHRFMG

SEQ ID NO: 121254 - protein, 313 aa, Unknown
  Bacterial polypetide isolated from the Sargasso Sea
MNYSTDNTRIIDRRKVPAPYELVNKHPIDDQIAKLVYGTRNEVSQILHDIDDRVFVVVGPCSIHDPESAFEYAQKLVTESQKYSENLLIIMRVYFEKPRTTVGWKGLINDPDINETFNISKGIEMARKLLIDIAKLGLPAGTEFLDPISPQYVTDVISWGAIGARTAESQIHRELASGLSCPVGIKNGTSGSLKAAIDGIQAANHSHVFLGATKESDIAMLKTAGNNDVHIILRGGKVPNYDKESVENTLTALKEAEVNESIMIDASHGNSQKKFKQQIPVIQSISEQIAEGNENIKGVMIESHLNEGNQKNR

SEQ ID NO: 121255 - protein, 206 aa, Unknown
  Bacterial polypetide isolated from the Sargasso Sea
ATETLDPITPQYLADLISWSAIGARTTESQTHREMASGLSMPVGFKNGTDGGLSVAINAMKSALQPHHFLGINNEGLSSAIQTSGNNNVHLVLRGGNNGPNYDALSIQKASASLASEGLPKSIMIDCNHANSGKDPSRQELVLRDAIHQIKTGDKSIIGIMIESNINGGNQPISASLKYGVSITDACLDWENTERIILNAHQSLST

SEQ ID NO: 121256 - protein, 130 aa, Unknown
  Bacterial polypetide isolated from the Sargasso Sea
MTTSSNNSALEKTSDLHVVETRPLIPPSRLHNDIPLDHASANTVSKTRRSIQNILHHDDKKLLVIVGPCSIHDIEAAKEYSKYIQDFREIYKDKLEIIMRVYFEKPRTTIGWKGLINDPHLDDSYDINTG

SEQ ID NO: 121257 - protein, 184 aa, Unknown
  Bacterial polypetide isolated from the Sargasso Sea
MSKFISNEIINTNVEIMKELITPNYLHTCFPNTGKIANFVKKNREEIRNILNGEDVRKLMIVGPCSIHNIEMAKEYGRELLKIAEKYKDKIKIVMRVYFEKPRTTVGWKGLINDPDMNGTFNINKGLKMARDLLLYLNLIGVPCGYEILDTFTAQYIGDLISWGAIGARTTESQVHRQMVSGLS

SEQ ID NO: 121258 - protein, 254 aa, Unknown
  Bacterial polypetide isolated from the Sargasso Sea
MYITDNSRILSREELSTPEEIINELPISKDNSKLVFGARRNISKILHNLDDRMIVVVGPCSIHDPESALEYASLLKGFSETVENEILIIMRVYFEKPRTTIGWKGLINDPQLDNSFKINDGLRVARKVLRDISEIGLPAGTEFLDLISPQYISDLVSWGAIGARTSESQVHRELTSGLSCPVGIKNSTNGEFKPAIDGIKSAQFQHVFLGTTKKGKVAIFKTSGNDDTHIILRGGKQPNYHAEAVNKCIEELNS

SEQ ID NO: 121259 - protein, 189 aa, Unknown
  Bacterial polypetide isolated from the Sargasso Sea
WTAIGARTTESQTHREMASGLSMPIGFKNGTDGSFATAINAMQSASKSHHFLGVNENGMASIVNTTGNPDGHIVLRGGSKGPNFESEHVQRISSELQQCNLPHKVMIDCSHGNSNKDFRKQSEVLKNIASQISNGEKNILGVMLESHLKEGNQKLLKKENLQFGRSITDACIDIETTKELLATLYNSLS

SEQ ID NO: 121260 - protein, 113 aa, Unknown
  Bacterial polypetide isolated from the Sargasso Sea
MSIHTDELRTRRLEALITPSELAHAFPLTDTIAQNLLDARRQVEAILSGEDQRLLVIVGPCSIHDPAAAHEYALRLNTLREEYKESLCIVMRTYFEKPRTIVGWKGLINDPRL

SEQ ID NO: 121261 - protein, 258 aa, Unknown
  Bacterial polypetide isolated from the Sargasso Sea
SPYYPQELKATLPLSEHAYRYILNARKTVADIVHKRDHRVLIVTGPCSIHDIDAAKEYALKLKKLHDELSDEFYILMRVYFEKPRTTVGWKGMINDPDMDESFDVEKGLKMARELMIWLAELELPVATEALDPISPQYISELVTWSAIGARTTESQTHREMASGLSMPVGFKNGTDGKLDVAINALKSAASSHRFMGINQQGQVALLQTAGNPDGHVILRGGVTPNYDAASVAECEAQLHKAKLNARLIIDCSHGNSL

SEQ ID NO: 121262 - protein, 180 aa, Unknown
  Bacterial polypetide isolated from the Sargasso Sea
MTRTENVNIVEVLPITSPKKLKDLLPLSDKVIDNVLNARNDIKKILAGKDSRLLIIVGPCSIHDPHAAIEYAERLKKLADEVSETVLIVMRVYFEKPRTTVGWKGLINDPELDGSHKINKGIELARKLLQKINALGLPCATETLDPITPQYLADLISWSAIGARTTESQTHREMASGLSM

SEQ ID NO: 121263 - protein, 228 aa, Unknown
  Bacterial polypetide isolated from the Sargasso Sea
MENIRDINIKDYSPITPPKVFIDEIPISKKSENIVSDSRKIISDIVHGKDNRILLITGPCSIHDVDAGLEYAKLLTEFSKSIKNFYIVMRVYFEKPRTTIGWKGLINDPDLNNTFNMDKGLRKARTFLNDVTSLGMPTATEFLDPFTPQYLADFVSWGAIGARTTESQTHRQMASGLSMPVGFKNGTGGSIQIAVDAMGAAQGEHAFLGINEDGQSSIIHTTGNKYSH

SEQ ID NO: 121264 - protein, 272 aa, Unknown
  Bacterial polypetide isolated from the Sargasso Sea
MNYSTDNTRIIDRKKVPAPYELVNKYPINDEISKLVYGTRNEISQILHNKDDRLFVIVGPCSIHDPKSAIEYAEMLSNENKKYNENLLVIMRVYFEKPRTTVGWKGLINDPDINETYNIAKGVEMARKLLIDIADLGLPAGTEFLDPISPQYVTDIISWGAIGARTAESQIHRELASGLSCPIGIKNATNGGLKAAIDGIQAANHSHVFLGATKEADIAMLKTAGNNDTHIILRGGKVPNFDKESVEQTLTALKEAEVNESIMIDASHGNSQ

SEQ ID NO: 121265 - protein, 176 aa, Unknown
  Bacterial polypetide isolated from the Sargasso Sea
ASGLSMPIGFKNGTDGGVTVAINAMQAAARPHHFLGINRQGHASIVSTTGNPDGHLVLRGGGGNTNYHAESINSVAETLKAAGLPHRVMVDCSHGNSNKDYRRQSEVLESVAQQVRGGSRSVLGVMLESNIVAGNQKLPADLSQLTYGQSITDACIDLATTESLLEQLAAAVPVAV

SEQ ID NO: 121266 - protein, 294 aa, Unknown
  Bacterial polypetide isolated from the Sargasso Sea
VVVGPCSIHDPESAIEYAERLTEESKKFNENLLLIMRVYFEKPRTTVGWKGLINDPDINESFNIAKGVEIARKLLIDIANLGLPAGTEFLDPISPQYVTDVISWGAIGARTAESQIHRELASGLSCPIGIKNGTDGGLKAAIDGIQAANHSHVFLGATKEADIAMLKTAGNIDTHIILRGGKTPNYDKDSVENTLIALREAEVNESIMIDASHGNSQKKFKEQIPVIDNISNQIIEGNKNIKGIMIESHLNEGNQKISDNLKYGQSITDACMGWEDTIKCLENLNAAVDKKRGN

SEQ ID NO: 121267 - protein, 179 aa, Unknown
  Bacterial polypetide isolated from the Sargasso Sea
ISPALLLDELPVPAATQTLVEDTRRAIGDILHGRDDRLLLVVGPCSIHDHDQALDYARRLKAAADALKDDLLITMRVYFEKPRTTVGWKGYINDPRLDGSFRINEGLRAARQLLLDINALGLPASTEFLDLLSPQYIADLIAWGAIGARTTESQSHRQLASGLSCPIGFKNGTDGGVQV

SEQ ID NO: 121268 - protein, 156 aa, Unknown
  Bacterial polypetide isolated from the Sargasso Sea
MKSKIHNINVVAKEKLPSPKALKDTLPLSTKSRKTVLSKRKELMSILDGNDSRLVVVVGPCSIHDTNLAKDYALRLKELSKEVEDAFLILMRVYFEKPRTTTGWKGLINDPNIDDTFQIDKGIHIARSLLIDLNEMGLGVATEALDPIMPQYLGDL

SEQ ID NO: 121269 - protein, 205 aa, Unknown
  Bacterial polypetide isolated from the Sargasso Sea
TRNEVSQILHGKDDRLIAVVGPCSIHDPDSAEEYAKLLIDEKKKYEEDILLIMRVYFEKPRTSIGWKGLINDPDMDNTFDANKGLFLARSILHKISQLGLPVGTEFLDPISPQFVADLISWGAIGARTAESQIHRELASGLSCPIGFKNGTTGDLNPAIYGMKASNHSHVFFSNTKEGMVSIYKTSGNSDTHIILRGGTKPNLYP

SEQ ID NO: 121270 - protein, 283 aa, Unknown
  Bacterial polypetide isolated from the Sargasso Sea
MEKIRDLNIKNYSPITPPKNFMDEIPISENSKKVVSESRNIISNIVHGKDKRFLLITGPCSIHDVEAGLEYAKLLTEFSKKIKNFYLVMRVYFEKPRTTVGWKGLINDPDLNNTFDMDKGLKKARTFLNDVTSLGMPTATEFLDPFTPQYLADFVSWGAIGARTTESQTHRQMASGLSMPIGFKNGTGGSIQIAVDAMGAAQGEHAFLGINELGQSSIIQTLGNKYSHLILRGSTQGTNFDEKSVSDAINLVSNQGMHPSVVVDWSHANCGKDHKKMNISFRE

SEQ ID NO: 121271 - protein, 151 aa, Unknown
  Bacterial polypetide isolated from the Sargasso Sea
MTTSSNNQSLEKTSDLHVVETRPLIPPIKLHNDIPLDYTSAETVSKTRRSIQNILHKNDPRILVIVGPCSIHDVEAAKEYSEYIQEFRKIYKDRLEIVMRVYFEKPRTTIGWKGLINDPHLDGSYDINTGLRRARNLLSYLATRGIPSATE

SEQ ID NO: 121272 - protein, 198 aa, Unknown
  Bacterial polypetide isolated from the Sargasso Sea
MHKTSDLRISGRQEVISASSLLDQQPISDISSQIVFNSRKEFSEILSKKDKRLAVVVGPCSIHDTESAMEYANLLLKEKKALEKELLIVMRVYFEKPRTTVGWKGLINDPDLDNSFNIDKGLSVSRQLLRDINDLGMPAGTEFLDVITPQYIADLISWGAIGARTTESQIHRELASGSSCPIGFKNATNGGIQVAADA

SEQ ID NO: 121273 - protein, 268 aa, Unknown
  Bacterial polypetide isolated from the Sargasso Sea
EIGDIINETSDKFLILVGPCSIHDVQACLEYANKLKTLSDQVNDKIMIVMRTYFEKPRTTTGWKGFINDPNLNDSFDVHEGLKKARGFLNQILHIGLPTATEFLDPFMPQYYGDLISWGAIGARTVESQTHRQLSSGLSMPIGFKNGTGGSVQIAIDAIIAAKNQHVFLGIDEKGQTSVVKTSGNKYGHLILRGGKTGPNYDSKSVESAVNSLIENKLDPKLVIDCSHGNSNKDHKNQSKVFKSIMEQKKSGQNAIFGVMLESHLNPR

SEQ ID NO: 121274 - protein, 303 aa, Unknown
  Bacterial polypetide isolated from the Sargasso Sea
MTKNWSKDSWRSKPILQVPEYDDLDQLKKVESRLTSYPPLVFAGEARRLKENLAKVSRGEAFLLQGGDCAESFAEHNPDNIRDTFRVILQMAIVLTFGAGCPVIKVGRIAGQFAKPRSAPLEKQEEIELPSYRGDIINNIEFVEDLRIPDPERQIMAYRQSASTLNLLRAFAQGGYANLDHVHKWNMGFVKESKQGEQYEQVANRISETLDFMNAVGINSDTTPELRSVDFYTSHESLLLGYEECLTRVDSTSGDWYDTSAHMLWIGDRTRQPDGAHIEFVRGIKNPIGMKCGPSLDPDELLN

SEQ ID NO: 121275 - protein, 195 aa, Unknown
  Bacterial polypetide isolated from the Sargasso Sea
MIQTEDLNVTGVNPLTAPKYIKVEYPISDKASETVFKFRKQIKDVLDEKDSRQLVIVGPCSIHHADIALDYADKLTKLIPEVEDKLLVVMRVYFEKPRTTVGWKGLINDPDLDGSHKIEKGIKLARKILLNINEMGIPCATETLDPITPQYLADLISWSAIGARTTESQTHREMASGLSMPVGFKNGTDGGLEVA

SEQ ID NO: 121276 - protein, 231 aa, Unknown
  Bacterial polypetide isolated from the Sargasso Sea
MVCRVEQVTNLRITDSVTLPSPVELRGEIPRSTEQKAFVTQSRRELHALIHGEDKRLLAVVGPCSIHDLKSCREYAERFAKLSAELKDRLLLVMRVYFEKPRTTVGWKGLIMDPKLNGTCDIPEGLRIARGFLGEVLDLGIPTATELLDPITPQFISDSLCWAAIGARTSESQTHRQMASGLSMPVGFKNATAGDLKAAVNGIIAATQSQTFLGITEDGKASAVTTGGNPD

SEQ ID NO: 121277 - protein, 239 aa, Unknown
  Bacterial polypetide isolated from the Sargasso Sea
NDPHLDNSYDINTGLRRARSLLSYLATRGIPSATELLDPIVPQYIADLISWTAIGARTTESQTHREMASGLSMPIGFKNGTDGSFTTAINAMQSASKSHHFLGVNENGMASIVNTTGNPDGHIVLRGGSKGPNFESEHVKRISSELKQSNLPHKVMIDCSHGNSNKDFRKQSEVLKNVASQIKIGEKNILGVMLESHLKEGNQKLLKKEDLQFGRSITDACIDIETTKELLAILYNSLS

SEQ ID NO: 121278 - protein, 273 aa, Unknown
  Bacterial polypetide isolated from the Sargasso Sea
MNYSTDNTRIIDRKKVPAPYELVNKYPINDEISKLVYGTRNEISQILHDKDDRLFVVVGPCSIHDPQSAIEYAEKLSIENKKLSENILIIMRVYFEKPRTTVGWKGLINDPDINETYNIAKGVEMARKLLIEIAELGLPAGTEFLDPISPQYVTDIISWGAIGARTAESQIHRELASGLSCPIGIKNGTDGGLKAAIDGIQAANHSHVFLGATKEADIAMLKTAGNNDAHIILRGGKVPNFDKESVENTLTALKEAEVNESIMIDASHGNSQK

SEQ ID NO: 121279 - protein, 187 aa, Unknown
  Bacterial polypetide isolated from the Sargasso Sea
MTKNWSKDSWRSKPILQVPEYDDLDQLKKVESRLTSYPPLVFAGEARRLKENLAKVSRGEAFLLQGGDCAESFAEHNPDNIRDTFRVILQMAIVLTFGAGCPVIKVGRIAGQFAKPRSAPLEKQGEIELPSYRGDIINNIEFVEDLRIPDPERQIMAYRQSASTLNLLRAFAQGGYANLDHVHKWDM

SEQ ID NO: 121280 - protein, 180 aa, Unknown
  Bacterial polypetide isolated from the Sargasso Sea
MKSKIHNINVVAKEKLPSPKALKDTLPLSNKARKTVLSKRKELMSILDGKDSRLVVVVGPCSIHDTDLAKDYASRLKELSKEMEDAFLILMRVYFEKPRTTTGWKGLINDPNIDDTFQIDKGIHIARSLLIDLNEMGLGVATEALDPIMPQYLGDLTSWTAIGARTAESQTHREMASGLS

SEQ ID NO: 121281 - protein, 276 aa, Unknown
  Bacterial polypetide isolated from the Sargasso Sea
ILSSDDPRLLAIVGPCSIHDPIAAIDYAYRLLEMARKLEEDLVIVMRVYFEKPRTTVGWKGLINDPGLDDTFEINRGLRVARKLLLDLSDMGLPTGTEYLDLISPQYIADLISWGAIGARTTESQTHRELASGLSCPVGFKNATNGDIQVAIDAIGSAIKPHHFLSVTKSGHSAIFHTKGNEDCHVILRGGRAPNYDMFSVDDTSLLLDKAGLPSRIMIDASHANSRKKPTKQIDVTLDIANQVRRGDGRIFGVMLESNLVEGRQDVASDRKLTYG

SEQ ID NO: 121282 - protein, 202 aa, Unknown
  Bacterial polypetide isolated from the Sargasso Sea
MREQIHNINVVAKEKLLSPKALKATLPLTRSARKTVLQSRKSLMSILDGKDDRLIIVVGPCSIHDTSLAIDYAERLKKLAKLVEDKFLILMRVYFEKPRTTTGWKGLINDPNIDDTFQIDKGVHIARSLMIQLNEMGLGVATEALDPIMPQYLGDLTSWTAIGARTAESQTHREMASGLSTPVGFKNGTDGSLSVAINAIKS

SEQ ID NO: 121283 - protein, 204 aa, Unknown
  Bacterial polypetide isolated from the Sargasso Sea
MNYSTDNTRIIDRRKVPAPYELVNKHPIDDQIAKLVFGTRNEISQILHDKDDRVFVVVGPCSIHDPESALEYAQKLVTESQKYSENLLIIMRVYFEKPRTTVGWKGLINDPDINETFNISKGIEMARKLLIDIAKLGLPAGTEFLDPISPQYVTDVISWGAIGARTAESQIHRELASGLSCPVGIKNGTTGGLKAAIDGIQAAN

SEQ ID NO: 121284 - protein, 122 aa, Unknown
  Bacterial polypetide isolated from the Sargasso Sea
MNYSTDNTRIIDRNKVPAPYELVNKYPINSEISKLVYGTRNEISQILHDKDDRLFVVVGPCSIHDPESAIEYAERLVKESKKFNENLLLIMRVYFEKPRTTVGWKGLINDPDLNETFNIFKR

SEQ ID NO: 121285 - protein, 175 aa, Unknown
  Bacterial polypetide isolated from the Sargasso Sea
MIQTEDLNVTGVNPLTAPKFIKAEYPISDKASETVFKFRKQIKDVLDEKDSRQLVIVGPCSIHHSDIAMDYADKLTKLIPEVEDKLLVVMRVYFEKPRTTVGWKGLINDPDLDGSHKIEKGIKLARKILLNINEMGIPCATETLDPITPQYLADLISWSAIGARTTESQTHREMA

SEQ ID NO: 121286 - protein, 277 aa, Unknown
  Bacterial polypetide isolated from the Sargasso Sea
QTQTRWMTLYHHSAATLNLLRAFAQGGLADLHQVSRWNLGFVDANPLKGRYQDVAQRIQEALRFMEICGITAENSPSIRETSLYTSHEALLLNYEEALTRRDSLTGEWYDCSAHMVWIGERTRQLDHAHLEFFRGIKNPVGVKVGPGMDEVDLLRLIDALNPENIPGRLTLITRMGADKLAEKLPALVRRVEREGRKVVWSSDPMHGNTVKASNDYKTRDFEAILREIRYFFAVHQAEGTHAGGIHLEMTGDNVTECTGGAYGLSENDLSKRYTTQC

SEQ ID NO: 121287 - protein, 240 aa, Unknown
  Bacterial polypetide isolated from the Sargasso Sea
NDPELDGSHKINKGIELARRLLLDINALGLPCATETLDPIMPQYLADLISWSAIGARTTESQTHREMASGLSMPVGFKNGTDGGLSVAINAMKSALQPHHFLGINNEGLSSAIQTSGNSNLHLVLRGGSNGPNYDALSIHKAAESLASEGLPKAIMIDCNHANSGKDPSRQELVLRDAIHQIKNGDNSIVGIMIESNINGGNQPISASLQYGVSITDACLDWENTNRIILNAHQSLITFS

SEQ ID NO: 121288 - protein, 320 aa, Unknown
  Bacterial polypetide isolated from the Sargasso Sea
GKAFLLQGGDCAESFSDFNAPKIRDTFKVLLQMAVVLTFAGGCPVVKVARMAGQYAKPRSSDLETIAGVSHPSYRGDIVNSFEFTAEARKPDPNRLMTAYHHSAATLNLLRAFAQGGLADLHQVSRWNLGFVDANPLKGRYQDVAQRIQEALRFMEICGITAENSPSIRETSLYTSHEALLLNYEEALTRRDSLTGDWYDCSAHMVWIGERTRQLDHAHLEFFRGIKNPVGVKVGPGMDEVDLLRLIDALNPDNTPGRLTLITRMGADKLAEKLPALVRRVEREGRKVVWSSDPMHGNTVKASNDYKTRDFEAILREIRY

SEQ ID NO: 121289 - protein, 253 aa, Unknown
  Bacterial polypetide isolated from the Sargasso Sea
MQKTSDLRISGRQEVISASSLLAEQPISEVSSETVFNARKEFSEILYKKDNRLAVVVGPCSIHDTNAAMEYANLLLEEKNNLKDELLIIMRVYFEKPRTTVGWKGLINDPDLDNSFNIDKGLSVSRQLLRDINDLGMPAGTEFLDVITPQYIADLISWGAIGARTTESQVHRELASGSSCPIGFKNATNGGIQVAADAIGSALHPHKFLSVTKDGRAAIFSSSGNKDCHVYLRGGKESNYSNKHINETSELLR

SEQ ID NO: 121290 - protein, 164 aa, Unknown
  Bacterial polypetide isolated from the Sargasso Sea
GFKNGTDGSFTTAINAMQSASKSHHFLGVNDNGMASIVNTTGNPDGHIVLRGGLKGPNFESEHVKRISSELKECNLPHKVMIDCSHGNSNKDFQKQSDVLKNIASQISNGEKNILGVMLESHLKEGNQKLVKKEDLQFGRSITDACIDIETTKELLAILYNSLS

SEQ ID NO: 121291 - protein, 242 aa, Unknown
  Bacterial polypetide isolated from the Sargasso Sea
FEKPRTSIGWKGLINDPDMDNTFDANKGLFLARSILHKISELGLPVGTEFLDPISPQFVADLVSWGAIGARTAESQIHRELASGLSCPIGFKNGTTGDLNPAIYGMKASNHSHVFFSNTKEGMVSIYKTSGNSDTHIILRGGTKPNLYPDDIRETINALNEAEANDSIMIDVSHGNSQKVYKRQLENIGVISKQISDGMNEIRGIMIESHLREGNQKIGEDLQYGQSITDACIHFEDTKQCL

SEQ ID NO: 121292 - protein, 283 aa, Unknown
  Bacterial polypetide isolated from the Sargasso Sea
SQILHGKDDRVLVVCGPCSIHDPQSAMEYARLLKGARDSLSADLLIIMRVYFEKPRTTVGWKGLINDPDINESYDVNKGLMLARKILRDITALGLPIGTEFLDPISPQYVADLVSWGAIGARTAESQSHRELASGLSCPIGIKNGTTGALKPAIDGIQAANHPHVFFSNTKDGRVSIYKTSGNSDAHIILRGGKEPNFSSDSIQQTLTALTEADVNDSIMVDASHGNSQKQFKKQIDVVENLAVQIAEGNNSLRGLMLKVILLKEIKVLQITLYMDKVLPMPA

SEQ ID NO: 121293 - protein, 233 aa, Unknown
  Bacterial polypetide isolated from the Sargasso Sea
MQNLDNPSHDREVGSADATQDTTRIDDVRIGAVRPLISPALLLDELPVPAATQTLVEDTRRAIGDILHGRDDRLLLVVGPCSIHDHDQALDYARRLKAAADALKDDLLITMRVYFEKPRTTVGWKGYINDPRLDGSFRINEGLRAARQLLLDINALGLPASTEFLDLLSPQYIADLIAWGAIGARTTESQSHRQLASGLSCPIGFKNGTDGGVQVASDAIVAAAASHAFMGMT

SEQ ID NO: 121294 - protein, 457 aa, Unknown
  Bacterial polypetide isolated from the Sargasso Sea
MTNEWSPKSWRAKKAKHIPFYEDEKELNNVLAKIEKFPPLVFAGEARMLQNKLAEVSEGNAFLLQGGDCAESFSDFHPDNIRDTFKVILQMAVVLTFGASCPVVKVGRIAGQFAKPRSQDTETINKIELESYKGDIINGLDFNEKSRKPDPNRLIQAYNQSASTLNLLRAFSQGGFANLHKIHQWNLSFVEGENAEKFKQISDRIDECLAFMNACGINDQNVSQLYETDFFTSHEALLLPYEEAMTRIDSTNGKWYDVSAHMLWVGDRTRQFDGAHIEFVRGIGNPIGIKVGPSSSIDDLLKIIQLINPENIPGRITLICRMGSDKIMQKLPKIVDNVHKEGRSVVWTCDPMHGNTIKSNSGYKTRPLNNIISEIQQFFQIHRSIGTHPGGVHVEMTGMDVTECMGGLQKITDEDLKNRYHTYCDPRLNASQSLELAFLLAEFLKDDKFSSQISLNL

SEQ ID NO: 121295 - protein, 280 aa, Unknown
  Bacterial polypetide isolated from the Sargasso Sea
MKKWKLNSWRNYPVKHIPTYEDEKELNMVLNKIKNFPPLVFAGETRHLKQQLADVVDGKAFLLQGGDCAESFAEFNPDNIRDYFKVMLQMSLVLTYSASLPVVKLGRIAGQFSKPRSAPTEKQGDKELPSYLGDNINGIEFNEKARRPDPKRLFKAYSQAASTLNLLRAFCHGGFADLKMVHLWNLGYIKKSPQAKKFKELEDKIADALAFMDACGINSDFNRRLKTVNFWTSHEALLLPFEETMTRVDSTTGEYHDTSAHFVWIGDRTRQLNGGHVEFC

SEQ ID NO: 121296 - protein, 406 aa, Unknown
  Bacterial polypetide isolated from the Sargasso Sea
MKTQWSPHSWRSKPAKHMPIYKDENSLKECLDKIKKFPPLVFAGEARSLKSKLAKVSTGEAFLLQGGDCAESFVDFHPDNIKNSFKVILQMAVVLTFGASCPVVKVGRIAGQFAKPRSSDKETINGVELESYKGDIINGIEFTKSDRTPDPSRLIQAYNQSASTLNLLRAFSQGGYANLNKIHQWNLNFVEEENANKFAEIADRIDECLAFMKACGINDGNVSQIYETEFFTSHEALLLDYEEALTRIDSTSGKWYDVSAHMLWVGDRTRQLDGAHIEFVKGIENPIGIKVGPTSDPEELVKIIDIINPENEAGKVTLICRMGAEKIDSHLPSIIKKVKNEGKIVVWACDPMHGNTIKSKTGYKTRPVNNIFSEIQKFFAIHKASGTYPGGIHLEMTGSDVTECME

SEQ ID NO: 121297 - protein, 390 aa, Unknown
  Bacterial polypetide isolated from the Sargasso Sea
ESFAEFNPDNIRDYFKVMLQMSLVLTYSASLPVVKLGRIAGQFSKPRSAPTEKQGDKELPSYLGDNINGIEFNEKARRPDPKRLFKAYSQAASTLNLLRAFCHGGFADLKMVHLWNLGYIKKSPQEKKFKELEDKIADALAFMDACGINSDFNRRLKTVNFWTSHEALLLPFEESMTRIDSTTGEYHDTSAHFVWIGDRTRQLDGGHVEFCRGIENPIGIKCGPTSKPDEIVKICNVLNAKNEKGKITLISRFGHDNVEKFLPKLIRAIKKEGLNVIWSCDPMHGNTIKSTTGFKTRPFNNVLKEVKNVFGVHQSEGSYAGGLHIEMTGQNVTECTGGTQKISDQDLSSRYRTHCDPRLNANQALELAFLISDEIKKNSIYAKSGIRAVS

SEQ ID NO: 121298 - protein, 418 aa, Unknown
  Bacterial polypetide isolated from the Sargasso Sea
PFLVFAEEARRLRKRMADVAEGKAFLLQGGDCAESFAEHNANNIRDSFRVLLQMAVVLTFGSALPVIKIGRLAGQYSKPRSSPFEVINDVSLPSYRGDMVNDMAFEDKAREPNPERLLQVYDKSASTLNLLRAFAGGGMADLTKLHEWNLEFVSGTNEAIKYKELASQITSSLEFMNACGMTPENTAQLRETEFYTSHEGLLLNYEEALTRKDTITEEKGWFATSAHMLWVGDRTRSIDEAHIEYMRGIANPIGLKCGPSTDPDDLLRLIEKLNPLNQAGRLTLIARMGSAEVYKKLKPLITAVKKSGLIVGWCCDPMHGNTVKASSGFKTRKMDDIVAEVRGFFEVHNEMHTVPGGVHFEMTGQNVTECVGGVYEVNEANLADRYHTHCDPRLNATQSLELAFLVADLLAEIRNNLA

SEQ ID NO: 121299 - protein, 143 aa, Unknown
  Bacterial polypetide isolated from the Sargasso Sea
MDYRTDNTRIVEKLEIVPPNDLLDKLPITKNVSSLVYGTRNEISSILHGTDDRILVVCGPCSIHDPESAKEYANKLKEQYDALSKDLLIVMRVYFEKPRTTVGWKGLINDPDINESYDVNKGIHIARSLLLDFGNMGLPCGTE

SEQ ID NO: 121300 - protein, 237 aa, Unknown
  Bacterial polypetide isolated from the Sargasso Sea
MIQTEDLNVTGVNPLTAPKYIKAEHPISDKASETVFKFRKQIKDVLDEKDSRQLVIVGPCSIHHADIALDYADKLTKLIPEVEDKLLVVMRVYFEKPRTTVGWKGLINDPDLDGSHKIEKGIKLARKILLNINEIGIPCATETLDPITPQYLADLISWSAIGARTTESQTHREMASGLSMPVGFKNGTDGGLEVAINAMRSAENAHHFLGVSHDGNVSIINTKREFLCPPGHAGGKE

SEQ ID NO: 121301 - protein, 459 aa, Unknown
  Bacterial polypetide isolated from the Sargasso Sea
MKKWKLDSWKNYPVKHIPKYDDMDELNLVLNKIKRFPPLVFAGESRSLIKQLSDVCDGKAFLLQGGDCAESFAEFHPDNIKDTFKVILQMALVLSSSASLPVVKVGRIAGQFSKPRSSPIENKNGKELPTYLGDNINGIEFTEEARKPDAKRLFRAYSQSASTLNLLRAFSQGGFADLRQVHLWNLGFVKGSPQGKKYKEVEDKISDALSFMEACGINADNNRRLRTVNFYTSHEALLLPFEQAMTRVDSTTGEYHDTSAHFVWIGDRTRQLDGGHVEFCRGIKNPIGLKCGPTLKPEELIKLCNKLNPQNEPGRLTLISRFGADNVDKFLPKLIRSVKKEGLNVIWSCDPMHGNTLVSTTGFKTRPFNNIVKEIKKVFAVHQSEGSYAGGLHIEMTGQDVTECTGGAQKISEKDLSHRYHTHCDPRLNANQALELAFLISDEIKKNSQYSKNIIQAAS

SEQ ID NO: 121302 - protein, 397 aa, Unknown
  Bacterial polypetide isolated from the Sargasso Sea
MKKWTLNSWKKFPAKHIPEYKDTKELDLVLSKVKKYPPLVFAGESRSLKKALANVVDGKAFLLQGGDCAESFAEFHPDNIRDTFKVILQMSLVLTASASVPVVKVGRIAGQFSKPRSSPTEKKDGKELPSYLGDNINGMEFTEKARIPDAKRLFRAYSQSASTLNLLRAFSQGGFADLRQVHLWNLGFIKDKTKGKYKEIEDKISDALAFMEACGINSDTNRRLRTVNIYTSHEALLLPFEEAMTRVDSTTGEYHDTSAHFVWIGDRTRQLDGAHVEFCRGIKNPIGLKCGPSLKPDELIKLCNVLNPENEPGRITLISRFGANNVEKFLPKLIKAVKKEGLKVVWSCDPMHGNTIKAATGFKTRTFDSVVKEVKNFFGVSQAEGSYAGGLHIEMTV

SEQ ID NO: 121303 - protein, 458 aa, Unknown
  Bacterial polypetide isolated from the Sargasso Sea
MKKWNLNSWTKLPAKHLPVYHDKEELDLVLSKIKKYPPLVFAGESRSLKKALADVVEGKAFLLQGGDCAESFAEFHPDNIRDTFKVLLQMSLVLTASASMPVVKVGRIAGQFSKPRSAPTEKKDGKELPSYLGDNINGMEFTEKARIPDAKRLFRAYSQSASTLNLLRAFSQGGFADLRQVHLWNLGFIKDKTKGKYKEIEDKISDALAFMEACGINSDNNRRLRSVNFYTSHEALHLPFEESMTRIDSTTGEYHDTSAHFVWIGDRTRQTDGAHVEFCRGIKNPIGLKCGPTLKPEELINLCNILNPENEAGRLTLISRFGADNVDKYLPKLIKAIKKEGIKVIWSCDPMHGNTIKAATGFKTRTFESVLKEVKNFFAVSQAEGSYAGGLHVEMTGQDVTECTGGAQKISENDLSNRYRTHCDPRLNADQALELAFLISEEIKKNSKISNKIIQAAS

SEQ ID NO: 121304 - protein, 285 aa, Unknown
  Bacterial polypetide isolated from the Sargasso Sea
MNYSTDNTRIIDRRKVPAPYELVNKFPINDEIAKLVYGTRNEISQILHGKDDRLFVVVGPCSIHDPESAIEYATKLTEQNSKLKENLLIIMRVYFEKPRTTVGWKGLINDPDINETYDIAKGVEMARKLLIEIANLKLPAGTEFLDPISPQYVTDIISWGAIGARTAESQIHRELASGLSCPIGIKNGTNGGLKAAIDGIQAANHSHVFLGATKEADIAMLKTAGNHDSHIILRGGKNPNYDKQSVEATLTALREADVNESIMIDASHGNSQKKFKQQIPVIENI

SEQ ID NO: 121305 - protein, 242 aa, Unknown
  Bacterial polypetide isolated from the Sargasso Sea
MNYSTDNTRIIDRNKVPAPYELVNKHPINDEISKLVYGTRNEISQILHDKDDRLFVVVGPCSIHDPESAIEYAERLAKESKKFNENLLLIMRVYFEKPRTTVGWKGLINDPDINESFNIAKGVEMARKLLIDIANLGLPAGTEFLDPISPQYVTDVISWGAIGARTAESQIHRELASGLSCPIGIKNGTDGGLKAAIDGIQAANHSHVFLGATKEADIAMLKTAGNIDTHIILRGGKTPNYD

SEQ ID NO: 121306 - protein, 450 aa, Unknown
  Bacterial polypetide isolated from the Sargasso Sea
MANNWSKDSWRNKPVVQVPEYDDQKALEKVEKRLSSYPPLVFAGEARRLKEHLAKVCRGEAFLLQGGDCAESFAEHNPDNIRDTFRVILQMAIVLTFGAGCPVIKVGRIAGQFAKPRSAPLEKQGEIELPSYRGDIINNIEFVEDLRIPDPERQIMAYRQSASTLNLLRAFAQGGYANLDHVHKWNMGFVKESKQGEQYEQVANRISEALDFMDAVGINSNTTPELRSVDFYTSHESLLLGYEECLTRVDSTSGDWYDTSAHMLWIGDRTRQPDGAHIEFVRGIKNPIGMKCGPSLDSDELLKLIDLINPSNEEGRLTLITRYGADNLDDHLPKLIRAVEKEGKKVVWSCDPMHGNTIKASNGYKTRPLDSILTEVKQFIDIHESEGTYAGGVHIEMTGQNVTECLGGTQKISEEDLTDRYHTHCDPRLNANQALDLSFLISERLKELRS

SEQ ID NO: 121307 - protein, 362 aa, Unknown
  Bacterial polypetide isolated from the Sargasso Sea
MIKDTVNNVHVSTEDVLITPEALSAELPVSDKALAAISESRKIVSDIIHRRDHRLLVVCGPCSIHDVEAAKEYALKLKELHESCKDTLFIVMRVYFEKPRTTTGWKGLINDPHIDGTFDIETGLRKARELLIWLAELELPVATEALDPISPQYLAELFSWAAIGARTSESQTHREMASGLSMPVGFKNGTDGSLDIAINALKSAASGHRFMGINKQGQVSIIGTSGNPDGHIILRGGKQPNYDSVCVSECEIELQDAGLTAGLVVDCSHANSSKDYRRQPLVAQNVVNQILEGNQSIIGVMLESHLKPGNQKAEGKKPEELEYGVSITDGCIDWETTENLISQTRDKLITVLPLRQNKRTVA

SEQ ID NO: 121308 - protein, 349 aa, Unknown
  Bacterial polypetide isolated from the Sargasso Sea
MNYSTDNTRIIDRRKVPAPYELVNKYPINDDIAKLVYGTRNQVSQILHDKDDRIFVVVGPCSIHDPESAIEYANKLVNESKNFHENLLIIMRVYFEKPRTTVGWKGLINDPDLNETYNISKGIELARKVLIEIAKLGLPAGTEFLDPISPQYVTDVISWGAIGARTAESQIHRELASGLSCPIGIKNGTDGSLKAAIDGIQAANHSHVFLGATKEADIAMLKTSGNNDAHIILRGGKTPNYDTQSINSTLTALKEAEVNESIMIDASHGNSQKKFKQQIPVVESICDQIINGGHNIKGVMIESHLNEGNQKITENLKYGQSITDACLGWDDTLICLKMLNEAIINKRGK

SEQ ID NO: 121309 - protein, 345 aa, Unknown
  Bacterial polypetide isolated from the Sargasso Sea
MIQTEDLNVTGVNPLTAPKFIKAEYPITDKASETVFKFRKQIKDVLDEKDSRQLVIVGPCSIHHADIAMDYADKLTKLIPEVEDKLLVVMRVYFEKPRTTVGWKGLINDPDLDGSHKIEKGIKLARKILLNINEMGIPCATETLDPITPQYLADLISWSAIGARTTESQTHREMASGLSMPVGFKNGTDGGLEVAINAMRSAENAHHFLGVSHDGNVSVINTKGNSYAHLVMRGGKEGPNFDVVSVGKALDELEKAGLRKKVMVDCNHANSGKDPYRQEQVLRAVLHQVNDGRKAILGTMIESNLGGGNQPIGPDMEYGVSITDACLDWKNTRRILLDAHQMLEN

SEQ ID NO: 121310 - protein, 400 aa, Unknown
  Bacterial polypetide isolated from the Sargasso Sea
GKAFLLQGGDCAESFDDFNADYIRDTFKVLLQMSVTLTAAGNCPVVKVGRMAGQFAKPRSAPKEEIDGVELDSYKGDIINDMDFTEDARVPDPDRMIRAYTQSAATLNLLRAFAKGGFSDLNKVHQWNMGFVDESSQGKKFRELANKISDTLSFMEAIGISSRNTKRLRSVDFFTSHEALLLPYEECLTRLDSTSGEVYDTSAHMVWIGDRTRQPDGAHVEFCRGIKNPIGIKCGPSLNPEELKKLLDILNPENEAGKITLICRFGSETINEKLPKLIQPFLNSDHNLVWSCDPMHGNTMKANSGFKTRPFESVLKEVETFFDIHHQMGTYPGGVHLEMTGQNVTECIGGAQAIKDEDLSARYHTHCDPRLNAKSALELAFFISDQLRESQEHIIQDYDC

SEQ ID NO: 121311 - protein, 392 aa, Unknown
  Bacterial polypetide isolated from the Sargasso Sea
MQTNWSPSSWRSKTAKHQPIYNDATQLNNSLDKIKKFPPLVFAGEARSLKSKLAKVSNGQAFLLQGGDCAESFADFHPDNIKNSFKVILQMAVVLTFGASCPVVKVGRIAGQFAKPRSSDKENINGIELESYKGDIINGIEFTKDDRVPDPKRLIQAYNQSASTLNLLRAFSQGGYANLNKIHQWNLNFVEEENANKFTEIADRIDECIAFMNACGINDTNVRQIYETEFFTSHEALLLDYEEALTRIDSTSGKWYDVSAHMLWVGDRTRQLDGAHIEFVRGIENPIGIKVGPTSDPDELVKIIDYINPNNEAGKVTLICRMGADKIDNHLPEIIKLVNKEGKVVVWACDPMHGNTIKSKTGFKTRPVKNIFAEIQKFFAIHKSIGTYPGGV

SEQ ID NO: 121312 - protein, 343 aa, Unknown
  Bacterial polypetide isolated from the Sargasso Sea
MKLENINISDHEVLITPDSLKSDMPVSAAITEQINESRKIVRNIISKKDKRLLVVVGPCSIHDPNAAIDYAHRLKKLSLLLDKRLYIVMRSYFEKPRSTVGWKGLINDPYLDDSFKISEGLKIARKLLLEISEIGLPLATEALDPITPQYLQDLISWSAIGARTTESQTHREMASGLSCAIGFKNGTDGSLEVAINAMQSAVAPHRFLGINPSGQVSIIHTRGNPDVHVVLRGGSNGPNYGKEAVLESEQQLQEKGLNPSIMIDCSHANSNKDHKNQSKVLDNISEQIREGNESITGVMIESNIGPGNQSISEQLEYGVSITDACVDWDETDRMLTKLAETLR

SEQ ID NO: 121313 - protein, 345 aa, Unknown
  Bacterial polypetide isolated from the Sargasso Sea
MIQTEDLNVTGVNPLTAPKFIKAEYPITDKASETVFKFRKQIKDVLDEKDSRQLVIVGPCSIHHADIALDYADKLTKLIPEVENKLLVVMRVYFEKPRTTVGWKGLINDPDLDGSHKIEKGIKLARKILLNINEMGIPCATETLDPITPQYLADLISWSAIGARTTESQTHREMASGLSMPVGFKNGTDGGLEVAINAMRSAGNAHHFLGVSHDGNVSVINTKGNSYAHLVMRGGKEGPNFDVVSVGKALDELEKAGLRKKVMVDCNHANSGKDPYRQEQVLRAVLHQVNDGRKAILGTMIESNLGGGNQPIGPDMEYGVSITDACLDWENTRRILLDAHQMLEN

SEQ ID NO: 121314 - protein, 349 aa, Unknown
  Bacterial polypetide isolated from the Sargasso Sea
MNYSTDNTRIIDRKKVPAPYELVNKYPINDEISKLVYGTRNEISQILHDKDDRIFVVVGPCSIHDPQSAIEYAKKLSNENKNFSENLLVIMRVYFEKPRTTVGWKGLINDPDINETYNIAKGVEMARKLLIEIAELGLPAGTEFLDPISPQYVTDIISWGAIGARTAESQIHRELASGLSCPIGIKNGTDGGLKAAIDGIQAANHSHVFLGATKEADIAMLKTAGNNDTHIILRGGKVPNFDKESVESTLTALKEAEVNESIMIDASHGNSQKKFKQQIPVIDSICEQISDGNKNIKGVMIESHLNEGNQKITEKLNYGQSITDACMGWEDTVMCLSKLNDAINLKRGK

SEQ ID NO: 121315 - protein, 349 aa, Unknown
  Bacterial polypetide isolated from the Sargasso Sea
MNYSTDNTRIIDRRKVPAPYELVNKYPINDEIAKLVYGTRNQISQILHDKDDRIFVVVGPCSIHDPESAIEYANKLSNESKNFNENLLIIMRVYFEKPRTTVGWKGLINDPDLNETYNIAKGVELARKLLIEIAELGLPAGTEFLDPISPQYVTDIISWGAIGARTAESQIHRELASGLSCPIGIKNGTDGSLKAAIDGIQAANHSHVFLGATKEADIAMLKTAGNNDAHIILRGGKTPNYDNESIYNTLTALKEAEVNESIMIDASHGNSQKKFKQQIPVVESICDQIINGDRCIKGVMIESHLNEGNQDITENLKYGQSITDACLGWDDTLMCLRMLNEAVIKKRGK

SEQ ID NO: 121316 - protein, 356 aa, Unknown
  Bacterial polypetide isolated from the Sargasso Sea
MQYLTDNTRIKGLLEVTPPIKLIDKLPLSSKASKLVYESRNELSSILKQEDDRLLVVVGPCSIHDPKAAIEYAKKLKPLADALSKELKIVMRVYFEKPRTTIGWKGLINDPDIDNSFNINKGLKTARKLLLEINELGLPAGTEYLDIITPQYISDLITWGAIGARTTESQIHRELASGLSCPVGFKNSTNGSVKVAVDALKAASHSHIFLSITKEGKSAIFNSAGNQDCHVILRGGSEPNYKDKDIKETSKILKENGLIDSVMVDMSHGNSSKQFKKQLIVNQDLCNQISSGSKNIIGVMIESNLIEGNQSSDKKDKLEYGQSITDACVGWEDTEIMLNLLSSAVKNRRQNMKVSA

SEQ ID NO: 121317 - protein, 233 aa, Unknown
  Bacterial polypetide isolated from the Sargasso Sea
ILMILILGLRRARSLLSYLATRGIPSATELLDPIVPQYIADLISWTAIGARTTESQTHREMASGLSMPIGFKNGTDGSFTTAINAMQSASKSHHFLGVNENGMASIVNTTGNPDGHIVLRGGSKGPNFESDHVQRISAELRQCNLPHKVMIDCSHGNSNKDFRKQSEVLKNVASQISNGEKNILGVMLESHLKEGNQKLLKKEDLQFGRSITDACIDIETTKELIAILYDSLS

SEQ ID NO: 121318 - protein, 457 aa, Unknown
  Bacterial polypetide isolated from the Sargasso Sea
MSDKWSPNSWRNKNALHMPNYQNEDHLNKTLNEISKYPPLVFAGEARLLKKKLGEVSNGNAFLLQGGDCAESFADFHPDNIRDTFKVILQMAVVLTFGASCPIVKVGRIAGQFAKPRSSATEVINDLELESYKGDIINGIDFNQKDRDPNPDRLIQAYNQSASTLNLLRAFSQGGFANLNKIHQWNLNFVKGENAAKFREISSRIDECLSFMEACGINGNSVRQLNETDFFTSHEALLLQYEEALTRIDSTSGKWYDVSAHMLWVGDRTRQLDGAHIEFLRGIENPIGIKVGPSTKTEELLKILDVLNPNNEAGKITLICRMGHEKVSGILPKIIRSVNSAGKNVVWTCDPMHGNTIKSNTGFKTRPLKDIISEIQQFFQIHRSEGTYPGGVHLEMTGQDVTECMGGLQEITDEDLKNRYHTYCDPRLNASQSLELAFLLSDFLKEEKLLSKQSSNL

SEQ ID NO: 121319 - protein, 350 aa, Unknown
  Bacterial polypetide isolated from the Sargasso Sea
MESIYHTDNTRIVEKFDLITPNNVISEYPLTDEISKLVYGTRNEASQILHGKDDRVLVVCGPCSIHDPVSAMEYAQLLKGARDSLSADLLIIMRVYFEKPRTTVGWKGLINDPDINESYDANKGLMLARKILRDITAMGLPIGTEFLDPISPQYVADLVSWGAIGARTAESQSHRELASGLSCPIGIKNGTTGALKPAIDGIQAANHPHVFFSNTKDGRVSIYKTSGNSDAHIILRGGKEPNFNPDAIQQTLTALTEADVNDSIMVDASHGNSQKQFKKQIDVVENLAEQISGGNNILRGLMLESHLVEGNQSITDNLVYGQSITDACMNWDDTLNCLQLISKAVQKRRG

SEQ ID NO: 121320 - protein, 197 aa, Unknown
  Bacterial polypetide isolated from the Sargasso Sea
MNYSTDNTRIVDRKKVPAPYELVNKYPINDEISKLVYGTRNEISQILHHKDDRIFVVVGPCSIHDPQSAIEYAERLSIENKKFSENILLVMRVYFEKPRTTVGWKGLINDPDINETYNIAKGLEMARKLLIEIAELGLPAGTEFLDPISPQYVTDIISWGAIGARTAESQIHRELASGLSCPIGIKNGTDGGLKDCD

SEQ ID NO: 121321 - protein, 355 aa, Unknown
  Bacterial polypetide isolated from the Sargasso Sea
MATTSDLHVVETRPLVAPALLHGDLPIDAAAMETVASARRRIQAILRGEDQRLLVVVGPCSVHDVKAAREYAERLAPIRERLKDQLEVVMRVYFEKPRTTVGWKGLINDPHLDGSYDINTGLRRARGLLLDLAREGMPAATELLDPVVPQYIADLISWTAIGARTTESQTHREMASGLSMPIGYKNSTDGSATIAINAMQAASKPHHFLGINRDGHASIVSTTGNPDGHLVLRGGHQGSNYHLEAVQAAAAELSKAGLKDRLMVDCSHANSNKDFRRQADVLATVADQLRAGSSHVMGVMIESHLVEGNQKLTADLSQLTYGQSITDACISLETTEVLLSQLAEAVSDCSRVVTA

SEQ ID NO: 121322 - protein, 348 aa, Unknown
  Bacterial polypetide isolated from the Sargasso Sea
MKNIQNLNIREIAKLPSPDEFIKNIPLSNSQSNLIMESRKVIENILTGKDDRILLLVGPCSIHDRNLGIEYAKRLRDLAEKVKDTIYIVMRVYFEKPRTTVGWKGLINDPDLNGSFNIPKGIELARNILSDVTELGMPTATEFLDPFTPQYIGDLVSWGAIGARTAESQTHRQMASGLSMPIGFKNGTGGSVQLAIDGMIACLGEHAFLGIDNDGNSSVVITKGNPANHVILRGGASGTNYDKESVRDAQELLEKNELDPVVVIDCAHGNSNKDHNRQPIVFKDVISQRMQGNKNIVGLMIESNINPGNQTLGENLADLDYGVSITDKCVGWEKTEEIILEASKELKN

SEQ ID NO: 121323 - protein, 395 aa, Unknown
  Bacterial polypetide isolated from the Sargasso Sea
VSRGEAFLLQGGDCAESFAEHNPDNIRDTFRVILQMAIVLTFGAGCPVIKVGRIAGQFAKPRSAPLEKQGEIELPSYRGDIINNIEFVEDLRIPDPERQIMAYRQSASTLNLLRAFAQGGYANLDHVHKWNMGFVKESKQGEQYEQVANRISETLGFMDAVGINSDTTPELRSVDFYTSHESLLLGYEECLTRVDSTSGDWYDTSAHMLWIGDRTRQPDGAHIEFVRGIKNPIGMKCGPSLDPDELLKLIDIINPSNEEGRLTLITRYGANNLDDHLPKLIKAVEKEGKKVVWSCDPMHGNTIKASNGYKTRPLDSILTEVKQFIDIHESEGTYAGGVHIEMTGQNVTECLGGTQQISEEDLTDRYHTHCDPRLNANQALDLAFLISERLKELRS

SEQ ID NO: 121324 - protein, 448 aa, Unknown
  Bacterial polypetide isolated from the Sargasso Sea
MNNWNIDSWRSRQAKHIPVYPDQGKLKEVENTLKDFPPLVFAGEVRSLKNSLSEVADGNAFLLQGGDCAESFSEFHADNIRDTFRVILQMAVILTSGTKLPIIKVGRMAGQFAKPRSNPSEINNGQELPSYAGDIINGIEFDANKRKPEPSRMLTAYSQAASTLNLLRAFADGGYADLRHVQSWNMGFVKSGPQGERYRYLAEEIQKSLHFMDALGISSENTPQLRTVQYYTSHEALLLPFEEALTRVDSTSGMIYNTSAHFLWIGDRTRFIDSAHVEFCRGIQNPLGIKCGPSSDPEELVKIIDILNPMNESGKITLITRFGNGSVENFLPKLIRKITEEGKNVIWSCDPMHGNTMKSNSGKKTRKFENILGEVKSNIEVHKSEGTHAGGIHLEMTGQNVTECIGGLDDISDSDLNDRYHTHCDPRLNANQAIEMAFLIADQLNNTP

SEQ ID NO: 121325 - protein, 458 aa, Unknown
  Bacterial polypetide isolated from the Sargasso Sea
MKKWTLNSWKKFPAKHIPEYQDQKELDLVLSKVKKYPPLVFAGESRSLKKALGDVVQGKAFLLQGGDCAESFAEFNPDNIRDTFKIILQMSLVLTASASVPVVKIGRIAGQFSKPRSAPTEKRDGKELPSYLGDNINGMEFTEKSRQPDAKRLFRAYSQSASTLNLLRAFSQGGFADLRQVHLWNLGFIKDITKGKYKEIEDKISDALAFMEACGINSDNNRRLRTVNFYTSHEALHLPFEQAMTRVDSTTGEYHDTSAHFVWIGDRTRQVDGAHVEFCKGIKNPIGLKCGPTLKADELIKLCNILNPNNEPGRMTLISRFGADNVEKYLPKLIKSVKKEGLNVVWSCDPMHGNTIKAATGFKTRTFDSVVKEVKNFFAVSQSEGSYAGGLHVEMTGQDVTECTGGAQKISEKDLSNRYRTHCDPRLNADQALELAFLISEEIKKNSKISNKIIQAAS

SEQ ID NO: 121326 - protein, 141 aa, Unknown
  Bacterial polypetide isolated from the Sargasso Sea
MQKTSDLRIADRQEVISASTLLSDQPISQESSETVFQARKSFSKILNKKDSRLAVVVGPCSIHDTSAAMDYAQRLKEESLKYKDQLHIIMRVYFEKPRTTVGWKGLINDPDLDDSFQIDKGLSIARQLLRDINDMGLPAGT

SEQ ID NO: 121327 - protein, 168 aa, Unknown
  Bacterial polypetide isolated from the Sargasso Sea
MNYSTDNTRIIDKVDLVTPNDVISKYPLTDEISKLVYGTRNEVSQILHGKDDRLIAVVGPCSIHDPNSAEEYAKLLIDEKQKYEEDILLIMRVYFEKPRTSIGWKGLINDPDMDNTFDANKGLFLARSILHKISELGLPVGTEFLDPISPQFVANLISWGAIGARTAK

SEQ ID NO: 121328 - protein, 348 aa, Unknown
  Bacterial polypetide isolated from the Sargasso Sea
MNYSTDNTRIIDRRKVPAPYELVNKYPINDQISKLVYGTRNEISQILHNKDDRLFVVVGPCSIHDPKSALEYAEKLAKENKRLSKNILVIMRVYFEKPRTTVGWKGLINDPDINETFNIAKGVELARKLLINIAELGLPAGTEFLDPISPQYVTDIISWGAIGARTAESQIHRELASGLSCPVGIKNGTDGGLKAAIDGIQAANHSHVFLGATKEADIAMLKTAGNNDTHIILRGGKEPNYDSESVESTLVALREAEVNESIMIDASHGNSQKIFKQQIPVVESICEQMLNGNNNIKGVMIESHLNEGNQKISESLKYGQSITDACMGWEDTVKCLEMLSSAVENKRG

SEQ ID NO: 121329 - protein, 114 aa, Unknown
  Bacterial polypetide isolated from the Sargasso Sea
MKSKIHNINVVAKEKLPSPKALKDTLPLSNKARKTVLSKRKELMSILDGKDSRLVVVVGPCSIHDTDLAKDYASRLKDLSKEVEDAFLILMRVYFEKPRTTTGWKGLINDPKID

SEQ ID NO: 121330 - protein, 363 aa, Unknown
  Bacterial polypetide isolated from the Sargasso Sea
MQQDTINNVHISSEKVLITPQELKATLPLSEHAYRYILNARKTVADIVHKRDHRVLIVTGPCSIHDIDAAKEYALKLKKLHDELSDEFYILMRVYFEKPRTTVGWKGMINDPDMDESFDVEKGLKMARELMIWLAELELPVATEALDPISPQYISELVTWSAIGARTTESQTHREMASGLSMPVGFKNGTDGKLDVAINALKSAASSHRFMGINQQGQVALLQTAGNPDGHVILRGGVTPNYDAASVAECEAQLHKAKLNARLIIDCSHGNSSKDYTRQVPVCEDVFAQIYNGNKSIIGVMLESHLNEGNQSCDKPLSELAYGVSVTDSCINWEKTESVLRAGASKLSSVLPTRFDMLKVANA

SEQ ID NO: 121331 - protein, 350 aa, Unknown
  Bacterial polypetide isolated from the Sargasso Sea
MNYSTDNTRIIDRRKVPAPYELVNKHPIDDQIAKLVYGTRNEVSQILHDKDDRVFVVVGPCSIHDPESALEYAQKLVTESQKYSENLLIIMRVYFEKPRTTVGWKGLINDPDINETFNISKGIEMARKLLIDIAKLGLPAGTEFLDPISPQYVTDVISWGAIGARTAESQIHRELASGLSCPVGIKNGTTGGLKAAIDGIQAANHSHVFLGATKESDIAMLKTAGNNDVHIILRGGKVPNYDKESVENTLTALKEAEVNESIMIDASHGNSQKKFKQQIPVIQSISEQIAEGNKNIKGVMIESHLNEGNQKIGDSLNYGQSITDACMGWEDTISCLNMLNQAVLTRRGSK

SEQ ID NO: 121332 - protein, 458 aa, Unknown
  Bacterial polypetide isolated from the Sargasso Sea
MNKNWKPSSWREKKAKHLPNYSDEKELNLITNKLTAYPPLVFAGESRNLLKQLGDVANGKAFLLQGGDCAESFADFNPNNIRDSFKVMLQMAVVLTYGASCPVVKVGRIAGQFAKPRSQDTEKLDNLELESYKGDIINGIDFNEKSRTADPKRLIQAYNQSAATLNLLRAFAQGGFANLKQIHQWNLSFADDNQYKKRFEDMANRIDECLTFMEACGINDENVRQMNETDFYTSHEALLLPYEEALTRVDSTTGLWYDVSAHMLWVGDRTRQLDGAHIEFIKGIENPIGIKVGPSTEVNELLKIIEVVNPNNIPGRVTLICRMGADKISSILPQIIREVSKTEYKVVWACDPMHGNTIKSNTGYKTRPLTNIISEIEQFFKIHRSEGTYPGGIHLEMTGQDVTECIGGIREVTEDDLKSRYHTYCDPRLNASQSLELAFILSDFLKDERIRLQQSSNL

SEQ ID NO: 121333 - protein, 298 aa, Unknown
  Bacterial polypetide isolated from the Sargasso Sea
RLIAVVGPCSIHDPNSAEEYAKLLIDEKKKYEEDILLIMRVYFEKPRTSIGWKGLINDPDMDNTFDANKGLFLARSILHKISELGLPVGTEFLDPISPQFVADLVSWGAIGARTAESQIHRELASGLSCPIGFKNGTTGDLNPAIYGMKASNHSHVFFSNTKEGMVSIYKTSGNSDTHIILRGGTKPNLYPDDIRETIDALNEAKANDSIMIDVSHGNSQKVFKRQLENIGIVSKQISDGMNEIRGVMIESHLQEGNQKIGEDLQYGQSITDACIHFEDTKKCLSELSSAVQARRSKS

SEQ ID NO: 121334 - protein, 445 aa, Unknown
  Bacterial polypetide isolated from the Sargasso Sea
KHVPSYESEKDFNQVLSKIKSFPPLVFAGETRHLKDQLSQVVDGKAFLLQGGDCAESFAEFNPDNIRDTFKVILQMSLVLTYSASLPIIKLGRIAGQFAKPRSAPTEKQGDKELPSYLGDNVNGIDFTEKSRRHDPKRLFKAYSQSASTLNLLRAFSNGGFADLKNVHLWNLGYIKKSPQAKKFKELEDKIADALAFMDACGINSDFNRRLKTVNFWTSHEALHLPFEESMARVDSTTGEYHATSAHFVWIGDRTRQLDGGHVEFCKGIENPIGIKCGPTSKPEEIAKICEVINPKNEKGKITLISRFGHDQVEKFLPKLIRRIKKEGLNVIWSCDPMHGNTIKSTTGFKTRPFNKVLNEVKNVFGVHQSESSYAGGLHIEMTGQNVTECTGGAKNISEQDLSSRYHTHCDPRLNADQALELAFLISDEIKKNSNYARNAIKAAS

SEQ ID NO: 121335 - protein, 120 aa, Unknown
  Bacterial polypetide isolated from the Sargasso Sea
MNYSTDNTRIIDRRKVPAPYELVNKYPINDEISKLVYGTRNEISQILHNKDDRLFVVVGPCSIHDTESALEYAEKLALQNKKLNKNILIIMRVYFEKPRTTVGWKGLNNDPDINETFNIA

SEQ ID NO: 121336 - protein, 449 aa, Unknown
  Bacterial polypetide isolated from the Sargasso Sea
MKWTKDSWKNFEAKQMPAYADQGNLDSVIEELSSMPPLIFAGETRSLKSQIYQVQKGESFYLQGGDCAESFQELNPNTIRDNFKLLLQMSVVLTFATNKPVVKLGRMGGQFAKPRSSDFEEKNGQKLPSYRGDIINSFEFNESSREPDPKRMIRAYNHSASTLNLLRAFAQGGFASLTQLNKWNLDFADNFDTTKKFKELSEKIAESIKFMNACGVNEKNTRELRETDFYTSHEALLLPYEQAFTRIDSTTGEWYNVNSHFLWVGDRTRDPNGAHIHYLSGIKNPLGLKVGPSTTIDDLKKNIEILNPENEGGRLTLIVRMGADKINSKYPDLLKEINKLGLNLTWICDPMHGNTSTSKSGYKTRATENIFKEIQSFFEIHKSEGSVAGGVHLELTGLDVTECVGGPDDIKDENLGDRYHTFCDPRLNVNQSLELSFLLADLLSNGEMN

SEQ ID NO: 121337 - protein, 349 aa, Unknown
  Bacterial polypetide isolated from the Sargasso Sea
MYITDNSRILSREELPTPEEVINEVPLDKESSKLVFGARRNISRILHGLDDRIIAVVGPCSIHDPKSAIEYAKLLKEFSPEVEDEVLIVMRVYFEKPRTTIGWKGLINDPRLDNSFKINEGLRVARRLLKNISDIGLPTGTEFLDLISPQYISDLISWGAIGARTAESQVHRELTSGLSCPMGIKNSTNGDLQVAIDAMKSAKYQHVFLGTTKQGKVAIFKTSGNDDTHIILRGGEKPNYEISDIEECVSKLIEEKTNKNIMVDFSHGNSQKNHENQKLVCKSIANQIEKGNMHITGVMIESHLKEGNQKMSENLEYGKSITDSCICWEETKELIKQLAKSVKKRRDIG

SEQ ID NO: 121338 - protein, 363 aa, Unknown
  Bacterial polypetide isolated from the Sargasso Sea
MQQDTINNVHISSEKVLITPQELKAALPLSEHAYRYILNARKTVADIVHKRDNRVLIVTGPCSIHDIDAAKEYALKLKQLHDELSDEFYILMRVYFEKPRTTVGWKGMINDPDMDESFDVEKGLKMARELMIWLAELELPVATEALDPISPQYISELVTWSAIGARTTESQTHREMASGLSMPVGFKNGTDGKLDVAINALKSAASSHRFMGINQQGQVALLQTAGNPDGHVILRGGATPNYDAKSVAECEAQLHKAKLNARLIIDCSHGNSSKDYTRQVPVCEDVFNQIYNGNKSIIGVMLESHLNEGNQSCDKPLSGLAYGVSVTDSCINWEKTESVLRAGASKLSSVLATRFDMLKVANA

SEQ ID NO: 121339 - protein, 178 aa, Unknown
  Bacterial polypetide isolated from the Sargasso Sea
MNYSTDNTRIIDRKKVPAPYELVNKYPINDEISKLVYGTRNEISQILHNKDDRLFVIVGPCSIHDPKSAIEYAEMLSNENKKYNENLLVIMRVYFEKPRTTVGWKGLINDPDINETYNIAKGVEMARKLLIDIADLGLPAGTEFLDPISPQYVTDIISWGAIGARTAESQIHRELASG

SEQ ID NO: 121340 - protein, 282 aa, Unknown
  Bacterial polypetide isolated from the Sargasso Sea
AEEYAKLLIDEKKKYEEDILLIMRVYFEKPRTSIGWKGLINDPDMDNTFDANKGLFLARSILHKISELGLPVGTEFLDPISPQFVADLVSWGAIGARTAESQIHRELASGLSCPIGFKNGTTGDLNPAIYGMKASNHSHVFFSNTKEGMVSIYKTSGNSDTHIILRGGTKPNLYPDDIRETINALNEAEANDSIMIDVSHGNSQKVFKRQLENIGVISKQISDGMNEIRGIMIESHLREGNQKIGEDLQYGQSITDACIHFEDTKQCLSELSSAVQARRSKS

SEQ ID NO: 121341 - protein, 254 aa, Unknown
  Bacterial polypetide isolated from the Sargasso Sea
MQQDTINNVHISSEKVLITPQELKATLPLSEHAYRYILNARKTVADIVHKRDNRVLIVTGPCSIHDIDAAKEYALKLKQLHDELSDEFYILMRVYFEKPRTTVGWKGMINDPDMDESFDVEKGLKMARELMIWLAELELPVATEALDPISPQYISELVTWSAIGARTTESQTHREMASGLSMPVGFKNGTDGKLDVAINALKSAASSHRFMGINQQGQVALLQTAGNPDGHVILRGGATPNYDAQSVAECEAQL

SEQ ID NO: 121342 - protein, 441 aa, Unknown
  Bacterial polypetide isolated from the Sargasso Sea
MKKWNLNSWTKLPAKHLPVYQDKGELDLVLSKIKKYPPLVFAGESRSLKKALAQVVEGEAFLLQGGDCAESFAEFHPDNIRDTFKVLLQMSLVLTASASVPVVKVGRIAGQFSKPRSAPTEKKDGKELPSYLGDNINGMEFTEKARIPDPKRLFRAYSQSASTLNLLRAFSQGGFADLRQVHLWNLGFIKDKTKGKYKEIEDKISDALAFMEACGINSDTNRRLRTVNFYTSHEALLLPFEESMTRVDSTTGEYHDTSAHFVWIGDRTRQLDGAHVEFCRGIKNPIGLKCGPSLKPQELINLCNILNPENEPGRMTLISRFGADNVEEFLPKLIKEVKKEGLNVVWSCDPMHGNTIKATTGFKTRTFDSVVKEVRNFFAVHQSEGTYAGGLHIEMTGQDVTECTGGAQKISENDLSNRYRTHCDPRLNANQALELAFLISD

SEQ ID NO: 121343 - protein, 312 aa, Unknown
  Bacterial polypetide isolated from the Sargasso Sea
MYITDNSRILSREELSTPEEITNEIPLDKESSKLIFGARSNISKILHGLDDRIIAVVGPCSIHDPKAAIDYAKRLKPLAEKIEDEVVVIMRVYFEKPRTTVGWKGLINDPRIDNSFKINEGLRVARKVLRDIANVGLPAGTEFLDLISPQYISDLVSWGAIGARTSESQVHRELTSGLSCPVGIKNSTNGEFKAAIDGMKSAQYQHVFLGTTKQGKVAIFKTSGNDDTHIILRGGKQPNYEPEDIQKCLEELKKSEVNQCIMVDFSHGNSQKIPGNQKKVSQSVCKQIETGNKNIVGVMIESNIEEGNQKIS

SEQ ID NO: 121344 - protein, 349 aa, Unknown
  Bacterial polypetide isolated from the Sargasso Sea
MYITDNSRILSREELPTPEEVINEVPLDKESSKLVFGARRNISRILHGLDDRIIAVVGPCSIHDPKSAIEYANLLKKFSTEVEDEVLIVMRVYFEKPRTTIGWKGLINDPRLDNSFKINEGLRVARKLLKDISDIGLPTGTEFLDLISPQYISDLISWGAIGARTAESQVHRELTSGLSCPMGIKNSTNGDLQVAVDAMKSAKYQHVFLGTTKQGKVAIFKTSGNDDTHIILRGGEKPNYDASDIEQCISTLAEEKTNMNLMVDFSHGNSQKNHENQKIVCKSIAEQIEKGNKHITGVMIESHLKEGNQKMSENLEYGKSITDSCICWEETKQLIKELADSVKKRREIG

SEQ ID NO: 121345 - protein, 372 aa, Unknown
  Bacterial polypetide isolated from the Sargasso Sea
MSAIDNPLHDQEVGSADATQDTTRIDDVRIGAVRPLISPALLQDELPVAPSVQTLVEKTRAEIADILHGRDDRLVMIVGPCSIHDHDQAIEYARKLKAAAQTYRDDLLIVMRVYFEKPRTTVGWKGYINDPRLDGSFRINEGLRLARQLLLDISGLGLPTATEFLDLLSPQYIADLIAWGAIGARTTESQSHRQLASGLSCPIGFKNGTDGGVQIAADAIVAARASHAFMGMTKMGMAAIFETRGNDDAHVILRGGKQGPNYDSASVEATCATLRSAGLREQVMIDCSHANSGKSHLRQLEVVQDLAQQLSQRERRIIGVMLESHLEEGRQDLKAGVPLRHGISITDACVSWAQTEPVLATLAEATRKRRAG

SEQ ID NO: 121346 - protein, 250 aa, Unknown
  Bacterial polypetide isolated from the Sargasso Sea
MNYSTDNTRIIDRRKVPAPYELVNKYPINDEISKLVYGTRNEISQILHNKDDRLFVVVGPCSIHDPDSALEYAEKLAIENKKLNKNILIIMRVYFEKPRTTVGWKGLINDPDINETFNIAKGVELARKLLINIAELGLPAGTEFLDPISPQYVTDIISWGAIGARTAESQIHRELASGLSCPIGIKNGTDGGLKAAIDGIQAANHSHVFLGATKEADIAMLKTAGNNDTHIILRGGKEPNYDSESVKSTL

SEQ ID NO: 121347 - protein, 431 aa, Unknown
  Bacterial polypetide isolated from the Sargasso Sea
NVLNELSSFPPLVFAGETRSLLKNLADVSQGKAFLLQGGDCAESFAEFHPNNIRDFFKVILQMSLVLTVSSNLPVIKVGRIAGQFSKPRSSPTEKKDKIELPSYLGDNINGSEFTKESRNPDPNRLLKAYSQSASTLNLLRAFSQGGFADLNKVHLWNMSFINDNAKTKFKEIEEKVSDSLSFMEACGITSETNRRLRTVNFYTSHEALLLPVEEVMTRIDSTTGEYHNTSAHFLWIGDRTRQLDGGHVEYCKGIKNPIGIKCGPTSDPKEIIKLTEILNPDNDAGKITLIIRLGHDKVKIKLPKLIKEIKKAGRNVIWSCDPMHGNTVKSSTGFKTRPFDNILKEVKEFFDVHQSEGTFGGGLHIEMTGKNVTECTGGAQNITDKDLSNRYHTHCDPRLNANQAIELAFLISEEIKKNSHFSKNKIKFAS

SEQ ID NO: 121348 - protein, 374 aa, Unknown
  Bacterial polypetide isolated from the Sargasso Sea
PADNIRDTFRVILHMAIILTSGTNLPIVKVGRMAGQFAKPRSSPTEQKNGQELESYKGDIINGIEFDETVRKPDPDRMLKAYSQAASTLNLLRAFADGGYADLRFVNSWNMGFLKSGSEYERYRKLANKIQESLNFMDALGVTTDNTPQLRKTDYYTCHEALLIPYEEALTRVDSTSGDIYDTSAHFVWIGDRTRFENSAHVEFCKGIKNPIGIKCGPSTDHDDLIKIIDKINPDNTAGRITLIARYGNDKVDNLLPKLIKRITDEGRIVVWSCDPMHGNTIKSSNGTKTRPFDKILSEVKKNIQLHNSLGSWFGGIHLEMTGQNVTECTGGIEEISESDLKDRYHTHCDPRLNANQAIELAFLIADELKNNGN

SEQ ID NO: 121349 - protein, 191 aa, Unknown
  Bacterial polypetide isolated from the Sargasso Sea
MTTSSNNQSLEKTSDLHVVETRPLIPPSKLRNDIPLDYTSAETVSATRRSIQNILHNNDPRILVIVGPCSIHDIEAAKDYSEYIQEFRKIYKDKLEIVMRVYFEKPRTTIGWKGLINDPHLDGSYDINTGLRRARNLLSYLATRGIPSATELLDPIVPQYIADLISWTAIGARTTESQTHREMASGLSMPI

SEQ ID NO: 121350 - protein, 198 aa, Unknown
  Bacterial polypetide isolated from the Sargasso Sea
MKSKTDDLRIINTQELVSPQEIIDSISPSDKGFATIINARNQIKNILNKSIKKFMIVVGPCSIHDVDAAKEYATRLKKLSSLLSDSCLIVMRVYFEKPRTVIGWKGLINDPDLDGSFKINKGIKIARKLLIDLAEMEIPCGHEFLDLVSPQYLSDLISWGAIGARTTESQSHRELASGLSCPVGFKNGTDGSLQIAID

SEQ ID NO: 121351 - protein, 268 aa, Unknown
  Bacterial polypetide isolated from the Sargasso Sea
MTRTENLNIVEVLPITSPKKLKDLLPVSDSVIETVLNARNAIKSILEGKDSRLLMIVGPCSIHDTKAAIEYAKRLKKLADEVSETVLVVMRVYFEKPRTTIGWKGLINDPELDGSHKINKGIELARRLLLDINALGLPCATETLDPITPQYLADLISWSAIGARTTESQTHREMASGLSMPVGFKNGTDGGLSVAINAMKSALQPHHFLGINNEGLSSAIQTSGNRNLHLVLRGGSNGPNYDAVSIHKAAESLASEGLPESIMIDCNH

SEQ ID NO: 121352 - protein, 293 aa, Unknown
  Bacterial polypetide isolated from the Sargasso Sea
VIVGPCSVHDVDAAIEYSNRLAPLRERYSQKLEIVMRVYFEKPRTTVGWKGLINDPHLDNSYDINTGLRKARGLLLDLAKKGMPAATELLDPVVPQYIADLISWTAIGARTTESQTHREMASGLSMPVGYKNGTDGTATIAINAMQAASKPHHFLGINNDGHASIVSTTGNPDGHLVLRGGKNGTNYHLDAINLIADELAQSKMPGKVMVDCSHGNSNKDFRRQSEVLRDVASQLKGGSKNIMGVMIESHLVEGNQKLNSDLSKLTYGQSVTDACINFSTTEVLLEELAQSVQ

SEQ ID NO: 121353 - protein, 293 aa, Unknown
  Bacterial polypetide isolated from the Sargasso Sea
RKRSYTGIAIMQKDALNNVHITDEQVLITPDQLKAEFPLSLEQEAQIAQSRQTISDIIAGRDPRLLVVCGPCSIHDPEAAIEYAHRFKALAEEVSDSLYLVMRVYFEKPRTTVGWKGLINDPHMDGSFDVEGGLKIARRLLVELVNMGLPLATEALDPNSPQYLGDLFSWSAIGARTTESQTHREMASGLSMPVGFKNGTDGSLSTAINAMRAAAMPHRFVGINQAGQVCLLQTQGNPNGHVILRGGKAPNYGPEDVEKCEKEMAQAGLKPSLMVDCSHGNSNKDYRRQPAVA

SEQ ID NO: 121354 - protein, 240 aa, Unknown
  Bacterial polypetide isolated from the Sargasso Sea
EVLPITSPKILKDILPVSDNVVENVLNARNAIRRILEGEDSRMLMIVGPCSIHDPEAALEYAARLKSLADEVSGTILIVMRVYFEKPRTTVGWKGLINDPELDGTHKINKGIELARRLLIGINALGLPCATETLDPITPQYLADLISWSAIGARTTESQTHREMASGLSMPVGFKNGTDGGLSVAINAMKSALQPHHFLGINNEGLSSAIQTSGNRNVHLVLRGGSNGPNYDAISIHKAA

SEQ ID NO: 121355 - protein, 303 aa, Unknown
  Bacterial polypetide isolated from the Sargasso Sea
NVNVAGQRVLISPAALRNTVEIPDSVYEFVSSSRSVIEQIIDRQDHRLMVVVGPCSIHDVTAALDYASRLKELAERVAKNLYLVMRVYFEKPRTTIGWKGLINDPNLDDSFAIESGLETGRTLLRDILAMGLPTATEALDPITPQYLHDLISWSAIGARTTESQTHREMASGLSSPVGFKNGTDGGLAVAVNALHSVANPHRFLGINSDGKVSVFETSGNRYGHIVMRGGSHGPNYSAEHIARCEAVLEAANLRANIMVDCSHANSEKNPALQPAVAQNVVEQIVQGNQSIIGIMLESNLEAG

SEQ ID NO: 121356 - protein, 301 aa, Unknown
  Bacterial polypetide isolated from the Sargasso Sea
TSKKFVIVVGPCSIHDIDAAKEYAIKLKNLKNSLSENILLVMRVYFEKPRTVIGWKGLINDPDLDGSFKINNGIKIARQLLIDLSEMDIPCGHEFLDLVSPQYLSDLISWGAIGARTTESQSHRELASGLSCPVGFKNGTDGSIQIAIDAMNAARHSHSFLSVTKEGKSAIFNTAGNNDCHIILRGGNKKTNFSSKDVKESTITLENNNLKPNIMIDASHANSKKDYKKQSTVVEDVKQQICNGEKNIIGIMLESNLVEGNQKINSREKLKYGQSITDSCIGWNETEQIILSLDETLKNNL

SEQ ID NO: 121357 - protein, 245 aa, Unknown
  Bacterial polypetide isolated from the Sargasso Sea
GWKGLINDPHLDNSYDINTGLRRARSLLSYLATRGIPAATELLDPIVPQYIADLISWTAIGARTTESQTHREMASGLSMPIGFKNGTDGSFNTAINAMQSASKSHHFLGVNENGMASIVNTTGNPDGHIVLRGGSKGPNFESHHVQRISAELKEFNLPDKVMIDCSHGNSNKDFRKQSEVLKNIASQINDGEKNILGVMLESHLKEGNQKLLNKEDLEFGRSITDACIDIETTKELLAILYSSVN

SEQ ID NO: 121358 - protein, 206 aa, Unknown
  Bacterial polypetide isolated from the Sargasso Sea
MTTSSNNSALEKTSDLHVVETRPLIPPSRLHNDIPLDHASANTVSKTRRSIQNILHHNDQKLLVIVGPCSIHDLEAAKEYSKYIQNFREIYKDKLEIIMRVYFEKPRTTIGWKGLINDPHLDDSYDINTGLRRARSLLSYLATRGIPSATELLDPIVPQYIADLISWTAIGARTTESQTHREMASGLSMPIGFKNGTDGSFNTAIN

SEQ ID NO: 121359 - protein, 266 aa, Unknown
  Bacterial polypetide isolated from the Sargasso Sea
KDKLEIIMRVYFEKPRTTIGWKGLINDPHLDDSYDINTGLRRARSLLSYLATRGIPSATELLDPIVPQYIADLISWTAIGARTTESQTHREMASGLSMPIGFKNGTDGSFTTAINAMQSASKSHHFLGVNENGMASIVNTTGNPDGHIVLRGGSKGPNFDNENVKKISAELRQCNLPHKVMIDCSHGNSNKDFRKQSEVLKNIASQISNGEKNILGVMLESHLKEGNQKLLNKEDLQFGRSITDACIDIETTKELLAILYNSISLL

SEQ ID NO: 121360 - protein, 323 aa, Unknown
  Bacterial polypetide isolated from the Sargasso Sea
TEDLNVASNEALITPQQLKNEIPLRGNALESVEKARSTIFSILDRKDPRICVVVGPCSIHDTEAAIDYAKRLKELADQVRDTLFIVMRVYFEKPRTSIGWKGLINDPHLDDSFKIEEGLRIGRRLLLDIIDIGLPTSTEALDPISPQYMQDLISWSAIGARTTESQTHREMSSGLSSAVGFKNGTDGGLTVAVNAMQSVSSPHRFLGINTQGQVSVVSTRGNPYAHVVLRGGSNGPNYDSVHVSQCEKALADGGVSSNIMIDCSHANSSKNPDIQPLVLKDVTHQILEGNKSIIGVMLESFINGGSQSIPENLDNLKYGISVT

SEQ ID NO: 121361 - protein, 185 aa, Unknown
  Bacterial polypetide isolated from the Sargasso Sea
MSEKTLNDLNVMNEETLVSPTELKNLIPASESAFQTVREGRDVIKKILDREDPRLFIVVGPCSIHDPNEALDYAKRLKGLADQVSDALVLVMRVYFEKPRTTTGWKGLINDPMMDDSFKIAEGLKRGRKLLIELAEMGLPTSTEALDPVTPQYLQDLISWSAIGARTTESQTHREMASGLSSAVG

SEQ ID NO: 121362 - protein, 296 aa, Unknown
  Bacterial polypetide isolated from the Sargasso Sea
PKTVIEECPVPPSVAQLVTRTRAEAHAILHGQDDRVIVIVGPCSIHDPVAALDYGARLEALRQKYSKDLLIVMRVYFEKPRTTVGWKGLINDPDLDGSFNINKGLRLARKLLLDLNLAGVPAGTECLDLLTPQYVADLISWSAIGARTTESQLHRELASGLSCPVGFKNGTDGNLKIAIDAVGAAAHPHHFLTVTKAGYLSIFETTGNEDGHVILRGGQSPNYDKESVNTAAQMLESAGCSPRLMVDFSHANSGKQHRGQITVGTDVSSQLAQGDNRIVGVMIESHLVEGRQDVVA

SEQ ID NO: 121363 - protein, 298 aa, Unknown
  Bacterial polypetide isolated from the Sargasso Sea
FIPPSRLHNDIPLDHTSANTVSKTRRSIQNILHHNDQKLLVIVGPCSIHDLEAAKEYSKYIQNFREIYNDKLEIVMRVYFEKPRTTIGWKGLINDPHLDDSYDINTGLRRARSLLAYLATRGIPSATELLDPIVPQYIADLISWTAIGARTTESQTHREMASGLSMPIGFKNGTDGSFNTAINAMQSASKSHHFLGVNDNGMASIVNTTGNPDGHIVLRGGSKGPNFESQHVHRISSELRQYNLPHKVMIDCSHGNSNKDFRKQSEVLNNVASQIGNGERNILGVMLESHLKEGNQKL

SEQ ID NO: 121364 - protein, 179 aa, Unknown
  Bacterial polypetide isolated from the Sargasso Sea
IVGPCSIHDPQAALEYAERLKSLADKVSDKIFVVMRVYFEKPRTTVGWKGLINDPELDGSHKINQGIEIARKLLIGINSIGLPCATETLDPITPQYLADLISWSAIGARTTESQTHREMASGLSMPVGFKNGTDGGLRVAINAMKSALQPHHFLGINNEGLSSAIQTSGNRNVHLVLRG

SEQ ID NO: 121365 - protein, 268 aa, Unknown
  Bacterial polypetide isolated from the Sargasso Sea
MKGELEVVMRVYFEKPRTTVGWKGLINDPHMDNSFRINDGLRIARKLLLEINDSGLPAAGEFLDMITPQYVADLMSWGAIGARTTESQVHRELSSGLSCPVGFKNGTDGTIKVAIDAINAAGAPHCFLSVTKWGHSAIVNTSGNSDCHIILRGGKEPNYSAKHVAEVKVGLAKAGLPAQIMIDFSHANSSKQFKKQMEVGADVCRQIASGEQAIMGVMIESHLVEGSQSLESGVPLAYGKSITDACIGWEDTDTILRQLADAVKARRG

SEQ ID NO: 121366 - protein, 235 aa, Unknown
  Bacterial polypetide isolated from the Sargasso Sea
MTTSSNNSALEKTSDLHVVETRPLIPPSRLHNDIPLDHASANTVSKTRRSIQNILHHNDKKLLVIVGPCSIHDLEAAKEYSKYIQNFREIYEDKLEIIMRVYFEKPRTTIGWKGLINDPHLDDSYDINTGLRRARSLLSYLATRGIPSATELLDPIVPQYIADLISWTAIGARTTESQTHREMASGLSMPIGFKNGTDGSFSTAINAMQSASKSHHFLGVNENGMASIINTTGNP

SEQ ID NO: 121367 - protein, 293 aa, Unknown
  Bacterial polypetide isolated from the Sargasso Sea
MVAPAILHSDLPLSDRASETVRQTRQTIQRILRGEDQRLLVIVGPCSVHDVAAAEEYAGALALIRDRLKDSLEIVMRVYFEKPRTTVGWKGLINDPHLDGSYDINTGLRRARSLLLQLAERGLPAATELLDPIVPQYIADLVSWTAIGARTTESQTHREMASGLSMPIGFKNGTDGGVTVAINAMQAAARPHHFLGINRQGHASIVSTTGNPYGHLVLRGGGGQTNFHSEAITSVAAQLKAAALPDRVMVDCSHGNSNKDYRRQSEVLHAVAEQVRQGSTSVLGVMLESNLVE

SEQ ID NO: 121368 - protein, 279 aa, Unknown
  Bacterial polypetide isolated from the Sargasso Sea
PKKLKNILPVSDIVIKNVLNARNDIKSILEGKDSRVLMIVGPCSIHDPQAAIEYAERLKKIADEVSDTILVVMRVYFEKPRTTVGWKGLINDPELDGSHKINEGIKLARQLLLEINSLGLPCATETLDPITPQYLADLISWSAIGARTTESQTHREMASGLSMPVGFKNGTDGGLTVAINAMKSALQPHHFLGINNEGLSSAIQTSGNRNVHLVLRGGSNGPNYDAVSIHKAAESLASEDLPEAIMIDCNHANSGKDPSRQELVLRDAIHQINKGDNSI

SEQ ID NO: 121369 - protein, 256 aa, Unknown
  Bacterial polypetide isolated from the Sargasso Sea
LHNDIPLDHTSANTVSKTRRSIQNILHHNDHKLLVIVGPCSIHDIEAAKEYSQYIQNFREIYKDKLEIIMRVYFEKPRTTIGWKGLINDPHLDDSYDINTGLRRARSLLSYLATLGIPSATELLDPIVPQYIADLISWTAIGARTTESQTHREMASGLSMPIGFKNGTDGSFTTAINAMQSASKSHHFLGVNADGMASIVNTTGNPDSHIVLRGGSKGPNFESQHVQRISAELKQCNLPHKVMIDCSHGNSNKDFR

SEQ ID NO: 121370 - protein, 297 aa, Unknown
  Bacterial polypetide isolated from the Sargasso Sea
PRVLVIVGPCSVHDVDAAIEYANCLAPLREKYSQKLEIVMRVYFEKPRTTVGWKGLINDPHLDNSYDINTGLRKARGLLLDLAKKGMPAATELLDPVVPQYIADLISWTAIGARTTESQTHREMASGLSMPVGYKNGTDGTATIAINAMQAASKPHHFLGINNDGHASIVSTTGNPDGHLVLRGGKNGTNYHLDAINLIADELAKFKMPGRVMVDCSHGNSNKDFRRQSEVLRDVASQLKGGSKNVMGVMIESHLVEGNQKLNSDLSKLTYGQSVTDACINFSTTEVLLEELAESVK

SEQ ID NO: 121371 - protein, 202 aa, Unknown
  Bacterial polypetide isolated from the Sargasso Sea
MTTSSNNSALEKTSDLHVVETRPLIPPSRLHNDIPLDHASANTVSKTRRSIQNILHHNDHKLLVIVGPCSIHDLDAAKEYSKYIQNFREIYKDKLEIIMRVYFEKPRTTIGWKGLINDPHLDDSYDINTGLRRARTLLSYLATRGIPSATELLDPIVPQYIADLISWTAIGARTTESQTHREMASGLSMPIGFKNGTDGSFT

SEQ ID NO: 121372 - protein, 357 aa, Unknown
  Bacterial polypetide isolated from the Sargasso Sea
MTTSSNNSALEKTSDLHVVETRPLIPPSRLHNDIPLDHASANTVSKTRRSIQNILHHNDHKLLVIVGPCSIHDLDAAKEYSKYIQNFREIYKDKLEIIMRVYFEKPRTTIGWKGLINDPHLDDSYDINTGLRRARTLLSYLATRGIPSATELLDPIVPQYIADLISWTAIGARTTESQTHREMASGLSMPIGFKNGTDGSFTTAINAMQSASKSHHFLGVNENGMASIVNTTGNPDGHIVLRGGSKGPNFESDHVKRISAELRQCNLPHKVMIDCSHGNSNKDFRKQSEVLKNVASQISNGEKNILGVMLESHLKEGNQKLLKKEDLQFGRSITDACIDIETTKELLAILYNSISLL

SEQ ID NO: 121373 - protein, 354 aa, Unknown
  Bacterial polypetide isolated from the Sargasso Sea
MTIKTDELRTSLLAKVISPAQLASEYPLTQDAADYLVQQRREVEAIIMGEDHRLLVIIGPCSIHDTQAALDYARRLAVLHQELKDDLCILMRVYFEKPRTIVGWKGLISDPDLDGSFEPNKGLRIARQLLQQITELKLPIATEFLDMVNGQYIADLITWGAIGARTTESQVHREMASALSCPVGFKNGTDGNINIAVDAVRAAKVPHIFYSPDKDGAMSVYRTHGNPYGHIILRGGKKPNYFEQDIEQARLKLESVNVTPRVVVDFSHGNSEKNHLKQLVVAENIMAQMRAGSTAIAGIMAESFLQEGNQKVVEGQPLCYGQSITDACLHWDDSEKLLRDLAKASRDRRELLGK

SEQ ID NO: 121374 - protein, 352 aa, Unknown
  Bacterial polypetide isolated from the Sargasso Sea
MNYKTDDLRIESIKAVTTPLEVCKEIPITEQAAKTTALTRDAIHQILHKNDNRLIVITGPCSIHDVNAAEEYASRLRPLIEKYSDDLLIIMRVYFEKPRTTVGWKGLINDPSLDNSFNINEGLRLARQLLLDLNEMGVPAGTEYLDLITPQYVTDLISWGAIGARTTESQVHRELASGLSCPVGFKNGTYGTTKIAVDAINAATRPHHFLSIRKDGGNAAIVSTKGNVDTHIILRGGKEPNYDAAHINRVSEELKAAKLPENIMIDLSHANSRKEHNLQIDVASEVAEQITNGDSRIIGVMIESHLVEGRQDVKSDNELTYGQSITDACIGWENTVKLIDSFAKASKNRKIN

SEQ ID NO: 121375 - protein, 357 aa, Unknown
  Bacterial polypetide isolated from the Sargasso Sea
MPPHNTDDVRIRELKELTPPAHLIREFACDETVSDVIYNSRNAMHRILHGMEDRLIVIIGPCSIHDTKAAMEYAGRLVEQRKRFAGELEIVMRVYFEKPRTTVGWKGLINDPYMDNSFKINDGLRTARELLLRINELGLPAGTEYLDMISPQYIADLISWGAIGARTTESQVHRELASGLSCPVGFKNGTDGNVKIAVDAIKAASQPHHFLSVTKGGHSAIVSTAGNEDCHIILRGGKTPNYDADSVNAACADIGKAGLAARLMIDASHANSSKKHENQIPVCADIGRQIASGDERIVGVMVESHLIAGRQDLQEGCTLTYGQSITDACIGWDESVAVLEGLAEAVKQRRVTRGSGN

SEQ ID NO: 121376 - protein, 357 aa, Unknown
  Bacterial polypetide isolated from the Sargasso Sea
MPPHNTDDVRIRELKELTPPAHLIREFACSEAASELIYNSRQSMHRILHGMDDRLIVVIGPCSIHDTKAAIEYAGRLVKERERFKGELEIVMRVYFEKPRTTVGWKGLINDPHLDNSFKINEGLRTARELLLQINEMGLPAATEYLDMISPQYIADLISWGAIGARTTESQVHRELASGLSCPVGFKNGTDGNVKIAVDAIKAASQPHHFLSVTKGGHSAIVSTAGNEDCHVILRGGKAPNYDADSVNAACADIGKAGLAARLMIDASHANSSKKHENQIPVCADIGRQIAAGDARIVGVMIESHLVEGRQDLKEGCELTYGQSITDACIAWDDSVKVLEGLAESVKARRVSRGSGN

SEQ ID NO: 121377 - protein, 235 aa, Unknown
  Bacterial polypetide isolated from the Sargasso Sea
MTTSSNNSALEKTSDLHVVETRPLIPPSRLHNDIPLDHASANTVSKTRRSIQNILHHNDQKLLVIVGPCSIHDVEAAKEYSKYIQNFREIYKDKLEIIMRVYFEKPRTTIGWKGLINDPHLDDSYDINTGLRRARSLLSYLATRGIPSATELLDPIVPQYIADLISWTAIGARTTESQTHREMASGLSMPIGFKNGTDGSFSTAINAMQSASKSHHFLGVNENGMASIINTTGNP

SEQ ID NO: 121378 - protein, 355 aa, Unknown
  Bacterial polypetide isolated from the Sargasso Sea
MPSPADLAGALQPALRATRTVHQARHAIVDVLNGTDDRLVVIAGPCSVHDPAAARDYAARLALQRARFADELEIVMRVYFEKPRTTVGWKGLINDPLLDGSERIDAGLHTARALLCDINGAEMPAATEFLDPLSPRYLADLVAWGAIGARTVESQVHRELASSLPIPIGFKNGTDGNVQVAVDAMRAAARAHRFLSVDAGGRLCATASPGNPHTHVVLRGGREPNFDAAAVNAVCERMVAAQCAPRVMIDISHGNSRRQFRNQLGVGTAVAAQVAAGDARIVGVLIESNLIEGRQDLVPGMPLRYGQSITDACLSFADTTPLLETLAYAVRARRRGHAPTPDLDFAREPLLACCA

SEQ ID NO: 121379 - protein, 361 aa, Unknown
  Bacterial polypetide isolated from the Sargasso Sea
MCAFAVEALPTPADLLALHPCPADLATGIDQHRQQVRQILSGEDDRLLVVIGPCSIHDPLAALDYARRLAVLAHDYRDRLQIVMRTYFEKPRTTVGWKGLVFDPHLDGSNDIGHGLQLARQLLLDINRLGLATATEFLDTTSFLYLADLISWGAIGARTTESQVHRQLASALPCPIGFKNGTDGNIRVAIDAIQASEASHLFTAPGSQGGMVVIKSEGNPAGHIILRGGTRPNYHQSDVEEAAERLARQGLTPRLMVDCSHGNSQKLHKNQIRVAGELCRQLGEGSDAIAAVMVESFLQGGSQKPAPLAELVYGQSVTDACLCWDDTQTLLAMLAEAVETRRQHPGRAQPDITRWHAQLAS

SEQ ID NO: 121380 - protein, 347 aa, Unknown
  Bacterial polypetide isolated from the Sargasso Sea
MKNKIHNINVIAKEKLPSPKALKETLPLTSKARKTVLAKRKELMRILDGNDSRLVVVVGPCSIHDTNLAKDYALRLKELSKELEDSFLVLMRVYFEKPRTTTGWKGLINDPNIDDTFQIDKGIHIARSLLIDLNEMGLGVATEALDPIMPQYLGDLTSWTAIGARTAESQTHREMASGLSTPVGFKNGTDGSLAVAVNAIKSSRQSHHFLGLNDGGRITVYQTKGNKYSHVVLRGGAKPNYDSRSIKSCEKQLIDSGLPMKIMVDCSHGNTNKDYRLQPKVAKSIVNQVKKGNQSIMGIMLESNINAGNQKITENLNDLKYGVSLTDACIDWETTEDLLMNLRTSLI

SEQ ID NO: 121381 - protein, 355 aa, Unknown
  Bacterial polypetide isolated from the Sargasso Sea
MTTSSNNQSLEKTSDLHVVETRPLIPPSKLHNDIPLDYTSAETVSNSRRSIQNILHNNDPRILVIVGPCSIHDIEAAKDYSEYIQEFRKIYKDKLEIVMRVYFEKPRTTIGWKGLINDPHLDGSYDINTGLRRARNLLSYLATRGIPSATELLDPIVPQYIADLISWTAIGARTTESQTHREMASGLSMPIGFKNGTDGSFSTAINAMQSASKSHHFLGVNDQGYASIVNTTGNPDGHIVLRGGSKGVNYENQHVKSISSELKVGNLPYKVMIDCSHGNSNKDYRKQSDVLKNVANQIKNGEKNILGVMLESHLKEGNQKLSNRKDLDYGTSITDACINIDTTKNLLQILYDSIL

SEQ ID NO: 121382 - protein, 354 aa, Unknown
  Bacterial polypetide isolated from the Sargasso Sea
MTIKTDELRTSLLAKVISPAQLASEYPLTQDAADYLVQQRREVEAIIMGEDQRLLVIIGPCSIHDTQAALDYARRLAVLHQELKDDLCILMRVYFEKPRTIVGWKGLISDPDLDGSFEPNKGLRIARELLQQITELKLPIATEFLDMVNGQYIADLITWGAIGARTTESQVHREMASALSCPVGFKNGTDGNINIAVDAVRAAKVPHIFYSPDKDGAMSVYRTHGNPYGHIILRGGKKPNYFEQDIEEARLKLESVDVTPRMVVDFSHGNSEKNHLKQLVVADNIMAQMRAGSTAIAGVMAESFLQEGNQKVVEGQPLCYGQSITDACLHWDDSEKLLRDLAKTSRDRRELLGK

SEQ ID NO: 121383 - protein, 227 aa, Unknown
  Bacterial polypetide isolated from the Sargasso Sea
MTTSSNNSALEKTSDLHVVETRPLIPPSRLHNDIPLDHTSADTVSKTRRSIQNILHHNDRKLLVIVGPCSIHDLDAAKEYSKYIQNFREMYKDKLEIIMRVYFEKPRTTIGWKGLINDPHLDDSYDINTGLRRARTLLSYLATHGIPSATELLDPIVPQYIADLISWTAIGARTTESQTHREMASGLSMPIGFKNGTDGSFTTAINAMQSASKSHHFLSVNNNGMAS

SEQ ID NO: 121384 - protein, 352 aa, Unknown
  Bacterial polypetide isolated from the Sargasso Sea
MYYQNDDVRINEVKELLPPIAILERFPASENAAATVFNARQSIHNILARQDDRLLVVIGPCSIHDPKAALEYGQRLVALRERYQDQLEVVMRVYFEKPRTTVGWKGLINDPYMDNSFKLNDGLRTARKLLVDLNDSGMPTAGEFLDMITPQYVADMMCWGAIGARTTESQVHRELASGLSCPVGFKNGTDGTIKVAIDAIGAANAPHHFLSVTKFGHSAIVSTKGNPDCHIILRGGREPNYSAGHVAQISEQLKKAKLVDNIMIDFSHANSSKQYQRQMQVANEVAEQIAAGNKAIFGVMVESHLVEGRQDLIEGQALCYGQSVTDACIGWEDTERLLAVLNQSVIERRQRD

SEQ ID NO: 121385 - protein, 349 aa, Unknown
  Bacterial polypetide isolated from the Sargasso Sea
MQFTTDNIRIAGMQELMPANRLIEELPITEEASRVVFESRQEISDILSKKDDRLIVVVGPCSIHDPEAGIDYAEKLKGEIDKYKNELKIVMRVYFEKPRTTVGWKGLINDPDLDNSFNINKGLNIARKLLLQINEMGVCAATEFLDVITPQYIADLISWGAIGARTTESQVHRELASGLSCPVGFKNSTNGSIQVAIDAIGSAKNPHIFLSVTKEGNSAVFSSSGNSDCHVILRGGKEPNYSAEFISEASNTLKSSNLEESLMVDMSHGNSQKQHKNQIEVCNNVSSQISSGENRIVGVMIESNIEEGNQSMKDINNLVYGKSITDACLNFEDTKSCLEKLATSIQERR

SEQ ID NO: 121386 - protein, 354 aa, Unknown
  Bacterial polypetide isolated from the Sargasso Sea
MSIHTDELRTRRLESLITPSELAHAFPLSDTVAQNLLDARREVEAILAGEDQRLLVIVGPCSIHDPAAAHEYALRLNALREQYKESLCIVMRTYFEKPRTIVGWKGLINDPRLDGSFDVNEGLKLARKLLVDINALGMPTATEFLDMVTGQYISDLITWGAIGARTTESQVHREMASALSCPVGFKNGTDGNTRIAIDAVRAARHSHIFYSPDKDGKMTIYRTAGNPYGHVILRGGHRPNYDTASIDEACEALADVGLPERLVVDFSHGNSMKDHRRQLLVAQDICDQLRRGRTGIAGIMAESFLVEGRQDVENGCAVTFGQSITDACLSWSDTETLLAMLAEAAQVRLAKQQA

SEQ ID NO: 121387 - protein, 351 aa, Unknown
  Bacterial polypetide isolated from the Sargasso Sea
MTINKKTDDLKISSTRELITPLSLITEIPMSDRAIQTVVDSRHQIANIIHKKDKRLLIIVGPCSIHNEEAALDYAEKLMKLKKDVESNIFIVMRVYFEKPRTVLGWKGLINDPDLDNSFNINKGIKKARKLLLDLAEMGMPAGHEYLDLISPQYIADLISWGAIGARTTESQSHRELASGLSCPVGFKNGTDGGIQIAIDAIKSASNPHNFLSVTKEGKSAIFSTTGNKDCHIILRGGKNSNYDSSSVLNVTKQLEKNNLGASIMIDSSHANSQKDFSKQKNVVRDIQNQIVNGNQAICGLMIESNLVEGRQEIGDGKNLTYGQSITDACIGWNETEKLILETNNILEKNK

SEQ ID NO: 121388 - protein, 349 aa, Unknown
  Bacterial polypetide isolated from the Sargasso Sea
MHKTSDLRISGRQEVISASSLLDQQPISDISSQTVFNSRKEFSEILSKKDKRLAVVVGPCSIHDTESAMEYANLLLKEKKALEKELLIVMRVYFEKPRTTVGWKGLINDPDLDNSFNIDKGLSVSRQLLRDINDLGMPAGTEFLDVITPQYIADLISWGAIGARTTESQIHRELASGSSCPIGFKNATNGGIQVAADAIGSALHPHKFLSVTKEGKAAIFSSSGNKDCHVILRGGKEPNYEKEFIDQTSEILKSNSLEDSIMVDMSHGNSSKQHKKQIDVCDNIASQIKSGETRITGVMIESNIEEGNQKADDLNNLTYGKSITDACINWQDTKDCLHKLADSVRIRNN

SEQ ID NO: 121389 - protein, 349 aa, Unknown
  Bacterial polypetide isolated from the Sargasso Sea
MKSKIHNINVVAKEKLPSPKALKDTLPLSNKARKTVLSKRKELMSILDGKDSRLVVVVGPCSIHDTDLAKDYASRLKDLSKEVEDAFLILMRVYFEKPRTTTGWKGLINDPNIDDTFQIDKGIHIARSLLIDLNEMGLGVATEALDPIMPQYLGDLTSWTAIGARTAESQTHREMASGLSTPVGFKNGTDGSLAVAVNAIKSSRQSHHFLGLNDGGRITVYQTKGNKYSHVVLRGGAKPNYDSRSIQSCETKLNDSKLPMKIMVDCSHGNTNKDYRLQPKVAKSIVNQVKKGNQSIMGIMLESNINEGNQKITENLDDLKYGVSLTDACINWETTEDLLMNLRTALISK

SEQ ID NO: 121390 - protein, 355 aa, Unknown
  Bacterial polypetide isolated from the Sargasso Sea
MTTSSNNSALEKTSDLHVLETRPLIPPSRLHNDIPLDHDSANTVSKTRRSIQNILHHNDQKLLVIVGPCSIHDLEAAKEYSKYIQKFREMYNDKLEIIMRVYFEKPRTTIGWKGLINDPHLDDSYDINTGLRRARSLLSYLATRGIPSATELLDPIVPQYIADLISWTAIGARTTESQTHREMASGLSMPIGFKNGTDGSFTTAINAMQSASKSHHFLGVNENGMASIVNTTGNPDGHIVLRGGSKGPNFESDHVQRISAELRQCNLPHKVMIDCSHGNSNKDFRKQSEVLKNVASQISNGEKNILGVMLESHLKEGNQKLLKKEDLQFGRSITDACIDIETTKELIAILYDSLS

SEQ ID NO: 121391 - protein, 342 aa, Unknown
  Bacterial polypetide isolated from the Sargasso Sea
MYYQNDDVRINEVKELLPPIAILERFPASENAAATVFNARQSIHNILARQDDRLLVVIGPCSIHDPKAALEYGQRLVALRERYQDQLEVVMRVYFEKPRTTVGWKGLINDPYMDNSFKLNDGLRTARKLLVDLNDSGMPTAGEFLDMITPQYVADMMCWGAIGARTTESQVHRELASGLSCPVGFKNGTDGTIKVAIDAIGAANAPHHFLSVTKFGHSAIVSTKGNPDCHIILRGGREPNYSASHVAQISEQLKKAKLVDNIMIDFSHANSSKQYQRQMEVANDVAEQLAAGNKAIFGVMVESHLVEGRQDLIEGQALCYGQSITDACIGWDDTERLLAVLN

SEQ ID NO: 121392 - protein, 313 aa, Unknown
  Bacterial polypetide isolated from the Sargasso Sea
SRQAIHQILAGEDQRLLVVIGPCSIHDPAAALEYGKRLKVLRDELKGQLEIVMRVYFEKPRTTVGWKGLINDPYLDNSCQINDGLRIGRKLLLDLNDMGLPTASEFLDMITPQYVADLMSWGAIGARTTESQVHRELASGLSCPVGFKNGTDGTIKVAIDAIGAASAPHHFLSVTKYGHSAIVATRGNPDCHIILRGGREPNYSAAHVDEVVKGLDKAGLPQKVMIDFSHANSSKQFKNQMLVAEDVAGQLRAGSRAVFGVMVESHLVEGRQDLVKGCELTVGQSITDACIGWADTEILLRNLADAVATRNAG

SEQ ID NO: 121393 - protein, 109 aa, Unknown
  Bacterial polypetide isolated from the Sargasso Sea
MENKTINCNGIKISNNSSLILISGPCQLETEQHAIDMAGKIKEITDKFGIGFIYKTSFDKANRTSLAGKRGAGLDKSLPVFDKIKKDLKIPVLTDVHSEEQCSLVSKHV

SEQ ID NO: 121394 - protein, 266 aa, Unknown
  Bacterial polypetide isolated from the Sargasso Sea
MITDKIEKNKFLLIAGPCVIEGKDIAYNITERLLEITSKLSIPFVFKGSYRKANRTRLDSFTGIGDHEALNILGDISSKFNIPVITDIHSSNEAEMAAEYVDIIQIPAFLARQTDILVSAAATGKTINIKKGQFMSAESMKYAVNKVVESGNKNVMITERGTQFGYNDLIVDFRGISELKKIAPTILDVTHSVQKTNQTSGVTGGNPEYIESLARAGIVNDVDGIFLETHTDLSKAKSDGTNMLDLSKVEDLLTNLLTIREATSKL

SEQ ID NO: 121395 - protein, 85 aa, Unknown
  Bacterial polypetide isolated from the Sargasso Sea
MVKQKIINLKNIKIGGPNPVVFILGPCQIENRDHSLMIAEKISNICEKFSAKFIFKSSYDKANRSSINSTRGVGLEEGLKILQEI

SEQ ID NO: 121396 - protein, 56 aa, Unknown
  Bacterial polypetide isolated from the Sargasso Sea
SVLSRAAVAVRVAGIFLETHEDPDNAPSDGPNMVKVSDLPFLLEKLLEIDRIVKNI

SEQ ID NO: 121397 - protein, 91 aa, Unknown
  Bacterial polypetide isolated from the Sargasso Sea
MQELGYPVVFDATHSAQLPGGDGKTTGGMRSVIPTLAKSAVAAGCNGIFMEVHDNIQDAKSDAYTQWPLEQLEPVLSLLIEIRSAVTDRRP

SEQ ID NO: 121398 - protein, 141 aa, Unknown
  Bacterial polypetide isolated from the Sargasso Sea
MKNIIVNCKNIEISNNNKICLIAGPCQLETEQHAMDMAGKIKEIAKKFNIGFIYKTSFDKANRTSHKGKRGAGLEKSLPVFDKIKKELKIPILTDIHNEESCSIVADHVDIFTIPAFLCRQTDLLIAAGKTNKIINVKKGT

SEQ ID NO: 121399 - protein, 43 aa, Unknown
  Bacterial polypetide isolated from the Sargasso Sea
AGVFIETHQDPDNAPSDGPNMVPLDELENLLHQLSDIDKLIKK

SEQ ID NO: 121400 - protein, 47 aa, Unknown
  Bacterial polypetide isolated from the Sargasso Sea
FIFRIAGFFIETHPNPETALSDGPNMVYLHKMPELLNAINKINKAAK

SEQ ID NO: 121401 - protein, 215 aa, Unknown
  Bacterial polypetide isolated from the Sargasso Sea
MGTGGKVAAAGYTGVEKGGHEVPSMPAGAAREGRSGAAGGDRASTHLIRGELGGEPQASRSGPDGTLKSKEYRASDGLSEVDQGLNGFPQGRTGLLRTRSSDAEGPSGSERDAAPRETLRGPGLEEPTGQDGPPSADARWQYAGSDVGLRGESFRGLSSFLLESGRWLRSILFSQNNNTGNYFASLDERAMGELPMETTAARSAQQSGGGSGDGS

SEQ ID NO: 121402 - protein, 58 aa, Unknown
  Bacterial polypetide isolated from the Sargasso Sea
KRIVPHLARAAMRFGVGAIFIETHDDPDNAPSDGPNMVPLKELKALLKKLTEIDKLVK

SEQ ID NO: 121403 - protein, 118 aa, Unknown
  Bacterial polypetide isolated from the Sargasso Sea
MKNITVKCGNIDISNANKFCLIAGPCQLETEQHAMDMSGKIKEITDKLGINFIYKTSFDKANRTSLKGKRGIGLEQSLPIFDKIKKEVKVPILTDIHNAEQCSEVARHVDILQIPAFL

SEQ ID NO: 121404 - protein, 98 aa, Unknown
  Bacterial polypetide isolated from the Sargasso Sea
NDFKGIDIMKKYEYPVIFDATHSVQQPGGMGDKSGGQREHIPSLCKAAISIGVAGLFLETHNDPDNAPSDGPNMINIKELKNLLIQLKQFDDIAKNHA

SEQ ID NO: 121405 - protein, 58 aa, Unknown
  Bacterial polypetide isolated from the Sargasso Sea
YVPALSKAAVAVGISGVFMETHNDPDKAPSDGPNMVKLSDMNDLVKKLIEIDNLVKEK

SEQ ID NO: 121406 - protein, 137 aa, Unknown
  Bacterial polypetide isolated from the Sargasso Sea
MQNKIINCNGIQIANNKKITLIAGPCQLESEQHAMDMSGKIKEITSKLNIGFVYKTSFDKANRTSLKGKRGVGLENSLPVFDKIKKQMDIPILTDVHNETHCELVSKHVDIIQIPAFLCRQTDLLIAAAKTNKIYHG

SEQ ID NO: 121407 - protein, 109 aa, Unknown
  Bacterial polypetide isolated from the Sargasso Sea
MQIDNSKLLIMAGPNVIESEDHTLYMASELKKLFEKFKNIQYVFKTSFDKANRTSFNSYRGLGMDEGLRILKRVKDELNLPIITDVHEPWQCEKVAQIADILQIPAFLC

SEQ ID NO: 121408 - protein, 128 aa, Unknown
  Bacterial polypetide isolated from the Sargasso Sea
MTSIKVNCENIEISNDNKICIIAGPCQLETEQHAMDMAGKIQEITKKFDLGFIYKTSFDKANRTSLKGKRGAGLEASLPVFNKIKKELNVPILTDIHNIEQCSIVADHVDVLQIPAFLCRQTDLLIAA

SEQ ID NO: 121409 - protein, 73 aa, Unknown
  Bacterial polypetide isolated from the Sargasso Sea
PGGLGNKSGGKREFVSTLAKASIAVGVAGLFIETHQDPDNAPSDGPNMLDIKNFEKLIIKLIEIDLIVKNSIE

SEQ ID NO: 121410 - protein, 139 aa, Unknown
  Bacterial polypetide isolated from the Sargasso Sea
MENKIINCNGIKISNKNSLILIAGPCQLESEQHSMDMAGRIKEITDKYNIGFIYKTSFDKANRTSLKGKRGAGLDKSLPVFDKIKKVLKIPILTDVHNVEQCSIISSHVDVLQIPAFLCRQTDLLIAAAKTNKIINVKK

SEQ ID NO: 121411 - protein, 99 aa, Unknown
  Bacterial polypetide isolated from the Sargasso Sea
MLNKVVKFNNFEISNNNKISLISGPCQLETEQHAMDMAGKIKEIASKFEIGFIYKTSFDKANRTSLKGKRGAGLDSSLPVFDKIKSELKIPVLTDVHNV

SEQ ID NO: 121412 - protein, 51 aa, Unknown
  Bacterial polypetide isolated from the Sargasso Sea
RAAAAVGVAAIFLETHQDPDNAPSDGPNMVPLNKLDELVNQIVEIDKLIKK

SEQ ID NO: 121413 - protein, 78 aa, Unknown
  Bacterial polypetide isolated from the Sargasso Sea
THSLQKPGGLGDKTDGRGQNVLDLAKSGMALGLAGIFLETHPDPKNALCDGPCALHLDLIEDFLIKIKAIDDLVKLSN

SEQ ID NO: 121414 - protein, 120 aa, Unknown
  Bacterial polypetide isolated from the Sargasso Sea
MSFPTRRISIGSVDVGNDLPIVLIAGPCQIESLEHTLMIAAKLVSVCEKQSIKLIFKASFDKANRTSITGRRGIGLEEGMRVLQRVKKEFGCPVLTDVHEKYHCDIVSEVVDVIQIPAFL

SEQ ID NO: 121415 - protein, 124 aa, Unknown
  Bacterial polypetide isolated from the Sargasso Sea
KKCESVGNKNIILCERGNIFGYNNLVVDILNFQIMKQSTKPVFFDVTHSLQQPGTLEKSTGGRGEYVLELAKAGISQGIAGLFLETHPDPSKALCDGPCALKLSKLESFLMEIFELDYLIKRNR

SEQ ID NO: 121416 - protein, 100 aa, Unknown
  Bacterial polypetide isolated from the Sargasso Sea
MNNHKVKCSNFEIANNKPFTLIAGPCQLESEEHAIKISSELKKITSELGINLIYKTSFDKANRTSLKGKRGLGLEKSLPIFDKIRKEVGVPVLTDVHTTE

SEQ ID NO: 121417 - protein, 268 aa, Unknown
  Bacterial polypetide isolated from the Sargasso Sea
PQFPKKIVAITSSTGSVIQDMKNVLSRRYPIGELLLIPVSVQGENSIDDICDAFKITNNFSDIDVIILARGGGSIEDLWSFNDERVAKAIYGSKHPVVSAIGHETDYTIADYVADYRAPTPSVAAEIIAPDMKNVKNNINEKINTGKNILEKKLNEKFYRLDLNLEKLNNNYPDFLEMKKNIYNLISSMNFVISNTIKSKKEKITNIKNSINILNPKLSLKRGFALVRNKNGKIVNKTASISLGEHLSFELSDGSAITEVKEINQDDK

SEQ ID NO: 121418 - protein, 69 aa, Unknown
  Bacterial polypetide isolated from the Sargasso Sea
GGKGGSSDGQSEFIIPVSRGAVGVGIAGIFIETHPDPKNALSDGPNSLPLNNLKPLLEQLLAIDEIVKK

SEQ ID NO: 121419 - protein, 52 aa, Unknown
  Bacterial polypetide isolated from the Sargasso Sea
AGISVGFDGLFIETHPDPKNAKSDGLNMLDINLIEALLKKLTMIRSTINSFN

SEQ ID NO: 121420 - protein, 111 aa, Unknown
  Bacterial polypetide isolated from the Sargasso Sea
MQDKIVKCNNLNISNSKPFTLIAGPCQLENEKHAVDIAYQLKDITQKLGVGLIYKTSFDKANRTSIKGKRGAGLETSLPIFDKIRKEIGIPVLTDVHTIEQCKIVSSHVDV

SEQ ID NO: 121421 - protein, 187 aa, Unknown
  Bacterial polypetide isolated from the Sargasso Sea
KAYGAEVILVSKEQDMEGARDLALSMSQNNEGYVLDQFSNKSNYLSHYETTGPEIWKQTNHSVTHFISAMGTTGTITGVSRFLKERNDNIEIIGVQPADGSRIPGIRRWKKEYTPKIFQNAIVDKIIDIDQQDAEDSMTSLSTQTGLFVGMSAGANIFIAKKVATKVKNSVIVTILCDRGDRYLSKL

SEQ ID NO: 121422 - protein, 43 aa, Unknown
  Bacterial polypetide isolated from the Sargasso Sea
MGFVIETHPDPENALSDGPNSLPLDNLKPLLEQLLAIDKIVKQ

SEQ ID NO: 121423 - protein, 100 aa, Unknown
  Bacterial polypetide isolated from the Sargasso Sea
VSDFRSIPILKSYGFPVVYDATHSVQQPGGKGDSSGGQREFISTLSKAAVSIGIAALFLETHNDPDNAPSDGPNMVPLNEMYNLIENIIEFDILAKKNNF

SEQ ID NO: 121424 - protein, 124 aa, Unknown
  Bacterial polypetide isolated from the Sargasso Sea
MNSIQVNCGNVEISNNNKICIIAGPCQLETEQHAMDMAGKIQEITKKFGLGFIYKTSFDKANRTSLKGKRGAGLEASLPIFDKIKKELNVPILTDIHSIDQCSEVADHVDILQIPAFCADRLIF

SEQ ID NO: 121425 - protein, 116 aa, Unknown
  Bacterial polypetide isolated from the Sargasso Sea
MKNLTVKCGNISISNSNKFFLIAGPCQLESEQHALDMSGKIKEITSKLNIGFIYKTSFDKANRTSLKGKRGIGLEQSLPIFDKIKKETNIPILTDIHNVEQCSIVAKHVDILQIPA

SEQ ID NO: 121426 - protein, 289 aa, Unknown
  Bacterial polypetide isolated from the Sargasso Sea
MFKKDLLKNKRILITGGGTGLGKEMAIHFAKHGAVLYICGRRENVLKETADEISEKCSTKVNYQTLDIRASKDVDDYVQSIFEESPLDGLVNNAAGNFISPTKDLSHKGFDAIANIVFHGTFYMTHSVGKRWIESSCKGSIINILTTWVWTGSPYVVPSAMSKSGINAMTKSLAAEWGKYGIKVNGIAPGPFPTKGAWERLNPENNDGDMMSTVPLGRVGEMSELQNLATFLMADGCDYLTGQTIGIDGAQYLTGGGTFSQLDKLSDEDWQNMRKLIRDANNKDKANRS

SEQ ID NO: 121427 - protein, 99 aa, Unknown
  Bacterial polypetide isolated from the Sargasso Sea
VNDFKGLDIMKRYEYPVIFDATHSVQQPGGLGDKSGGQREHIPSLCKAAISIGVAGLFLETHNDPDNAPSDGPNMINIKDLKNLLIQLKQFDDIAKNHA

SEQ ID NO: 121428 - protein, 62 aa, Unknown
  Bacterial polypetide isolated from the Sargasso Sea
MNKAVKLNNFEFSNYDKLNLIAGPCVLESHSHAKKMVEALLEITTKLKINFVYKTSFDKANR

SEQ ID NO: 121429 - protein, 53 aa, Unknown
  Bacterial polypetide isolated from the Sargasso Sea
LSRAATAVGIAAIFLETHQDPDNAPSDGPNMVPLNKLENLISQIVEIDNLVKK

SEQ ID NO: 121430 - protein, 162 aa, Unknown
  Bacterial polypetide isolated from the Sargasso Sea
SCFFMQTTDLVVEAAKTGKIINLKKPQFMSAKEIFHVVKKCESVGNKNIILCERGNIFGYNNLVVDILNFQIMKESTKPVFFDVTHSLQQPGTLEKSTGGRGEYVLELAKAGISQGIAGLFLETHPDPSKALCDGPCALKLSELESFLMEIFELDSLIKRNR

SEQ ID NO: 121431 - protein, 121 aa, Unknown
  Bacterial polypetide isolated from the Sargasso Sea
KCNHFGNENILLCERGSIFGYDNLIVDFLGIDEIKKFAPTILDITHSLQLPGGKGKSADGRSSQAKVLGTAAAAIGLAGFFIEVHPNPENALCDGASATRLSEFESLLLELKKFDELSKSL

SEQ ID NO: 121432 - protein, 232 aa, Unknown
  Bacterial polypetide isolated from the Sargasso Sea
MIQFKELFDKKNSFLLIAGPCAIESEEIAFEIADKIHKISQKLDINFVFKGSFKKANRSKIDSFTGIGDEKALEIIKKVGNSFSIPTTTDIHEVKDAELAAKHVDILQIPAFLARQTDLIVAAARTSKIVNIKKGQFMNPTSMKFAVDKVKDSGNDKVLITERGNMFGYQDLVVDFRGIPKMKEYAPVILDVTHSLQQPNQPSGVTGGHPELIETIAKAGIASGVDGLFIET

SEQ ID NO: 121433 - protein, 192 aa, Unknown
  Bacterial polypetide isolated from the Sargasso Sea
RELKKKFNIEILTDVHESHQPGELDVVDIFQIPAFLCRQTDLLKAAAQTGKPVNVKKGQFLSPQEMGNVKEKLISFGCDQIILTERGTTFGYNNLVVDFRSIPILKTFGWPVAIDATHSVQMPGKQGNQSGGDRSFAKYMMRCGLVCGADVVFAEVHNDPDNAPSDGPNMLHLDTFENFVKEIRKWFDASLD

SEQ ID NO: 121434 - protein, 84 aa, Unknown
  Bacterial polypetide isolated from the Sargasso Sea
GYPVVFDGTHSVQQPGGQGESSGGQREFVEYLSRAAVAVGVAAIFLETHEDPDNAPSDGPNMVPLNKMDELINQIVEIDNLVKK

SEQ ID NO: 121435 - protein, 119 aa, Unknown
  Bacterial polypetide isolated from the Sargasso Sea
WNDNIILCERGSSFGYDNLIVDFLGISEQKAFNYPIILDVTHSLQLPGGQGNSAGGRSHQAEDLARAAIALKISGLFIEVHPNPDKALCDGPSATKLEDFEDMITKIKKIDDLVKSEKF

SEQ ID NO: 121436 - protein, 171 aa, Unknown
  Bacterial polypetide isolated from the Sargasso Sea
MIIVDIIQIPVFLCRQTDLLLAAGRTNKIINVKKGQFLAPQDVKNIFEKIESVNNNKILITERGTFFGYNNLVNDFRSLEIMKQFNYPVIFDGTHSVQQPGGLGDKSGGKREYVAPLSKAAASIGVAGIFLETHNNPDNAPSDGPNMLNLKDLKKLLIKLKEFDKIAKTNA

SEQ ID NO: 121437 - protein, 92 aa, Unknown
  Bacterial polypetide isolated from the Sargasso Sea
MTKKVTVDKVQYGTGSLPLIAGPCVIESREHSLKMAEAIRSITDSLGMPFIYKSSFDKANRTATNSFRGPNIDEGLSILSEIKKEIDVPVLN

SEQ ID NO: 121438 - protein, 82 aa, Unknown
  Bacterial polypetide isolated from the Sargasso Sea
IFFDGTHSVQQPGGLGEKSGGQREFVEYLSRAATAVGIAGIFLETHQDPDNAPSDGPNMVPLDKLENLISQIVEIDTLIKKS

SEQ ID NO: 121439 - protein, 78 aa, Unknown
  Bacterial polypetide isolated from the Sargasso Sea
IPGGLGNSAAGRRGSIREMGLAGLSQKIAGLFLEAHPEPDKALCDGPSALKLNQLEPFLEQMKAIDVMVKSFKTLDTE

SEQ ID NO: 121440 - protein, 62 aa, Unknown
  Bacterial polypetide isolated from the Sargasso Sea
MAQKIIKVRDIEIANDKPFVLFGGINVLESRDLAMQACEEYVRVTEKLGIPYVFKASFDKAN

SEQ ID NO: 121441 - protein, 100 aa, Unknown
  Bacterial polypetide isolated from the Sargasso Sea
NTLVSDMRSIPIMSKNGYPVIFDGTHSVQQPGGLGEKSGGQREFVKYLSRAATAVGIAGIFLETHQDPDNAPSDGPNMVPLNKLESLISQIVEIDNLVKK

SEQ ID NO: 121442 - protein, 145 aa, Unknown
  Bacterial polypetide isolated from the Sargasso Sea
KTNKIINVKKGQFLSPYEVPNIFQKIESTGNQNIMITERGTSFGYNNLINDFKSLDIMKNYLYPVIFDATHSVQEPGAMGEKSGGKREFVSTLSKAAVAVGVSGIFIETHNDPDNAPSDGPNMLHIENLESLISKLIELDTVSKK

SEQ ID NO: 121443 - protein, 62 aa, Unknown
  Bacterial polypetide isolated from the Sargasso Sea
GDRKFVPALSKAAVAVGVSGVFMETHNDPDNAPSDGPNMVKLSNMSDLVKKLIEIDNLVKEK

SEQ ID NO: 121444 - protein, 94 aa, Unknown
  Bacterial polypetide isolated from the Sargasso Sea
MRSLPIMAKIGYPVVFDGTHSVQQPGGLGEKSGGQREFVEYLTRAAVAVGVAAVFLETHQDPDNAPSDGPNMIPLDKLENLLNQIVEIDNLVKK

SEQ ID NO: 121445 - protein, 74 aa, Unknown
  Bacterial polypetide isolated from the Sargasso Sea
MTARQIQLGNITFANDRRFALLGGVNVLEDLDFALRCAGHYKQVCERLGIPLVFKASYDKANRSSIHSFRGPGL

SEQ ID NO: 121446 - protein, 77 aa, Unknown
  Bacterial polypetide isolated from the Sargasso Sea
RGSSSGGQREFVAPLARAAAAVGIDGIFMEVHPNPEEALSDGPNMVPLNKLEGLIKDIINIRNAVGDKACSSSIEKI

SEQ ID NO: 121447 - protein, 85 aa, Unknown
  Bacterial polypetide isolated from the Sargasso Sea
MVFPIVFDATHSVQQPGGMGEKSGGQREFVPHLARAAIAVGVGAIFIETHEDPDNAPSDGPNMVPLKEMKNLLKKLTEIDNLIKK

SEQ ID NO: 121448 - protein, 130 aa, Unknown
  Bacterial polypetide isolated from the Sargasso Sea
PWDMKHVVAKINEAGNNNILLTERGTSFGYNTLVSDMRALPIMGELGYPIIFDATHSVQQPGGLGKSSGGQREFVPALARAAAAVGVNGLFIESHESPDQAPSDGPNMLPFSQMPEVLDSVVRVHQAMQN

SEQ ID NO: 121449 - protein, 98 aa, Unknown
  Bacterial polypetide isolated from the Sargasso Sea
MSLFFFIREIFLMSNSSFKPTVIAGPCLAESYEIMEEVCESLKSLSDELGFQLIFKASFDKANRSSFSSFRGYGLEKTLFWFSELKRKYQLEILTDVH

SEQ ID NO: 121450 - protein, 70 aa, Unknown
  Bacterial polypetide isolated from the Sargasso Sea
MEAWGEKSGGQREFVPYLARAAIAVGVGAIFIETHEDPDNAPSDGPNMVPLNEVKDLLKKLTEIDSLVKK

SEQ ID NO: 121451 - protein, 130 aa, Unknown
  Bacterial polypetide isolated from the Sargasso Sea
MSDIEVKLNSNISFGNHLPLTLIAGPCVLESKQHAIDISGYLKELTSRLNINFVYKTSFDKANRTDLTNLRGIGLNQSIEIFKEIKQEIGCPILTDVHSPEQCEMLEQVVDIIQIPAFLCRQTDLLVKAA

SEQ ID NO: 121452 - protein, 74 aa, Unknown
  Bacterial polypetide isolated from the Sargasso Sea
MTVKVSNLSIDNGSRLTLISGPCVIESKDLIHDVAGRIKEITDSLEIGYIFKSSFDKANRTSIDSFRGPGMEEG

SEQ ID NO: 121453 - protein, 201 aa, Unknown
  Bacterial polypetide isolated from the Sargasso Sea
ERLFAVREETGLRLLTDIHEPHQAAPAAEVVDVLQIPAFLCRQTDLLTAAGQTGCAVNVKKGQWVAPEEMGAAVHKVRTAGGSICAVTERGTAHGYGDLVVDMRSFARLRKATGAVVLFDATHSIQRAGAIGGATGGDPHHITALARAAVAAGCDGIFLETHPQPSEAPSDGTNMLPLHELPDLVEQILAVRTAIEGSLGS

SEQ ID NO: 121454 - protein, 105 aa, Unknown
  Bacterial polypetide isolated from the Sargasso Sea
MNTQKTISVNDISLSNDNSFVLIGGLNVLETKDLNFKVAETFKEITSRLQIPYIFKASFDKANRSSMDSYRGPGMEEGLRILEDIKHALEIPILTDIHEPQQAKP

SEQ ID NO: 121455 - protein, 120 aa, Unknown
  Bacterial polypetide isolated from the Sargasso Sea
MQKSVDLGNTVFSNEKKLVLIAGPCVLESYEHAKMMTESLLEIASRLKIDFVYKTSFDKANRTSINSERGLGIDQSIEIFNKLRSEYGIHILTDIHNIDDCDKIKDHVDILQIPAFLCRQ

SEQ ID NO: 121456 - protein, 134 aa, Unknown
  Bacterial polypetide isolated from the Sargasso Sea
MDNKLVKCGKLNISNQNTFTLIAGPCQLESEKHALDISTELKKITEKLGIGLIYKTSFDKANRTSLKGKRGAGLEKSLPVFDKIRKEVGIPVLTDVHTAEQCTVVAKHVDVLQIPAFLCRQTDLLIAAAKTGKV

SEQ ID NO: 121457 - protein, 58 aa, Unknown
  Bacterial polypetide isolated from the Sargasso Sea
LAGLSQKIAGLFLEAHPDPDRALCDGPSALRLDQLEPFLEKMQAVDELVKSFETLDPL

SEQ ID NO: 121458 - protein, 70 aa, Unknown
  Bacterial polypetide isolated from the Sargasso Sea
GLGEKSGGQREFVEHLSRAAVAVGVAALFIETHQDPDNAPSDGPNMLHLNNLENLLYQIVEIDNLIKNNE

SEQ ID NO: 121459 - protein, 166 aa, Unknown
  Bacterial polypetide isolated from the Sargasso Sea
MFYYPIKIEKGKKITIIGGVNVLSDIDEAIEIGLKFKEACHRNKFPYVFKASFDKANRTSFDSYRGPGFSKGLEMLREIKNILRVPILTDIHETHQASKAAEVCDMLQLPAFLARQTDLIQALAKTGKPINIKKPQFISPDQIKFIVQKFSKFGCEDVVICERGSM

SEQ ID NO: 121460 - protein, 46 aa, Unknown
  Bacterial polypetide isolated from the Sargasso Sea
LAPWDMKNVIDKILHNGNDQILLTERGSSFGYNTLVSDMRAIPQMS

SEQ ID NO: 121461 - protein, 189 aa, Unknown
  Bacterial polypetide isolated from the Sargasso Sea
MQAVTIGNVACGGDAPLLLITGPCQIESADHALYCAEALAKMAATAGMGFVYKSSYDKANRTSAGAARGVGMDSGLEILAMVKAKIGVPVLSDVHLPEQCAAAAEVLDIIQIPAFMCRQTDLLVEAAKTGCVINVKKGQFLAPWDMEHVAAKITKAGNDKLLLTERGTSFGYNTLVSDMRAFARWRGGA

SEQ ID NO: 121462 - protein, 89 aa, Unknown
  Bacterial polypetide isolated from the Sargasso Sea
MSSQKTISVNDINLCNENSFVLIGGLNVIETKDLALKVAETFSEITSRLKIPYIFKASFDKANRSSIDSFRGPGMEEGLRILEEVKQAF

SEQ ID NO: 121463 - protein, 95 aa, Unknown
  Bacterial polypetide isolated from the Sargasso Sea
MNKVILDKIIFGDSSIPLIGGPCVIESRDHCLGMAEKIIEITTKLNTPFIFKSSFDKANRTSISSFRGNGLDDGLKILEEIKKTFKRSNNDRYSS

SEQ ID NO: 121464 - protein, 254 aa, Unknown
  Bacterial polypetide isolated from the Sargasso Sea
FLLISRSMVQFEGEDIALKIANKLVSITSKLSIPLVFKGSYRKANRTRLDSFTGIGDLKALKILKKINSEFNIPVITDIHGKDEAEFAAEFVDILQIPAFLARQTDLLVSAAKTGKVVNIKKGQFMSAESMKYAVDKVKQSGNNNIMLTERGTQFGYNDLIVDFRGISELKKLAPTILDVTHSVQRPNQSTGITGGSPEHIESLAKAGIVNNVDGIFLETHTNPSEAKSDGSNMLDIKNLNKLLSNLLQLREAS

SEQ ID NO: 121465 - protein, 95 aa, Unknown
  Bacterial polypetide isolated from the Sargasso Sea
MRSIPIMAKDGYPVVFDGTHSVQQPGGLGEKSGGQREFVEYLTRAAVAVGVAAIFIETHQDPDNAPSDGPNMVPLNKLENLINQVVEIDKLIKKY

SEQ ID NO: 121466 - protein, 87 aa, Unknown
  Bacterial polypetide isolated from the Sargasso Sea
MTARQIQLDDITFANDRPFALLGGVNVLEDLDFALRCAGHYKQVCERLGIPLVFQASYDKANRSSIHSFRGAGLVAGLQISAARQDT

SEQ ID NO: 121467 - protein, 64 aa, Unknown
  Bacterial polypetide isolated from the Sargasso Sea
KKSGGQREFVPHLAGAAIAVGVGAIFIETHEDPDNAPSDGPNMVPLNEIKNLLKKLTEIDKLVK

SEQ ID NO: 121468 - protein, 139 aa, Unknown
  Bacterial polypetide isolated from the Sargasso Sea
MTNHKVKCSNFEIANDKPFTLIAGPCQLENEQHAIKMSTELKKITSELGINLIYKTSFDKANRTSLKGKRGMGLEKSLPIFDKIRKEVGLPVLTDIHTAEQCSIVADHVDVLQIPAFLCRQTDLLIAAAKTGKVINVKK

SEQ ID NO: 121469 - protein, 82 aa, Unknown
  Bacterial polypetide isolated from the Sargasso Sea
FPIIFDATHSVQQPGGMGEKSGGQREFVPHLARAAIAVGVGAIFIETHEDPDNAPSDGPNMVPLNELKGLLKKLTEIDKLVK

SEQ ID NO: 121470 - protein, 103 aa, Unknown
  Bacterial polypetide isolated from the Sargasso Sea
FGYNTLVSDMRSIPIMAKNGYPIVFDGTHSVQQPGGLGEKSGGQREFVEYLSRAATAVGIAAIFLETHQDPDNAPSDGPNMVPLDKLENLISQIVEIDSLVKK

SEQ ID NO: 121471 - protein, 199 aa, Unknown
  Bacterial polypetide isolated from the Sargasso Sea
LKILSELKQKYNLPILTDIHEPHQAKPVSEVCDIIQIPAFLCRQTDLVVEAAKTGKIINLKKPQFMSAKEIFHVVKKCESVGNKNIILCERGNFFGYNNLVVDILNFQIMKESTKPVFFDVTHSLQQPGTLEKSTGGRGEYVLELAKAGISQGIAGLFLETHPDPSKALCDGPCALKLSELESFLMEIFELDSLIKRNR

SEQ ID NO: 121472 - protein, 69 aa, Unknown
  Bacterial polypetide isolated from the Sargasso Sea
RWKKRYVLSLAKAGISQSIAGLFLEAHPNPDDAKCDGPCALPLSVLEEFLKQVKELDEFVKNQKDLEIT

SEQ ID NO: 121473 - protein, 134 aa, Unknown
  Bacterial polypetide isolated from the Sargasso Sea
MPKSVFLSKQLIKNDTDRLTLISGPCLLENEKLVRQVAKSLIKYAKKEKFNLIFKCSFDKANRSSDQTIRNKISFDKSLDILKNLKNDLKMSITSDVHETSQVDRLAELLDVIQIPAFLCRQTDLIKSAAQTKK

SEQ ID NO: 121474 - protein, 164 aa, Unknown
  Bacterial polypetide isolated from the Sargasso Sea
MQNLLMETKIVNCNGIEISNKNKICLIAGPCQLETEQHALDMAGKIKEITIKYNIGFIYKTSFDKANRTSLKGIRGAGLENSLPVFDKIKKDINVPVLTDIHNEKQCSLVSPHVDVLQIPAFLCRQTDLLIAAAKTNKIINVKKGQFLAPWDMVNVTKKISDSG

SEQ ID NO: 121475 - protein, 51 aa, Unknown
  Bacterial polypetide isolated from the Sargasso Sea
MARSNLNVSGIEIANDKPFVLFGGMNVLESRELAFEVAEKYVDVCTRLGIP

SEQ ID NO: 121476 - protein, 134 aa, Unknown
  Bacterial polypetide isolated from the Sargasso Sea
MVNKSVKCGKLNISNTGPFTLIAGPCQLENEKHALDIAKELKKITDNLGIGLIYKTSFDKANRTSLNGKRGVGLEKALPVFDKIRNQIGVPVLTDIHTVDQCAIVSKHVDVLQIPAFLCRQTDLLVAAAKTGKI

SEQ ID NO: 121477 - protein, 74 aa, Unknown
  Bacterial polypetide isolated from the Sargasso Sea
MKNFNIKCNELEISNAENICLISGPCQIESEQHAIDIAGKINDIAKKNKIKFIFKSSFDKANRTSLSSPRGLGL

SEQ ID NO: 121478 - protein, 108 aa, Unknown
  Bacterial polypetide isolated from the Sargasso Sea
YKNLIVDMLGFSDMKKSQYPVILDVTHSLQQPGGRSGAADGRREQVTNLAKAGLSQGLAGLFLEAHPNPNDALCDGPCALRLDCLHPFLNQMKELDCLIKSQAFIDTA

SEQ ID NO: 121479 - protein, 115 aa, Unknown
  Bacterial polypetide isolated from the Sargasso Sea
NFSYERGASFGYNTLVSDMISIPIMAKNGYPVIFDATHSVQQPGGMGEKSGGQREFVEHLSRAASAVGVAGIFIETHQDPDNAPSDGPNMVPLSKLENLLNQIVEIDSLVKKNNA

SEQ ID NO: 121480 - protein, 252 aa, Unknown
  Bacterial polypetide isolated from the Sargasso Sea
MLIAGPCAIEGEEMAFEIAEKCIRIAKKHSIQYVFKGSFKKANRSKIDSFTGIGDIKALKILSKIGNELKIPVTTDVHEVSDIDVAKEHVDIIQIPAFLARQTDLLVAAAKSGRIVNIKKGQFMDSKSMSYAVDKVLQSGNKSVLITERGSMFGYQDLVVDFRNIPKMKVYAPVILDVTHSLQKPNQESGVTGGQPDLIETIAKAGIVTGADGIFIETHSDPKSAKSDGKNMLPIEDLDELISKLVRIKSSI

SEQ ID NO: 121481 - protein, 110 aa, Unknown
  Bacterial polypetide isolated from the Sargasso Sea
SFGYNTLVCDMRSLTQMAVTGCPVVFDATHSVQQPGSLGGASGGDRSFVPVLARAAIAVGVAALFVETHNDPDNAPSDGPNMIRLDDMEYMLSQLKKFDEISKANPLVNR

SEQ ID NO: 121482 - protein, 72 aa, Unknown
  Bacterial polypetide isolated from the Sargasso Sea
MTVKVSNLSIDNGSRLTLISGPCVIESKELIHDVAGRIKEITDSLEIGYIFKSSFDKANRTSIDSFRGPGME

SEQ ID NO: 121483 - protein, 269 aa, Unknown
  Bacterial polypetide isolated from the Sargasso Sea
MDIGNIKIGLDQPMVLMAGPCVLESYELNFSVAKTLKKIAEDHGVNFIFKSSFEKANRSAVSSFTGLPFAEALATLERIKTELAVPIVTDVHEVSHVEQVAQVADVLQIPALLCRQTKLVQAAVATGRAVNIKKGQFMAPSEMMGVVGKAKAVDPDARIMLCERGTFFGYHNLVSDMRSLVVMRESGCPVIYDVGHSVQLPGAGQGVSSGQPQFIPSLARAAIAVGISGLFVETHPQPDQALSDGGNSLALGQVDSLLKQLGALDRLVK

SEQ ID NO: 121484 - protein, 134 aa, Unknown
  Bacterial polypetide isolated from the Sargasso Sea
MTNLIVKCSNFEIANNRPFTLIAGPCQLESQDHAINISTKLKEITSELGINLIYKTSFDKANRTSLKGKRGLGLDKSLPIFDKLRKEVGVPVLTDVHTIEQCSVVANHVDVLQIPAFLCRQTDLLIAAAKTGKI

SEQ ID NO: 121485 - protein, 184 aa, Unknown
  Bacterial polypetide isolated from the Sargasso Sea
MFNLNELITNTKSFFLIAGPCAIESEEMAFKICDEVNNIAKEFEINFVFKGSFKKANRSRLDSFTGIGDEKALEILKKVSNEFSIPTTTDIHEIKHAKYAADYVDILQIPAFLARQTDLIVAAARTGKIVNIKKGQFMSPEAMSFAVQKVKDSGNNNILITERGSTFGYQDLVVDFRGIPKMKK

SEQ ID NO: 121486 - protein, 106 aa, Unknown
  Bacterial polypetide isolated from the Sargasso Sea
GASFGYNTLVSDMRALPIMSKLGFPIVFDVTHSVQQPGGMGDKSGGQREFTPHLARAAIAVGVGAIFIETHEDPDNAPSDGPNMVPLNEMKSLLKKLSEIDNLIKK

SEQ ID NO: 121487 - protein, 101 aa, Unknown
  Bacterial polypetide isolated from the Sargasso Sea
MNTVKVGSIEIANDKPFALLAGPCAMETRDHAMFMAENLKQICDEVGIPLIYKSSFDKANRTSLNAGRGIGLSEAMKVFQEIKDTFGLPCVTDVHEPHQCA

SEQ ID NO: 121488 - protein, 72 aa, Unknown
  Bacterial polypetide isolated from the Sargasso Sea
SATGGRREFVLSLAKAGISQSIAGLFLEAHPNPDDAKCDGPCALPLNVLDDFLEQIKNLDDFIKNQDDLDIK

SEQ ID NO: 121489 - protein, 72 aa, Unknown
  Bacterial polypetide isolated from the Sargasso Sea
KSTDGRREHLLHMAKAGISQKIAGLFLEAHPDPDKAKCDGPCALRLDQLESFLLQVKELDKLVKSQKDLDLK

SEQ ID NO: 121490 - protein, 65 aa, Unknown
  Bacterial polypetide isolated from the Sargasso Sea
MTVKVSNLSIDNGSRLTLISGPCVIESKDLIHDVAGRIKEITDFLEIGYIFKSSFDKANRTSIDS

SEQ ID NO: 121491 - protein, 42 aa, Unknown
  Bacterial polypetide isolated from the Sargasso Sea
VSDMRSLAIMRETSAPVVFDATHSVQLPGGQGTNSRWPPELV

SEQ ID NO: 121492 - protein, 121 aa, Unknown
  Bacterial polypetide isolated from the Sargasso Sea
KNLLLCERGTSFGYKNLVVDMLGFNVMKKFGYPLIFDVTHSLQLPGGHGKSAAGRREYVRELGLAGLSQKIAGLFIEAHPEPDKALCDGQCALRLDQIEPFLRQMKAVDVMVKSFETLDTS

SEQ ID NO: 121493 - protein, 199 aa, Unknown
  Bacterial polypetide isolated from the Sargasso Sea
MKILQEISENFDCPTITDVHEPYQCKIAAEVVDILQIPAYLCRQTDLLLAAGDTDKPINVKKGQFLSPTDMAKVAEKISSTGNDKIMLCERGTTFGYNTLVNDFRALDIMAETGYPVIFDATHSVQQPSLLGDKSGGERKFVPTLSRAACAIGVSGLFIETHENPDEAPSDGANMLDINDLPRLIPTLLSFDNMVKNNI

SEQ ID NO: 121494 - protein, 75 aa, Unknown
  Bacterial polypetide isolated from the Sargasso Sea
HSVQQPGGQGESSGGQREFVEYLSRAAVAVGVAGVFIETHQDPDNAPSDGPNMVPLDKLENLLKQLTDIDNLIKK

SEQ ID NO: 121495 - protein, 131 aa, Unknown
  Bacterial polypetide isolated from the Sargasso Sea
MKNHKVKCSNFEISNDKPFTLIAGPCQLESENHALKISNELRDITKELGINLIYKTSFDKANRTSLKGKRGIGLDKSLSIFDRIRKEVGVPVLTDVHTADQCSIVSNHVDVLQIPAFLCRQTDLLIAAAKT

SEQ ID NO: 121496 - protein, 57 aa, Unknown
  Bacterial polypetide isolated from the Sargasso Sea
AGMSQSIAGLFLEAHPNPDEAKCDGPCALPLSYLDEFLNQIKDLDDFVKGQNNLEIK

SEQ ID NO: 121497 - protein, 41 aa, Unknown
  Bacterial polypetide isolated from the Sargasso Sea
DPNQARCDGPSALPLDQLEPFLSQVKAIDDLVKSQPMININ

SEQ ID NO: 121498 - protein, 81 aa, Unknown
  Bacterial polypetide isolated from the Sargasso Sea
MNTIKVDKLEINNDKPFVLIAGLNVLEDEKTIESVITKCIESTSKHNIPFIFKASYDKANRSSIDSYRGPGAKQGLEIKKN

SEQ ID NO: 121499 - protein, 266 aa, Unknown
  Bacterial polypetide isolated from the Sargasso Sea
MIQFKELFDKKNSFLLIAGPCAIESEEIAFEIAEKIHKISQKLNINFVFKGSFKKANRSKIDSFTGIGDEKALEIIKKVGNSFSILTTTDIHEVKDADIAAKHVDILQIPAFLARQTDLIVAAAKTSKIVNIKKGQFMNPTSMKFAVDKVKDSGNDKVLITERGNMFGYQDLVVDFRGIPKMKEYAPVILDVTHSLQQPNQPSGVTGGHPELIETIAKAGIASGVDGLFIETHPSPKNAKSDGKNMLPLDQLEILLVKLLKIKSAI

SEQ ID NO: 121500 - protein, 251 aa, Unknown
  Bacterial polypetide isolated from the Sargasso Sea
ESLGHALDIAGKLCELSQELDFGLIYKTSYDKANRTSLDSHRGPGIETAIPIFSEIKKQCGCPVLTDIHSVEDAKALAEVTDVLQIPAFLCRQTDLLRAAGETGKVINIKKGQFLAPWDMGNVAEKVEKTGNKNIFLCERGTSFGYNNLVSDMRSLPILRKLGYPVIFDATHSVQQPGGLGSSSGGQREFAPVLAKAAVAVGVAGVFMETHQDPDNAPSDGPNMIKITEMRDLISLLLEIDIVTKRSMGDM

SEQ ID NO: 121501 - protein, 164 aa, Unknown
  Bacterial polypetide isolated from the Sargasso Sea
MSSIKVNCNKIEISNDSKICIIAGPCQLETEQHAMDMAGKIQDITKKFGVGFIYKTSFDKANRTSLKGKRGAGLDASLPVFDKIKKELNIPILTDIHNIEQCSIVASHVDVLQIPAFLCRQTDLLVAAAKTNKVINVKKGQFLAPWDMVNVTKKISDSGNKNIL

SEQ ID NO: 121502 - protein, 196 aa, Unknown
  Bacterial polypetide isolated from the Sargasso Sea
MTQNIVEILNFKVSNKLPLFLIAGPCSIESKEHAINHAGMIRDICKKLNINFVYKSSFDKANRTSTNSFRGVGLEKGLSILSDVKKSFNLPILTDVHETHQCKDIEEIVDIIQIPAFLCRQTDLLIAAANTNKVINVKKGQFLAPWDMKNVLDKILNNGNDQILLTERGTSFGYNTLVSDMRALPQMSSFGYPNYI

SEQ ID NO: 121503 - protein, 240 aa, Unknown
  Bacterial polypetide isolated from the Sargasso Sea
MDMAGKIREITKKFNLGFVYKTSFDKANRTSLKGKRGAGLEASLPVFDKIRKELNVPILTDIHNIEQCSIVSGHVDVIQIPAFLCRQTDLLIAAAKTNKIINVKKGQFLAPWDMVNVTKKISDSGNKNILVTERGASFGYNTLVSDMRSLPIMAKNGYPVIFDATHSVQQPGGLGEKSGGQREFVEHLARAAVAVGVAGVFIETHQDPDNAPSDGPNMIPLDKLENLLQQLTDIDNLIKN

SEQ ID NO: 121504 - protein, 124 aa, Unknown
  Bacterial polypetide isolated from the Sargasso Sea
TKKISDSGNKNILVTERGASFGYNTLVSDMRALPIMAKNGYPVIFDATHSVQQPGGLGEKSGGQREFVEHLSRAAVAVGVAGVFIETHQDPDNAPSDGPNMVPLNKLENLLKQLTDIDSLIKNK

SEQ ID NO: 121505 - protein, 131 aa, Unknown
  Bacterial polypetide isolated from the Sargasso Sea
APWDMVNVTKKISESGIKKILVTERGASFGYNTLVSDMRSIPIMAKNGYPVIFDATHSVQQPGGLGEKSGGQREFVEYLARAAVAVGVAGVFIETHQDPDNAPSDGPNMVPLDKLENLLKQLTDIDNLIKN

SEQ ID NO: 121506 - protein, 258 aa, Unknown
  Bacterial polypetide isolated from the Sargasso Sea
TIIAGLNVLEDEDMALDVAEKLKEITTKHNIPFVFKASFDKANRSSIDSYRGPGLEAGKKIFESIKKNISVPIITDIHEEGQIEEISQVVDILQIPAFLCRQTDLISAACKTQLPLNIKKGQFLSPYQMKNIIEKCNSFGNDNIILCERGSSFGYDNLIVDFLGISEQKAFNYPIILDVTHSLQLPGGQGNSAGGRSHQAEDLARAAIALKISGLFIEVHPNPDKALCDGPSATKLEDFEDMITKIKKIDDLVKSEKF

SEQ ID NO: 121507 - protein, 232 aa, Unknown
  Bacterial polypetide isolated from the Sargasso Sea
MGTQKTIFVNDISLCNDNSFVLIGGLNVLESKDLNLKVAETFKEITSRLKIPYIFKASFDKANRSSTDSYRGPGMEKGLRILEYIKQEFEIPILTDIHEPQQAKPASEIADVLQLPAFLSRQTDLVSALANTKAVINIKKAQFLSPDEMGNIINKFEFFGNKKLFLCERGTSFGYNNLVVDMLGFKLMKKFGYPLVFDVTHSLQIPGGLGNSAAGRRGSIREMGLAGLSQKL

SEQ ID NO: 121508 - protein, 242 aa, Unknown
  Bacterial polypetide isolated from the Sargasso Sea
MSNIKVNCGKIEISNKNKICLISGPCQLESEQHALDMAGKISEITSKFNLGFVYKTSFDKANRTSLKGKRGIGLDASLPIFDKIKKDLNVPILTDVHNIDQCSVVAKHVDILQIPAFLCRQTDLLVAAAKTNKIINVKKGQFLAPWDMVNVTKKISDSGNNNILVTERGASFGYNTLVSDMRSIPIMAKNGYPVIFDATHSVQQPGGLGEKSGGQREFVEHLSRAAVAVGVAGLFIETHQDP

SEQ ID NO: 121509 - protein, 88 aa, Unknown
  Bacterial polypetide isolated from the Sargasso Sea
GYPVIFDATHSVQQPGGMGDKSGGQREFVEHLARAAIAVGVAGIFIETHPDPDNAPSDGPNMVPLSQMPNLLKQLSAIDKLVKNGKNQ

SEQ ID NO: 121510 - protein, 240 aa, Unknown
  Bacterial polypetide isolated from the Sargasso Sea
MKLRDFKIDNTEPMVLMGGMNVLESRDLAMKIAETFKEITQSKHINYIFKGSFDKANRSSISSFRGPGMDEGLKILQEVSTTFDIPVITDIHEPQQAEAVSEICEVIQIPAFLARQTDLVNAAAKTKSIIQFKKPQFLSAPEMSNIVEKCSSAGNENITLCERGNSFGYNNLVVDTLNFQILKGLLKPVIFDVTHSLQLPGGLGSATGGRREYLLSLAKAGMSQSIAGLFLEAHPDPDQA

SEQ ID NO: 121511 - protein, 171 aa, Unknown
  Bacterial polypetide isolated from the Sargasso Sea
LSEHVDVLQIPAFLCRQTDLLIAAARTNKIVNVKKGQFLAPWDMTNVTDKISSSGNKNILVTERGASFGYNTLVSDMRSLPIMAKNGYPVIYDATHSVQQPGGQGTSSGGQREFVEYLARASIAVGVAGIFIETHQDPDNAPSDGPNMLPLKDLENLLKQLIEIDNVVKHN

SEQ ID NO: 121512 - protein, 238 aa, Unknown
  Bacterial polypetide isolated from the Sargasso Sea
MIKINLNNFAISNNLPFILVAGPCVLENEKHTLKIAEQISQICNELNINYIFKSSFDKANRSSIQSERGLNLDSGLKIFEKIKNEFDCPILTDVHNEEQCNLLDNSDIVDILQIPAFLCRQTDLLLSAGKTKKIINVKKGQFLAPRDIKNIFEKIKSVNNEKIIITERGTSFGYNNLINDFKGIDIMKQFKYPIIFDGTHSVQQPGGLGHKSGGNREFIPSLCKAAVSIGVAGVFRDT

SEQ ID NO: 121513 - protein, 245 aa, Unknown
  Bacterial polypetide isolated from the Sargasso Sea
MKDISIKDFQIGNDQDFTLMGGMNVLESEETALLVAEKFKEVTDKLEINWIFKASFDKANRSSIESFRGPGMNEGLKILEKVSSSFDVPVITDIHEPSQADPVSEVCEVIQIPAFLCRQTNLVSAAAKTKSAIQFKKPQFLSAAEMRNVVEKCKSAGNEKIILCERGNIFGYNNLVVDTLNFQIMKEYSVPVMFDVTHSLQLPGGLGKSTDGRREYLLHMAKSGISQKIAGLFLEAHPDPDKSQM

SEQ ID NO: 121514 - protein, 140 aa, Unknown
  Bacterial polypetide isolated from the Sargasso Sea
INVKKGQFLAPWDMVNVTKKISDSGNKNILVTERGASFGYNTLVSDMRSIPIMAKSGYPVIFDATHSVQQPGGLGEKSGGQREFVEHLARAAVAVGVAGVFIETHQDPDNAPSDGPNMIPLNKLESLLKQLTDIDNLIKK

SEQ ID NO: 121515 - protein, 264 aa, Unknown
  Bacterial polypetide isolated from the Sargasso Sea
MTVKVSNLSIDNGSRLTLISGPCVIESKDLIHDVAGRIKEITDSLEIGYIFKSSFDKANRTSIDSFRGPGMEEGLAILESVRDQLGVPVITDVHEDTPLDEVASVVDVLQTPAFLCRQTNFIINVASQQKPVNIKKGQFLSPWEMENVVKKAKSTGNEDILVCERGYTFGYNNLVSDMRSLVVLKETSCPVIYDATHSLQLPGGKGGSSDGQSEFIIPVSRGAVGVGIAGIFIETHPDPKNALSDGPNSLPLDNLKPLLEQLLA

SEQ ID NO: 121516 - protein, 192 aa, Unknown
  Bacterial polypetide isolated from the Sargasso Sea
MDKTVKCGKLNISNKGPFTLIAGPCQLENEKHALTIANELKKITEKLGIGLIYKTSFDKANRTSLNGKRGAGLEKSLPVFDKIKKEVEVPVLTDIHTIGQCELVSKHVDVLQIPAFLCRQTDLLVAAAKTGKVINVKKGQFLAPWDMTNVTKKIEQSGNKNILVTERGASFGYNTLVSDMRSLPIMAKNGYP

SEQ ID NO: 121517 - protein, 225 aa, Unknown
  Bacterial polypetide isolated from the Sargasso Sea
MKKINLKNFSISNHEPFVLISGPCVIENQEHTIMIAEEINNICIDLGINFIFKSSFDKANRSSIESERGKTLKESLIIFEKVKEKINCPILTDVHTEEQCMVLAKSNIIDILQIPAFLCRQTDLLIAAANTGKVINVKKGQFLAPDDVKNIFKKIESTNNNNILITERGTSFGYNNLVNDFRALDIMKNYKYPIIFDATHSVQEPGGLGDKSGGKRKFIPSLCKA

SEQ ID NO: 121518 - protein, 81 aa, Unknown
  Bacterial polypetide isolated from the Sargasso Sea
VIFDATHSVQQPGGQGESSGGQREFVEHLARAAVAVGVAGVFIETHQDPDNAPSDGPNMVPLDKLENLLHQLSDIDKLIKK

SEQ ID NO: 121519 - protein, 147 aa, Unknown
  Bacterial polypetide isolated from the Sargasso Sea
AAKTNKIINVKKGQFLAPWDMVNVTKKISDSGNKNILVTERGASFGYNTLVSDMRSLPIMAKNGYPVIFDATHSVQQPGGQGESSGGQREFVEYLARAAVAVGVAGVFIETHQDPDNAPSDGPNMVPLNKLENLLKQLHDIDNLIKK

SEQ ID NO: 121520 - protein, 188 aa, Unknown
  Bacterial polypetide isolated from the Sargasso Sea
VPVLTDVHTAEQCSIVSQHVDVLQIPAFLCRQTDLLIAAAKTGKVINVKKGQFLAPWDMVNVTKKIEDSGNKNILVTERGASFGYNTLVSDMRSLPIMAKSGYPVVFDATHSVQQPGGMGDKSGGQREFVEYLARAAVAVGVAAIFMETHPDPDNAPSDGPNMVPLSKMPSLLNQLVKIDKLIKNGKN

SEQ ID NO: 121521 - protein, 206 aa, Unknown
  Bacterial polypetide isolated from the Sargasso Sea
ARGVGMDSGLEILAMVKAKIGVPVLSDVHLPEQCAAAAEVLDVIQIPAFLCRQTDLLVEAAKTGCAINLKKGQFLAPWDMEHVATKIIKAGNDKLLLTERGTSFGYNTLVSDMRALPTMAALGHPVIFDATHSVQQPGGLGASSGGQREFVPVLARAAVAVGVQGLFMESHENPDQAPSDGPNMVPLSEMPVLLDMLMRIDQARRG

SEQ ID NO: 121522 - protein, 255 aa, Unknown
  Bacterial polypetide isolated from the Sargasso Sea
GLNVLEEEKTILEVISRCKQSANSLDIPYIFKASYDKANRSSFDSYRGPGPKKGLEILSELKKEFDVPVISDIHTPAEAEMASEVLDIIQIPAFLSRQTDLIKAACETSLPLNIKKGQFLAPSDMLNIIEKCNHFDNDKIMICERGTSFGYNNLIVDMLGMVELKKTDAPIIFDVTHSLQRPGGLGNKADGRGSSVFELARAGMSLGLAGLFLETHPDPAKALCDGPCALKLDDLDKFLSEIKSLDDLIKSYKEK

SEQ ID NO: 121523 - protein, 259 aa, Unknown
  Bacterial polypetide isolated from the Sargasso Sea
MKNLKVKCGTIDISNANKFCLIAGPCQLETEQHAMDMSGKIKEITSKLGINFIYKTSFDKANRTSLSGKRGIGLEQSLPIFDKIRKEINIPILTDVHNIEQCSIVSDHVDILQIPAFLCRQTDLLIAAAKTKKIINVKKGQFLAPWDMVNVTKKISDSGNNNILVTERGASFGYNTLVSDMRSLPIMAKNGYPVIFDATHSVQQPGGQGTASGGQREFVEHLSRAAVAVGVAGVFMETHQDPDNAPSDGPNMIPLSNLK

SEQ ID NO: 121524 - protein, 259 aa, Unknown
  Bacterial polypetide isolated from the Sargasso Sea
GGLNVIETKELALKVAETFTDFTSRLKIPYIFKASFDKANRSSIDSFRGPGMEEGLRILEDVKKTFKIPILTDIHEPNQAKPASEVADVLQLPAFLSRQTDLISALANTNAVINIKKAQFLSPDEMGNIINKFEFYGNEKLFLCERGTSFGYKNLVVDMLGFKVMKEFGYPLVFDVTHSLQVPGGLGNSASGRRESIRELGLAGLSQKIAGLFLETHPEPKKALCDGPSALKLNQLEPFLKQMKSVDLLVKSFETLDTR

SEQ ID NO: 121525 - protein, 157 aa, Unknown
  Bacterial polypetide isolated from the Sargasso Sea
MINIKIKNFEISNNSPLFLIAGPCVIESRDHSLKIAEKINSICDSANINYVFKSSFDKANRTNLKSHRGIGYQESLKIFEEIKKNYGCPIITDVHTEKQCEELSKNDIVDILQIPAFLCRQTDLLIAAGKTNKIVNVKKGQFLSPYEIPKYYEKIIL

SEQ ID NO: 121526 - protein, 220 aa, Unknown
  Bacterial polypetide isolated from the Sargasso Sea
SFDKANRTSIKSKRGIGLEKSLPIFDKIRNELKVPILTDVHNEKQCDIVSKHVDILQIPAFLCRQTDLLISAAKTKKIINVKKGQFLAPWDMINVTKKISDSGNDQILVTERGSSFGYNALVSDMRSLPIMAKNGYPIVFDATHSVQQPGGLGEKSGGQREFVKYLSRAATAIGIASVFLETHQDPDNAPSDGPNMIPLSELENIIHEIVQIDDLIKNKK

SEQ ID NO: 121527 - protein, 151 aa, Unknown
  Bacterial polypetide isolated from the Sargasso Sea
MTEVSVNKLKISNSNPFTLIAGLNVLESDKVIEQVITHCIEVTNKLSIPYIFKASYDKANRSSVDSYRGPGVDEGLRILSNLKKEFNVPIISDVHTVEEVSKASEVLDIIQIPAFLSRQTDLIKEAASTKIPINIKKGQFMAPEDTKNIIN

SEQ ID NO: 121528 - protein, 184 aa, Unknown
  Bacterial polypetide isolated from the Sargasso Sea
PCGIWDFGLIAGPCVIESEDHAIHMAGSIKEIVDGLNIKMIFKSSFDKANRSSITSFRGLGIDEGLKILDKVKSEVDVPILTDIHLPEQADPVSEVVDIIQIPAFLCRQTDLLIAAGKTGKPVNIKKGQFLAPWDMKNVITKMKEIHCDEILITDRGTQFGYNNLVGDMRSILHNAGIGLPCSV

SEQ ID NO: 121529 - protein, 151 aa, Unknown
  Bacterial polypetide isolated from the Sargasso Sea
MLIAAAKTNKIINVKKGQFLAPWDMVNVTKKISESGNENILVTERGASFGYNTLVSDMRSIPIMAKNGYPVVFDGTHSVQQPGGLGEKSGGQREFVEYLSRAAVAVGVAAIFIETHQDPDNAPSDGPNMVPLNNLDELINQIVEIDNLVKK

SEQ ID NO: 121530 - protein, 238 aa, Unknown
  Bacterial polypetide isolated from the Sargasso Sea
MISKSVKCGKLNISNTNTFTLIAGPCQLENEKHALDVASKLKKITDELGIGLIYKTSFDKANRTSLKGKRGAGLEKSLPIFDKIRKEINVPVLTDIHTIDQCKTVSKHVDVLQIPAFLCRQTDLLVAAAQTGKVINVKKGQFLAPWDMINVTKKIEDSGNKNILVTERGASFGYNTLVSDMRSLPIMAKNGYPVVFDATHSVQQPGGMGDKSGGQREFVEHLSRAAIAVGVAAIFIET

SEQ ID NO: 121531 - protein, 270 aa, Unknown
  Bacterial polypetide isolated from the Sargasso Sea
MKKKIIEIGNLKIGGNHPLVIISGPCQLESLQHSRMVVEKLCDICFNSKLGFIFKASFDKANRSSINGKRGPGIDEGLTILDKIKTEFNCLTLTDVHDPKQCSPVSEVVDVLQIPAFLCRQTDLLIASGNTGRTINVKKGQFLAPWDMENVIKKIQSTGNENILLCERGTTFGYNSLVVDFRSLAIMAATGYPVVYDATHSVQEPSKNIESTGGQREFVEPLSKAACALGISAIFIETHQDPANAPSDGPTMVPLSEMQNLISRLKKLML

SEQ ID NO: 121532 - protein, 146 aa, Unknown
  Bacterial polypetide isolated from the Sargasso Sea
QFKKPQFLSAAEMRNVVEKCKSAGNEKVILCERGNIFGYNNLVVDTLNFQIMKEYSVPVMFDVTHSLQLPGGLGKSTDGRREYLLHMAKAGISQKIAGLFLEAHPDPDKAKCDGPCALRLDQLESFLLQVKELDKLVKSQKDLDLK

SEQ ID NO: 121533 - protein, 178 aa, Unknown
  Bacterial polypetide isolated from the Sargasso Sea
DILSDNNIIDVLQIPAFLCRQTDLLISAAKTNKILNVKKGQFLAPNDVKNIFEKISSANNNNIMITERGTSFGYNNLVNDFRGIDIMKQFQFPVIFDGTHSVQQPGGLGDKSGGKRQFIPSLCKAAISIGISGVFLETHDDPDNAPSDGPNMIDLKNLKNLLIQLKEFDFIAKKHAQN

SEQ ID NO: 121534 - protein, 148 aa, Unknown
  Bacterial polypetide isolated from the Sargasso Sea
MKNIKLANFEISNKNNFILIAGPCVIENESHSLMMTEQIAKICQKLKIHFIFKSSFDKANRSSINSNRGVDIKQAEKIFNKIKSIYNCPILTDVHNESQCEFFSNSESVDVLQIPAFLCRQTDLLIAAAKTKKIINVKKGQFLSPHEV

SEQ ID NO: 121535 - protein, 236 aa, Unknown
  Bacterial polypetide isolated from the Sargasso Sea
MQNIKVKCNTIEISNSNRFCLIAGPCQLETEQHALDMAGKIQEITKKFNIGFIYKTSFDKANRTSLKGKRGAGLDKSLPVFDKIKKDLKIPVLTDIHNEEQCNIVSKHVDILQIPAFLCRQTDLLIAAAKTNKIINVKKGQFLAPWDMVNVTKKISESGNNNILVTERGASFGYNTLVSDMRSIPIMAKNGYPVIFDATHSVQQPGGMGEKSGGQREFVEHLSRAAIAVGVAGLFI

SEQ ID NO: 121536 - protein, 145 aa, Unknown
  Bacterial polypetide isolated from the Sargasso Sea
MASVDHKKIEIGGMTLSNQRPFVLIAGPCQIESEDHSFMIAKKLEGICAKLEIPFIFKASFDKANRSSVSGKRGVGLERGLDILGKIRETVGCPVLTDVHEREQCKRVAEVADVIQIPAFLCRQTDLVLEAGRTGKIVNIKKGQF

SEQ ID NO: 121537 - protein, 233 aa, Unknown
  Bacterial polypetide isolated from the Sargasso Sea
MTLISGPCLLENEKLVRKVAQSLIKYTKEEKFNLVFKCSFDKANRSSHKTIRNKISFDQSIDILKNLKKDLKMSITSDVHETTQVDKLAEFLDVIQIPAFLCRQTDLIKAAAQTKKIVNVKKGQFLSHKEVSNIINKIENENNKKILITERGNSFGYNYLINDFKGIHLMKSFGYPIIFDSTHSVQLPGGLGKKSGGAREYVTPLSKAASSLRIAGFFIETHPNPEIALSDGP

SEQ ID NO: 121538 - protein, 178 aa, Unknown
  Bacterial polypetide isolated from the Sargasso Sea
MDKTVKCGKLNISNNGPFTLIAGPCQLENEKHALTIANELKKITEKLGIGLIYKTSFDKANRTSLNGKRGAGLEKSLPVFDKIKKEVEVPVLTDIHTIEQCELVSKHVDVLQIPAFLCRQTDLLVAAAKTGKVINVKKGQFLAPWDMINVTKKIEQSGNKNILVTERGASFGYNTLVS

SEQ ID NO: 121539 - protein, 234 aa, Unknown
  Bacterial polypetide isolated from the Sargasso Sea
MGINYIFKGSFDKANRSSINSFRGPGLDEGLKILEEISKTYDIPVITDIHEPNQAKSVSEICEVIQIPAFLARQTDLVRAAAKTTSIIQFKKPQFLSAQEMSNVVEKCEAAGNKNITLCERGNSYGYNNLVVDTLNFQILKKLSKPVIFDVTHSLQLPGGLGSSTGGRREYVLSLAKAGMSQSIAGLFLEAHPNPDEAKCDGPCALPLSYLDEFLNQIKDLDDFVKGQNNLEIK

SEQ ID NO: 121540 - protein, 132 aa, Unknown
  Bacterial polypetide isolated from the Sargasso Sea
MDKFRECGNEKLLLCERGTNFGYDNLVVDMLGFGVMKRTCDDLPLIFDVTHALQCRDPGGAASGGRRTQVVDLARSGMAVGLAGLFLEAHPDPAQARCDGPSALPLDQLEPFLTQVKAIDDLVKGMQELRIN

SEQ ID NO: 121541 - protein, 186 aa, Unknown
  Bacterial polypetide isolated from the Sargasso Sea
NVPILTDIHNIEQCSIVASHVDVLQIPAFLCRQTDLLVAAAKTNKVINVKKGQFLAPWDMVNVTKKISDSGNKNILVTERGASFGYNTLVSDMRALPIMAKNGYPVIFDATHSVQQPGGLGEKSGGQREFVEHLARAAVAVGVAGVFIETHQDPDNAPSDGPNMIPLNKLENLLQQLTDIDNLIKK

SEQ ID NO: 121542 - protein, 250 aa, Unknown
  Bacterial polypetide isolated from the Sargasso Sea
PCQLETEQHALDMAGKIKEITTKYNIGFIYKTSFDKANRTSLKGKRGAGLENSLPVFDKIKKDINVPVLTDIHNEEQCSQVSHHVDVLQIPAFLCRQTDLLIAAAKTKKIINVKKGQFLAPWDMVNVTKKISDSGNENILVTERGASFGYNTLVSDMRSIPIMAKNGYPVVFDGTHSVQQPGGLGEKSGGQREFVKYLSRAAVAVGVAAIFLETHQDPDNAPSDGPNMVPLDKLDEIINQIVEIDNLIKK

SEQ ID NO: 121543 - protein, 183 aa, Unknown
  Bacterial polypetide isolated from the Sargasso Sea
MSSIKVNCENIEISNNNKICIIAGPCQLETEQHAIDMAGKIKEITSKFGLGFIYKTSFDKANRTSLKGKRGAGLDASLPVFDKIKKELNVPILTDIHNAEQCAIVSKHVDVLQIPAFLCRQTDLLIAAAKTNKIINVKKGQFLAPWDMVNVTKKISDSGNKNILVTERGASFGYNTLVSDMRS

SEQ ID NO: 121544 - protein, 273 aa, Unknown
  Bacterial polypetide isolated from the Sargasso Sea
ENKIINCNGIKISNKSKICLIAGPCQLETEQHAMDMAGNIREIAAKYNIGFIYKTSFDKANRTSIKGKRGAGLEKSLPVFDKIKKELNVPILTDIHNEQQCSVVATHADVLQIPAFLCRQTDLLIAAAKTNKIINVKKGQFLAPWDMVNVTKKISDSGNDNILVTERGASFGYNTLVSDMRSIPIMAKNGYPIVFDATHSVQQPGGLGEQSGGQREFVEYLSRAAAAVGVAAIFLETHQDPDNAPSDGPNMVPLNKLDSLVNQIVEIDNLIKK

SEQ ID NO: 121545 - protein, 140 aa, Unknown
  Bacterial polypetide isolated from the Sargasso Sea
FLAPEEMVYIIDKFESFDNRKLILCERGSVFGYKNLVVDMLGFSVMKKSLYPVIFDVTHSLQQPGAGLGSADGRRAQVAELAKAGLSQGLAGLFLETHPDPDKALCDGPCALKLESLHPFLDQMKDLDSLIKSQAYIDTA

SEQ ID NO: 121546 - protein, 272 aa, Unknown
  Bacterial polypetide isolated from the Sargasso Sea
MNAIKVNCENIEISNKNKICIIAGPCQLETEQHAMDMAGKIKEITSKFGLGFIYKTSFDKANRTSLKGKRGAGLDASLPVFDKIKKELNIPILTDIHNAEQCAVVSKHVDVLQIPAFLCRQTDLLIAAAKTNKIINVKKGQFLAPWDMVNVTKKISDSGNEKILVTERGASFGYNTLISDMRSLPIMAKNGYPVIFDATHSVQQPGGQGESSGGQREFVEYLARAAVAVGVAGVFIETHQDPDNAPSDGPNMVPLNKLENLLKQLHDIDNLI

SEQ ID NO: 121547 - protein, 219 aa, Unknown
  Bacterial polypetide isolated from the Sargasso Sea
MSSITVNCGNIEISNDKKICIIAGPCQLETEQHAMDMAGKIKEITSKYGLGFIYKTSFDKANRTSLKGKRGAGLEASLPVFDKIKKELKVPILTDIHNSEQCSVVANHVDVLQIPAFLCRQTDLLIAAAKTNKIINVKKGQFLAPWDMVNVTKKISDSGNANILVTERGASFGYNTLVSDMRSLPIMAKNGYPVIFDATHSVQQPGGQGESSGGQREFC

SEQ ID NO: 121548 - protein, 158 aa, Unknown
  Bacterial polypetide isolated from the Sargasso Sea
LCRQTDLLVAAAKTNKIVNVKKGQFLAPWDMVNVTKKISDSGNKNILVTERGASFGYNTLVSDMRSLPIMAKNGYPVIFDATHSVQQPGGLGEKSGGQREFVEYLARAAVAVGVAGVFIETHQDPDNAPSDGPNMVPLDKLESLLKQLTDIDNLIKNK

SEQ ID NO: 121549 - protein, 102 aa, Unknown
  Bacterial polypetide isolated from the Sargasso Sea
GYNTLVSDMRALPIMAKNGYPVIFDATHSVQQPGGLGEESGGQREFVEHLARAAVAVGVAGVFIETHQDPDNAPSDGPNMIPLNKLENLLRQLTDIDNLIKN

SEQ ID NO: 121550 - protein, 260 aa, Unknown
  Bacterial polypetide isolated from the Sargasso Sea
NNKISLIAGPCQLESEQHALDMAGKIKEISNKFKIGFIYKTSFDKANRTSIKGKRGAGLEKSLPVFDKIKKELNIPILTDIHNEEQCSLVASHVDILQIPAFLCRQTDLLIAAAKTQKIVNVKKGQFLAPWDMVNVTKKISESGNDNILVTERGASFGYNTLVSDMRAIPIMARNGYPIIFDATHSVQQPGGQGEKSGGQREFVEYLARAAVAVGVAGVFIETHQDPDNAPSDGPNMVPLNKLENLLNQLLEIDNLIKNK

SEQ ID NO: 121551 - protein, 187 aa, Unknown
  Bacterial polypetide isolated from the Sargasso Sea
FNIPILTDIHSIDQCSEVADHVDILQIPAFLCRQTDLLIAAAKTNKIINVKKGQFLAPWDMVNVTKKISDSGNTNILVTERGASFGYNTLVSDMRSLPIMAKNGYPVIFDATHSVQQPGGQGQSSGGQREFVEYLARAAVAVGVAGVFIETHQDPDNAPSDGPNMVPLDKLENLLHQLSDIDKLIKK

SEQ ID NO: 121552 - protein, 185 aa, Unknown
  Bacterial polypetide isolated from the Sargasso Sea
MENRIVKCQDLNISNSNKICLIAGPCQLETEQHALDMAGEIKNITDKYKIGFIYKTSFDKANRTSLKGKRGAGLEKSLPVFDKIKNQIKVPILTDIHNEEQCSIVAPHVDVLQIPAFLCRQTDLLVAAAKTKKIINVKKGQFLAPWDMVNVTKKISDSGNNNILVTERGASFGYNTLVSDMRSIP

SEQ ID NO: 121553 - protein, 262 aa, Unknown
  Bacterial polypetide isolated from the Sargasso Sea
MKLRNFNIDNNDSMTLMGGMNVLESRDLAMKVAEKFKEATQKLNINYIFKGSYDKANRSSINSFRGPGIEEGLKILQEVSNTFDVPVITDIHEPNQAKPVSEICEVIQIPAFLARQTDLVCAAAKTDSIIQFKKPQFLSAPEMLNTIEKCSAAGNDKIILCERGNSFGYNNLVVDTLNFQILKKLSKPVIFDVTHSLQLPGGLGSATGGRREYVLSLAKAGISQSIAGLFLEAHPNPDEAKCDGPCALPLSVLEEFLKQVKE

SEQ ID NO: 121554 - protein, 220 aa, Unknown
  Bacterial polypetide isolated from the Sargasso Sea
KLSFDKANRTSIKGKRGLGLEESKDIFLALKGEGFSTLTDVHEPQQCEEMAKFVDVLQIPAFLCRQTDLLLAAGKTGLMINVKKGQFLAPWDMKGVVEKLTSTGLPKEKIMLCERGTFFGYNQLVVDYRGLIQMREFGTQICMDATHCVQQPGGKGDSSGGNRDYAPYMAYASTIFKPEAIFMETHEDPDNAPSDGPNMIKLDDMEKVVKTIKAYNDVAV

SEQ ID NO: 121555 - protein, 253 aa, Unknown
  Bacterial polypetide isolated from the Sargasso Sea
NFEISNKKQFILIAGPCVIENEDHSLMIAEKIAESCNKHNINFIFKSSFDKANRSSIKSKRGVSINEAEKIFNKIKSTFNCPILTDVHNENQCEFFKESDSVDVLQIPAFLCRQTDLLVAAAKTNKIINVKKGQFLSPFEVPNIFSKIESTGNNKIMITERGTSFGYNNLINDFKSLDIMKSFEYPVIFDATHSVQEPGGLGEKSGGKREFVNTLSKAAAAIGVAGIFIETHNDPDNAPSDGPNMLNIKNLES

SEQ ID NO: 121556 - protein, 265 aa, Unknown
  Bacterial polypetide isolated from the Sargasso Sea
GIEISNKSRICLISGPCQLETEQHAMDIAGKIKDITSKFNIGFVYKTSFDKANRTSLKGKRGAGLEKSLPVFDKIKKELNIPVLTDVHNVEQCSIVAPHVDVLQIPAFLCRQTDLLIAAAKTKKIINVKKGQFLAPWDMTNVTKKISESGNDNILVTERGASFGYNTLVSDMRSIPIMAKNGYPIVFDGTHSVQQPGGLGEKSGGQREFVEYLTRAAVAVGVAAVFLETHQDPDNAPSDGPNMVPLKNLDGLINQLVEIDSLVKK

SEQ ID NO: 121557 - protein, 252 aa, Unknown
  Bacterial polypetide isolated from the Sargasso Sea
MTVKVSNLSIDNGSRLTLISGPCVIESRDLIHDVAGRIKEITDSLEIGYIFKSSFDKANRTSIDSFRGPGMEEGLAILESVRDQLGVPVITDVHEDTPLDEVASVVDVLQTPAFLCRQTNFIINVASQQKPVNIKKGQFLSPWEMENVVKKAKSTGNEDILVCERGYTFGYNNLVSDMRSLVVLKETSCPVIYDATHSLQLPGGKGGSSDGQSEFIIPVSRGAVGVGIAGIFIETHPDPKNALSDGPNSLPL

SEQ ID NO: 121558 - protein, 246 aa, Unknown
  Bacterial polypetide isolated from the Sargasso Sea
MKLRDFKIDNNEKMTLMGGMNVLESRDLAMEVAEKFKNVTDKNDINYIFKGSFDKANRSSINSFRGPGMDEGLKILEEISKTYDIPVITDIHEPNQAKSVSEICEVIQIPAFLARQTDLVSAAAKTSSIIQFKKPQFLSAQEMSNVVEKCEAAGNKNITLCERGNSYGYNNLVVDTLNFQILKKLSKPVIFDVTHSLQLPGGLGSSTGGRREYVLSLAKAGMSQSIAGLFLEAHPNPDEAKCDGLC

SEQ ID NO: 121559 - protein, 279 aa, Unknown
  Bacterial polypetide isolated from the Sargasso Sea
MIDHKVVKVDDIDIANSLPFTLIAGPCVVESEDHALKTAKTISNVSNKLGINFVYKSSFDKANRTSMNSERGLGLEKSKEIFKEIKKVIGCPIISDVHEINQIELLSEYVDIIQIPAFLCRQTDLLIEAAQTNKPIMVKKGQFLAPWDMKNVIDKLSENGDGKILVCERGVSFGYNTLVSDFRSIPIMKKFGYPVVFDATHSVQQPGGMGSKSGGQREFVPILARAAISIGIAALFMETHDDPDNAPSDGPNMLPLKDLEKLLNTLIKFDAIAKEKSQS

SEQ ID NO: 121560 - protein, 67 aa, Unknown
  Bacterial polypetide isolated from the Sargasso Sea
KSGGQREFVEYLSRAAIAVGVAAVFMETHPDPDNAPSDGPNMVPLSNMPGLLKQLFEIDKLIKNGKN

SEQ ID NO: 121561 - protein, 176 aa, Unknown
  Bacterial polypetide isolated from the Sargasso Sea
MKLLDFKVGIKYPFFLIAGPCVVESEALQIETAGFLKEVCKKLGVSFIFKSSFDKANRSSANSFRGLGMQDGLKILEKVKKEIDVPLLTDVHNASEINEVSSVVDVLQTPAFLCRQTDFISAVAKSGKPVNLKKGQFLAPGDMKNVVDKARKAAAEAGLNDNQFMVCERGASFGTT

SEQ ID NO: 121562 - protein, 164 aa, Unknown
  Bacterial polypetide isolated from the Sargasso Sea
LQSPAFLCRQTDLLIAAAKTNKIINVKKGQFLAPWDMVNVTKKISDSGNDNILVTERGASFGYNTLVSDMRSIPIMIKNGYPVVFDATHSVQQPGGLGEKSGGQREFVEYLARAASAVGVAAIFMETHQDPDNAPSDGPNMVPLNKLESLLTQIIEIDRLVKNF

SEQ ID NO: 121563 - protein, 241 aa, Unknown
  Bacterial polypetide isolated from the Sargasso Sea
SVAEKFKTLSEKLGFNYVFKASFDKANRSSLDSFRGPGLDEGLKSLEKIKNEFNLPVITDIHEPDQAVPVSEVCEVLQIPAFLCRQTDLIVAAAKTKKVINIKKPQFSSAKEMFHAVDKCSAVGNEDVILCERGNIFGYNNLVVDPLNFQILKERGNPVFFDVTHSLQQPGMLEKSTGGRGQYVFELAKVGISQNIAGLFLETHPDPSKAKCDGPCALKLSDLDIFMEKIISLDEFVKNSK

SEQ ID NO: 121564 - protein, 214 aa, Unknown
  Bacterial polypetide isolated from the Sargasso Sea
MNQKIVKCKDFEIANNKKFTFISGPCQIESEEHAIDIASYIKELTTQLDINFIFKSSFDKANRTSITGARGIGLDKSLKIFDKIKNKLNLPVLTDVHNPEQCSILSDVIDIIQIPAFLCRQTDLLVAAAKTKKIINVKKGQFLAPWDMVNVTKKISGSGNENILVTERGVSFGYNTLVSDMRSLPEMAKNGYPVVFDATHSVQQPGGKGNSSGG

SEQ ID NO: 121565 - protein, 171 aa, Unknown
  Bacterial polypetide isolated from the Sargasso Sea
QLPAFLARQTDLVRAMAETGAVINIKKPQFLSPEQMRNIVDKFRECGNEQLLLCERGTNFGYDNLVVDMLGFGVLKRTCDDLPLIFDVTHALQCRDPGGAASGGRRSQVVDLAKAGMAVGLAGLFLEAHPDPKQARCDGPSALPLDQLEPFLSQVKAIDDLVKSQPALEIR

SEQ ID NO: 121566 - protein, 184 aa, Unknown
  Bacterial polypetide isolated from the Sargasso Sea
MNSIKVNCGNIEISNNNKICIIAGPCQLETEQHAMDMVGRIQEITKKFGLGFIYKTSFDKANRTSLKGKRGAGIEASLPVFDKIKKEYNVPILTDIHNIDQCSEVADHVDILQIPAFLCRQTDLLIAAAKTNKIINVKKGQFLAPWDMVNVTKKISDSGNTNILVTERGASFGYNTLVSDMRSC

SEQ ID NO: 121567 - protein, 109 aa, Unknown
  Bacterial polypetide isolated from the Sargasso Sea
MKDQIIKINDIELANNKPFVLFGGMNVLESRDLAMRIAEHYVEVTTKLNIPYVFKASFDKANRSSINSYRGPGMEEGLKIFEEIKNTFNIPLITDVHEPHQAAPLAEVV

SEQ ID NO: 121568 - protein, 112 aa, Unknown
  Bacterial polypetide isolated from the Sargasso Sea
ILITERGASFGYNTLVSDMRSIPIMAQTGYPIVFDATHSVQQPGGMGDKSGGERKFVSHLSRAAVAVGIAAVFIETHQDPDNAPSDGPNMVPLNEMDGLVNKLLEIDKLIKN

SEQ ID NO: 121569 - protein, 252 aa, Unknown
  Bacterial polypetide isolated from the Sargasso Sea
MENKIINCNGIEISNNKRISLIAGPCQLESEQHAMDMAGKIKEIANKFKIGFIYKTSFDKANRTSIKGKRGAGLEKSLPVFDKIKKELNVPILTDIHNEEQCSQVAEHVDVLQIPAFLCRQTDLLVAAAKTKKIINVKKGQFLAPWDMVNVTKKISDSGNNNILVTERGASFGYNTLVSDMRSLPIMAKNGYPVIFDATHSVQQPGGMGEKSGGQREFVEHLARAAVAVGVAGVFIETHQDPDNAPSDGTNM

SEQ ID NO: 121570 - protein, 216 aa, Unknown
  Bacterial polypetide isolated from the Sargasso Sea
MNSINVNCGNIEISNNNKICIIAGPCQLETEQHAMDMAGKIQEITKKFGLGFIYKTSFDKANRTSLKGKRGAGLEASLPVFDKIKKEFNIPILTDIHSIDQCSEVSDHVDILQIPAFLCRQTDLLIAAAKTNKIINVKKGQFLAPWDMVNVTKKISDSGNTNILVTERGASFGYNTLVSDMRSLPIMAKNGYPVIFDATIQYNNLEVKESHQEVKE

SEQ ID NO: 121571 - protein, 219 aa, Unknown
  Bacterial polypetide isolated from the Sargasso Sea
MQNIKVKCNQIEISNSNRFCLIAGPCQLETEQHALDIAGKIQEITKKFNLGFIYKTSFDKANRTSLKGKRGAGLEKSLPVFDKIKKELNIPVLTDIHNEAQCKIVSNHVDVLQIPAFLCRQTDLLIAAAKTKKIVNVKKGQFLAPWDMVNVTKKISDSGNNNILVTERGASFGYNTLVSDMRSIPIMAKNGYPVIFDATHSVQQPGGMGEKRWWTKKNL

SEQ ID NO: 121572 - protein, 254 aa, Unknown
  Bacterial polypetide isolated from the Sargasso Sea
MSTQKTIFVNDISLCNDNSFVLIGGLNVLETKDLNLKVAETFKEITSRLKIPYIFKASFDKANRSSTDSYRGPGMEEGLRILEDIKQEFEIPILTDIHEPQQAKPASEIADVLQLPAFLSRQTDLVSALANTKAVINIKKAQFLSPDEMGNIINKFEVFGNKKLFLCERGTSFGYNNLVVDMLGFKLMKKFGYPLVFDVTHSLQIPGGLGNSAAGRRGSIREMGLAGLSQKIAGLFLEAHPEPDKALCDGPSAL

SEQ ID NO: 121573 - protein, 198 aa, Unknown
  Bacterial polypetide isolated from the Sargasso Sea
MIKINLNNFSIANNLPFVLIAGPCVIENEEHTLMMAEEINNICSELKINFIFKSSFDKANRSSIKSKRGVSIEDALEIFQQIKSKFNCPIITDLHTESQCKLLSENHDIDILQIPAFLCRQTDLLLAAGRTNKIINVKKGQFLAPNDVKNIFEKIESVNNNKILITERGTFFGYNNLINDFRSLEIMKQFNYPVIFDG

SEQ ID NO: 121574 - protein, 155 aa, Unknown
  Bacterial polypetide isolated from the Sargasso Sea
MNSITINCGKIEISNNNKICIIAGPCQLETEQHAMDMAGKIKEITKKFNLGFIYKTSFDKANRTSLKGKRGAGLEASLPVFDKIKKEFNIPLLTDIHNIEQCSIVSNHVDILQIPAFLCRQTDLLIAAAKTNKIINVKKGQFLAPWDPWLMSRKK

SEQ ID NO: 121575 - protein, 224 aa, Unknown
  Bacterial polypetide isolated from the Sargasso Sea
FIYKTSFDKANRTSIKGKRGAGLEKSLPVFDKIKKDLDIPILTDIHNEEQCTVLAKHVDVLQIPAFLCRQTDLLIAAAKTKKIINVKKGQFLAPWDMVNVTKKISDSGNSNILVTERGASFGYNTLVSDMRSIPIMSKNGYPVIFDATHSVQQPGGMGEKSGGQREFVEHLARAAVAVGVAGVFIETHQDPDNAPSDGPNMVPLNKLENLINKLLEIDNLIKNR

SEQ ID NO: 121576 - protein, 137 aa, Unknown
  Bacterial polypetide isolated from the Sargasso Sea
VKKGQFLAPWDMKNVVDKLKEYQCKKIMLTDRGAQFGYNNLIADMRSIPIMQDFGYPVIFDATHSAQLPGGDGLTSSGMRAMIPTLAKSAVAAGCDGIFMEVHNDINNAKSDAATQWSLSELEHLLIKLKHIREAII

SEQ ID NO: 121577 - protein, 116 aa, Unknown
  Bacterial polypetide isolated from the Sargasso Sea
GNEDILVCERGYTFGYNNLVSDMRSLVVLKETSCPVIYDATHSLQLPGGKGGSSDGQSEFIIPVSRGAVGVGIAGIFIETHPDPKNALSDGPNSLPLDNLKPLLEQLLAIDEIVKK

SEQ ID NO: 121578 - protein, 236 aa, Unknown
  Bacterial polypetide isolated from the Sargasso Sea
GKIQEITKKFGLGFIYKTSFDKANRTSLKGKRGAGLEASLPVFDKIRKELNVPILTDIHNSEQCSVVANHVDVLQIPAFLCRQTDLLIAAAKTNKIINVKKGQFLAPWDMVNVTKKISDSGNKNILVTERGASFGYNTLVSDMRSLPIMAKNGYPVIFDATHSVQQPGGQGVSSGGEREFVEYLARAAVAVGVAGVFIETHQDPDNAPSDGPNMVPLNKLENLLKQLHDIDNLIKK

SEQ ID NO: 121579 - protein, 254 aa, Unknown
  Bacterial polypetide isolated from the Sargasso Sea
IAGPCQLETEQHAMDMAGKIQDITKKFGVGFIYKTSFDKANRTSLKGKRGAGLDTSLPIFDKIKKELNVPILTDIHNIEQCSIVAKHVDVLQIPAFLCRQTDLLVAAAKTNKIINVKKGQFLAPWDMVNVTKKISDSGNKNILVTERGASFGYNTLVSDMRALPIMAKNGYPVIFDATHSVQQPGGLGEKSGGQREFVEHLARAAVAVGVAGVFIETHQDPDNAPSDGPNMVPIDKLESLLKQLTDIDSLIKNK

SEQ ID NO: 121580 - protein, 141 aa, Unknown
  Bacterial polypetide isolated from the Sargasso Sea
KIINVKKGQFLAPWDMINVIKKITESGNKNILITERGASFGYNTLVSDMRALPIMARFGFPVVFDATHSVQQPGGMGEKSGGQREFVPYLAQAAVAVGVSAIFMETHEDPDNAPSDGPNMVPLNEVKALLKKLTEIDKIVK

SEQ ID NO: 121581 - protein, 216 aa, Unknown
  Bacterial polypetide isolated from the Sargasso Sea
KIEEICSEQGINFIYKSSFDKANRTSLNSSRGPGIYEAISIFNEIKEKIGCPIITDVHEKDQISLISEVVDVIQIPAFLCRQTDLLVEAAKSNLPVMVKKGQFLAPWDMKNVTDKLEKNGDGGVMICERGVSFGYNTLVSDFRAIPILKNLGHPIVFDATHSVQQPGGLGDKSSGQREFVPTLATAAAAIGVAAIFMETHEDPDNAPSDGPNMWPN

SEQ ID NO: 121582 - protein, 183 aa, Unknown
  Bacterial polypetide isolated from the Sargasso Sea
LTDIHNENQCSIVAPHVDVLQIPAFLCRQTDLLVAAAKTKKVINVKKGQFLAPWDMVNVTKKISESGNEKILVTERGASFGYNTLVSDMRSIPIMAKNGYPIVFDGTHSVQQPGGQGDKSGGQREFVEYLSRAAVAVGIAAIFLETHQDPDNAPSDGPNMVPLDKLDGLINQIVEIDNLIKKN

SEQ ID NO: 121583 - protein, 155 aa, Unknown
  Bacterial polypetide isolated from the Sargasso Sea
RQTNFILKVVAQNIPVNIKKGQFLSPWDMENVVNKAKSQGNENILVCERGYSFGYNNLVSDMRSLVIMKETQCPVIFDATHSLQLPGGKGSSSDGQREYINPLARAATAVGIAGIFIETHPDPDKALSDGPNSLPLDELKPLMEKLVKIDNLVKT

SEQ ID NO: 121584 - protein, 211 aa, Unknown
  Bacterial polypetide isolated from the Sargasso Sea
MNTISIGNVKFQNGSLPLIAGPCVIESRDHSLKMAEQIQKITNALSIPLIFKSSFDKANRSSIGSFRGPNRLDEGLSILADVKKELGIPVLTDIHLPDQCGVVAEVCDVLQIPAFLCRQTDLLLAAGKTGKTINIKKGQFLAPGKMKYTAEKIESTGNKNIILTERGTSFGYSLVSDMTSIPVMRKTGYPVIFDATHSAQLPSDKNITGGQ

SEQ ID NO: 121585 - protein, 233 aa, Unknown
  Bacterial polypetide isolated from the Sargasso Sea
KENTKNFGLGFIYKTSLIKANRTSLKGKRGAGLEASLPVFDKIKKELNVPILTDIHNAEQCSIVANHIDILQIPAFLCRQTDLLIAAAKTNKIINVKKGQFLAPWDMVNVTKKISDSGNKNILVTERGASFGYNTLVSDMRSLPIMAKNGYPVIFDATHSVQQPGGQGESSGGEREFVEYLARAAVAVGVAGVFIETHQDPDNAPSDGPNMVPLNKLESLLKQLSDIDNLIKK

SEQ ID NO: 121586 - protein, 219 aa, Unknown
  Bacterial polypetide isolated from the Sargasso Sea
TSFDKANRTSLKGKRGMGLEKSLPIFDKIRKEVGVPVLTDVHTAEQCSIVSKYVDVLQIPAFLCRQTDLLIAAAKTGKIINVKKGQFLAPWDMANVIKKIEESGNKNILITERGASFGYNTLVSDMRALPIMSKFGFPIVFDATHSVQQPGGMGEKSGGQREFVPHLARAAIAVGVGAIFMETHQDPDNAPSDGPNMVPLSEMKSLLKKLTEIDNLIKK

SEQ ID NO: 121587 - protein, 138 aa, Unknown
  Bacterial polypetide isolated from the Sargasso Sea
MKEKEIEFANIKLSNSKPFVLFGGLNVLETKSLGLQVAETFKNVCEALDIQLVFKASFDKANRSSVASFRGPGLDEGLRWLDDIKKQCDVPIITDVHEVVQVKPVAEVADVIQLPAFLSRQTDLICAMAATDKVINIK

SEQ ID NO: 121588 - protein, 229 aa, Unknown
  Bacterial polypetide isolated from the Sargasso Sea
QNLTFGFIYKTSFDKANRTSLKGKRGAGLDVSLPVFDKIKKELNVPILTDIHNAEQCEMVSKHVDVLQIPAFLCRQTDLLIAAAKTNKIINVKKGQFLAPWDMVNVTKKISDSGNKNILVTERGASFGYNTLVSDMRSLPIMAKNGYPVIFDATHSVQQPGGQGESSGGQREFVEYLARAAVAVGVAGVFIETHQDPDNAPSDGPNMVPLNKLENLLKQLHDIDNLIKK

SEQ ID NO: 121589 - protein, 162 aa, Unknown
  Bacterial polypetide isolated from the Sargasso Sea
IPAFLCRQTDLLIAAAKTNKIINVKKGQFLAPWDMVNVTKKISDSGNDNILVTERGASFGYNTLVSDMRSIPIMIKNGYPVVFDATHSVQQPGGLGEKSGGQREFVEYLARAATAVGVAAIFMETHQDPDNAPSDGPNMVPLNKLESLLNQIIEIDKLVKNF

SEQ ID NO: 121590 - protein, 152 aa, Unknown
  Bacterial polypetide isolated from the Sargasso Sea
MEHKTINCNGIEISNNKKISLIAGPCQLESEQHAMDMAGKIREIASKFKIGFIYKTSFDKANRTSIKGKRGAGIDKSLPVFDKIKKELNVPILTDIHNEEQCAIVSKHVDILQIPAFLCRQTDLLIAAAKTKKIINVKKGQFLAPWDMVNVT

SEQ ID NO: 121591 - protein, 251 aa, Unknown
  Bacterial polypetide isolated from the Sargasso Sea
PLENEKHALTIANDLKKITEKLGIGLIYKTSFDKANRTSLNGKRGAGLEKSLPVFDKIKKEVGIPVLTDIHSIEQCDVVSKHVDVLQIPAFLCRQTDLLVAAAKTGKVINVKKGQFLAPWDMTNVTKKIEQSGNKNILVTERGASFGYNTLVSDMRSLPIMAKIGYPVVFDATHSVQQPGGMGEKSGGQREFVEHLSRAAIAVGVAAVFMETHEDPDNAPSDGPNMVPLSQMPKLLKQLVEIDNLIKNGKN

SEQ ID NO: 121592 - protein, 152 aa, Unknown
  Bacterial polypetide isolated from the Sargasso Sea
DLLIAAAKTNKIINVKKGQFLAPWDMVNVTKKISDSGNKNILVTERGASFGYNTLVSDMRSLPIMAKNGYPVIFDATHSVQQPGGLGEKSGGQREFVEYLARAAVAVGVAGVFIETHQDPDNAPSDGPNMVPLNKLENLLKQLTDIDNLIKN

SEQ ID NO: 121593 - protein, 174 aa, Unknown
  Bacterial polypetide isolated from the Sargasso Sea
MSDNDVIDVLQIPAFLCRQTDLLLSAAKTNKIINVKKGQFLAPNDVSNIFEKIQSENNNKIMITERGTSFGYNNLVNDFRGIDIMKQFKFPVIFDATHSVQQPGGLGDKSGGKREFIPSLCKAAVSIGIAGIFLETHDDPDNAPSDGPNMININDLNNLLVQLKEFDLIAKKYA

SEQ ID NO: 121594 - protein, 215 aa, Unknown
  Bacterial polypetide isolated from the Sargasso Sea
KANRTSLKGKRGAGLDSSLPVFDKIKKELKIPVLTDVHNVDQCSIVSEHVDVLQIPAFLCRQTDLLIAAAKTNKIINVKKGQFLAPWDMANVTKKISESGNDNILVTERGASFGYNTLVSDMRSIPIMAKNGYPIIFDATHSVQQPGGLGEKSGGQREFVEHLSRAATAVGIAAIFLETHQDPDNAPSDGPNMVPLNKLENLIYQIVEIDNLVKK

SEQ ID NO: 121595 - protein, 154 aa, Unknown
  Bacterial polypetide isolated from the Sargasso Sea
MSILKIKNFTIGNNEPMVLMGGVNVLESESVVMAVAEQFAKVTSSLNINWIFKGSFDKANRSSISSFRGPGLDEGLKMLEKVKSEFDAPVLTDIHEPSQADPVSKICDIIQIPAFLCRQTDLVIAAAKTKKIIQFKKPQFLSAPEMKNVIEKCN

SEQ ID NO: 121596 - protein, 152 aa, Unknown
  Bacterial polypetide isolated from the Sargasso Sea
TNLLKSAAETDKPVNVKKGQFLAPWDMKNVVQKLEEFGCKKILLTDRGTQFGYNNLVADMRSIPIMKDFGHPVVFDATHSAQLPGANGLTSSGMRGMIPTLARAAVGAGCDGVFMEVHNDVKSAKSDAATQWPLSELEPLLLKLKIIWDASR

SEQ ID NO: 121597 - protein, 230 aa, Unknown
  Bacterial polypetide isolated from the Sargasso Sea
QLETEQHAMDMAGKIKEIATKYKIGLIYKTSFDKANRTSIKGKRGAGLGNSLPVFDKIKKELNIPVLTNIHNEEQCSVVAPHVDVLQIPAFLCRQTDLLIAAAKTNKIINVKKGQFLAPWDMVNVTKKISDSGNENILVTERGASFGYNTLVSDMRSIPIMAKNGYPIVFDATHSVQQPGGQGEKSGGQREFVEHLSRAAVAVGVAAIFLETHQDPDNAPSDGPNMVPLN

SEQ ID NO: 121598 - protein, 120 aa, Unknown
  Bacterial polypetide isolated from the Sargasso Sea
MNKIDLNNFSIANNLPFVLIAGPCVIENEGHTLMMAEEINNICSELKINFIFKSSFDKANRSSIKSNRGVSLEDALKIFNKIKSKINCPIITDLHTERQCQILTENQDIDILQIPAFLCR

SEQ ID NO: 121599 - protein, 221 aa, Unknown
  Bacterial polypetide isolated from the Sargasso Sea
MNKVKLHNFSISNNLPFVLIVGPCVIEDEKHSLFMAEKINNICEDLKINYIYKSSFDKANRSSISSSRGIGLKEAIKIFKKIKNNFNCPIITDVHNEYQCEFLTNEDSIDVIQIPAFLCRQTDLLIAAGRSDKVLNVKKGQFLSPHDVKNIFKKIESTNNNKILITERGTSFGYNNLVSDFKGIEIMKKFNYPIIFDATHSVQEPGGLGSKSGGKESLYLL

SEQ ID NO: 121600 - protein, 155 aa, Unknown
  Bacterial polypetide isolated from the Sargasso Sea
MKDILIKDFKIGNDQDLTLMGGMNVLESEETALLVAEKFKEVTDKLEINWIFKASFDKANRSSIESFRGPGMDEGLKILEKVSSAFDVPVITDIHEPSQANPVSEVCEVIQIPAFLCRQTDLVSAAAKTKSAIQFKKPQFLSAAEMKNVLKNVSL

SEQ ID NO: 121601 - protein, 204 aa, Unknown
  Bacterial polypetide isolated from the Sargasso Sea
GVDEGLSILSNLKKEFKVPIISDVHTVEEVSRASEVLDIIQIPAFLSRQTDLIKEAASTKTPINIKKGQFMAPEDTKNIINKCEHFGNKQIMICERGSSFGYNNLVVDMLGMVQLKESNYPVIFDVTHSLQRPGGLGDRTDGRGSKVLDLARAGMALGLAGLFLETHPDPEKALCDGPCALKIDSLEDFLVQIKAIDDLVKSFN

SEQ ID NO: 121602 - protein, 163 aa, Unknown
  Bacterial polypetide isolated from the Sargasso Sea
MKSITVNCNNIEISNNKRICLIAGPCQLETEQHAMDMAGKIKEITSKFNIGFIYKTSFDKANRTSLKGKRGAGLDKSLPVFDKIKKELKVPILTDIHNIDQCSVVAGHVDILQIPAFLCRQTDLLIAAAKTNKIINVKKGQFLAPWNMVNVTKKISDSGNNNI

SEQ ID NO: 121603 - protein, 211 aa, Unknown
  Bacterial polypetide isolated from the Sargasso Sea
MNAHTISVAGIPVANHLPFVLFGGMNVLESRDLAMRIAEHYVEVTGKLGIPYVFKASFDKANRSSVHSYRGPGLDEGLKIFEEIKRTFKVPLITDVHEPYQAAPVAEVVDVIQLPAFLARQTDLVVAMAKTGAVINVKKPQFLAPHEMRHIITKFKEAGNEQVLLCERGSCFGYNNLVVDMLGMDEMKQYGPVIFDATHALQKPGGRESSA

SEQ ID NO: 121604 - protein, 253 aa, Unknown
  Bacterial polypetide isolated from the Sargasso Sea
MPARRVELGPITFSNDQPFALLGGVNVLEDLDFALRSAAHYKDVCQRLKIPLVFKASYDKANRSSVYSFRGPGLKDGLAILQAVKDRHGIPVITDVHSPEEAVAAAKVADIIQLPAFLARQTDLVRAMAETGSVINIKKPQFLSPEQMRNIVEKFRECGNEQLLICERGSNYGYDNLVVDMLGFGVMKRSCDDLPLIFDVTHALQCRDPGGAASSGRRSQVVDLARAGMAIGLAGLFLEAHPNPDQARCDDRA

SEQ ID NO: 121605 - protein, 72 aa, Unknown
  Bacterial polypetide isolated from the Sargasso Sea
GGMGDKSGGQREFVEYLARAAIAVGVAAVFMETHPDPDNAPSDGPNMVPLSEMPKLLNQLVEIDKLIKNGKN

SEQ ID NO: 121606 - protein, 263 aa, Unknown
  Bacterial polypetide isolated from the Sargasso Sea
EISNNNKICIIAGPCQLETEQHAMDMAGKIKEISSKFGLGFIYKTSFDKANRTSLKGKRGAGLDASLPIFDKIKKELNVPILTDIHNAEQCEIVSRHVDVLQIPAFLCRQTDLLIAAAKTNKIINVKKGQFLAPWDMVNVTKKISDSGNKNILVTERGASFGYNTLVSDMRSLPIMAKNGYPVIFDATHSVQQPGGQGESSGGQREFVEYLARAAVAVGVAGVFIETHQDPDKAPSDGPNMVPLNKLENLLKQLLDIDNLIKK

SEQ ID NO: 121607 - protein, 171 aa, Unknown
  Bacterial polypetide isolated from the Sargasso Sea
MNTITIGNVKYESGSFPLIAGPCVIESRDHILMMAEQIQKITSTMNIPLIFKSSFDKANRSAIDSFRGPDNLDTGLSILNDVKTELGIPVLTDVHLPDQCKAVAEVSDVLQIPAFLCRQTDLLIAAGKTGKAINIKKGQFLAPGKMKHVAEKVESTGNKNILLTERGTSFG

SEQ ID NO: 121608 - protein, 149 aa, Unknown
  Bacterial polypetide isolated from the Sargasso Sea
AVINIKKAQFLSPEEMGNIINKFEVSGNNKLILCERGTSFGYNNLVVDMLGFKVMKKFGYPLVFDVTHSLQIPGGLGNSAAGRRESILELGLAGLSQKIAGLFLEAHPDPDKALCDGPSALRLDQLEPFLEQMKAVDELVKSFERLSTA

SEQ ID NO: 121609 - protein, 184 aa, Unknown
  Bacterial polypetide isolated from the Sargasso Sea
MIFTIEEQCSIVAPHVDVLQIPAFLCRQTDLLVAAAKTKKIINVKKGQFLAPWDMVNVTKKISESGNNNILVTERGASFGYNTLVTDMRSIPIMAKNGYPIVFDATHSVQQPGGQGDKSGGQREFVEHLSRAAVAVGVAAIFIETHQDPDNAPSDGPNMVPLNKLDNLINQIVEIDNLIKKNNV

SEQ ID NO: 121610 - protein, 189 aa, Unknown
  Bacterial polypetide isolated from the Sargasso Sea
MQNHIMENKLVNCNGIEISNKNKICLIAGPCQLETEQHAMDMAGKIKEIASKYKIGLIYKTSFDKANRTSIKGKRGAGLENSLPVFDKIKKDLNIPVLTDVHNEKQCGVVAPHVDVLQIPAFLCRQTDLLIAAAKTNKVINVKKGQFLAPWDMVNVTKKISDSGNDNILVTERGASFGYNTLVSDMRSI

SEQ ID NO: 121611 - protein, 172 aa, Unknown
  Bacterial polypetide isolated from the Sargasso Sea
CSVVANHVDVLQIPAFLCRQTDLLIAAAKTGKIINVKKGQFLAPWDMVNVIKKIEESGNKNILITERGASFGYNTLVSDMRALPIMSRFGFPIVFDATHSVQQPGGMGEKSGGQREFVPYLARAAIAVGVGAIFMETHEDPDNAPSDGPNMVPLNEVKALLKKLTEIDKLVK

SEQ ID NO: 121612 - protein, 244 aa, Unknown
  Bacterial polypetide isolated from the Sargasso Sea
MMMTARQIQLGDITFANDRPFALLGGVNVLEDLDFALRCAGHYKQVCERLGIPLVFKASYDKANRSSIHSFRGPGLKDGLGILQAVKDTHGIPVITDVHSPEEAAAAAKVADIIQLPAFLARQTDLVRAMAETGAVINIKKPQFLSPEQMRNIVDKFRECGNEQLLICERGTNFGYDNLVVDMLGFGVMKRTCDELPLIFDVTHALQCRDPGGAASGGRRSQVVDLAKSGMAVGLAGLFLEAHP

SEQ ID NO: 121613 - protein, 235 aa, Unknown
  Bacterial polypetide isolated from the Sargasso Sea
AMDMAGKIKEITAKFDLGFIYKTSFDKANRTSLKGKRGAGLEASLPVFDKIKKELNVPILTDIHNAEQCEIVSKHVDVLQIPAFLCRQTDLLIAAAKTNKIINVKKGQFLAPWDMVNVTKKISDSGNKNILVTERGASFGYNTLVSDMRSLPIMAKNGYPVIFDATHSVQQPGGLGEKSGGQREFVEYLARAAVAVGVAGVFIETHQDPDNAPSDGPNMVPLDKLENLLKQLSDI

SEQ ID NO: 121614 - protein, 105 aa, Unknown
  Bacterial polypetide isolated from the Sargasso Sea
ASFGYNTLVSDMRALPIMAKNGYPVIFDATHSVQQPGGLGEKSGGQREFVEHLARAAVAVGVAGVFIETHQDPDNAPSDGPNMVPLDKLESLLKQLTDIDSLIKN

SEQ ID NO: 121615 - protein, 196 aa, Unknown
  Bacterial polypetide isolated from the Sargasso Sea
MSNIELTDRTIELNNLKISNKYPLTLISGPCQLESLEHAMMIAEKLLEICDRNDINLVFKSSFDKANRTSHLSKRGIGIEEGLKIFQKLRNSLNICTLTDVHTTEQCELVAKEVDILQIPAFLCRQTDLIIAASKTNKPVNIKKGQFLSPAEMQQVAAKFISAGNENLLLCERGTTFGYNDLVCDMRSLEVLRQSG

SEQ ID NO: 121616 - protein, 178 aa, Unknown
  Bacterial polypetide isolated from the Sargasso Sea
MRLRNFNIGNSETLTLMGGMNVLESRDLAMHVAEKFKESCEKYNINYIFKGSFDKANRSSINSFRGPGLDEGLKILHEVSNSFDVPVITDIHEADQAKPVSEVCEVVQIPAFLARQTDLVSAAAKTSSIIQFKKPQFLSAPEMENVVEKCISAGNENIILCERGNTFGYNNLVVDTLN

SEQ ID NO: 121617 - protein, 208 aa, Unknown
  Bacterial polypetide isolated from the Sargasso Sea
VEEGLRILEEVKQAFEIPILTDIHEHQQAEPAAEVADVLQLPAFLSRQTDLVSALAKTKAVINIKKAQFLSPEEMGNIVKKFEVYGNKKLILCERGTSFGYNNLVVDMLGFKVMKKFGYPLAFDVTHSLQIPGGMGNSAAGRSDSILELGLAGLSQKIAGLFLEAHPDPDKALCDGPSALRLDQLEPFLEQMKAVDELVKSLETLDTA

SEQ ID NO: 121618 - protein, 199 aa, Unknown
  Bacterial polypetide isolated from the Sargasso Sea
MENKIVNCNGIEISNKNRICLIAGPCQLETEQHAIDIAGKIKEIASKYSIGFIYKTSFDKANRTSLQGKRGAGLEKSLPVFDKIKKDLNIPVLTDIHNEEQCTLVAPHVDVLQIPAFLCRQTDLLIAAAKTNKIINVKKGQFLAPWDMINVTKKIYDSGNQNILLTERGASFGYNTLVSDMRSIPIMAKIGYPVVFDGT

SEQ ID NO: 121619 - protein, 204 aa, Unknown
  Bacterial polypetide isolated from the Sargasso Sea
MLINNIFRSENLDIIAGPCVIESEDHALFMSEKLNSICKKLKVNLVYKSSFDKANRTSQESFRGLGIQDGLSILRKVKNNIGVLVLTDIHEPMQADMVSEIVDIIQIPAFLCRQTDLLKAAAGTGKIVNIKKGQFLAPWDMKNVVKKLESFGCKRILLTDRGTQFGYNNLIADMRSIPLMKDYGYPVIFDCTHSVQLPGGNGTF

SEQ ID NO: 121620 - protein, 121 aa, Unknown
  Bacterial polypetide isolated from the Sargasso Sea
KISDSGNENILVTERGASFGYNTLVSDMRSIPIMAKNGYPIVFDATHSVQQPGGLGEQSGGQREFVEYLSRAAAAVGVAAIFLETHQDPDNAPSDGPNMVPLNKLDSLINQIVEIDKLIKK

SEQ ID NO: 121621 - protein, 240 aa, Unknown
  Bacterial polypetide isolated from the Sargasso Sea
MDMAGKIQEITKKFGLGFIYKTSFDKANRTSLKGKRGAGLDASLPVFDKIKKELNVPILTDIHNAEQCSLVANHVDVLQIPAFLCRQTDLLISAAKTKKIINVKKGQFLAPWDMVNVTKKISDSGNKNILVTERGASFGYNTLVSDMRSLPIMAKNGYPVIFDATHSVQQPGGQGESSGGQREFVEYLARASVAVGVAGVFIETHQDPDNAPSDGPNMVPLNKLENLLKQLNDIDNLIKK

SEQ ID NO: 121622 - protein, 250 aa, Unknown
  Bacterial polypetide isolated from the Sargasso Sea
PCQLESEQHAMDMAGKIKEISNKFKIGFIYKTSFDKANRTSIKGKRGAGLEKSLPVFDKIKKDLNVPILTDIHNAEQCSVVANHVDVLQIPAFLCRQTDLLVAAAKTKKIINVKKGQFLAPWDMVNVTKKISDSGNNNILVTERGASFGYNTLVSDMRSIPIMAKSGYPVIFDATHSVQQPGGMGEKSGGQREFVEYLARAAVAVGVAGVFIETHQDPDNAPSDGPNMVPLNKLENLINQLFEIDNLVKK

SEQ ID NO: 121623 - protein, 226 aa, Unknown
  Bacterial polypetide isolated from the Sargasso Sea
HFIFKSSFDKANRSSINSNRGVDINQAEKIFNKIKSIYNCPILTDVHNESQCEFFSNSESVDVLQIPAFLCRQTDLLIAAAKTKKIVNVKKGQFLSPHEVPNIFNKIESAGNYNIMITERGTSFGYNNLINDFKSLDIMKNFQYPVIFDATHSVQEPGGMGEKSGGKREFVSTLAKAAVAVGVAGIFIETHNDPDNAPSDGPNMLQIENLESLISKLIELDTVSKK

SEQ ID NO: 121624 - protein, 221 aa, Unknown
  Bacterial polypetide isolated from the Sargasso Sea
SSFDKANRTSISSERGIGIDDGLEILSRVKKEFDLTTITDIHDASQCHKVSCVVDILQIPAFLCRQTDLLVAAAKTDCVLNVKKGQFLAPWDMHQVVKKIKSSGNNKVLVTERGVSFGYNTLISDMRAIPELKKSNCPVIFDATHSVQQPGGKGNSSGGERKYVSILSRAAIAVGVAGIFMETHKDPDSAPSDGPNMIPLDELSNLLKLLKNFDILSKSNI

SEQ ID NO: 121625 - protein, 156 aa, Unknown
  Bacterial polypetide isolated from the Sargasso Sea
MKNHIVKCSNIEISNKKPFTLIAGPCQLESEAHAIKISTELKKITNELGINLIYKTSFDKANRTSLKGKRGIGLEKSLPIFDKIKKEVGIPVLTDVHTAEQCSIVAKHIDVLQIPAFLCRQTDLLIAAAKTGKVINIKKGQFLAPWDMANVIKKIE

SEQ ID NO: 121626 - protein, 252 aa, Unknown
  Bacterial polypetide isolated from the Sargasso Sea
MLNKVVKCNNFEISNNKKISLISGPCQLETEQHAMDMAGKIKEIASKFEIGFIYKTSFDKANRTSLKGKRGAGLDSSLPVFDKIKKELNIPVLTDVHNVEQCSIVSKHVDVLQIPAFLCRQTDLLVAAAKTNKVINVKKGQFLAPWDMTNVTKKISESGNDNILVTERGASFGYNTLVSDMRSIPIMAKNGYPIVFDGTHSVQQPGGLGEKSGGQREFVEYLSRAATAVGIAAIFLETHQEPDNAPSDGPNM

SEQ ID NO: 121627 - protein, 261 aa, Unknown
  Bacterial polypetide isolated from the Sargasso Sea
ANDKPFTLIAGPCQLESEPHAIKISTELKKITSDLGINLIYKTSFDKANRTSLKGKRGIGLEKSLPIFDKIRKEVGVPVLTDIHTAEQCSAVSKHVDVLQIPAFLCRQTDLLIAAAKTGKIINVKKGQFLAPWDMANVIKKIEESGNKNILITERGASFGYNTLVSDMRALPIMSKFGFPIVYDATHSVQQPGGMGEKSGGQREFVPYLARAAIAVGVGAIFMETHEDPDNAPSDGPNMVPLNEVKDLLKKLTEIDNLIKK

SEQ ID NO: 121628 - protein, 144 aa, Unknown
  Bacterial polypetide isolated from the Sargasso Sea
TKKIINVKKGQFLAPWDMVNVTKKISDSGNNNILVTERGASFGYNTLVSDMRSLPIMAKNGYPVIFDATHSVQQPGGQGEKSGGQREFVEHLSRAAVAVGVAGIFMETHQDPDNAPSDGPNMIPLSNLEKLLKQLIEIDNIIKK

SEQ ID NO: 121629 - protein, 157 aa, Unknown
  Bacterial polypetide isolated from the Sargasso Sea
MKNKKIIKLKDINIGGSYPVVFILGPCQIESRDHSLMMAEKISKICFEFNANFIFKSSFDKANRSSIRAKRGVGLEEGLKILQEVSNNFGCPVLTDVHEATQCKILAEVVDIIQIPAFLSRQTDLLLAAGETQKPVNIKKGQFLSPNGHDESCRESS

SEQ ID NO: 121630 - protein, 183 aa, Unknown
  Bacterial polypetide isolated from the Sargasso Sea
MASKSVKCGRLNISNTGRFTLIAGPCQLENEKHALDIATELKKITDELGVGFIYKTSFDKANRTSLNGKRGAGLEKSLPVFDKIRKDVGVPVLTDVHTIEQCKVVSKHADVLQIPAFLCRQTDLLIAAAKTGKVINVKKGQFLAPWDMVNVTKKIEDSGNKNILVTERGASFGYNTLVSDMRS

SEQ ID NO: 121631 - protein, 183 aa, Unknown
  Bacterial polypetide isolated from the Sargasso Sea
DVHTVEQCNIVSKHADVLQIPAFLCRQTDLLIAAAKTGKVINVKKGQFLAPWDMVNVTKKIEDSGNKNILVTERGASFGYNTLVSDMRSLPIMAKNGYPVVFDATHSVQQPGGMGDKSGGQREFVEYLSRAAIAVGVAAIFIETHPDPDKAPSDGPNMVPLSKMSGLLKQLVEIDNLIKNGKN

SEQ ID NO: 121632 - protein, 198 aa, Unknown
  Bacterial polypetide isolated from the Sargasso Sea
SLPVFDKIKKELNIPILTDIHNIEQCSIVASHVDVLQIPAFLCRQTDLLVAAAKTNKVINVKKGQFLAPWDMVNVTKKISDSGNKNILVTERGASFGYNTLVSDMRALPIMAKNGYPVIFDATHSVQQPGGLGEKSGGQREFVEHLARAAVAVGVAGVFIETHQDPDNAPSDGPNMIPLNKLESLLEQLTDIDNLIKK

SEQ ID NO: 121633 - protein, 224 aa, Unknown
  Bacterial polypetide isolated from the Sargasso Sea
MTRQVKINNFSIANNLPLILIAGPCQLENREHAIYIAENIKKICDKLKINFVYKTSFDKANRTSHLSRRGLGLEKSLKIFEEIREKIKIPILTDVHSVEQCELLKNSIDIIQIPAFLCRQTDLLQSAAKTNLVINIKKGQFLAPWDVSNILGKVEDFNKNILLTERGVSFGYNTLVSDMRSISIMKKEKYPVIFDATHSVQQPGGKGNKSGGQREFIYDLSKAP

SEQ ID NO: 121634 - protein, 157 aa, Unknown
  Bacterial polypetide isolated from the Sargasso Sea
QTDLISAACKTQLPLNIKKGQFLSPYQMKNIIEKCNSFGNDNIILCERGSSFGYDNLIVDFLGISEQKAFNYPIILDVTHSLQLPGGQGNSAGGRSHQAEDLARAAIALKISGLFIEVHPNPDKALCDGPSATKLEDFEDMIKKIKKIDDLVKSEKF

SEQ ID NO: 121635 - protein, 194 aa, Unknown
  Bacterial polypetide isolated from the Sargasso Sea
MKTIKVGNLEVGNDKPFVLIAGLNVLEDDETIKDVIEECIRLTKKYNIPYIFKASYDKANRSSIDSYRGPGVEKGLKKLVELKKDYKVPLISDIHNPGEAELASNVLDIIQIPAFLSRQTDLIEAACATSLPINIKKGQFLAPSDMNNILRKCSHFQNKNIMICERGTSFGYNNLVVDMLGMVELKNNSPVIFD

SEQ ID NO: 121636 - protein, 174 aa, Unknown
  Bacterial polypetide isolated from the Sargasso Sea
MENKIINCNGIKISNKNPLTLIAGPCQLESEQHSMDMAGKIKEITDKFKIGFIYKTSFDKANRTSLTSKRGAGLEKSLPVFDKIKKDLKIPVLTDIHSIEQCSIISKHVDILQIPAFLCRQTDLLIAAAKTNKIINVKKGQFLAPWDMENVTKKISESGNNNILVTERGASFGY

SEQ ID NO: 121637 - protein, 224 aa, Unknown
  Bacterial polypetide isolated from the Sargasso Sea
FDKANRSSISSYRGPGLEEGLNILKEVSDEFDVPVITDIHEPDQAEPVSEICEVIQIPAFLARQTDLVNAAAITKSIIQFKKPQFLSAPEMKNVVEKCTAAGNSNIILCERGNSYGYNNLVVDTLNFQILKKFMTPVIFDVTHSLQLPGGLGGSTDGRREYVLSLAKAGISQSIAGLFLEAHPNPDEAKCDGPCALPLSILEEFLTQIKELDDFIKQQENLDIS

SEQ ID NO: 121638 - protein, 99 aa, Unknown
  Bacterial polypetide isolated from the Sargasso Sea
MIAGPCVWEGYSHAEAIAEKLLTVCGKHDVNFIYKTSFDKANRSSLKGFRGAENAIEGFRELKKKFNLEILTDVHESHQPGELDVVDIFQIPAFLCRQT

SEQ ID NO: 121639 - protein, 176 aa, Unknown
  Bacterial polypetide isolated from the Sargasso Sea
MSNIKVNCGKIEISNDNKICLIAGPCQLETEQHAIDIAGKIQEITKKFNIGFIYKTSFDKANRTSLKGKRGAGLEASLPVFDKIKKELSIPILTDIHNTDQCSIVANHVDVLQIPAFLCRQTDLLVAAAKTNKIINVKKGQFLAPWDMVNVTKKISDSGNQNILVTERGASFGTTL

SEQ ID NO: 121640 - protein, 105 aa, Unknown
  Bacterial polypetide isolated from the Sargasso Sea
YNSLVSDMRSIPIMAKNGYPVVFDATHSVQQPGGMGDKSGGQREFVEHLARAAVAVGVAAVFIETHPDPDNAPSDGPNMVPLSKMPNLLKQLVEIDKLIKNVKNQ

SEQ ID NO: 121641 - protein, 254 aa, Unknown
  Bacterial polypetide isolated from the Sargasso Sea
WISGPCVIESKDLIHDVAGRIKEITDSLEIGYIFKSSFDKANRTSIDSFRGPGMEEGLAILESVRDQLGVPVITDVHEDTPLDEVASVVDVLQTPAFLCRQTNFIINVASQQKPVNIKKGQFLSPWEMENVVKKAKSTDNEDILVCERGYTFGYNNLVSDMRSLVVLKETSCPVIYDATHSLQLPGGKGGSSDGQSEFIVPVSRGAVGVGIAGIFIETHPDPKNALSDGPNSLPLDNLKPLLEQLLAIDEIVKK

SEQ ID NO: 121642 - protein, 172 aa, Unknown
  Bacterial polypetide isolated from the Sargasso Sea
MTNEDSIDIIQIPAFLCRQTDLLIAAGKSDKIINVKKGQFLSPHDIKNIYKKIESTNNTKIMITERGTTFGYNNLVSDFKGIEIMKQYNYPVIFDATHSVQEPGGLGNRSGGKREFIPSLAKAAIAVGVAGLFIETHQDPDNAPSDGPNMLDIKNLETLIKKLMLIDQISKS

SEQ ID NO: 121643 - protein, 86 aa, Unknown
  Bacterial polypetide isolated from the Sargasso Sea
KNGYPVIFDATHSVQQPGGLGEQSGGQREFVEYLARAAVAVGVAGVFIETHQDPDNAPSDGPNMVPLNKLENLLKQLSEIDNLIKK

SEQ ID NO: 121644 - protein, 189 aa, Unknown
  Bacterial polypetide isolated from the Sargasso Sea
MSSIKIGKLEISNNGPLVFIAGPCAMESRSHALSMAHSLKKISTELDVGLIFKSSFDKANRTSIKSKRGVGLDDSLDIFATIKEETDLPILTDVHEPEQCDIVKDYVDVLQIPAFLARQTDLILAAANTQKPVNIKKSQFMSPWDIKYSAEKILSQSNANILLTERGYSFGYNNLVVDFRSIEIMKKLD

SEQ ID NO: 121645 - protein, 274 aa, Unknown
  Bacterial polypetide isolated from the Sargasso Sea
MENKIVNCNGIQISNKNKICLISGPCQLETEQHALDMAGKIKEITTKYNIGFIYKTSFDKANRTSLKGKRGAGLENSLPVFDKIKKDINVPVLTDIHNEEQCSLVSHHVDVLQIPAFLCRQTDLLIAAAKTNKIINVKKGQFLAPWDMVNVTKKISDSGNENILVTERGASFGYNTLVSDMRSIPIMAKNGYPVVFDGTHSVQQPGGLGEKSGGQREFVEYLSRAAVAVGVAAIFLETHQDPDNAPSDGPNMVPLDKLDELINQIVEIDNLVKK

SEQ ID NO: 121646 - protein, 163 aa, Unknown
  Bacterial polypetide isolated from the Sargasso Sea
IPAFLSRQTDLIVAAAKTGKAINIKKGQFLAPWDMRNVLQKAVESGNQNLLVCERGTSFGYNTLISDMRSLATMEKFGYPVVFDATHSVQQPGGKGTSSGGQREFVAVLARAAVAIGVAAVFIETHQEPDIAPSDGPNMVPLSEMKGLLKVLMSFDKLAKQNK

SEQ ID NO: 121647 - protein, 189 aa, Unknown
  Bacterial polypetide isolated from the Sargasso Sea
MINHKVKCNNFEIGNNKPFTLIAGPCQLESETHAIKISTELKKITNDLGINLIYKTSFDKANRTSLKGKRGLGLEKSLPIFDKLRKEVGVPVLTDVHTTEQCSIVAKHVDVLQIPAFLCRQTDLLIAAAKTEKIINVKKGQFLAPWDMANVIKKIEDSGNKNILITERGASFGYNTLISDMRAIPIMSK

SEQ ID NO: 121648 - protein, 152 aa, Unknown
  Bacterial polypetide isolated from the Sargasso Sea
DLLIAAAKTNKIINVKKGQFLAPWDMVNVTKKISESGNDKILVTERGASFGYNTLVSDMRSLPIMAKNGYPVIFDATHSVQQPGGQGESSGGQREFVEYLSRAAVAVGVAGVFIETHQDPDNAPSDGPNMVPLNKLENLLKQLYDIDNLIKK

SEQ ID NO: 121649 - protein, 185 aa, Unknown
  Bacterial polypetide isolated from the Sargasso Sea
MSAIKVNCENIEISNNNKICIIAGPCQLETEQHAMDMAGKIKEITSKFGLGFIYKTSFDKANRTSLKGKRGAGLDASLPVFDKIKKELNVPILTDIHNAEQCAIVSKHVDVLQIPAFLCRQTDLLIAAAKTNKIINVKKGQFLAPWDMVNVTKKISESGNDKILVTERGASFGYNTLVSDMRSLP

SEQ ID NO: 121650 - protein, 111 aa, Unknown
  Bacterial polypetide isolated from the Sargasso Sea
LTERGASFGYNTLVSDMRSIPIMAKNGYPIIFDATHSVQQPGGMGEKSGGQREFVEYLARAAVAVGVAGVFIETHPDPDNAPSDGPNMVPLSKMENLLKQLIEIDNLIKNA

SEQ ID NO: 121651 - protein, 216 aa, Unknown
  Bacterial polypetide isolated from the Sargasso Sea
DKANRTSLKGKRGAGLENSLPVFDKIKKEINVPVLTDIHNEEQCSLVSHHVDVLQIPAFLCRQTDLLIAAAKTNKIINVKKGQFLAPWDMVNVTKKISDSGNENILVTERGASFGYNTLVSDMRSIPIMAKNGYPVVFDGTHSVQQPGGLGEKSGGQREFVEYLSRAAVAVGVAAIFLETHQDPDNAPSDGPNMVPLDKLDELINQIVEIDNLVKK

SEQ ID NO: 121652 - protein, 260 aa, Unknown
  Bacterial polypetide isolated from the Sargasso Sea
MINKEVNCNGIKISNANKIVLISGPCQLETEQHAMDMAGKIKEIALKFKIGFIYKTSFDKANRTSLKGKRGAGLDSSLPVFDKIKKDLNIPVLTDVHNIEQCSIVSNHVDVLQIPAFLCRQTDLLVAAAKTNKIINVKKGQFLAPWDMVNVTKKISDSGNENILVTERGASFGYNTLVSDMRSIPIMSKNGYPVIFDGTHSVQQPGGLGEKSGGQREFVEYLSRAAAAVGIAGIFLETHQDPDNAPSDGPNMVPLNKLES

SEQ ID NO: 121653 - protein, 250 aa, Unknown
  Bacterial polypetide isolated from the Sargasso Sea
ENEKHALEVASELKNITQKLGIGLIYKTSFDKANRTSLKGKRGAGLEKSLPVFDKIRKELNIAVLTDVHNAEQCEIVSKHVDVLQIPAFLCRQTDLLIAAAKTGKIINVKKGQFLAPWDMVNVTRKLEESGNKNILITERGASFGYNTLVSDMRSLPIMAKSGYPVVFDATHSVQQPGGMGDKSGGQREFVEYLARAAIAVGVAAIFMETHPDPDKAPSDGPNMVPLAKMPSLLKQLVEIDKLIKNVKNN

SEQ ID NO: 121654 - protein, 229 aa, Unknown
  Bacterial polypetide isolated from the Sargasso Sea
MNKEVNCNGIKISNINKIVLISGPCQLETEQHAMDMAGKIKEIATKFNIGFIYKTSFDKANRTSLKGKRGAGLDNSLPVFDKIRKDLEVPVLTDVHNAEQCSIVSDHVDVLQIPAFLCRQTDLLIAAAKTKKIVNVKKGQFLAPWDMVNVTKKISDSGNENILVTERGASFGYNTLVSDMRSIPIMSKNGYPVIFDGTHSVQQPGGLGEKSGGQREFVEYLSRAATAVG

SEQ ID NO: 121655 - protein, 181 aa, Unknown
  Bacterial polypetide isolated from the Sargasso Sea
QAAPVAEVADIIQLPAFLSRQTDLVEAMAKTQAIINIKKAQFLAPHEMRHILHKCLEAGNDKLILCERGSAFGYNNLVVDMLGFDIMKEMNVPVFFDVTHALQTPGGRADSAGGRRSQITTLARAGMATGLAGLFLEAHPDPEKAKCDGPCALRLSQLEPFLAQLKELDTLVKGFKKLDTH

SEQ ID NO: 121656 - protein, 189 aa, Unknown
  Bacterial polypetide isolated from the Sargasso Sea
MAQKIIDLKDIKIGNELPMTLIAGPCQLETEGHAVMIASNLAKICDEEKINFVFKGSFDKANRTSVTGTRGIGLSRGLQILSAVKEKIGCAVLTDIHNPEQCKEVSDIVDILQIPAFLCRQTDIILAASKTNKVINIKKGQFLAPWDMEKVLEKALSTGNQKIMLCERGSSFGYNTLVTDFRSLPIRKI

SEQ ID NO: 121657 - protein, 106 aa, Unknown
  Bacterial polypetide isolated from the Sargasso Sea
MKEVKIGNVIFSDKHLGIIAGPCVIEDRDHSLRMANEIKKISDDIEIPIIFKSSFDKANRTSIKSFRGPGIDEGIKILSDVKVETGLPVITDIHNADQAKVVAEVV

SEQ ID NO: 121658 - protein, 237 aa, Unknown
  Bacterial polypetide isolated from the Sargasso Sea
KWAEQIQKVTNALSIPLIFKSSFDKANRSSIGSFRGPDKLDEGLSILADVKRELGIPVLTDVHLPDQCSSVAEVCDVLQIPAFLCRQTDLLLAAGTTGKTVNIKKGQFLAPGKMKHAAEKIESTGNKNIILTERGTSFGYSLVSDMTSIPVMSQTGYPVIFDATHSAQLPGDKNITGGQREMIPTLAKAAVAAGCNGVFMEVHDNPKNAKSDASTQWPIDKLKNILQTLLKVYEAVN

SEQ ID NO: 121659 - protein, 193 aa, Unknown
  Bacterial polypetide isolated from the Sargasso Sea
MRKVKIKKDFFFSNSEEIKFILGPCQIESRSHAFNICSEIDILSKKLDFKYVYKSSFDKANRTSHKSKRGVGLKKGLDILAEVGEKFGCAVTTDVHDAQQIEKVKEYVDIIQIPAFLCRQTDLLIEAGKSKLPINVKKGQFLSPWDMENVVNKIFSTGNKKILLTERGTSFGYNNLVSDMRSLVIMKKTKLPI

SEQ ID NO: 121660 - protein, 216 aa, Unknown
  Bacterial polypetide isolated from the Sargasso Sea
MQNAIDIFGIGNDKPLTVIAGPCVVESEKVVFECAEELKRISDDLGVNVIFKASLDKANRTSDTGFRGVGFEKALSILAKVKSRYGLPVITDVHHCEMIQDVAEVVDFLQIPAFLCRQTDLIRAACQTGLPVNIKKGQFLAPGDMRFVLEKALNTGNKNILLCERGTTFGYHNLVVDFRGLSQMRSFGYPVVFDATHSVQLPGGGDGKSSGQREYA

SEQ ID NO: 121661 - protein, 194 aa, Unknown
  Bacterial polypetide isolated from the Sargasso Sea
FDKIKKDLNVPVLTDVHNIEQCTIVSNHVDVLQIPAFLCRQTDLLVAAAKTKKIINVKKGQFLAPWDMVNVTKKISDSGNENILVTERGASFGYNTLVSDMRSIPIMSKNGYPVIFDGTHSVQQPGGLGEKSGGQREFVEYLSRAAAAVGIAGIFLETHQDPDNAPSDGPNMVPLNKLESLISQIVEIDTLVKK

SEQ ID NO: 121662 - protein, 163 aa, Unknown
  Bacterial polypetide isolated from the Sargasso Sea
MLNKTLKIANICMSNDLPIVLIAGPCQIESLNHSREIAENLSNLGQKLNFDLIFKGSFDKANRTSIKSERGVGIEEGLTILDKIKSEFNCPVLTDVHEPEQCNQASEVVDVIQIPAFLCRQTNLLIAASKTGKALNVKKGQFLAPNDMKYIVEKDITVLEMTI

SEQ ID NO: 121663 - protein, 143 aa, Unknown
  Bacterial polypetide isolated from the Sargasso Sea
GKIINVKKGQFLAPWDMANVIKKIEDSGNKKILITERGATFGYNTLVSDMRSLPIMSKFGFPIVFDATHSVQQPGGMGEKSGGQREFVPHLARAAIAVGVGAIFIETHEDPDNAPSDGPNMVPLKEMKNLLKKLTEIDNLIKQ

SEQ ID NO: 121664 - protein, 203 aa, Unknown
  Bacterial polypetide isolated from the Sargasso Sea
MTQNIVKIFNFKVSNNDPFFLIAGPCSIESKDHAINHAGMIKEICNKLNINFVYKSSFDKANRSSKKSSRGVGIEKGLSILFDVKKTFKVPILTDVHETHQCKDVGEIVDIIQIPAFLCRQTDLLIAAAKTKKVVNVKKGQFLAPWDMKNVLDKILENGNNQILLTERGTSFGYNTLVSDMRAIPQMSSFGYPIVFDATHSVQ

SEQ ID NO: 121665 - protein, 143 aa, Unknown
  Bacterial polypetide isolated from the Sargasso Sea
KIINVKKGQFLAPWDMVNVTKKISDSGNNNILVTERGASFGYNTLVSDMRSLPIMAKNGYPVIFDATHSVQQPGGQGESSGGQREFVEYLARAAVAVGVAGVFIETHQDPDNAPSDGPNMVPLNKLENLLKQLSDIDSLIKKL

SEQ ID NO: 121666 - protein, 210 aa, Unknown
  Bacterial polypetide isolated from the Sargasso Sea
MKGKRGVGLEKSLPIFDKIKKEINVPILTDIHNSEQCSLVAQHVDILQIPAFLCRQTDLLISAANTKKIINVKKGQFLAPWDMKNVTKKISESGNNNILVTERGASFGYNTLVSDMRSLPIMAKDGYPVIFDATHSVQQPGGQGESSGGQREFVEYLARAATAVGVAGIFMETHQDPDNAPSDGPNMIPISKLENLLKQLVEIDKTIKNN

SEQ ID NO: 121667 - protein, 155 aa, Unknown
  Bacterial polypetide isolated from the Sargasso Sea
MLLLSKEINNQDSRIFVIAGPCVIESEGLIFEMADFLKRLSEKLGVFLIFKSSFDKANRSSIDSFRGPGLHEGLEILAKVKSQFELPVLTDVHEDTPVDEVASVVDVLQTPAFLCRQTNFITKVCSQGIPVNIKKGQFLAPSEMKNVVKKASVCG

SEQ ID NO: 121668 - protein, 273 aa, Unknown
  Bacterial polypetide isolated from the Sargasso Sea
MKNHKVKCNNFEIGNDKPFTLIAGPCQLESETHAMKISTELKKITSGLGINLIYKTSFDKANRTSLKGKRGLGLDKSLPIFDKLRKEVGVPVLTDIHTTEQCSVVANHVDVLQIPAFLCRQTDLLIAAAKTGKIINVKKGQFLAPWDMANVIKKIEDSGNKNILITERGASFGYNTLVSDMRALPIMSKFGFPIIFDATHSVQQPGGMGEKSGGQREFVPHLARAAIAVGVGAIFIETHDDPDNAPSDGPNMVPLNELKGLLKKLTEIDKLVK

SEQ ID NO: 121669 - protein, 215 aa, Unknown
  Bacterial polypetide isolated from the Sargasso Sea
MSKKVTLGKINIKNDNEKLLLISGPCLLESEKLVRQVATKLIKHSTKNNFNFVFKCSFDKANRSSDKTIRSKVSIERSIDILKNLKKDLKIPITSDVHETNQIDKLESLLDIIQIPAFLCRQTDLIRVAAQTKKIVNVKKGQFLSHQEIENIILKIENQNNKKILITERGNSFGYNYLINDFKGVHFMKHFGYPIIFDSTHSVQLPGGMGIKSGG

SEQ ID NO: 121670 - protein, 250 aa, Unknown
  Bacterial polypetide isolated from the Sargasso Sea
MQNLLMENKTVNCNGIEISNKNKICLISGPCQLETEQHALDMAGKIKEIVTKYNIGFIYKTSFDKANRTSLKGKRGAGLENSLPVFDKIKKDINVPVLTDIHNEEQCSLVSPHVDILQIPAFLCRQTDLLIAAAKTNKIINVKKGQFLAPWDMLNVTKKISDSGNENILVTERGASFGYNTLVSDMRSIPIMAKNGYPVVFDGTHSVQQPGGLGEKSGGQREFVEYLSRAAVAVGVAAIFLEHIRTLIML

SEQ ID NO: 121671 - protein, 253 aa, Unknown
  Bacterial polypetide isolated from the Sargasso Sea
LNVLEDEDMALDVAEKLKEITTKHNIPFVFKASFDKANRSSIDSYRGPGIEVGKKIFESIKKNINVPIITDIHEEGQIEEISQVVDILQIPAFLCRQTDLISAACKTQLPLNIKKGQFLSPYQMKNIIEKCNSFGNDNIILCERGSSFGYDNLIVDFLGISEQKAFNYPIILDVTHSLQLPGGQGNSAGGRSYQAEDLARAAIALKISGLFIEVHPNPDKALCDGPSATKLEDFEDMITKIKKIDDLVKSEKF

SEQ ID NO: 121672 - protein, 127 aa, Unknown
  Bacterial polypetide isolated from the Sargasso Sea
VCGNEQLLLCERGTNFGYDNLVVDMLGFGVMKRTCDGLPLIFDVTHALQCRDPGGAASGGRRSQVVDLAKAGMAVGLAGLFLEAHPDPNQARCDGPSALPLDQLEPFLSQVKAIDDLVKSQPALEIR

SEQ ID NO: 121673 - protein, 172 aa, Unknown
  Bacterial polypetide isolated from the Sargasso Sea
SIVSPHVDVLQIPAFLCRQTDLLIAAAKTNKIINIKKGQFLAPWDMVNVTKKISDSGNENILVTERGASFGYNTLVSDMRSIPIMAKNGYPVVFDGTHSVQQPGGLGEKSGGQREFVEYLSRAAVAVGVAAIFLETHQDPDNAPSDGPNMVPLDKLDELINQIVEIDNLVKK

SEQ ID NO: 121674 - protein, 265 aa, Unknown
  Bacterial polypetide isolated from the Sargasso Sea
ISNSNKICLIAGPCQLETEQHALDMAGEIKNITDKYNIGFIYKTSFDKANRTSLKGKRGAGLEKSLPVFDKIKNQIKVPVLTDIHNEEQCSIVAPHVDILQIPAFLCRQTDLLVAAAKTKKIINVKKGQFLAPWDMVNVTKKISDSGNNNILVTERGASFGYNTLVTDMRSIPIMAKNGYPIVFDATHSVQQPGGQGDKSGGQREFVQYLSRAAVAVGIAAIFIETHEDPDNAPSDGPNMVPLNQLDNLINQIVAIDNLIKKNNV

SEQ ID NO: 121675 - protein, 218 aa, Unknown
  Bacterial polypetide isolated from the Sargasso Sea
DKANRTSLSSHRGVGIDEGLEILLKVKQEFNLTTITDIHNENQCKMASKVVDILQIPAFLCRQTDLLIAAAKTHRVVNIKKGQFLAPWDIHQVVNKIKNSGNNKVLVTERGVSFGYNTLVSDMRALPELKKTNCPVIFDATHSVQQPGGKGISSGGQREFVSVLSRAAIAVGVAGLFIETHKDPENAPSDGPNMVPLKELENLLKILKDLDKISKQHI

SEQ ID NO: 121676 - protein, 218 aa, Unknown
  Bacterial polypetide isolated from the Sargasso Sea
DSSFRGPGLKDGLGILHLVKDTHGIPVITDVHCPEEAGAAAKVADIIQLPAFLARQTDLVRAMAETGAVINIKKPQFLSPEQMRNIVDKFRECGNEQLLICERGTNFGYDNLVVDMLGFGVMKRTCDELPLIFDVTHALQCRDPGGASSSGRRSQVVDLAKSGMAVGLAGLFLEAHPEPNQARCDGPSALPLDQLEPFLSQVKAIDDLVKSQPVLEIA

SEQ ID NO: 121677 - protein, 269 aa, Unknown
  Bacterial polypetide isolated from the Sargasso Sea
MITQKTIFVNDISLCNDNSFVLIGGLNVLETKDLNLKVAETFKEITSRLKIPYIFKASFDKANRSSTDSYRGPGMEEGLRILEDIKQEFEIPILTDIHEPQQAKPAAEIADVLQLPAFLSRQTDLVSALANTKAVINIKKAQFLSPEEMGNIINKFEVFGNKKLFLCERGTSFGYNNLVVDMLGFKLMKKFGYPLVFDVTHSLQIPGGLGKSAAGRRGSIREMGLAGLSQKIAGLFLEAHPEPDKALCDGPSALKTNQLEPIPGTDEGN

SEQ ID NO: 121678 - protein, 126 aa, Unknown
  Bacterial polypetide isolated from the Sargasso Sea
VNVTKKISDSGNENILVTERGASFGYNTLVSDMRSIPIMAQNGYPIVFDATHSVQQPGGQGEKSGGQREFVEYLSRAAVAVGVAAIFLETHQDPDNAPSDGPNMVPLNKLDELINQIVEIDNLIKK

SEQ ID NO: 121679 - protein, 184 aa, Unknown
  Bacterial polypetide isolated from the Sargasso Sea
PILTDIHNIEQCSIFANHVDVLQIPAFLCRQTDLLVAAAKTKKIINVKKGQFLAPWDMVNVTKKISDSGNKNILVTERGASFGYNSLVSDMRSLPIMAKNGYPVIFDATHSVQQPGGLGEKSGGQREFVEYLARAAVAVGVAGVFIETHQDPDNAPSDGPNMVPLDKLENLLKQLTDIDNLIKN

SEQ ID NO: 121680 - protein, 242 aa, Unknown
  Bacterial polypetide isolated from the Sargasso Sea
MSNIKVNCNKIEISNDNKICIIAGPCQLETEQHAMDMAGKIQDITKKFGVGFIYKTSFDKANRTSLKGKRGAGLDTSLPIFDKIKKELNVPILTDIHNIEQCSIVAEHVDVLQIPAFLCRQTDLLVAAAKTNKIINVKKGQFLAPWDMVNVTKKISDSGNKNILVTERGASFGYNTLVSDMRALPIMAKNGYPVIFDATHSVQQPGGLGEKSGGQREFVEHLARAAVAVGVAGVFIETHQDP

SEQ ID NO: 121681 - protein, 250 aa, Unknown
  Bacterial polypetide isolated from the Sargasso Sea
MAGPNVIESREHALRMAHAINTIASSLSLTYVFKASFDKANRTSRVSYRGPGLEAGLRILEDVKKLVGVPIITDIHEPSQAATVAEVADILQIPAFLCRQTDLIVAAAETQAVLHVKKGQWCDTSVMDAAADKARAAGNRQFIACERGTQFGYGDLVVDPRNLHWLRSETGLVTADVTHSLQQPGGRIGDAGERSAGGLRPLIPTVARAACAVGVDGLFMEVHDDPANSLCDAPTQWPLRHLRPLLEECA

SEQ ID NO: 121682 - protein, 255 aa, Unknown
  Bacterial polypetide isolated from the Sargasso Sea
MLNFKFNNDSPLKIIAGPCQIESEEHAMMMADIINGICNDVGMRWVYKSSFDKANRSSIKGKRGVGLKRGLQILEKIGKSFDVPLLTDVHEPDQCGVVGEVVDIIQIPAFLCRQTDLITAAAQTNKIINVKKGQFISYTDVDNIKIKVNEAWNDQFMITERGTMFGYNNLVVDIKGFPYMKKLCPVIFDGTHSVQQPGGHGTSSGGDRSMVAPLCLSAVAQGIAGVFLEVHDDPDNAPSDGPNMLTPDQFRKLIT

SEQ ID NO: 121683 - protein, 155 aa, Unknown
  Bacterial polypetide isolated from the Sargasso Sea
MKNHKVKCSNFEIANDKLFTLIAGPCQLENEAHAMNISTELKKITSDLGINLIYKTSFDKANRTSLKGKRGMGLEKSLPIFDKIRKEVGVPVLTDVHTAEQCSIVSDHVDVLQIPAFLCRQTDLLIAAAKTGKIINVKKGQFLAPWDMANVIKKI

SEQ ID NO: 121684 - protein, 131 aa, Unknown
  Bacterial polypetide isolated from the Sargasso Sea
PWDMVNVTKKISDSGNDNILVTERGASFGYNTLVSDMRSIPIMIKNGYPVVFDATHSVQQPGGLGEKSGGQREFVEYLARAASAVGVAAIFIETHQDPDNAPSDGPNMVPLNKLKDLLTQIIEIDKLVKNF

SEQ ID NO: 121685 - protein, 245 aa, Unknown
  Bacterial polypetide isolated from the Sargasso Sea
VAEKFKLISDKLEINYIFKGSFDKANRSSVSSFRGPGMDEGLKLLQEVSTEFNVPVVTDIHEPDQAKPVSEVCEVVQIPAFLARQTDLVVAAAKTNAILQFKKPQFLSAPEMKNITEKCESAGNSKITLCERGNSFGYNNLVVDTLNFQILKNLGKPAIFDVTHSLQLPGGLGNAAGGRREYLLSLAKAGISQGIAGLFLEAHPDPDKAKCDGPCALRLDMLEPFLQQIKDLDVFVKNQENLDIF

SEQ ID NO: 121686 - protein, 175 aa, Unknown
  Bacterial polypetide isolated from the Sargasso Sea
MKLRNFKIDNTEPMVLMGGMNVLESRDLAMQIAETFREITQKKNINYIFKGSFDKANRSSINSYRGPGIEDGLKILEEISNTFDIPVITDIHEPDQAKPVSEICEVVQIPAFLARQTDLIKAAAKTKSIIQFKKPQFLSASEMGNVVEKCSLAGNENITLCERGNSYGYNNLVVD

SEQ ID NO: 121687 - protein, 205 aa, Unknown
  Bacterial polypetide isolated from the Sargasso Sea
MSIDIGKSKNLTLISGPCAIESENSTLSIAEYICGITENLPISYIFKASFDKANRSSIDSNRGVGIEEGLRILEKVKNTFDIPVLTDVHEDTPVDEVADVVDVLQTPAFLCRQTNFITKVSSTMKPVNIKKGQFLSPKEMINVVKKAKSTGNKDIYVCERGVSFGYNNLVSDMRSLEILRETGCPVIYDASHSVQKPGALPHQSG

SEQ ID NO: 121688 - protein, 168 aa, Unknown
  Bacterial polypetide isolated from the Sargasso Sea
VLDIIQIPAFLSRQTDLIEAACATSLPINIKKGQFLAPSDMNNILKKCSHFQNENIMICERGTSFGYNNLVVDMLGMVELKNNSPVIFDVTHSLQKPGGLGDKADGRGSSVLDLARAGMSLGLAGLFLEVHPDPTKALCDGPCALPLQKLDQFLNKVKNLDDLIKEFK

SEQ ID NO: 121689 - protein, 110 aa, Unknown
  Bacterial polypetide isolated from the Sargasso Sea
MKLSKQVNIGDFVIGGDSLPVLIAGPCVIENKEVTLKCAEVLKKISEQLSINTIFKSSFDKANRSSSTSFRGPGLEDGLAILSDVKQKTGLPILSDVHSVFDIENSKEIL

SEQ ID NO: 121690 - protein, 256 aa, Unknown
  Bacterial polypetide isolated from the Sargasso Sea
MENKIVNCNGIKISNKNKICLIAGPCQLETEQHALDMAGKIKEITTKYNIGFIYKTSFDKANRTSLKGKRGAGLENSLPVFDKIKKDINVPVLTDIHNVEQCSLVSNHVDILQIPAFLCRQTDLLIAAAKTDKIINVKKGQFLAPWDMVNVTKKISDSGNENILVTERGASFGYNTLVSDMRSIPIMAKNGYPVVFDGTHSVQQPGGLGEKSGGQREFIGYLSRAAVAVGVAAIFLETHQDPDNAPSDGPNMVPLD

SEQ ID NO: 121691 - protein, 136 aa, Unknown
  Bacterial polypetide isolated from the Sargasso Sea
FLIAGPCSIESKDHAINHAGVINEICKKLKINFVYKSSFDKANRSSKYSERGIGIEKGLNILSDVNKEFNIPTLTDVHESYQCKEVAKVVDIIQIPAFLCRQTDLLTAAAETQKIINIKKGQFLAPWDMKNVINKV

SEQ ID NO: 121692 - protein, 249 aa, Unknown
  Bacterial polypetide isolated from the Sargasso Sea
CQLETEQHAMDMSGKIKEITKNLGINFIYKTSFDKANRTSLKGKRGIGLEQSLPIFDKIKKINKVPILTDVHNSDQCSVVADHVDILQIPAFLCRQTDLLIAAAKTKKIINVKKGQFLAPWDMVNVTKKISDSGNNNILVTERGASFGYNALVSDMRSLPIMAKNGYPVIFDATHSVQQPGGLGESSGGQREFIEYLSRAAVAVGVAGVFMETHQDPDNAPSDGPNMIPLSNLENLLKQLIEIDNVIKK

SEQ ID NO: 121693 - protein, 235 aa, Unknown
  Bacterial polypetide isolated from the Sargasso Sea
MGVAVSTRQLWRKLSNGKSLFLIAGPCVIESEALCLRVARSLRKTCERLGVTYIFKASYDKANRTSGKSRRGPGLEKGLQILKTVREKVNVPVLTDIHDEAQARAAAEVVDVIQIPAFLCRQTDLIEVAARTSVIVNLKKGQFLSPQEMGQVVKKAEAAGGKMLFVTDRGTTFGYNNLVSDMRSMPIMREFGWPVVFDATHSVQMPGGDGDKSSGNGEYAPVLARAAVAAGANGV

SEQ ID NO: 121694 - protein, 112 aa, Unknown
  Bacterial polypetide isolated from the Sargasso Sea
NILITERGASFGYNTLVSDLRALPIMAKYGFPIVFDATHSVQQPGGMGEKSGGQREFVPYLARAAIAVGVSAVFMETHEDPDNAPSDGPNMVPLSEIKSLLKKLTEIDRIVK

SEQ ID NO: 121695 - protein, 253 aa, Unknown
  Bacterial polypetide isolated from the Sargasso Sea
MKLRNFDIDNSEPMILMGGMNVLESRDLAMNVAEKFKEVTDKNDIGYIFKGSFDKANRSSIGSFRGPGIDEGLKILQEISNTFDIPVITDIHEPEQAIPVSEICEVIQIPAFLARQTDLVRAAAQTKSIIQFKKPQFLSAQEMANVVEKCESAGNKNITLCERGNSFGYNNLVVDTLNFQILKKFLKPVIFDVTHSLQLPGGLGTSTDGRREFVLSLAKAGMSQSIAGLFLEAHPNPDEAKCDGPCALPLIMS

SEQ ID NO: 121696 - protein, 89 aa, Unknown
  Bacterial polypetide isolated from the Sargasso Sea
MININLKKFSISNNFPFVLIAGPCVIENESHSLMIAEELNKICNDVGINLIFKSSFDKANRSSINSDRGIKLDDALKIFEKIKTNFNLP

SEQ ID NO: 121697 - protein, 168 aa, Unknown
  Bacterial polypetide isolated from the Sargasso Sea
MKNHKVKCSNFDIANNEPFTLIAGPCQLESEAHAIKISTELKKITGELGINLIYKTSFDKANRTSLKGKRGLGLDKSLPIFDKIRNEVGLPVLTDVHTSEQCTIVAEHVDVLQIPAFLCRQTDLLIAAAKTGKIINVKKGQFLAPWDMANVIKKIEDSGNKNILITER

SEQ ID NO: 121698 - protein, 249 aa, Unknown
  Bacterial polypetide isolated from the Sargasso Sea
MDINIGNDKPFFLIAGPCQIESQEHAYKMASELTEITNKLDIPFIYKSSFDKANRTSYFGKRGAGLERGMEIFDYLKEKIPGLYIITDVHEKEQCSIVAPHVDALQIPAFLCRQTDLLIEAGRQGVWLNVKKGQFLAPWDMQNVADKISYATNNEMIMLCERGTSFGYNTLINDMRGLHEMKKTGYPVVIDATHSCQQPGGQGTSSGGNREHIPVIAQAAVAVGVAGVFMEVHDDPDNAASDGPNNLHL

SEQ ID NO: 121699 - protein, 80 aa, Unknown
  Bacterial polypetide isolated from the Sargasso Sea
SARRDPGEAASGGRRDQVLKLAKAGAAVGIAGLFLEAHPNPDEALCDGPSALPLAQLQPFLEQVKAVDALVKSQPELTIQ

SEQ ID NO: 121700 - protein, 258 aa, Unknown
  Bacterial polypetide isolated from the Sargasso Sea
LIAGPCVIENEKTTLLIAEEINKICNDLNINYIFKSSFDKANRSSIKSLRGVSLSDGLKILSKIKKEYNCPIITDVHTEQQCEILNDNNVIDVLQIPAFLCRQTDLLISAGKTNKIVNVKKGQFLAPSDVQNIFEKIKSVNNNKIMITERGTSFGYNNLVNDFRGLDIMKKFQYPVIFDGTHSVQQPGGLGDKSGGKREFIPSLCKAAVAIGVAGIFLETHPDPDNAPSDGPNMIHLQDLKKLLLQLKEYDLITKKNA

SEQ ID NO: 121701 - protein, 187 aa, Unknown
  Bacterial polypetide isolated from the Sargasso Sea
DSLYFQSSFDKANRTSIHSFRGPGMEEGLSILESVRDQLGIPVITDVHEDTPLDEVASVVDVLQTPAFLCRQTNFIINVASQQKPVNIKKGQFLSPWDMENVVKKAKSTGNDDILVCERGYTFGYNNLVSDMRSLVILKETSCPVIYDATHSLQLPGGKGQSSDGQSEFIIPVSRGAVGVGIAGICH

SEQ ID NO: 121702 - protein, 196 aa, Unknown
  Bacterial polypetide isolated from the Sargasso Sea
MLNRIVKCNNFEISNNKKISLISGPCQLETEQHAMDMAGKVKEIAAKFDIGFIYKTSFDKANRTSLKGKRGAGIDVSLPVFDRIRKDLNVPVLTDVHNVEQCSIVSKHVDVLQIPAFLCRQTDLLVAAAKTKKIINVKKGQFLAPWDMVNVTKKISESGNENILVTERGASFGYNTLVSDMRSIPIMAKNGYPIVS

SEQ ID NO: 121703 - protein, 85 aa, Unknown
  Bacterial polypetide isolated from the Sargasso Sea
NGYPVIFDATHSVQQPGGQGESSGGQREFVEHLSRAAVAVGVAGIFMETHQDPDNAPSDGPNMIPLSSLENLLKQLIEIDKIIKK

SEQ ID NO: 121704 - protein, 188 aa, Unknown
  Bacterial polypetide isolated from the Sargasso Sea
MSLSPKTIRPIAVGPYLIGNQNPLTLIGGPCVIESEQKAMGIAEQLKRITTDSGVPFIFKASYDKANRTSIKSYRGPGLGNGLKILQKIKTQLDLPILSDVHKEEEIEPAAEVLDILQIPAFLCRQTDLIVKAAQTGKPINVKKGQFLAPWDMKNVVFKLEESGNNNILLTERGATFGYNNLVVDMRS

SEQ ID NO: 121705 - protein, 266 aa, Unknown
  Bacterial polypetide isolated from the Sargasso Sea
MNNFKVNCQNIEISNDNKICIIAGPCQLETEQHAMDMAGKIKEITKKFGLDFIYKTSFDKANRTSLKGKRGAGLDTSLPVFDKIKKELNIPILTDIHNIDQCSIVADHVDVLQIPAFLCRQTDLLIAAAKTNKIINVKKGQFLAPWDMVNVTKKISDSGNKNILVTERGASFGYNTLVSDMRSLPIMAKNGYPVIFDATHSVQQPGGQGQSSGGQREFVEYLARAAVAVGVAGVFIETHQDPDNAPSDGPNMIPLDKLEHLLKQLT

SEQ ID NO: 121706 - protein, 205 aa, Unknown
  Bacterial polypetide isolated from the Sargasso Sea
KEGLRMLEKVKSQFHVPVITDIHEPSQAEQVAEVADVIQIPAFLCRQTDLVVAAAKTKKIIQFKKPQFLSATEMKNVIEKCSQAGNSKIILCERGNSFGYNNLIVDMINFQIMKELDVPVIFDATHSLQLPGGLGHAADGRREYLLPLARAGLSQCIAGLFIEAHPDPDNAKCDGPCAISSDEIPKVVSQLADLDDFIKNQVRAN

SEQ ID NO: 121707 - protein, 100 aa, Unknown
  Bacterial polypetide isolated from the Sargasso Sea
MKNIKLANFEISNKNNFILIAGPCVIENESHSLMMTEQIAKICQKLKIHFIFKSSFDKANRSSINSNRGVDINQAEKIFNKIKSIYNCPILTDVHNESQC

SEQ ID NO: 121708 - protein, 229 aa, Unknown
  Bacterial polypetide isolated from the Sargasso Sea
MKLRDFKIDNNEKMTLMGGMNVLESRDLAMEVAEKFKNVTDKNDINYIFKGSFDKANRSSINSFRGPGLDEGLKILEEISKTYDIPVITDIHEPNQAKSVSEICEVIQIPAFLARQTDLVSAAAKTSSIIQFKKPQFLSAQEMSNVVEKCEAAGNKNITLCERGNSYGYNNLVVDTLNFQILKKLSKPVIFDVTHSLQLPGGLGSSTGGRREYVLSLAKAWYVAINSWT

SEQ ID NO: 121709 - protein, 102 aa, Unknown
  Bacterial polypetide isolated from the Sargasso Sea
WIHTLVSDMRSLPIMAKNGYPVIFDATHSVQQPGGQGESSGGQREFVEYLARAAVAVGVAGVFIETHQDPDNAPSDGPNMVPLNKLENLLKQLHDIDNLIKK

SEQ ID NO: 121710 - protein, 236 aa, Unknown
  Bacterial polypetide isolated from the Sargasso Sea
KEITQKLNIGLIYKTSFDKANRTSLKGKRGAGLDKSLPIFDKIRKDLEIPVLTDVHNIEQCEIVSKHVDILQIPAFLCRQTDLLVAASKTGKIINVKKGQFLAPWDMVNVTKKIEDSGNKNILVTERGASFGYNTLVSDMRSIPIMAKNGYPVVFDATHSVQQPGGMGDKSGGQREFVEHLARAAIAVGVAAIFMETHPDPDNAPSDGPNMVPLSKMPDLLKQLVEIDKLVKNGKN

SEQ ID NO: 121711 - protein, 234 aa, Unknown
  Bacterial polypetide isolated from the Sargasso Sea
KVNCENIEISNNFKICIIAGPCQLETEQHALDMAGKIKEITSKFGLGFIYKTSFDKANRTSLKGKRGAGLDASLPVFDKIKKELNVPILTDIHNAEQCEVVSKHVDVLQIPAFLCRQTDLLIAAAKTNKIINVKKGQFLAPWDMVNVTKKISESGNDKILVTERGASFGYNTLVSDMRSLPIMAKNGYPVIFDATHSVQQPGGQGQSSGGQREFVEYLARAAVAVGVAGVFIET

SEQ ID NO: 121712 - protein, 274 aa, Unknown
  Bacterial polypetide isolated from the Sargasso Sea
MCGFNVGLDQRFFLIAGTCSIEGLEMSLDVAGQLKEACAPLGIPLIYKGSFDKANRSSGTSKRGVGLEAGLKILDEVRRQLQLPILTDVHDTSHVAEVASVVDVLQTPAFLCRQTDFIRAVAQSGKPVNIKKGQFLAPWDMKNVIDKARSAAAEVGLSEDRFLACERGVSFGYNNLVADMTSLAEMRNSGAPVVFDVTHSVQKPGGLGAVSGGARDMVPVLARAGVAVGVAGLFMETHPRPAEAWSDGPNAVPLKHMKALLETLVALDDVHQEK

SEQ ID NO: 121713 - protein, 213 aa, Unknown
  Bacterial polypetide isolated from the Sargasso Sea
MKDISIKDFQIGNDQDFTLMGGMNVLESEETALLVAEKFKEVTDKLEINWIFKASFDKANRSSIESFRGPGMNEGLKILEKVSSSFDVPVITDIHEPSQADPVSEVCEVIQIPAFLCRQTNLVSAAAKTKSAIQFKKPQFLSAAEMRNVVEKCKSAGNEKIILCERGNIFGYNNLVVDTLNFQIMKEYSVPVMFDVTHSLQLPGGLENLLMVE

SEQ ID NO: 121714 - protein, 175 aa, Unknown
  Bacterial polypetide isolated from the Sargasso Sea
MKNSKINCNDIVFSNDVDFCLISGPCQIESENHALDIAGKLKEITIKNNVKFVFKSSFDKANRTSINSKRGLGLEKSLKIFEKIKKELNLNILTDVHTSEQCSLVAKYVDIIQIPAFLCRQTDLLVSAAKTNKVINIKKGQFLAPWDIVNVINKVTESGNKNILLTERGTSFGYN

SEQ ID NO: 121715 - protein, 190 aa, Unknown
  Bacterial polypetide isolated from the Sargasso Sea
KELNVPILTDVHNEKHCEVVSRHVDILQIPAFLCRQTDLLIAAAKTNKIINVKKGQFLAPWDMVNVTKKISDSGNDNILVTERGASFGYNTLVSDMRSIPIMVKNGYPVVFDATHSVQQPGGLGEKSGGQREFVEYLARAASAVGVAAIFMETHQDPDNAPSDGPNMVPLNKLESLLNQIIEIDKLVKNF

SEQ ID NO: 121716 - protein, 215 aa, Unknown
  Bacterial polypetide isolated from the Sargasso Sea
MHLCGYEVTDSSQFFLIAGPCVLESEALAMESSSYLKAVCDDLRIPLIFKSSFDKANRSSHESFRGLGIEKGLRILEKVKVEVGVHTLTDVHEDTPLDEVKDVVSVLQTPAFLCRQTNYIQRVAGTGLPVNIKKGQFLAPSDMKNVVEKARAVGNPNILVCERGVSFGYNNLVSDMRALPILRETGCPVVFDATHSVQFPGGRGSSSGGDREMVP

SEQ ID NO: 121717 - protein, 279 aa, Unknown
  Bacterial polypetide isolated from the Sargasso Sea
IIFMKLRNFEIENNKPLTLMGGMNVLESRDLAMQVAENFKKVTDKLNINYIFKASFDKANRSSISSFRGPGLEEGLNILKEVSDGFDVPVITDIHEPDQALPVSEICEVIQIPAFLARQTDLVNAAAKTKSIIQFKKPQFLSAPEMKNVVEKCAAAGNSNIILCERGNSFGYNNLVVDTLNFQILKKLMTPVVFDVTHSLQLPGGLGGSTDGRREYVLSLAKAGISQSIAGLFLEAHPNPDEAKCDGPCALPLSMLEEFLTQIKELDNFIKQQEYLNIS

SEQ ID NO: 121718 - protein, 183 aa, Unknown
  Bacterial polypetide isolated from the Sargasso Sea
MKEKEIEFANIRLSNSKPFVLFGGLNVLETKSLGLQVAETFKNVCEALDIQLVFKASFDKANRSSVTSYRGPGLDEGLRWLDDIKQQCDVPIITDVHEVVQVKPVAEVADVIQLPAFLSRQTDLICAMAATDKVINIKKAQFLAPEEMAYIIEKFESLDNKKLILCERGSIFGYKNLIVDMLG

SEQ ID NO: 121719 - protein, 201 aa, Unknown
  Bacterial polypetide isolated from the Sargasso Sea
LQEVSNSFDVPVITDIHEVDQAKPVSEVCEVIQIPAFLARQTDLVSAAAKTNSIIQFKKPQFLSAPEMVNVVEKCNAAGNKNIILCERGNTFGYNNLVVDTLNFQILKKIGTPVIFDVTHSLQLPGGLGSATGGRREFVLSLAKAGISQSIAGLFLEAHPYPDDAKCDGPCALPLNVLDDFLEQIKNLDDFVKNQDDLDIE

SEQ ID NO: 121720 - protein, 162 aa, Unknown
  Bacterial polypetide isolated from the Sargasso Sea
DLVVAMAKTGAIINVKKPQFLAPHEMRHIITKFNEAGNNNIALCERGSSFGYNNLVVDMLGMDDMKAMAPVIFDATHALQRPGGRADSADGRRAQAAELARSGMALGIAGLFIEAHPNPNEAKCDGPCALALSKLEGYLSQMKAVDDLVKSFAPLDTSASDL

SEQ ID NO: 121721 - protein, 187 aa, Unknown
  Bacterial polypetide isolated from the Sargasso Sea
MNTITIGNVKYESGSFPLIAGPCVIESRDHILMMAEQIQKITSTMNIPLIFKSSFDKANRSAIDSFRGPDNLDTGLSILNDVKTELGIPVLTDVHLPDQCKAVAEVSDVLQIPAFLCRQTDLLIAAGKTGKAINIKKGQFLAPGKMKYVAEKVESTGNKNILLTERGSSFGYSLVSDMTSIPVMQNV

SEQ ID NO: 121722 - protein, 270 aa, Unknown
  Bacterial polypetide isolated from the Sargasso Sea
MKIKNIKVGLGDPFFLIAGPCVIESRGIVLEIANQLKMITDYANVPFIFKASFDKANRTSGESFRGLGMEQGLKILEEVKNTFGCPVLTDVHNIDHIGEVASVVDVLQTPAFLCRQTDFIQKVASAGKPVNIKKGQFLAPSEMKFVVEKALNSSREKNIMVCERGSSFGYNNLVSDMRSLVIMRETQCPVVFDATHSVQLPGGSGKSSGGQREFVPPLARAAVSVGVSGIFMETHPNPSEALSDGPNSWPLDQMGELLKKLKALDVIVKG

SEQ ID NO: 121723 - protein, 158 aa, Unknown
  Bacterial polypetide isolated from the Sargasso Sea
FLCRQTDLLIAAAKTNKIINVKKGQFLAPWDMVNVTKKISDSGNENILVTERGASFGYNTLVSDMRSIPIMSKNGYPVVFDGTHSVQQPGGLGEKSGGQREFVEYLSRAAAAVGVAAIFLETHQDPDNAPSDGPNMVPLNKLDVLINQIVEIDNLVKK

SEQ ID NO: 121724 - protein, 233 aa, Unknown
  Bacterial polypetide isolated from the Sargasso Sea
KVCFKNNVKLIFKASYDKANRSSIGSARGIGIEEGLRILQDVSKAFDCPIITDVHEPSHCEIVSEVVDILQIPAFLCRQTDLLIAAGKTGRPVNVKKGQFLAPQDMWNVAEKIVSTGNKNIMLCERGTSFGYNTLINDFRGIEIMAETGYPVIFDATHSVQKPSNLGNASGGERKFVYGLARAACAVGVSGLFIETHQDPDNAPSDGQNMIPIDQMDILVPSLKAFDALRKNL

SEQ ID NO: 121725 - protein, 273 aa, Unknown
  Bacterial polypetide isolated from the Sargasso Sea
MKINNINIGNELPFVLIAGPCAIENLDSALFHAEKIKNICFDLNIPLIYKSSFDKANRTSISSERGIGIDDGLEILSKVKKEFNLTIITDIHDASQCQQVSSVVDILQIPAFLCRQTDLLVAAAKTDCVVNVKKGQFLAPWDMHQVVKKIKNSGNNKVLVTERGVSFGYNTLVSDMRALPELKKSNCPVIFDATHSVQQPGGKGNSSGGERNYVSVLSRAAIAVGVAGIFMETHKDPDSAPSDGPNMIPLDELSNLLKLLKNFDDLSKSNIKL

SEQ ID NO: 121726 - protein, 244 aa, Unknown
  Bacterial polypetide isolated from the Sargasso Sea
SEEHAIKISTELKKITGELGINLIYKTSFDKANRTSLKGKRGLGLNKSLPIFDKLRKDVGVPVLTDIHSVDQCSVISNHVDVLQIPAFLCRQTDLLVAAAKTGKIINVKKGQFLAPWDMANVIRKIEDSGNKNILITERGASFGYNTLVSDMRALPIMSKFGFPIVFDATHSVQQPGGMGEKSGGQREFVPYLARAAIAVGVGAIFMETHEDPDNAPSDGPNMVPLNEVKNLLKQLTEIDKLVK

SEQ ID NO: 121727 - protein, 267 aa, Unknown
  Bacterial polypetide isolated from the Sargasso Sea
MGIKISNKNALTLIAGPCQLESEQHSMDMAGKIKEIANKFGIGFIYKTSFDKANRTSLKGKRGAGLEKSLPVFDKIKKDLKIPVLTDIHNEEQCSLISNHVDVLQIPAFLCRQTDLLIAAAKTNKIINVKKGQFLAPWDMANVTKKISDSGNNNILVTERGASFGYNTLVSDMRSLPIMSKLGYPVIFDATHSVQQPGGMGDKSGGQREFVEYLSRAAVAVGVAGVFIETHQDPDNAPSDGPNMLPINKLEQLLNQLFEIDKLVKSK

SEQ ID NO: 121728 - protein, 208 aa, Unknown
  Bacterial polypetide isolated from the Sargasso Sea
DRGIGIDESIKIFDKLKSEYSLKILTDVHSPSDCDKIKKHVDILQIPAFLCRQTDLLISAAATGKIINVKKGQFLAPHDMFNVANKIIESGNKQLLLTERGASFGYNNLVSDMRSLEIMKQEILYPVIFDATHSVQAPGGKGTSSGGDRKFVPVLAKAAVSTGIAGVFMETHNDPDNAPSDGPNMVPVDELEKLLYKLIQIDSIVKEN

SEQ ID NO: 121729 - protein, 168 aa, Unknown
  Bacterial polypetide isolated from the Sargasso Sea
MPAFLSRQTDLVVAMAKTGAVINIKKAQFLAPQEMKHILTKCEEAGNDQLILCERGSSFGYNNLVVDMLGFGIMKQFEYPVFFDVTHALQMPGGRADSAGGRRAQVTDLAKAGMSQGLAGLFLEAHPDPENAKCDGPCALRLNKLEPFLTQLKQLDDLIKSFPPIETA

SEQ ID NO: 121730 - protein, 277 aa, Unknown
  Bacterial polypetide isolated from the Sargasso Sea
MENRIVKCQDINISNLNKICLIAGPCQLETEQHALDMAGEIKNITDKYNIGFIYKTSFDKANRTSLKGKRGAGLEKSLPVFDKIKKQIKVPVLTDIHTEEQCLIVAPHIDVLQIPAFLCRQTDLLVAAAKTKKIINVKKGQFLAPWDMINVTKKISESGNNNILVTERGASFGYNTLVTDMRSIPIMAKNGYPIVFDATHSVQQPGGQGDKSGGQREFVEHLSRAAVAVGVAAIFIETHQDPDNAPSDGPNMVPLKKLDNLVNQIVEIDNLIKKINV

SEQ ID NO: 121731 - protein, 91 aa, Unknown
  Bacterial polypetide isolated from the Sargasso Sea
EYPVFFDVTHALQMPGGRSDSAGGRRAQVTDLAKAGMSQSLAGLFLEAHPDPDNAKCDGPCALRLDKLEPFLAQLKQLDELVKSFPTVETA

SEQ ID NO: 121732 - protein, 274 aa, Unknown
  Bacterial polypetide isolated from the Sargasso Sea
MKTIKIGDFEISNKKNLILIAGPCVIESESHSLIMAEKIATVCQKLKINFVYKSSFDKANRSSINSNRGIEINQAEKIFDKIKSTFNCPILTDIHNESQCEFLSKSESVDVLQIPAFLCRQTDLLISAAKTNKIINVKKGQFLSPYEIPNIFKKIESAGNHNVMITERGTSFGYNNLINDFKSLDIMKNYLYPVIFDATHSVQEPGGMGEKSGGKREFVSTLSKAAVAVGVAGIFIETHNDPDNAPSDGPNMLHIENLESLISKLIELDTVSKK

SEQ ID NO: 121733 - protein, 278 aa, Unknown
  Bacterial polypetide isolated from the Sargasso Sea
MIKIDLNNFSIANNLPFVLIAGPCVIENEDHTLMMAEEINNICSELKINFIFKSSFDKANRSSIKSKRGVSIKDALEIFKKIKSKVNCPIITDLHTEIQCKMLSENHDIDILQIPAFLCRQTDLLIAAGQTNKIINVKKGQFLAPNDVQNIFEKIESVNNNKILITERGTFFGYNNLINDFRSLEIMKKFKYPVIFDGTHSVQQPGGLGDKSGGKREYVAPLCKAAVSIGVAGIFLETHDDPDSAPSDGPNMLNLKDLKKLLIELKEFDIIAKKNAKN

SEQ ID NO: 121734 - protein, 197 aa, Unknown
  Bacterial polypetide isolated from the Sargasso Sea
NIYSLRSEYGIHILTDIHSVDDCDQIKDHVDILQIPAFLCRQTDLLIAAAKTNKVVNIKKGQFLAPMDMVNVAKKVSDSGNNKILLTERGVSFGYNTLVSDMKSLQVMKEEIGFPVVFDATHSVQSPGGKGDRSGGDRKYVPTLAKAAVAVGVSSVFMETHDNPDVAPSDGPNMVKLEELEKLVSKLIQIDNLVKEN

SEQ ID NO: 121735 - protein, 261 aa, Unknown
  Bacterial polypetide isolated from the Sargasso Sea
MTLMGGVNVLESDSVVMNVAEKFAESTQDLNINWIFKGSYDKANRSSISSFRGPGIEEGLRMLEKVKSEFNVPVITDIHEPSQAEQVAEVSDVIQIPAFLCRQTDLVIAAAKTNKIIQFKKPQFLSAIEMKNVIEKCMQAGNKKVILCERGNSFGYNNLIVDMINFQIMKELEVPVIFDATHSLQLPGGLGHAAGGRREYLLPLAKAGLSQCIAGLFIEAHPDPDNAKCDGPCAISSDEISKVLNQLVALDEFIKNQFRAD

SEQ ID NO: 121736 - protein, 274 aa, Unknown
  Bacterial polypetide isolated from the Sargasso Sea
MSSIKIGKLEISNNAPLVFIAGPCAIESKAHSLSMAHNLKKISTELGVGLIFKSSFDKANRTSVKSKRGVGLDASLDIFAAIKEETDLPILTDVHEPEQCNIVKDYVDVLQIPAFLARQTDLILAAANTQKPVNIKKSQFMSPWDIKYSAEKILSQSNTNICLTERGYSFGYNNLVVDFRSIEVMKKLDFPIIFDATHSVQLPGGGESSGGQKEFIEALSTAAVSIGVSAVFAEVHNNPPAAISDGDNQLNLDEFHLLAKKLIQFDMIAKNFKS

SEQ ID NO: 121737 - protein, 270 aa, Unknown
  Bacterial polypetide isolated from the Sargasso Sea
MKKITINDICFGGDSLGLILGPCVIESRDHSLMMAEAICQIANRTGFKTIFKSSIDKANRSSISSFRGLGFDESLSILEEVKKEIGCSIITDIHEPAQAALVAEVVDVIQIPAFLCRQTDLLVSAGKTGKTVNVKKGQFLAPWDMKNVVDKLQESQCDNIILTDRGTQFGYNNLVADMRSIPIMQNFGYPVVFDATHSAQLPGGNGLTSSGNRDMIPTLAKSAVAAGCDGLFMEVHDNVDSAKSDAKTQWPLLELEPLLLELKSIHEAIN

SEQ ID NO: 121738 - protein, 251 aa, Unknown
  Bacterial polypetide isolated from the Sargasso Sea
NVLEDEKTIESVITKCIESTSKHNIPFIFKASYDKANRSSIDSYRGPGAKQGLGILRELKQDFGVPVISDIHTPLEAELASDVLDIIQIPAFLSRQTDLIEAACQTSLPLNIKKGQFLAPSDMLNILKKCSYFNNDKVMICERGTSFGYNNLVVDMLGVNELKKTQQPVIFDVTHSLQRPGGLGDKADGRGSNVLELARSGMSLGLAGLFLETHPNPEKALCDGPCALKLDDLDDFLYQIKLLDDLIKSFV

SEQ ID NO: 121739 - protein, 274 aa, Unknown
  Bacterial polypetide isolated from the Sargasso Sea
MKNISVNCDGIKISNKEKICLIAGPCQLENEQHALDMAGKISEISKKYNIGFIYKTSFDKANRTSLKSKRGAGLEKSLPIFDKIKKQINVPILTDIHNSEQCSIVANHVDVLQIPAFLCRQTDLLVAAAKTNKVINVKKGQFLAPWDMSNVVKKISDTGNSNILITERGASFGYNTLVSDMRSIPIMAQTGYPIVFDATHSVQQPGGMGDKSGGERKFVSHLSRAAVAVGIAAVFIETHQDPDNAPSDGPNMVPLNEMDSLVNKLLEIDKLIKN

SEQ ID NO: 121740 - protein, 249 aa, Unknown
  Bacterial polypetide isolated from the Sargasso Sea
QLESEQHAMDMAGKIKEIASKFGIGFIYKTSFDKANRTSLKGKRGAGLDSSLPVFDKIKNELKIPVLTDVHNVEQCSIVSKHVDVLQIPAFLCRQTDLLVAAAKTNKIINVKKGQFLAPWDMINVTKKISESGNENILVTERGASFGYNTLVSDMRSIPIMAKNGYPIVFDGTHSVQQPGGLGEKSGGQREFVEYLSRAATAVGIAAIFLETHQDPDNAPSDGPNMVPLDKLESLISQIVEIDNLVKNK

SEQ ID NO: 121741 - protein, 260 aa, Unknown
  Bacterial polypetide isolated from the Sargasso Sea
MGGMNVLESRDLAMHVAEKFKESSEKYNINYIFKGSFDKANRSSINSFRGPGLDEGLKILQEVSNSFDVPVITDIHEVDQAKPVSEVCEVVQIPAFLARQTDLVSAAAKTNSIIQFKKPQFLSAPEMENVVEKCISAGNENIILCERGNTFGYNNLVVDTLNFQILKKIGTPVIFDVTHSLQLPGGLGSATGGRREFVLSLAKAGISQSIAGLFLEAHPNPDDAKCDGPCALPLNVLDDFLEQIKNLDDFVKNQDDLDIK

SEQ ID NO: 121742 - protein, 257 aa, Unknown
  Bacterial polypetide isolated from the Sargasso Sea
MININLKDYSFSNNSQFILIAGPCVIENESHSLMIAEELSKICDDVGINLIFKSSFDKANRSSIKSDRGIKLDDALKIFEKIKTNFNLPILTDVHNEEQCNQLKKDSIIDIIQIPAFLCRQTDLLLAAGNTNKIINVKKGQFLSPNDVKNIFTKIETTNNKNIMITERGTSFGYNTLVNDFRGLDIMKKYKYPVIFDATHSVQQPGGLGDKSGGQREHIPSLCKAAISIGVAGLFLETHNDPDNAPSDGPNMIYIKD

SEQ ID NO: 121743 - protein, 260 aa, Unknown
  Bacterial polypetide isolated from the Sargasso Sea
MGGMNVLESRDLAMEVAEKFKESTNNLNINYIFKGSFDKANRSSISSYRGPGLEEGLKILEEVSNTFDVPVITDIHEPLQAQSVSEICEVVQIPAFLARQTDLVSAAAKTKSIIQFKKPQFLSAQEMSNVVEKCIAAGNENITLCERGNSFGYNNLVVDTLNFQILKKLSKPVIFDVTHSLQLPGGLGTVTGGRREYVLSLAKAGISQSIAGLFLEAHPNPDEAKCDGPCALPLSSLNDFLKQIKDLDDFIKDQKDIEIS

SEQ ID NO: 121744 - protein, 254 aa, Unknown
  Bacterial polypetide isolated from the Sargasso Sea
MIAGPCVIESKDLIHDVAGSIKEITESLGIHYIFKSSFDKANRTSIDSFRGPGMEEGLSILESVRDQLGIPVITDVHEDTPLDEVASVVDVLQTPAFLCRQTNFIINVASQQKPVNIKKGQFLSPWDMENVVKKAKSTGNDDILVCERGYTFGYNNLVSDMRSLVILKETSCPVIYDATHSLQLPGGKGQSSDGQSEFIIPVSRGAVGVGIAGIFIETHPDPENALSDGPNSLPLDNLKPLLEQLLAIDKIVKQ

SEQ ID NO: 121745 - protein, 279 aa, Unknown
  Bacterial polypetide isolated from the Sargasso Sea
MSKSNKDVKIKDFVVSNNNKFTLIAGPCLIENREHALKTADLISNICNSLGLNFIYKSSFDKANRTSLKSSRGPGIHDSLEIFSEIKNKIGCPVITDVHEKEQISLLSEVLDVIQIPAFLCRQTDLLIESAKSNLPIMVKKGQFLAPWDMKNVVEKISQNGSGGVMICERGVSFGYNTLVSDFRSIPILKEMGYPVVFDATHSVQQPGGLGDKSSGQREFVPTLAKAATAIGVAALFMETHEDPDNAPSDGPNMWPLDKLKNLLKILINHDEIAKELNN

SEQ ID NO: 121746 - protein, 261 aa, Unknown
  Bacterial polypetide isolated from the Sargasso Sea
LMGGMNVLESRDLAMKIAEKFKEITQNKHINYIFKGSFDKANRSSISSFRGPGMDEGLKILQEVSTTFDIPVITDIHEPQQAEAVSEICEVIQIPAFLARQTDLVNAAAKTKSIIQFKKPQFLSAPEMSNIVEKCSSAGNENITLCERGNSFGYNNLVVDTLNFQILKGLLKPVIFDVTHSLQLPGGLGSATGGRREYLLSLAKAGMSQSIAGLFLEAHPDPDQAKCDGPCALPLSVLDEFLTQIKDLDDFVKDQNDLEIS

SEQ ID NO: 121747 - protein, 273 aa, Unknown
  Bacterial polypetide isolated from the Sargasso Sea
MNKVKLDKIIFGDAAIPFIGGPCVIESRDHCFGIAEKITEITSKLNIPFIFKSSFDKANRTSISSFRGDGLDVGLRILEEIKNNFNIPVTTDIHLPEHANAVSDVVDIIQIPAFLCRQTDLLVEAAKTGKVVNVKKGQFLSPYKVENIIKKLEESGNKNILITERGNTFGFDSLVTDLKSIPIMQAFGYPVIFDATHSAQIPGNHESKTGGNRQFIPTQTFAAVSSGADGIFMEVHDDVDNALSDASTQWPIDKLENILTSIIAFRKTYLEHG

SEQ ID NO: 121748 - protein, 253 aa, Unknown
  Bacterial polypetide isolated from the Sargasso Sea
MIAGPCVIESLDHALFMAESLKKVSDQAGINMIYKSSFDKANRSSISSFRGLGIEEGLSILQKVKSETGLPVITDIHEPIQASAISEVADVIQIPAFLCRQTDLLSAAAKTGKVVNVKKGQFLAPWDMINVVTKLEESHCSNILLTDRGTQFGYNNLIADMRSIPIMQELGYPIIFDATHSAQLPGGGGKTTAGMREMVPTLAKTAVAAGCDGVFMEVHDNVEKAMSDATTQWPLDNLLKLLLQLKAIRESLT

SEQ ID NO: 121749 - protein, 259 aa, Unknown
  Bacterial polypetide isolated from the Sargasso Sea
MTIIAGLNVLEDENMALKVAEQLKEIAIKHNIPFIFKASFDKANRSSIESYRGPGLKSGIKIFKSIKKHLDLPIITDIHEKGQIEEIAQVVDILQIPAFLCRQTDLISAACKTQLPLNIKKGQFLSPYQMKNIIDKCYSFGNDNIILCERGSSFGYDNLIVDFLGISEQKTFNFPIILDVTHSLQLPGGQGNSAGGRSHQAEDLARAAIALKISGLFIEVHPNPDEALCDGPSATRLEDFEDMIVKVKLIDDLVKSEKF

SEQ ID NO: 121750 - protein, 274 aa, Unknown
  Bacterial polypetide isolated from the Sargasso Sea
MKNITVNCDGVKISNQEKICLIAGPCQLENEQHALDMAGKISEISKKYNIGFIYKTSFDKANRTSLKSKRGVGLEKSLPIFDKIKKQINVPVLTDIHNAEQCSIVADHVDVLQIPAFLCRQTDLLVAAAKTNKVINVKKGQFLAPWDMSNVVKKISDTGNSNILITERGASFGYNTLVSDMRSIPIMAQTGYPIVFDATHSVQQPGGMGDKSGGERKFVSHLSRAAVAVGIAAVFIETHQDPDNAPSDGPNMVPLNEMDSLVNKLLEIDKLIKN

SEQ ID NO: 121751 - protein, 277 aa, Unknown
  Bacterial polypetide isolated from the Sargasso Sea
MINKIVKLKNFEISNNKKISLISGPCQLETEQHARDMAGKIKEIAKKLDIGFIYKTSFDKANRTSLKGKRGAGLETSLPVFDRIRKELDIPVLTDVHNIDQCSVVSDHVDIIQIPAFLCRQTDLLIAAAKTNKIINVKKGQFLAPWDMVNVTKKISDSGNENILVTERGASFGYNTLVSDMRSIPIMSKNGYPVIFDGTHSVQQPGGLGEKSGGQREFVEYLSRAATAVGIAGIFLETHQDPDNAPSDGPNMVPLKNLENLVSQIVEIDNLIKKNNG

SEQ ID NO: 121752 - protein, 282 aa, Unknown
  Bacterial polypetide isolated from the Sargasso Sea
MSNKIINLGSIEIANDKPFVLFGGMNVLESRDLAMSIAETYAEVTQKLGIPYVFKASFDKANRSSVNSYRGPGMEEGLKIFEEIKKTFNLPLITDVHETYQCAPVAEVVDIIQLPAFLARQTDLVVAMAKTGAIINVKKPQFLAPHEMRHIITKFNEAGNDEIILCERGSCFGYNNLVVDMLGMDEMKQSGYPVIFDATHALQRPGGRADSAGGRRAQATELARSGMALGLAGLFIEAHPDPDNAKCDGPCALPLHQLENYLKQMKAIDDLVKSFDPIDTSK

SEQ ID NO: 121753 - protein, 274 aa, Unknown
  Bacterial polypetide isolated from the Sargasso Sea
MPRSVFLSKQLIKNDTDRLTLISGPCLLENEKLVRQVAKSLINYAKKEKFNLIFKCSFDKANRSSDQTIRNKISFDKSLDILKNLKNDLKISITSDVHETSQVDKLAELLDVIQIPAFLCRQTDLIKSAAQTKKIVNVKKGQFLSHKEVSNIIKKIENENNKKILITERGNSFGYNYLINDFKGIHFMKEFGYPIIFDSTHSVQLPGGLGKKSGGAREYVVPLSKAASSLRIAGFFIETHPNPEKALSDGPNMIYLHKMPKLLNTINKINKAAK

SEQ ID NO: 121754 - protein, 281 aa, Unknown
  Bacterial polypetide isolated from the Sargasso Sea
MNVSITPDVTVGNGLPFVLFGGLNVLESVEFTLYVCSRYVEVTRRLGIPLVFKASFDKANRSSIHSYRGVGFDEGLRIFEEIKSRFGVPVITDVHEVWQAEPASRVVDVLQVPAFLARQTDLVVAIARTGNAVNIKKPQFMSPTQIEHVVSKCREAGNDKVILCERGASFGYDNLVVDMLGFRQMRDATGDCPVIFDVTHSLQTRDPHGAASGGRRRQVLDLARAGMAVGLAGLFLEAHPEPDHARCDGPSALPLAQLDAFLQQVKAVDDLVKRLPLLDIR

SEQ ID NO: 121755 - protein, 226 aa, Unknown
  Bacterial polypetide isolated from the Sargasso Sea
GLGFIYKTSFDKANRTSLKGTRGAGLEASLPVFDKIKKELNIPILTDIHNADQCSVVADHVDVLQIPAFLCRQTDLLIAAAKTNKIINVKKGQFLAPWDMVNVTKKISDSGNKKILVTERGASFGYNTLVSDMRSLPIMAKNSYPVIFDATHSVQQPGGQGESSGGQREFVEYLARAAVAVGVAGVFIETHQDPDNAPSDGPNMVPLNKLENLLKQLHDIDNLIKE

SEQ ID NO: 121756 - protein, 274 aa, Unknown
  Bacterial polypetide isolated from the Sargasso Sea
MNSIKVYCGNIEISNNNKICIIAGPCQLETEQHAMDMAGKIQEITKKFGLGFIYKTSFDKANRTSLKGKRGAGLEASLPVFDKIKKEFNVPILTDIHNIDQCSEVSDHVDILQIPAFLCRQTDLLIAAAKTNKIINVKKGQFLAPWDMVNVTKKISDSGNTNILVTERGASFGYNTLVSDMRSLPIMAKNGYPVIFDATHSVQQPGGQGESSGGQREFVEYLARAAVAVGVAGVFIETHHDPDNAPSDGPNMVPLDKLENLLNQLSDIDKLIKK

SEQ ID NO: 121757 - protein, 278 aa, Unknown
  Bacterial polypetide isolated from the Sargasso Sea
MSIPFTLIAGPCVLESPELAFELAVKLKAMSDRLGIRYLFKTSFDKANRSSGASFRGPGLEQGLQVLAQLKQELGLQVLTDIHESHQAAVVGQVVDVLQIPAFLCRQTDLLLAAAAAVQDPTAAVTAVNVKKGQFLAPWDMAQVVTKLRAAGLQGDEQLWLTERGTSFGYNTLVVDMRSLPQLRQQGCPVIFDATHSVQQPGGRGNSTGGQREFVAPLARAAMAVGVDGLFIETHPDPDQALSDGPNMVPLHRLEPLLEQLLAIRAAAIGQPEAVSVL

SEQ ID NO: 121758 - protein, 222 aa, Unknown
  Bacterial polypetide isolated from the Sargasso Sea
MKLRNFDIDNSEPMILMGGMNVLESRDLAMNVAEKFKEITDKNAIGYIFKGSFDKANRSSINSFRGPGMDEGLKILQEISNTFDVPVITDIHEPEQALPVSEICEVIQIPAFLARQTDLVNAAAQTKSIIQFKKPQFLSAQEMANVVEKCESAGNNNITLCERGNSYGYNNLVVDTLNFQILKKISKPVIFDVTHSLQLPGGLGTSTDGRREFVLSLAKAGM

SEQ ID NO: 121759 - protein, 256 aa, Unknown
  Bacterial polypetide isolated from the Sargasso Sea
MKQIELNNFSISNDKELTIIGGMNVLESHSLAMQVAEHFKKVTEKLNLKWVFKASFDKANRSSIDSFRGLGFEEGLKILEDISSTFDVPVLTDIHEKDQAKPVSEICEIIQIPAFLCRQTDLIEAAAKTNKIIQFKKPQFLSAPDMRNVVTKCYGFGNEKVLLCERGNIFGYNNLVVDMLNFDIMKSFDVPVVFDVTHSLQMPGGLGKSTAGRREYLLQLARAGISQKIAGLFLETHPNPDEAKCDGPMCITALSS

SEQ ID NO: 121760 - protein, 276 aa, Unknown
  Bacterial polypetide isolated from the Sargasso Sea
MKLRDFKIDNDEKMTLMGGMNVLESRDLAMEVAEKFKNVSDKNGINYIFKGSFDKANRSSINSFRGPGLDEGLKILEEISKTYDIPVITDIHEPNQAKSVSEICEVIQIPAFLARQTDLVSAAAKTSSIIQFKKPQFLSAQEMSNVVEKCEAAGNKNITLCERGNSYGYNNLVVDTLNFQILKKLSKPVIFDVTHSLQLPGGLGSSTGGRREYVLSLAKAGMSQSIAGLFLEAHPNPDEAKCDGPCALPLSYLDEFLNQIKDLDDFVKGQNNLEIK

SEQ ID NO: 121761 - protein, 276 aa, Unknown
  Bacterial polypetide isolated from the Sargasso Sea
MNQKIIKCSDFEIGNNRKIVLISGPCQMESEDHAVEMAYKIKEITIKLNINLIYKTSFDKANRTSIGGKRGLGLEKSLKVFDKIKNEVKLPTLTDVHSSDQCSVISDVIDVIQIPAFLCRQTDLLIAAAKTGKIINVKKGQFLAPWDMVNVTKKILESGNDKILVTERGASFGYNTLVSDMRSIPIMADQGFPVVFDATHSVQQPGGKGSSSGGQREFIEHLSKAATAVGIAALFIETHNDPDNAPSDGPNMLQIDKLENLLNKIIKIDNLTKTDE

SEQ ID NO: 121762 - protein, 274 aa, Unknown
  Bacterial polypetide isolated from the Sargasso Sea
MKNLTVKCGSIDISNSNKFCLIAGPCQLESEQHAMDMSGKIKEITSKLNIGFIYKTSFDKANRTSLTGKRGIGLEQSLPIFDKIKKEINIQILTDIHNAEQCSVVAKHVDILQIPAFLCRQTDLLIAAAKTKKIINVKKGQFLAPWDMVNVTKKISESGNNNILVTERGASFGYNTLVSDMRSLPIMAKNGYPVIFDATHSVQQPGGQGEKSGGQREFVEHLSRAAVAVGVAGIFMETHQDPDNAPSDGPNMIPLSNLENLLKQLIEIDNVIKK

SEQ ID NO: 121763 - protein, 274 aa, Unknown
  Bacterial polypetide isolated from the Sargasso Sea
MKSITVNCNNIEISNNKKICLIAGPCQLETEQHAMDMAGKIKEITSKFNIGFIYKTSFDKANRTSLKGQRGAGLDKSLPVFDKIKKELKVPILTDIHNIDQCSVVAGHVDILQIPAFLCRQTDLLIAAAKTNKIINVKKGQFLAPWDMVNVTKKISDSGNNNILVTERGASFGYNTLVSDMRSLPIMAKNGYPVIFDATHSVQQPGGLGEKSGGQREFVQYLARAAVAVGVAGVFIETHQDPDNAPSDGPNMVPLDKLENLLKQISEIDNLIKN

SEQ ID NO: 121764 - protein, 274 aa, Unknown
  Bacterial polypetide isolated from the Sargasso Sea
MENKIVNCNGIEISNKNKICLIAGPCQLETEQHAMDMAGKIKEIASKYSIGLIYKTSFDKANRTSIKGKRGAGLEKSLPVFDKIKKDLNIPILTDIHNEQQCEIVAPHVDVLQIPAFLCRQTDLLIAAAKTNKIINVKKGQFLAPWDMVNVTKKISESGNENILVTERGASFGYNTLVSDMRSIPIMAKNGYPIVFDATHSVQQPGGQGEQSGGQREFVEYLSRAAVAVGVAAIFLETHQDPDNAPSDGPNMVPLNKLDSLINQIVEIDKLIKI

SEQ ID NO: 121765 - protein, 209 aa, Unknown
  Bacterial polypetide isolated from the Sargasso Sea
SFRGDGLDAGLKILEEIKNNFNIPVTTDIHLPEHANAVSDVIDIIQIPAFLCRQTDLLVAAAQTGKVVNVKKGQFLSPYKVENIINKLEESGNKNILLTERGNTFGFDSLVTDLKSIPIMQSFGYPVIFDATHSAQIPGNHESKTGGNRQFIPSQTFAAVSSGANGIFMEVHDDVDNALSDASTQWPVDKLEKILTSIIAFRETYLSHG

SEQ ID NO: 121766 - protein, 199 aa, Unknown
  Bacterial polypetide isolated from the Sargasso Sea
MININLKNFSISNNSPFVLIAGPCVIENESHSLMIAEELKKICDDVDINLIFKSSFDKANRSSIKSDRGIKLDNALKIFEKIKTNFNLPLLTDVHNEHQCNELNQDSIIDILQIPAFLCRQTDLLLAAGNTNKIINVKKGQFLSPTDVKNIFTKIETTNNKNIMITERGTSFGYNTLVNDYKGLDIMKRYEYPVVFDAT

SEQ ID NO: 121767 - protein, 183 aa, Unknown
  Bacterial polypetide isolated from the Sargasso Sea
MKLRNFYIDNTKTMTLMGGMNVLESRDLAMHVAENFKKASEKYNINYIFKGSFDKANRSSINSFRGPGLEEGLKILQEVSSSFDIPVITDIHELEQAQPVSEVCEVIQIPAFLARQTDLVSAAAKTNSIIQFKKPQFLSAPEMKNVVEKCISAGNKNIILCERGNSFGYNNLVVDTLNFQILK

SEQ ID NO: 121768 - protein, 151 aa, Unknown
  Bacterial polypetide isolated from the Sargasso Sea
MKDISIKGFQIGNDQDLTLMGGMNVLESEETALLVAEKFKEVTEKLNINWIFKASFDKANRSSIDSFRGPGMDEGLKILDKVSSAFDVPIITDIHEPSQAKAVSEVCEVIQIPAFLCRQTDLVCAAAETRSAIQFKKPQFLSAAEMKNVVE

SEQ ID NO: 121769 - protein, 125 aa, Unknown
  Bacterial polypetide isolated from the Sargasso Sea
MKQSKINLVSKDYLTLISGPCAIESEKMALDTAEFLKTITDKLGINFIYKSSFDKANRSSVNSKRGVGIDMGLKILEKVKNDLDVPVLTDVHEYTPFDEVADVVDVLQTPAFLCRQTDFILKVCS

SEQ ID NO: 121770 - protein, 274 aa, Unknown
  Bacterial polypetide isolated from the Sargasso Sea
MSSIKVNCGKIDISNNDKICIISGPCQLESEQHAMDMAGKIKEITSKFGLGFIYKTSFDKANRTSLKGKRGAGLEASLPVFDKIKKELNVPILTDIHNSEQCAIVSKHVDVLQIPAFLCRQTDLLIAAAKTNKIINVKKGQFLAPWDMVNVTKKISESGNDKILVTERGASFGYNTLVSDMRSLPIMAKNGYPVIFDATHSVQQPGGLGEKSGGQREFVEYLARAAVAVGVAGVFIETHQDPDNAPSDGPNMVPLNKLENLLKQLNDIDNLIKN

SEQ ID NO: 121771 - protein, 157 aa, Unknown
  Bacterial polypetide isolated from the Sargasso Sea
MCRQTDLLIAAAKTNKIINVKKGQFLAPWDMVNVTKKISDSGNTNILVTERGASFGYNTLVSDMRSLPIMAKNGYPVIFDATHSVQQPGGQGESSGGQREFVEYLARAAVAVGVAGVFIETHQDPDNAPSDGPNMVPLDKLENLLHQLSDIDKLIKK

SEQ ID NO: 121772 - protein, 282 aa, Unknown
  Bacterial polypetide isolated from the Sargasso Sea
MSNKIIKLGSIEIANDKPFVLFGGMNVLESRDLAMSIAETYAEVTQKLGIPYVFKASFDKANRSSVNSYRGPGMEEGLKIFEEIKKTFNLPLITDVHEPYQCAPVAEVVDIIQLPAFLARQTDLVVAMAKTGAIINVKKPQFLAPHEMRHIITKFNEAGNDEIILCERGSCFGYNNLVVDMLGMDEMKQSGYPVIFDATHALQRPGGRADSAGGRRAQATELARSGMALGLAGLFIEAHPDPDNAKCDGPCALPLHQLENYLKQMKAMDDLVKSFEPIDTSK

SEQ ID NO: 121773 - protein, 110 aa, Unknown
  Bacterial polypetide isolated from the Sargasso Sea
NERGASFGYNTLVSDMRSIPIMAKNGYPIVFDGTHSVQQPGGQGDKSGGQREFVEYLSRAAVAVGIAAIFLETHQDPDNAPSDGPNMVPLDKLDSLINQIVEIDNLIKKN

SEQ ID NO: 121774 - protein, 185 aa, Unknown
  Bacterial polypetide isolated from the Sargasso Sea
MKLGDFEIGLDKPFFLIAGTCVVESEQMTIDTAGQLKEICAKLNIPFIYKSSYDKANRSSGKSFRGLGMDEGLRILSEVKRQLGLPVLTDVHAEHEIEQVASVVDVLQTPAFLCRQTDFIQACARSGKPVNIKKGQFLAPHDMTNVIDKARDAAREAGLSEDRFMACERGVSFGYNNLVSDMRSL

SEQ ID NO: 121775 - protein, 274 aa, Unknown
  Bacterial polypetide isolated from the Sargasso Sea
MTEVSVNKLKISNSNPFTLIAGLNVLESDKVIEQVITHCIAVTKKLNIPYIFKASYDKANRSSVDSYRGPGVDEGLNILSDLKKEFKVPIISDVHNIEEVSKASEVLDVIQIPAFLSRQTDLIREAASSNIPLNIKKGQFMAPEDTNNIINKCEHFGNNQIMICERGSSFGYNNLVVDMLGMTQLKESSYPIIFDVTHSLQRPGGLGDRTDGRGSKALDLARSGMALGLAGLFLETHPDPKNALCDGPCALKIDLLEDFLVQIKAIDDLVKSFL

SEQ ID NO: 121776 - protein, 274 aa, Unknown
  Bacterial polypetide isolated from the Sargasso Sea
MSAIKVNCENIEISNNNKICIIAGPCQLETEQHALDMAGKIKEITSKFGLGFIYKTSFDKANRTSLKGERGAGLDASLPVFDKIKKELNVPILTDIHNLEQCEIVSKHVDVLQIPAFLCRQTDLLIAAAKTNKIINVKKGQFLAPWDMVNVTKKISESGNDKILVTERGASFGYNTLVSDMRSLPIMAKNGYPVIFDATHSVQQPGGQGESSGGQREFVEYLARAAVAVGVAGVFIETHQDPDNAPSDGPNMVPLNKLENLLKQLHDIDNLIKK

SEQ ID NO: 121777 - protein, 232 aa, Unknown
  Bacterial polypetide isolated from the Sargasso Sea
MKEIKIKEINLSNNSPMTIIAGLNVLENEDMALDVAEKLKEITTKHNIPFVFKASFDKANRSSIDSYRGPGLEAGKKIFESIKKNISVPIITDIHEEGQIEEISQVVDILQIPAFLCRQTDLISAACKTQLPLNIKKGQFLSPYQMKNIIEKCNSFGNDNIILCERGSSFGYDNLIVDFLGISEQKAFNYPIILDVTHSLQLPGGQGNSAGGRSHQAEDLARAAIALKISGL

SEQ ID NO: 121778 - protein, 274 aa, Unknown
  Bacterial polypetide isolated from the Sargasso Sea
MENKIINCNGIEISNNKRISLIAGPCQLESEQHAMDMAGKIKEIADKFKIGFIYKTSFDKANRTSIKGKRGAGLDKSLPVFDKIKKELNVPILTDIHNEEQCSQVAKHVDVLQIPAFLCRQTDLLVAAAKTKKIINVKKGQFLAPWDMVNVTKKISDSGNNNILVTERGASFGYNTLVSDMRSLPIMAKNGYPVIFDATHSVQQPGGMGEKSGGQREFVEHLARAAVAVGVAGVFIETHQDPNNAPSDGPNMVPLNKLENLVNQLFEIDNLVKK

SEQ ID NO: 121779 - protein, 207 aa, Unknown
  Bacterial polypetide isolated from the Sargasso Sea
MENKIVNCNGIEISNKNKICLISGPCQLETEQHALDIAGKIKEITTKYNIGFIYKTSFDKANRTSLKGKRGAGLENSLPVFDKIKKEINVPVLTDIHNEEQCSLVSKHVDVIQIPAFLCRQTDLLIAAAKTNKIINVKKGQFLAPWDMVNVTKKISDSGNKNILVTERGASFGYNTLVSDMRSIPIMAKNGYPVVFDGTHSVQQPGV

SEQ ID NO: 121780 - protein, 168 aa, Unknown
  Bacterial polypetide isolated from the Sargasso Sea
MTNHKVKCSNFEIANDKPFTLIAGPCQLENEQHAIKMSTELKKITSELGINLIYKTSFDKANRTSLKGKRGMGLEKSLPIFDKIRKEVGVPVLTDVHTAEQCSIVADHVDVLQIPAFLCRQTDLLIAAAKTGKIINVKKGQFLAPWDMANVIKKIEDSGNKNILITER

SEQ ID NO: 121781 - protein, 153 aa, Unknown
  Bacterial polypetide isolated from the Sargasso Sea
MENKLVNCNGIEISNKNKICLIAGPCQLETEQHAMDMAGKIKEIASKYEIGLIYKTSFDKANRTSIKGKRGAGLENSLPVFDKIKKDLNIPVLTDVHNEKQCAVVAPHVDVLQIPAFLCRQTDLLIAAAKTNKVINVKKGQFLAPWDMVNVTK

SEQ ID NO: 121782 - protein, 270 aa, Unknown
  Bacterial polypetide isolated from the Sargasso Sea
MKEVKIGNVIFSDKHLGIIAGPCVIEDRDHSLRMANEIKKISDDIEIPIIFKSSFDKANRTSIKSFRGPGIDEGIKILSDVKVETGLPVITDIHNADQAKVVAEVVDVIQIPAFLSRQTDILIAASNTGKPVNIKKGQFLAPWDVEHIVQKIEETGHNNILLTDRGTQFGYNNLVADMRAIPLMKKYGYPVVFDATHSAQLPGASGGHSSGMRDMIPTLARSAVAAGSSGVFMEVHDKVDSAKSDAATQWPLSQLKDLLIDLINIHNVVS

SEQ ID NO: 121783 - protein, 273 aa, Unknown
  Bacterial polypetide isolated from the Sargasso Sea
MNKVILDKVTFGDNSIPLIGGPCVIESRDHCLRMAEKITEITTKLNIPFIFKSSFDKANRTSISSFRGNGLDDGLKILEEIKRTFNIPITTDIHLPEHAQAVSEVVDIIQIPAFLCRQTDLLIAAAKTGKVVNVKKGQFLSPYKVENIINKLEENGNNNILITERGNTFGFDSLVTDLRSIPIMKKFGYPVVFDATHSAQIPGNHENNTGGNREYIPSQTFAAVSAGADGIFMEVHDNVDSALSDASTQWPIEKLENTLQSILAFRKTYLNHG

SEQ ID NO: 121784 - protein, 74 aa, Unknown
  Bacterial polypetide isolated from the Sargasso Sea
MININLNNFSISNNLPFVLIAGPCVIENEKHSMMIAESLSKICNEISINLIFKSSFDKANRSSINSQRGVNLNE

SEQ ID NO: 121785 - protein, 138 aa, Unknown
  Bacterial polypetide isolated from the Sargasso Sea
MIKLNNFKIGNSERLTIFGGVNVIESKELIFEVAEAFIKNSSKLKFNFVFKASFDKANRSSLDSYRGPGLEDGLKILSELKQKYNLPILTDIHEPHQAKPVSEVCDIIQIPAFLCRQTDLVVEAAKTGKIINLKKPPV

SEQ ID NO: 121786 - protein, 275 aa, Unknown
  Bacterial polypetide isolated from the Sargasso Sea
MSNIQINDFEIGNTLPLTIIGGVNVLESDQLCSEVANTFVDLSKKHSFNFIFKGSFDKANRSSYKSFRGPGLTKGLHMLEKIKNDFDVPVITDIHEPNQANQVAQVCDIIQIPAFLCRQTDLIQAAAETRKPLHIKKPQFLSATDMRNVVEKCFSFDNKNILLCERGNIFGYNNLVVDMLNFQTLKSYNLPVIFDVTHSLQIPGGLGISTGGRRELFLPLAKSGVAQKIAGLFIETHTNPDDAKCDGPSAININDLDRYIKEIVNLDKLIKAQED

SEQ ID NO: 121787 - protein, 265 aa, Unknown
  Bacterial polypetide isolated from the Sargasso Sea
MINIGKTKNLTLISGPCAIESEDLCIKIAEHMCEITDPLPISYIFKASFDKANRSSINSNRGIGIEKGLKILDRIKTDFKIPVLTDVHEDTPINEVADCVDILQTPAFLCRQTNFILKVSSAMKPVNIKKGQFLSPLEMINVVEKAKSTGNKDIFVCERGVSFGYNNLVSDMRSLVLLRETKCPVIYDASHSVQYPGKDITSSGGGSEFIPSLAKAATAVGVDALFIETHPNPAIALSDGKNSLNLNNMKSLLESVVNINDIVKR

SEQ ID NO: 121788 - protein, 224 aa, Unknown
  Bacterial polypetide isolated from the Sargasso Sea
YKTSFDKANRTSLNGKRGAGLEKSLPVFDKIKKEFGIPVLTDIHSIEQCDVVSKHVDVLQIPAFLCRQTDLLVAAAKTGKVINVKKGQFLAPWDMTNVTKKIEQSGNKNILVTERGASFGYNTLVSDMRSLPIMAKIGYPVVFDATHSVQQPGGMGEKSGGQREFVEHLSRAAIAVGVAAVFMETHEDPDNAPSDGPNMVPLSQMPKLLKQLVEIDNLIKNGKN

SEQ ID NO: 121789 - protein, 271 aa, Unknown
  Bacterial polypetide isolated from the Sargasso Sea
MKNIFKINGVEFGGKQLPIIAGPCVIESRDHILYMAEKIKAITDKNKLPLIFKSSFDKGNRSSHSSFRGPGIDSGLRILEDVKEAFNIPVTTDIHNASQAKLVSEIIDIIQIPAFLCRQSDIINAAVKTGKIINVKKGQFMAPWDANNIVEKVADGNGEKLLLTERGSSFGYNSLVSDMTSIPIMQGFGVPVIFDATHSVQRPGGLGKTTGGAREFIPTLAKCAVAAGCNGIFMEVHDNPDNAKSDAASQWPLNKLDTVLNSLKDIKEVIN

SEQ ID NO: 121790 - protein, 217 aa, Unknown
  Bacterial polypetide isolated from the Sargasso Sea
MKLRDFKIDNNEKMTLMGGMNVLESRDLAMEVAEKFKNVTDKNDINYIFKGSFDKANRSSINSYRGPGLDEGLKILEEISKTYDIPVITDVHEPNQAKSVSEICEVIQIPAFLARQTDLVSAAAKTSSIIQFKKPQFLSAQEMSNVVEKCEAAGNKNITLCERGNSYGYNNLVVDTLNFQILKKLSKPVIFDVTHSLQLPGGLGSSTGGRREYVLSL

SEQ ID NO: 121791 - protein, 279 aa, Unknown
  Bacterial polypetide isolated from the Sargasso Sea
MNALNLRNFEISNNKTMSLMGGVNVLESRDLCMEVGEKFKSISDDLKINYIFKGSFDKANRSSIDSFRGPGLDEGLKILEEISKEFDIPTITDIHEPDQAKPVGEICEIIQIPAFLARQTDLVIAAAKTGNILQFKKPQFLSAPEMKNIIKKCESAGNSKITLCERGSSFGYNNLVVDTLNFQILKNLNKPVIFDVTHSLQLPGGQGNSAGGRREYLLSLAKAGLSQGIAGLFLEAHPDPDKAKCDGPCALKLEMLKPFLTQLKELDDFIKNQDALEIS

SEQ ID NO: 121792 - protein, 282 aa, Unknown; identical to SEQ ID NO: 121752
  Bacterial polypetide isolated from the Sargasso Sea

SEQ ID NO: 121793 - protein, 197 aa, Unknown
  Bacterial polypetide isolated from the Sargasso Sea
LPVFDKIKKEFNIPILTDIHNIDQCSEVADHVDILQIPAFLCRQTDLLIAAAKTNKIINVKKGQFLAPWDMVNVTKKISDSGNTNILVTERGASFGYNTLVSDMRSLPIMAKNGYPVIFDATHSVQQPGGQGESSGGQREFVEYLARAAVAVGVAGVFIETHQDPDNAPSDGPNMVPLDKLENLLHQLSDIDKLIKK

SEQ ID NO: 121794 - protein, 189 aa, Unknown
  Bacterial polypetide isolated from the Sargasso Sea
ITDIHEPQQAQAVSEICEVVQIPAFLARQTDLVNAAAKTKSIIQFKKPQFLSAPEMSNIVEKCSSAGNENITLCERGNSFGYNNLVVDTLNFQILKGLLKPVIFDVTHSLQLPGGLGSATGGRREYLLSLAKAGISQSIAGLFLEAHPDPDQAKCDGPCALPLSVLEEFLTQIKDLDDFIKDQNDLKIS

SEQ ID NO: 121795 - protein, 270 aa, Unknown
  Bacterial polypetide isolated from the Sargasso Sea
MKINNTQIANDKRLTIFGGVNVIESDDLLFNVAEKFKSAAEKYKFNYVFKASFDKANRSSVDSFRGPGLDEGLESLRKVKEEFKIPLITDIHEPNQAEAVAEVCDVIQIPAFLCRQTDLIVAAAKTKKIINIKKPQFSSAKEMFHAVSKCEQAGNPDIILCERGNIFGYNNLVVDTLNFQILKESGKPVFFDVTHSLQQPGMLEKSTGGRGQYVFDLAKAGVSQNIAGLFIETHPDPANAMCDGPCALDLSDLDNFMHKIMLLDDLVKSN

SEQ ID NO: 121796 - protein, 274 aa, Unknown
  Bacterial polypetide isolated from the Sargasso Sea
MKNIKLSNFEISNKSNFILIAGPCVIENENHSLMMTEQIAKICQKLKIHFIFKSSFDKANRSSINSNRGVDINQAEKIFNKIKSIYNCPILTDVHNESQCEFFSNSESVDVLQIPAFLCRQTDLLIAAAKTKKIVNVKKGQFLSPHEVPNIFNKIESAGNYNIMITERGTSFGYNNLINDFKSLDIMKNFQYPVIFDATHSVQEPGGMGEKSGGKREFVSTLAKAAVAVGVAGIFIETHNDPDNAPSDGPNMLQIENLESLISKLIELDTVSKK

SEQ ID NO: 121797 - protein, 197 aa, Unknown
  Bacterial polypetide isolated from the Sargasso Sea
LPVFDKIRKELSVPVLTDVHNVEQCSIVSKHVDVLQIPAFLCRQTDLLLAAAKTNKIINVKKGQFLAPWDMVNVTKKLSDSGNENILVTERGASFGYNTLVSDMRSIPIMAKNGYPIIFDGTHSVQQPGGLGEKSGGQREFVEYLSRAATAVGIAGIFLETHQDPDNAPSDGPNMVPLDNLENLISQIVEIDNLIKK

SEQ ID NO: 121798 - protein, 279 aa, Unknown
  Bacterial polypetide isolated from the Sargasso Sea
MKDISIKDFQIGNDQDFTLMGGMNVLESEETALLVAEKFKEVTDKLKINWIFKASFDKANRSSIESFRGPGMDEGLKILEKVSSAFDVPIITDIHEPSQANPVSEVCEVIQIPAFLCRQTDLVSAAAKTSSAIQFKKPQFLSAAEMKNVVEKCKSAGNEKIILCERGNIFGYNNLVVDTLNFQIMKGYSVPVMFDVTHSLQLPGGLGKSTDGRREYLLHMAKAGISQKIAGLFLEAHPNPDKAKCDGPCALRLDQLESFLLQVKELDKLVKSQKDLDLK

SEQ ID NO: 121799 - protein, 274 aa, Unknown
  Bacterial polypetide isolated from the Sargasso Sea
MENKIVNCNGIEISNKNKICLIAGPCQLETEQHALDMAGKIKEIVTKYNIGFIYKTSFDKANRTSLKGKRGAGLENSLPVFDKIKKDIKVPVLTDIHNEEQCSLVSNHVDVLQIPAFLCRQTDLLIAAAKTNKIINVKKGQFLAPWDMVNVTKKISDSGNENILVTERGASFGYNTLVSDMRSIPIMAKNGYPVVFDGTHSVQQPGGLGEKSGGQREFVEYLSRAAVAVGVAAIFLETHQDPDNAPSDGPNMVPLDKLDELINQIVEIDNLVKK

SEQ ID NO: 121800 - protein, 277 aa, Unknown
  Bacterial polypetide isolated from the Sargasso Sea
MINKIVKCNNFEISNNKKISLISGPCQLETEQHAMDMAGKISDIAKKFDIGFVYKTSFDKANRTSLKGKRGAGLETSLPIFDKIRKELDIPVLTDVHNIEQCSIVSKHVDIIQIPAFLCRQTDLLVAAAKTNKIINVKKGQFLAPWDMVNVTKKISDSGNENILVTERGASFGYNTLVSDMRSIPIMSKNGYPVIFDGTHSVQQPGGLGEKSGGQREFVEYLSRAATAVGIAGIFLETHQDPDNAPSDGPNMVPLKNLELLISQIVEIDSLIKKNNG

SEQ ID NO: 121801 - protein, 279 aa, Unknown
  Bacterial polypetide isolated from the Sargasso Sea
MKDISIKDFQIGNDKDLTLIGGMNVLESEETALLVAEKFKEVTEKLEINWIFKASFDKANRSSIESFRGPGMDEGLKILEKVSSSFDVPVITDIHEPSQANSVSEVCEVIQIPAFLCRQTDLVLAAAKTNSAIQFKKPQFLSAAEMKNVVEKCKSAGNEKVILCERGNIFGYNNLVVDTLNFQIMKEYFVPVIFDVTHSLQLPGGLGKSTDGRREYLLHMAKAGISQKIAGLFLEAHPDPDKAKCDGPCALRLDQLESFLLQVKELDKLVKSQKDLNLK

SEQ ID NO: 121802 - protein, 270 aa, Unknown
  Bacterial polypetide isolated from the Sargasso Sea
MKINNLPIANDQRLTVFGGVNVIESDDLLFRVAEEFKSIAEKYKFSYVFKASFDKANRSSADSFRGPGLEEGLESLRKVKEKFDVPLITDIHEPDQAEAVAEVCDVIQIPAFLCRQTDLIIAAAKTKKIINIKKPQFSSAKEMFHAVSKCEKAGNSDVILCERGNIFGYNNLVVDTLNFQILKDSGKPVFFDVTHSLQQPGMLEKSTGGRGQYVFDLAKAGVSQNIAGLFIETHPDPASAMCDGPCALNLSELDNFMHKILLLDDLVKSK

SEQ ID NO: 121803 - protein, 275 aa, Unknown
  Bacterial polypetide isolated from the Sargasso Sea
MVQITEVQLNNRKISNMDPAIVIAGMNVIESEELCISVAGELKNICERNNVDFIFKASYDKANRSSIDSFRGPGIDQGLKILKTVKDEFNVPIISDIHEPSQAETAAEVLDVIQIPAFLSRQTDLIKAACETEKVINVKKAQFLSPAQMMNIIEKCNHFGNENILLCERGSIFGYDNLIVDFLGIDEIKKIAPTILDITHSLQLPGGKGKSADGRSSQAKALGTAAAAIGLAGFFIEVHPIPENALCDGASATRLSEFESLLLELKKFDELSKSL

SEQ ID NO: 121804 - protein, 277 aa, Unknown
  Bacterial polypetide isolated from the Sargasso Sea
MENRIVKCQDLNISNSNKICLIAGPCQLETEQHALDMAGEIKKITDKYNIGFIYKTSFDKANRTSLRGKRGAGLEKSLPVFDKIKNEIKVPVLTDIHNVEQCSIVAPHIDILQIPAFLCRQTDLLVAAAKTNKIINVKKGQFLAPWDMENVTKKISESGNNNILLTERGASFGYNTLVSDMRSIPIMAKNGYPIIFDATHSVQQPGGQGNKSGGQREFVEHLSRAAVAVGVAAIFIETHQDPDNAPSDGPNMVPLNKLDNLINQIVEIDNLIKKKNV

SEQ ID NO: 121805 - protein, 251 aa, Unknown
  Bacterial polypetide isolated from the Sargasso Sea
MIAGPCVWEGYSHAEAIAEKLLAVCGKHDVNFIYKTSFDKANRSSLKGFRGAENAIEGFRELKKKFNLEILTDVHESHQPGELDVVDIFQIPAFLCRQTDLLKAAAQTGKPVNVKKGQFLSPQEMGNVKEKLISFGCDQIILTERGTTFGYNNLVVDFRSIPILKTFGWPVAIDATHSVQMPGKQGDQSGGDRSFAKYMMRCGMVCGADVVFAEVHNDPDNAPSDGPNMLHLDTFENFVKEIRKWFDASPE

SEQ ID NO: 121806 - protein, 277 aa, Unknown
  Bacterial polypetide isolated from the Sargasso Sea
MENRIVKCQDLNISNSNKICLIAGPCQLETEQHALDMAGEIKKIADKYNIGLIYKTSFDKANRTSLDGKRGAGLENSLPVFDKIKKQIKIPVLTDIHNVEQCVIVAPHVDVLQIPAFLCRQTDLLIAAAKTKKIINVKKGQFLAPWDMVNVTKKISDSGNNNILVTERGASFGYNTLVSDMRSIPIMAKNGYPIVFDATHSVQQPGGQGNKSGGQREFVEHLSRAAVAVGVAAIFIETHQDPDNAPSDGPNMVPLKELDNLISQIVQIDNLVKKNNV

SEQ ID NO: 121807 - protein, 93 aa, Unknown
  Bacterial polypetide isolated from the Sargasso Sea
MRALPIMSKFGFPIVFDATHSVQQPGGMGEKSGGQREFVPFLARAAIAVGVAAIFMETHEDPDNAPSDGPNMVPLNEVKTLLKKLTEIDKLVK

SEQ ID NO: 121808 - protein, 281 aa, Unknown
  Bacterial polypetide isolated from the Sargasso Sea
MNIDIAPGVTLGNTLPFVLFGGLNVLESLDFTLDVCEKYVEVTHKLNVPFVFKASFDKANRSSMHSYRGVGLDEGLEILSAVKQRFGVPVITDVHEVAQARPVADVADVLQVPAFLARQTDLVVAIASTGKPVNVKKPQFMSPAQIKHVVAKCNEAGNRQVILCERGSSFGYDNLVVDMLGFREMRDASDNCPVIFDVTHSLQRRDPASEASGGRRRQVVDLARAGMAVGLAGLFLEAHPDPDRARCDGPSALPLHLLEAFLSQIKAIDDLVKSQPVLDIQ

SEQ ID NO: 121809 - protein, 276 aa, Unknown
  Bacterial polypetide isolated from the Sargasso Sea
MKLRNFEIGNSKSLTLMGGMNVLESRDLAMQVAEDFKKVTDKLNINYIFKASFDKANRSSIASYRGPGLEEGLNILKEVSYEFDVPVITDIHEPDQAEPVSEICEVIQIPAFLARQTDLVNAAASTKSIIQFKKPQFLSAPEMKNVVEKCVAAGNSNIILCERGNSYGYNNLVVDTLNFQILKKLMTPVIFDVTHSLQLPGGLGGSTDGRREYVLSLAKAGISQSIAGLFLEAHPNPDEAKCDGPCALPLSMLEEFLTQIKDLDDFIKQQENLDIS

SEQ ID NO: 121810 - protein, 274 aa, Unknown
  Bacterial polypetide isolated from the Sargasso Sea
MSNIKVNCNKIEISNDNKICIIAGPCQLETEQHAMDMAGKIQEITEKFGVGFIYKTSFDKANRTSLKGKRGAGLDASLPVFDKIKKELNVPILTDIHNIEQCSIVANHVDVLQIPAFLCRQTDLLVAAAKTNKIINVKKGQFLAPWDMVNVTKKISESGNKNILVTERGASFGYNTLVSDMRALPIMAKNGYPVIFDATHSVQQPGGLGEKSGGQREFVEYLARAAVAVGVAGVFIETHQDPDNAPSDGPNMVPLDKLESLLKQLTDIDNLIKN

SEQ ID NO: 121811 - protein, 274 aa, Unknown
  Bacterial polypetide isolated from the Sargasso Sea
MSEVTINELEVSNTKPFTLIAGLNVLESDKVIDQVITSCIEVTQKLNIPYVFKASYDKANRSSIDSYRGPGVDKGLSILSDLKKEFKVPIISDVHTVEQVIKASEVLDIIQIPAFLSRQTDLIREAALTKLPINIKKGQFMAPEDTTNIIKKFEHFGNSKLMICERGSSFGYNNLVVDMIGISKLKETNYPVIFDVTHSLQKPGGLGDRTDGRGSKVLDLAKSGMAIGLAGLFLETHPDPANALCDGPCALSIDLLEEFLVQIKAIDDLVKSFK

SEQ ID NO: 121812 - protein, 166 aa, Unknown
  Bacterial polypetide isolated from the Sargasso Sea
MIKIKINNFEISNNLPLFIIAGPCVIENESHSLQMVEKISKICESQRINFVFKSSFDKANRSSLLSERGIKIDQAIKIFNKIRSEFRCPILTDVHNEEQCKILSEVESINIIQIPAFLCRQTDLLIAAGKTNKIINVKKGQFLSPYDVPNIYKKIEMCGKFKHNNY

SEQ ID NO: 121813 - protein, 146 aa, Unknown
  Bacterial polypetide isolated from the Sargasso Sea
MFNSSVLKIGDISVGGESPLVFILGPCQLESRDHALFMAEKIVKVCEPSSSKFIFKSSFDKANRSSITSARGIGIEEGLKILEEVKATFSCPVITDVHTVPQCGIVAEVVDVLQIPAFLSRQTDLLIAAGETGKPINVKKGQFLAP

SEQ ID NO: 121814 - protein, 257 aa, Unknown
  Bacterial polypetide isolated from the Sargasso Sea
MIAGPCVIESEKLIMEVAECLLEITRDLGITYVFKSSFDKANRSSSDSFRGLGLEEGLRILEQVRNQYQIPVLTDVHDDSPIDEVADVVDILQTPAFLCRQTNFIQKVAKAGKPVNVKKGQFLAPWEMLNVVKKARETGNDDIMVCERGTSFGYNYLVSDMRSLVIMRETNCPIIFDATHSVQMPGAKGSTSGGQREFVPALARAAVAVGISGLFMETHPKPDLALSDGPNSVPLKEVRILLETLKILDSTIRKGTL

SEQ ID NO: 121815 - protein, 66 aa, Unknown
  Bacterial polypetide isolated from the Sargasso Sea
SGGQREFVPVLARAAVAVGVHGLFMESHEDPDQAPSDGPNMVPLDAMPKILQQLMRLDAARRDLLA

SEQ ID NO: 121816 - protein, 189 aa, Unknown
  Bacterial polypetide isolated from the Sargasso Sea
MIKIDLKRFSISNNLPFILIAGPCVIENEIKTLKIAEEINNICRDLKINYIFKSSFDKANRSSIKSQRGVSLDQSLKIFEKVKNNFNCPITTDVHTENQCNNLMKDDIIDILQIPAFLCRQTDLLIAAAKTNKIINVKKGQFLAPTDVVNIFDKIKTINNNIMITERGTSFGYNNLINDFRGLDIMKPV

SEQ ID NO: 121817 - protein, 233 aa, Unknown
  Bacterial polypetide isolated from the Sargasso Sea
RIADKFSIGFIYKTSFDKANRTSLKGKRGAGLEKSLPVFDKIKKDLKVPVLTDIHNEEQCLAVSNHVDILQIPAFLCRQTDLLIAAAKTKKIINVKKGQFLAPWDMANVTKKISESGNNNILVTERGASFGYNTLVSDMRSLPIMSKLGYPVIFDATHSVQQPGGMGDKSGGQREFVEYLARAAVAVGVAGVFIETHQDPDNAPSDGPNMLPINKLEQLLNQLYEIDKLVKIK

SEQ ID NO: 121818 - protein, 271 aa, Unknown
  Bacterial polypetide isolated from the Sargasso Sea
MTVKVSNLSIDNGSRLTLISGPCVIESKELIHDVAGRIKEITDSLEIGYIFKSSFDKANRTSIDSFRGPGMEEGLAILESVRDQLGVPVITDVHEDTPLDEVASVVDVLQTPAFLCRQTNFIINVASQQKPVNIKKGQFLSPWEMENVVKKAKFTGNEDILVCERGYTFGYNNLVSDMRSLVVLKETSCPVIYDATHSLQLPGGKGGSSDGQSEFIIPVSRGAVGVGIAGIFIETHPDPKNALSDGPNSLPLNNLKPLLEQLLAIDEIVKK

SEQ ID NO: 121819 - protein, 273 aa, Unknown
  Bacterial polypetide isolated from the Sargasso Sea
MSSITVNCGNIEISNDKKICIIAGPCQLETEQHAMDMAGKIKEITSKYGLGFIYKTSFDKANRTSLKGKRGAGLEASLPVFDKIKKELNVPILTDIHNSEQCSVVANHVDVLQIPAFLCRQTDLLIAAAKTNKIINVKKGQFLAPWDMVNVTKKISDSGNTNILVTERGASFGYNTLVSDMRSLPIMAKNGYPVIFDATHSVQQPGGQGESSGGQREFVEYLARAAVAVGVAGVFIETHQDPDNAPSDGPNMVPLNKLENLLKQLTEIDKLIK

SEQ ID NO: 121820 - protein, 270 aa, Unknown
  Bacterial polypetide isolated from the Sargasso Sea
MKKVSIKNVVFGSSDLGLISGPCVIESLDHALRMANAIKEIADKSGINVIYKSSFDKANRSSISSFRGLGIDEGLSILQKVKADTGLPVLTDIHEPSQALPVAEVADVIQIPAFLCRQTDLLIAAAKTEKVVNVKKGQFLAPWDMKNVIAKLEESSCVDILLTDRGTQFGYNNLVADMRSIPLMQELGYPIIFDATHSAQLPGGGGKITSGMRDMIPTLAKAAVAAGCNGIFMEVHDNIEKAMSDAATQWPLNDLLSLLLDLKSIKESLH

SEQ ID NO: 121821 - protein, 189 aa, Unknown
  Bacterial polypetide isolated from the Sargasso Sea
MTVKVSNLSIDNGSRLTLISGPCVIESKDLIHDVAGRIKEITDSLEIGYIFKSSFDKANRTSIDSFRGPGMEEGLAILESVRDQMGVPVITDVHEDTPLNEVASVVDVLQTPAFLCRQTNFIINVASQQKPVNIKKGQFLSPWEMENVVKKAKSTGNEDILVCERGYTFGYNNLVSDMRSLIVLKETSC

SEQ ID NO: 121822 - protein, 82 aa, Unknown
  Bacterial polypetide isolated from the Sargasso Sea
MKLRNFNIGNSETLTLMGGMNVLESRDLAMHIAEKFKESSEKYNINYIFKGSFDKANRSSINSFRGPGLDEGLKILQEVSNS

SEQ ID NO: 121823 - protein, 149 aa, Unknown
  Bacterial polypetide isolated from the Sargasso Sea
AAAKTNKIVNVKKGQFLAPWDMVNVTKKISDSGNKNILVTERGASFGYNTLVSDMRSLPIMAKNGYPVIFDATHSVQQPGGLGEKSGGQREFVEYLARAAVAVGVAGVFIETHQDPDNAPSDGPNMVPLDNLENLLKQLTDIDNLIKNK

SEQ ID NO: 121824 - protein, 109 aa, Unknown
  Bacterial polypetide isolated from the Sargasso Sea
EQASGYNTLVSDMRSLPIMAKSGYPVVFDATHSVQQPGGKGDKSGGQREFVEYLSRAAIAVGVAAVFIETHPDPDNAPSDGPNMVPLSNMLDLLKQLVEIDNLIKNAKN

SEQ ID NO: 121825 - protein, 169 aa, Unknown
  Bacterial polypetide isolated from the Sargasso Sea
MANKSVKCGKLNISNTGPFTLIAGPCQLENEKHALDIAGELKKITDNLGIGLIYKTSFDKANRTSLNGKRGAGLEKSLPIFDKIRKQIGVPVLTDIHAIDQCALVSKHVDVLQIPAFLCRQTDLLVAAAKTGKVINVKKGQFLAPWDMVNVTKKIEDSGNKNILVTERG

SEQ ID NO: 121826 - protein, 270 aa, Unknown
  Bacterial polypetide isolated from the Sargasso Sea
MKEVKIGNVIFSDKHLGIIAGPCVIEDRDHSLRMANEIKKISDDIEIPIIFKSSFDKANRTSIKSFRGPGIDDGIKILSDVKVETGLPVITDIHNADQAKIVAEVVDVIQIPAFLSRQTDILIAASNTGKPVNIKKGQFLAPWDVKHIVQKIEETGHSNILLTDRGTQFGYNNLVADMRAIPLMKKYGYPVVFDATHSAQLPGASGGHSSGMRDMIPTLARSAVAAGCSGVFMEVHDKVDSAKSDAATQWPLSQLKDLLIDLINIHNVVS

SEQ ID NO: 121827 - protein, 274 aa, Unknown
  Bacterial polypetide isolated from the Sargasso Sea
MKNITVKCRNIDISNTSKFCLIAGPCQLETEQHAMDMSGKIKEITSKLGINFIYKTSFDKANRTSLKGKRGIGLEQSLSIFDKIRNETKVPILTDIHNIEQCAVVAEHVDILQIPAFLCRQTDLLIAAAKTKKIINVKKGQFLAPWDMVNVTKKISDSGNNNILVTERGASFGYNTLVSDMRSLPIMAKNGYPVIFDATHSVQQPGGQGESSGGQREFVEHLSRAAVAVGVAGIFMETHQDPDNAPSDGPNMIPLSNLENLLNQLIEIDKIIKK

SEQ ID NO: 121828 - protein, 276 aa, Unknown
  Bacterial polypetide isolated from the Sargasso Sea
MKLRNFEIGNNKPLTLMGGMNVLESRDLAMQVAEDFKKVTDKLNINYIFKASFDKANRSSITSYRGPGLEEGLNILKEVSDEFDVPVITDIHEPDQAEPVSEICEVIQIPAFLARQTDLVNAAANTKSIIQFKKPQFLSAPEMKNVVEKCAAAGNSNILLCERGNSYGYNNLVVDTLNFQILKKLMTPVIFDVTHSLQLPGGLGGSTDGRREYVLSLAKAGISQSIAGLFLEAHPNPDEAKCDGPCALPLSMLEEFLTQIKELDDFIKQQENLDIS

SEQ ID NO: 121829 - protein, 120 aa, Unknown
  Bacterial polypetide isolated from the Sargasso Sea
RLFYAREENIFGYNNLVFDTLNFQIMKEYSVPVMFDVTHSLQLPGGLGKSTDGRREYLLHMAKSGISQKIAGLFLEAHPDPDKAKCDGPCALRLDQLEPFLLQVKELDKLVKSQKDLDLK

SEQ ID NO: 121830 - protein, 268 aa, Unknown
  Bacterial polypetide isolated from the Sargasso Sea
KLNISNNGPFTLIAGPCQLESEKHAMDIATELKIITDKLGIGLIYKTSFDKANRTSLNGKRGAGLEKSLPVFDKIRNQIGVPVLTDIHTIDQCATVSKHVDVLQIPAFLCRQTDLLVAAAKTGKIINVKKGQFLAPWDMVNVTKKIEDSGNKNILVTERGASFGYNTLVSDMRSLPIMAKNGYPVVFDATHSVQQPGGMGDKSGGQREFVEYLSRAAIAVGVAAVFMETHPDPDNAPSDGPNMVPLSSMPNLLKQLVEIDNLIKNGKN

SEQ ID NO: 121831 - protein, 200 aa, Unknown
  Bacterial polypetide isolated from the Sargasso Sea
QEVSNTFDVPVITDIHEPNQAKPVTEVCEIIQIPAFLARQTDLVSAAAKTDSIIQFKKPQFLSAPEMSNTIEKCSAAGNDKIILCERGNSFGYNNLVVDTLNFQILKKLSKPVIFDVTHSLQLPGGLGSATGGRREYVLSLAKAGISQSIAGLFLEAHPNPDEAKCDGPCALPLSVLEEFLKQVKELDVFVKNQKDLEII

SEQ ID NO: 121832 - protein, 181 aa, Unknown
  Bacterial polypetide isolated from the Sargasso Sea
PVLTDVHLPDQCKAVAEVSDVLQIPAFLCRQTDLLIAAGKTGKVINIKKGQFLAPGKMKHVAEKVESTGNKNILLTERGTSFGYSLVSDMTSIPVMQNVGYPVIFDATHSAQLPGDQNITGGQRNMIPTLAKAAVAAGCNGIFMEVHNDPSNAKSDASTQWPLDSLEDLLGKLLKIYEAVH

SEQ ID NO: 121833 - protein, 272 aa, Unknown
  Bacterial polypetide isolated from the Sargasso Sea
YINSQKYSQLKSPMKYGLFPGGKKIRSKILIDLGSLFSIDYKTLIIVGSAVECIHAYSLIHDDLPCMDDDDIRRGKPSAHIKFGESTAVLAGNSLLTLAFEILSSPKLKLNEKIKINLIKKLSECSGHLGIAGGQYLDLSYERKKISRNKILEMEIKKTGMLFSFCCAVPAIIKKKTIQEIKFFENIGSKIGLLFQIADDLIDLKSNSKEAGKKTGKDKKKGKATLINLIGYDDSLKYCDKIIKDINKNLRKYGSRSEKINETLGYILNRKK

SEQ ID NO: 121834 - protein, 272 aa, Unknown
  Bacterial polypetide isolated from the Sargasso Sea
VQLRLHEVEVVGGRGAVRLGGQHLHLPRHLPRGGAQAQAARGGRAEAQRRQPQAADGARHGGGARGAQGRAAGPADGGHGREEPAARGGGGDGEAAQPRRAARQRAQGRERAVGRGGRGAQGADGPAAWRRHVLGRLHRVHRPVQRGLPRGDAHQLVRRPRVALHTELRQRRSDRDARRRRGDRGVAVGGAARRSAVGRERRHPQYVLAVAAAVRPAAAGHRVAQAARGRRGGGGAALAKGLPRQGAARHDRGAAHPAREPRRERRRGARAR

SEQ ID NO: 121835 - protein, 99 aa, Unknown
  Bacterial polypetide isolated from the Sargasso Sea
AELADKCEVQFSYSIGVAEPTSFYVKTFGTGSISDEELTDLAKAVFPLKPAGIIEHLKLKHPRYLITSAYGHFGREEDSFTWEQTGMVETLKLKLTERN

SEQ ID NO: 121836 - protein, 93 aa, Unknown
  Bacterial polypetide isolated from the Sargasso Sea
MKDGHWVFTSESVSSGHPDKLCDAISDAILDACLTVDPNAKVAVETLVKGEASRSHIVLGGEVTLANGAKVPDFEAVAREAAVAIGYTDHAIG

SEQ ID NO: 121837 - protein, 90 aa, Unknown
  Bacterial polypetide isolated from the Sargasso Sea
MNQFQKGIPDKICDQISDAILHECLKSDPNSRVACETLIKNNTVVVAGEITSNANVDYEAVARKVVKDIGYIEENLGFASASFEFQNLIY

SEQ ID NO: 121838 - protein, 53 aa, Unknown
  Bacterial polypetide isolated from the Sargasso Sea
MYYFTSESVSPGHPDKLCDHLSDTILDHVLEQDKNSRVACETFVKGKENQPGT

SEQ ID NO: 121839 - protein, 80 aa, Unknown
  Bacterial polypetide isolated from the Sargasso Sea
VSKPLSIYVKLDDNDKGKVENIKKLIDQNFDLSPRGIRELLGLNKPIYQITSAYGHFGREPSNNGEFSWEKIDKKDIFSK

SEQ ID NO: 121840 - protein, 246 aa, Unknown
  Bacterial polypetide isolated from the Sargasso Sea
EKNIAIERALEMVEQGADIIDIGGESTRPFSDSVSLKEEISRVIPVIEGICKESDVCISIDTTKSKVACEALEAGASVINDISAMEIDSLMVDVALKFNCPIVLMHMKGIPKNMQDNPQYQSLISDIKEYLLARIDFVVSKGIDRNKIIIDPGIGFGKTVENNFEIINNLDQFVKMNFPVLLGASRKSFIGVSLNLPENDRLEGSIAANIIGLQKGAKIFRVHDVVETSRAMVIANKIFNSNNIIS

SEQ ID NO: 121841 - protein, 214 aa, Unknown
  Bacterial polypetide isolated from the Sargasso Sea
HPNIVTVYDAGEEYDLAYIAMEFLEGHDLTRYIKADSLLPFPIVMGIVFKSAIALDSAHTQNVVHRDIKPANIMYESNKKQVKITDFGIARITDSSRTKTGMVLGTPSYMSPEQLSGEKVDGRSDLFSLGVMLYQMTTGTLPFKGDSMATLMYKIANEPHQNIFKLRPDLEQRTPNIAAIIDRALQKDINKRYQTGAEMAKDIQECVRQIGNKK

SEQ ID NO: 121842 - protein, 34 aa, Unknown
  Bacterial polypetide isolated from the Sargasso Sea
MKKNFLFTSESVSEEHPDKVCDRISDMVVDTYLG

SEQ ID NO: 121843 - protein, 292 aa, Unknown
  Bacterial polypetide isolated from the Sargasso Sea
TILPGQHVHSHNVTLRDFERDYAFGKDVKIPEEVEQQATFEGFLRPDGKAGTRNYIGVLTSVNCSATVAKYIGAAFDKEGETDFGNLDGVVAFTHGTGCGMNQGNGLALLRRTMAGYAAHPNLAAVLVVGLGCEVNQIPDWLKEAGLEAGPQLRTMVIQESGGTRKTVERGVSMVREMIPDFKSIQRQTVPASHLSLGLECGGSDAYSGITANPSLGAAADLLVRHGGTAILSETPEIYGAEHLLTRRAVSEKVGRKIVDLIQWWEDYTMRNKAEMNNNPSPGNKAGGLTTI

SEQ ID NO: 121844 - protein, 230 aa, Unknown
  Bacterial polypetide isolated from the Sargasso Sea
IKIFEIHLVNKIEDKDFEVHIHTNNQIIKTKKIIVACNGYLDDLLGSIRNYFMPINNYIIATEPIGETLAKKLINRNCGVIDSRFMIDYYRFSEDNRLLFGGPETITSKFVKDAKNFVAKRMYKVFPEMQKYKIEFSWGGTLAISINRLPILGYLMNQKLIYSHAYSGHGLAMSVMAGKLISEKILNISNRFDMFNQIKHLKIPGGNILRRPIYSSAIIYYRAIDFLNRL

SEQ ID NO: 121845 - protein, 177 aa, Unknown
  Bacterial polypetide isolated from the Sargasso Sea
GKNHSFSFKPSKQEVSHSEVNKKVEISTDILKAIRKGMFDVLNDKEGTAYKYRTIDQKKLIAGKTGTSQVRRITREERERGVIKNEDLPWEKRDHALFTCYAPYDNPDYALSVVVEHGGSGSKVAAPIARDIMLFQLFNGIPPIEAYPEEQRSEINERLQKIASKLNISSPNNSLSL

SEQ ID NO: 121846 - protein, 292 aa, Unknown
  Bacterial polypetide isolated from the Sargasso Sea
GSNPEKGCWEKTDSIRITRPYRILGMKPGFSCLISGLFWFILVNFCVYAQQNPTVANAPPVSIKQLKQSISENDRIEWITLRLEKNLPPNQPIQRLRMAVEGRTTLILHPLQRHLPFETTPLTQYLFFHLEMCSMAPEMNLESRFRWRDFIHSGGTLFMDTCPDSRSMEEQKAFNQSWKDWGRSIFPGSGWSPLNRKHTLSFSFYLLEKRMLLQNEGSPFSLLALDGRVILLHNQSPRWSWNTLKSSPVSAQLNPRNIEIHLRLYINLMMLLLSGDYKQDQLHLPTILLRRR

SEQ ID NO: 121847 - protein, 304 aa, Unknown
  Bacterial polypetide isolated from the Sargasso Sea
TNSGQIFAEAVSSGETNNNAIKSEDDTNNMTLINNIGGHIYNNNSSATALQQATVFIAAEDTATLTNSGTIENKAGPENYAIRIAGSGVTVTLKDSGKVIGKINVADSGHTIKLQHGAGQGYYYDIDGNGTYTLQDLDGNPVVKGSAGSVGQGGNEMIDEELGYKSLGVRSSIVRYQKSDEYSQREKGWGEITTSFLKRDGDKSTLALDNKKIGIGANIFEPISDNKTLIFSFETSLQNISKNHDIDKFSFLTGVNFDKIKISDEIYSELYFLGGASFYKSDRNILTNTTSSGLLDISDEYMSL

SEQ ID NO: 121848 - protein, 371 aa, Unknown
  Bacterial polypetide isolated from the Sargasso Sea
MAGYLVLAPCMQVMAQGSIGATALDCSFSNPEASPWKMITPLTSMTPQNAILYQRTVSLMVSFKYGTAPVAHELVSAAHWVPGAVVADGIAPTNVNGIGFKWVGVSGDDTERALQQHALPMATAKINLDRAGGGDTDSRFIRFRQYLVLDKPASQLPQEKLVVKNLPGNPTVAIYALDLPKGTATIGGTVTVPEQPTPANLCKQLKTFVGVGNVCIGSECEIHVPNRCEIQSNWIVPVTLGNFSISNFPSVNATSKPVSFDIALSQCAASAKPAISFRDKAAKPNPDKTLLQLSAPAGQTVARGFNIVMTNALTGERIAYGEPGAAAEYPMRRTGDMAVMPLRAQYIRTGGEGELAPGYAGGGAEFSFTFP

SEQ ID NO: 121849 - protein, 403 aa, Unknown
  Bacterial polypetide isolated from the Sargasso Sea
MSTSTASAPSRHPWPVFIAFLRLGLTSFGGPVAHLGYFRTEFVTRRGWLTERTYADLVGLCQFLPGPASSQVGMAIGLARAGYAGMFAAWLGFTLPSALLMTLFALGVHATGAPIEAGALHGLRIVSVAVIAQAVWGMARTLCPDARRVTLMAAAACVVLLAPAAWTQVAVIVAAGLAGLVLLPQPTRGAHDPLPLHVSPRAGVLWLALFAALLVVLPFATRTLRSDTLAVVDAFFRTGALVFGGGHVVLPLLQAAVVAPGWVGDAAFLAGYGVAQAVPGPLFTFSAFLGASLRTAPNGWLGSTIALVSIFAPSFLLVAGTAPFWEQLRRSTRMQAALAGVNAAVVGLLVAALYHPVWTDTIVAPRDLAAALVAFVALVFWRVPPWAVVIASAALGWGLGVLA

SEQ ID NO: 121850 - protein, 571 aa, Unknown
  Bacterial polypetide isolated from the Sargasso Sea
MTHVDEPPEAPADHEFPFDLAADVIARWQRLVDLMAEIVGVPAGLIMRNVGRDIQVLVASRNTGNPFYPGESAELHGSGLYCEAVIASGHTLVVPDARQSAQWRNNPDLRVNMVSYLGLPIRWPDNTPFGTICLLDCKENAYSERYIRLVEEFRDQIEMQLQLIRAQRIAERERQRAAQLAENFRRQKDLATQAVHVKSSFLAAASHDLRQPVHALSLFVGALRHVPMPADGTLLVDRIDQSVNAMDALFTAILDISRLDAGVVPVHRRPFAIGTVLERVCREVAADAHGKGLSLSYVRSTAVVDSDPVLVERIARNLLSNAVRYTDTGRIVVGCRRTRQHVRLQFIDTGRGIPADQQARVFDDYYQLRRRGDEPERGVGLGLAIVRRLAGLLDCPLTLRSEPGRGSCFELQLVRLDTVVQPGAAADEIAVDEATAAAHLVVVIDDESAIRAGMSMLLERWGYQVVTAASIDDAIACLASCEVRPSLLICDLHLHGDQNGIAAIARIRDEYNTAIPAMLITGDTTARRPGRLKHGGFVLLHKPVPSDKLRAAMARLLQAQPPGQPHRADAG

SEQ ID NO: 121851 - protein, 290 aa, Unknown
  Bacterial polypetide isolated from the Sargasso Sea
MKKQLNKIAKDTNIFLKKYINSQKYSQLMSPMKYGLFPGGKKIRSKILIDLGSLFSIDYKTLIIVGSAVECIHAYSLIHDDLPCMDDDDIRRGKPSTHIKFGESTAVLAGNSLLTLAFEILSSPKLKLNEKIKINLIKKLSECSGHLGIAGGQYLDLSYEKKKISRNKILEMEIKKTGMLFSFCCAAPAIIKKKTTKEIKFFENIGSKIGLLFQIADDLIDLKSKSKEAGKKTGKDQKKGKATLINLIGYDDSVKYCDKIIKDINKNLRKYGSKSEKINETLDYILNRKK

SEQ ID NO: 121852 - protein, 221 aa, Unknown
  Bacterial polypetide isolated from the Sargasso Sea
ECIHAYSLIHDDLPCMDDDNMRRGKPSTHIKFGESTAVLAGNSLLTLAFEILSNPKLELNEKIKINLIKKLSECSGHLGIAGGQYLDLSYERKKISKNKIIEMEIKKTGMLFSFCCAAPAIIKKKTIREIKFFENIGSKIGLLFQIADDLIDLKSNSKEAGKKTGKDQKKGKATLINLIGYDDSVKYCDKIIKDVNKNLSKYGSRSKKINETLNYILNRKK

SEQ ID NO: 121853 - protein, 253 aa, Unknown
  Bacterial polypetide isolated from the Sargasso Sea
MIKKYKVGLVIQARVSSKRFPGKVMKNILGKPMIYRIYERVKLCKKIDTIVVSIPKNKSDDMLFQFLKRSKINVFRGSELNLISRFYNTAKKYNFDYIVRLPADNPLPDYKQIDKLIKFHMKLKKNMNVFSTNLQPVKNSNYIDGIGAEIFSFKMLEKLVQNKNIRKSREHISQNFYNFEKKKVMNKKYFRVFYPIAPKSISYPNIVLDVNYKKQFNLIKKIYKNIYPKNKFFLTNHIIKFLKKHEKNLFKNK

SEQ ID NO: 121854 - protein, 208 aa, Unknown
  Bacterial polypetide isolated from the Sargasso Sea
MSFFYQKANTGNFYNWDAIAYTMAVQLDEGKSTDEAHGYTYKTLKDEVDPGLFQTLCCTGKYRQDQFDSPGNLKSMMPMYALKPGYIALIKVVKLFTGLNEYQSMKYISIFSTLIMTLLFFITFFFQKNFLQFIWIPLVFFSQFLFLAKLMTPDAITALLFLISVMFLVKNKLYTSYLLMALTLSFRPDMIVAAGLAGLLPLINKDFR

SEQ ID NO: 121855 - protein, 899 aa, Unknown
  Bacterial polypetide isolated from the Sargasso Sea
MAQTEDDTVWMQTGSGLHQWTKQDGLSEPYQAFGQHSVNNEIRTLFAQGNKVWVGGRSSLFQFDPASSQFKSIPFFDNAVSPIINVLETDQQGNLLVGTFDGIYKVSLTSGVFESFADGRQLLQGINVRSLLVDRSGLLWVGSREKGLFYGRHQPSAFSDLTQWGPAAATLAKQQLTAVKVEDNFLWLGSSDQFHQINRKTGAVLSLAMPARVNAITRSTQGELYIGSDNGLWQFDEDTQQLLQLDSGQSLQGTQWQNVRDLVSLPDGSLYLGLWQNGLMRWDPAGNHQFWLQDMAQHKVGDAVQVVQEIQGKIWVGTRYSGLFVLDPSSAQLQSLANLIPVAQALDIQCIAQGPDDTVLLCSRSGLVSLDLKNPGISGLGDSISAAKAELLGAYTDVQKNIWLLSAQGLSLKPYQQERLITFTEQDGLNNKEMIFKAFSVSKRGNLYLGTAGGLSIVHAELLWLNQHKSTTQVSGIWIDQKKLKPGIMQGYSSEIELKPGESISLELASLDYHDPKRNQFIYQLAGVDTGWQYSTGYTKVNYSQLEPGTYQFKALGSNQHALFSDKPYLLTIEVLPLWWQRGWVIAGLGLLLLLLLLGGHAYRLRHMRQINKLLQHSVQERAYNQTVLETMVEERTKALQDSSATLSLRTRQLEVSLSQLAENNRELKRLNTLKDEFISTVSHELRTPLTSIRGAVGLLAKKAVTEGSEHYEQLLQTALGNSERLSQLINDLLDLQKFESGNFSLSFATTDMKQLVLQALDSIAPYAARYQVSFQTELAECQVVADQTRIRQVVDNLLSNAIKFSASGQTVAVKLTELVGRIRFEVQDQGCGIPQNFRSRVFEKFSQADGSTSRKAEGTGLGLNICKTIISAHHGDIGFESEPDHGALFWFELPVAQA

SEQ ID NO: 121856 - protein, 36 aa, Unknown
  Bacterial polypetide isolated from the Sargasso Sea
LDLKRPIYKNTASYGHFGRENKDFSWENTDISSQIK

SEQ ID NO: 121857 - protein, 263 aa, Unknown
  Bacterial polypetide isolated from the Sargasso Sea
MIVDDELEIRKIIQEILNDEGYSTSSASSAEEARIEANNKKPDLVFLDIWMPDEDGISLLKEWSSQPETDFPVIMISGHATIETAIEATKLGAKDFIEKPVSIEKLLASAEEVLSQNKIGEDIFSHLVQNTPSFKKTLDEAGSFIKENNIFVLQGEEGLEKSAWARALFLSQYSDMGEFLKIEFSVKEPAENEELDALYKALESGNNSALYIENMHKLSEDEKSMIRQRLMISAKKSTAKIFIGVSEKEESFFMDEESFTEVN

SEQ ID NO: 121858 - protein, 415 aa, Unknown
  Bacterial polypetide isolated from the Sargasso Sea
MSSSNGDTIKIYAGVYEEPIGTSKNIHFIGEDSSNTIISWENGGVFVMGDGQASYNTLIKNLTIRDGESDTYGGMGIHDFGTVVLDRVRLVNNSTVPNESGSNNEFGINTGGGINIYNTTVTIKNSYIGSNSSRNGGGVKATNATLTIHNSIIENNVITGEGGGVIVGNTTTNITRSKIMNNTSGGNGAGVYLSGGTLNITNSVIANNTANGGHGGGIRLQRGNTTIINSTIADNIAKNSNSDAVQLYQGAVLNVINSIFWGNGSQNFGFSDQYESSTLNLDFSLVQGALTNGSLNIDVNNNGTVISQNQATIIDVDPKFKNASLGDYSISNSSPAVGMGTQSLSISGTTYNAPTADINGMQRPSPSGSNPDLGAYESLISAPGPMATAIYDGTSNDTNELDYTNSPSTLSAYWD

SEQ ID NO: 121859 - protein, 400 aa, Unknown
  Bacterial polypetide isolated from the Sargasso Sea
FVLFGGGLTGLSSALHLSNKGYSVTILEANKIGSGASGRNGGQLGIGMRKDQFYLEKKFGFEKAKIFWSVGLDAVQDVLKLIKKYEIDCAIKPGVLHVGNTNKDYKYFLDEINHLQKNYNYEQIEYFDEKAIKDEILSDRYYSGILLKDSFHLNPLKLTYGLMNACLKNGVKIYENSPVNQIIEKSNNIEVKSNLNLINTKKLIVSCNGYLDNLLGSVRNYFMPINNYIIATEPLGENFARKLIKRNVAVSDSRFMIDYFRFSEDSRLLFGGPETVTSNFVKDAKKFVSKRMIKVFPDLKDVKIDFAWGGTLAISVNRMPQFGTLMKEKLYYAHGYSGHGLAMSIMGGKLVADKILGKNDLFDLFSNIFHLKIPGGDILRRPIYSSSIIYYRLLDYISRL

SEQ ID NO: 121860 - protein, 698 aa, Unknown
  Bacterial polypetide isolated from the Sargasso Sea
QRAPSYFLRHGYSDLEHRTDSYIRLLANGGVITPALRDAALSAQVVLRHAPDPAQNTDSFVSRKAVTSMRSHLLAALGIRSFYELDRLDLQATGTLNNAVQQAVSDRLAAAATRDGAKAAGIVGFEMLRASDDPSKIAYSFTLFERRGGANLVRVQTDSVNQPFDINSGARLNLGSTAKMRTVVTYLQIVSDLHARYAPLSIAELKAVKPDPNDQLTRWALDYLMHTPDRSLQAMLDAAVERKYSASPGETFYTGGGAQTFNNFDSDDNSRILTVHRAFQHSVNLVFVRLMRDIVHYEMVQTTGPSSQWLGDPAIRKMYLTRCADQESRVYMSRFYTKYHGKTPDQQLALLLLGVRKSPPKVATVLRSVAPDESNAWFNAKMRAALKNTPAASILDDEDLGNLYEKYAIDRFNLNDRGYISSVHPLELWTLNYLRAHPDATLDQMENASRDVRLSTYSWLFKTRYHATQDRRIKRMVELRAYDAIGKSWQALGYPFATLTPSYAAAIGASGDRPAALAQLIGVIANDGSKVPTETLTQLDFAKNTPYETHFQRAAVAPQQQLSPEIAGVVRGLLRDVVLGGTAKRLAQGMTFPDGQTLEIYGKTGTGDQRFNVWAKGARLIESRKVNRSATFVFVMGDRFYGTLTAWVHEPYAARYDFTSALSVQLLKSLAPVLQPLLDNDNPPARTASITTVAVQAQ

SEQ ID NO: 121861 - protein, 271 aa, Unknown
  Bacterial polypetide isolated from the Sargasso Sea
KHQIYLISDSTGETIDRIFLAIKAQFQEFDYEDHQYSFTRTENQIQKILELAKKHKKSIILYTIVDSELANFLENETHKLNIPCFGVLGKLIENFSQIIEKTATHIPSAQYTLNDEYYKKIEAIQFTMDHDDGNSLEDIEKSDIILLGVSRTSKTPTAIYLANRGFKTSNIPMINENSVPEFLKKNPEKKCVIGLTLEPTRLTEVRKNRMSSLKENHSIDYTNQEKVELEIQNARKTFKKYQWPIVDVTRKSVEETAASIIKIYEIKRENG

SEQ ID NO: 121862 - protein, 52 aa, Unknown
  Bacterial polypetide isolated from the Sargasso Sea
RADLANWIKENVDLSPKGIIDKFSLFELDLTETTLYGHFGRDNLPYERLDLF

SEQ ID NO: 121863 - protein, 96 aa, Unknown
  Bacterial polypetide isolated from the Sargasso Sea
MSERLFTSESVSEGHPDKVCDQISDSILDAAIEQDKSSRVACEVLVKDNLVVVAGEITTNAEIDYESLAKSVISDIGYNDSSMQFNSKNCSVVNAI

SEQ ID NO: 121864 - protein, 128 aa, Unknown
  Bacterial polypetide isolated from the Sargasso Sea
MNNEYLFTSESVSPGHPDKLSDQLSDAVLDYVFDTDKNARVACEVLTKGKKDSPGSIVVAGEITCTNPLDFDQKLREVICDIGYKSNELGFNGNECEIVRLINQQSPDIKMGVDRKDKESQGAGDQGL

SEQ ID NO: 121865 - protein, 91 aa, Unknown
  Bacterial polypetide isolated from the Sargasso Sea
KCLIQLAYAIGVSKPLSIYVDLFDNDEEKNKHVEKLISKNFDLSPRGIREMLGLNKPIYEKSAAYGHFGREPEEDGSFSWEKTDKKSIFSK

SEQ ID NO: 121866 - protein, 73 aa, Unknown
  Bacterial polypetide isolated from the Sargasso Sea
MSDLKNYLFTSESVSEGHPDKVSDRISDMVVDSYLSGDPFSRVACETLTTTNKVVLAGEVRGPEISKDEIIEK

SEQ ID NO: 121867 - protein, 74 aa, Unknown
  Bacterial polypetide isolated from the Sargasso Sea
IYVDLFDNDEEKNLHVEKLIKENFDLSPRGIREMLSLNKPIYEKTSAYGHFGRTPENDGSFSWEKTDKSGVFSK

SEQ ID NO: 121868 - protein, 41 aa, Unknown
  Bacterial polypetide isolated from the Sargasso Sea
MKKDYLFTSESVSEGHPDKVCDRISDMVVDTYLAAEPQSRV

SEQ ID NO: 121869 - protein, 67 aa, Unknown
  Bacterial polypetide isolated from the Sargasso Sea
MSNLKNYVFTSESVSEGHPDKVSDRISDMVVDSYLSNDPFSRVACETLTTTNKVVLAGEVRGPEIKK

SEQ ID NO: 121870 - protein, 40 aa, Unknown
  Bacterial polypetide isolated from the Sargasso Sea
MKRDYIFTSESVSEGHPDKVCDRISDMVVDSYLSTRDPQT

SEQ ID NO: 121871 - protein, 39 aa, Unknown
  Bacterial polypetide isolated from the Sargasso Sea
GLNKAIYEKTAAYGHFGREPDSDGSFSWEKTDKKGVFSK

SEQ ID NO: 121872 - protein, 45 aa, Unknown
  Bacterial polypetide isolated from the Sargasso Sea
MKKNFLFTSESVSEGHPDKVCDRISDMVVDSYLGSEPQSRVACET

SEQ ID NO: 121873 - protein, 58 aa, Unknown
  Bacterial polypetide isolated from the Sargasso Sea
ETEIVKKINDNFDLSPGGLIQDLKLRNPIYKQTSAYGHFGRNDLDLPWEKLNKVTKLK

SEQ ID NO: 121874 - protein, 41 aa, Unknown
  Bacterial polypetide isolated from the Sargasso Sea
MKNNSYLFTSESVSEGHPDKVCDKISDMIVDSYLSLDPYSR

SEQ ID NO: 121875 - protein, 41 aa, Unknown
  Bacterial polypetide isolated from the Sargasso Sea
MSNLKNYLFTSESVSEGHPDKVSDRISDMVVDSYISSDPFS

SEQ ID NO: 121876 - protein, 104 aa, Unknown
  Bacterial polypetide isolated from the Sargasso Sea
MTSESVTEGHPDKLCDQISDAVIDAVMTDDPMGRVACETAMTNGLVMVIGEITTKANLNIPEIVRETLRKAGYTNSDYGIDADSCGVSVSVGKQSTDIDAGVSN

SEQ ID NO: 121877 - protein, 46 aa, Unknown
  Bacterial polypetide isolated from the Sargasso Sea
MSNLKNYLFTSESVSEGHPDKVSDRISDMVVDSYISGDPFSRVACE

SEQ ID NO: 121878 - protein, 67 aa, Unknown
  Bacterial polypetide isolated from the Sargasso Sea
MKKNYLFTSESVSEGHPDKVCDRISDMVVDTYLGAEPQSRVACETLTTTNKVVLAGEVRGPEIKKDD

SEQ ID NO: 121879 - protein, 77 aa, Unknown
  Bacterial polypetide isolated from the Sargasso Sea
LSLYVNTDNTGKISDEELSKILRREVDLTPSGIRSCLGLNNSIYKPSAAYGHFGRVPDEEIKGSFSWEKTDLVSRIS

SEQ ID NO: 121880 - protein, 76 aa, Unknown
  Bacterial polypetide isolated from the Sargasso Sea
LSIYIDLFDNDLEKNKFVVEKINDNFDLSPRGIREMLNLNKPIYEKTSAYGHFGRMPEDNGSFSWEKTDKIAIFSK

SEQ ID NO: 121881 - protein, 42 aa, Unknown
  Bacterial polypetide isolated from the Sargasso Sea
MKRSYVFTSESVSEGHPDKVCDRISDMVVDSYLSKDPNSRVA

SEQ ID NO: 121882 - protein, 65 aa, Unknown
  Bacterial polypetide isolated from the Sargasso Sea
MSNLKNYLFTSESVSEGHPDKVSDRISDMVVDSYLSNDPFSRVACETLTTTNKVVLAGEVRGPEI

SEQ ID NO: 121883 - protein, 103 aa, Unknown
  Bacterial polypetide isolated from the Sargasso Sea
MLQNVVASKIADKCLIQLAYAIGVSKPLSIYVDLFDGDEKKSKHVEELIKKNFDLSPRGIREMLSLNKPIYECTSAYGHFGRNPGSDGSFSWEKTNKTDVFKK

SEQ ID NO: 121884 - protein, 35 aa, Unknown
  Bacterial polypetide isolated from the Sargasso Sea
MNNLKNYLFTSESVSEGHPDKVCDRISDMVVDSYL

SEQ ID NO: 121885 - protein, 56 aa, Unknown
  Bacterial polypetide isolated from the Sargasso Sea
MKKDYLFTSESVSEGHPDKVCDRISDMVVDTYLGLEPQSRVACETLTNYNKGCIGR

SEQ ID NO: 121886 - protein, 63 aa, Unknown
  Bacterial polypetide isolated from the Sargasso Sea
MSNLKNYLFTSESVSEGHPDKVSDRISDMVVDNYISGDPFSRVACETLTTTNKVVLAGEVRGP

SEQ ID NO: 121887 - protein, 40 aa, Unknown
  Bacterial polypetide isolated from the Sargasso Sea
LKLNNPIYEITSAYGHFGRKPTNKGEFTWEKTDKTDLFKL

SEQ ID NO: 121888 - protein, 39 aa, Unknown
  Bacterial polypetide isolated from the Sargasso Sea
MSNLKNYLFTSESVSEGHPDKVSDRISDMVVDSFISGDP

SEQ ID NO: 121889 - protein, 62 aa, Unknown
  Bacterial polypetide isolated from the Sargasso Sea
IIPDVMDLRPRGIRETLGLNAPIYASTAAYGHFGRKAGEAGSGSFPWEALDLVDTLKSAAGK

SEQ ID NO: 121890 - protein, 68 aa, Unknown
  Bacterial polypetide isolated from the Sargasso Sea
MSNIKNYLFTSESVSEGHPDKVSDRISDMVVDSYLTNDPFSRVACETLTTTNKVVLASEVRGPEIKKE

SEQ ID NO: 121891 - protein, 32 aa, Unknown
  Bacterial polypetide isolated from the Sargasso Sea
MTYLFTSESVSEGHPDKLCDKISDSILDACLK

SEQ ID NO: 121892 - protein, 104 aa, Unknown
  Bacterial polypetide isolated from the Sargasso Sea
ICKDPFSRVACETLTTTNKVVLAGETRGPEIKKNHPIEKVRDCIKDIGYEQKGFHWKNCDIDVHLHYQSSDIAMGVDSKGNKDEGAGDQGIMFGYACDETEVLM

SEQ ID NO: 121893 - protein, 94 aa, Unknown
  Bacterial polypetide isolated from the Sargasso Sea
ISEKCLIQLAYAIGVSKPLSIYVDLFDNDDEKNKHVEKLIRENFDLSPRGIREMLGLNKPIYEKTSAYGHFGRIPDDKGSFSWEKTDKSNVFIK

SEQ ID NO: 121894 - protein, 38 aa, Unknown
  Bacterial polypetide isolated from the Sargasso Sea
IGGPDGDTGLTGRKIIVDTYGGAAHMEEEHSLEKIQQK

SEQ ID NO: 121895 - protein, 97 aa, Unknown
  Bacterial polypetide isolated from the Sargasso Sea
AAGVSEKCLIHLAYAIGVSKPLSIFIKLASGDDGKVEKVKKLIEDNFNLSPRGIREMLNLNNPIYEVTSSYGHFGRKPNIKGQFTWEKTDKTDIFKL

SEQ ID NO: 121896 - protein, 33 aa, Unknown
  Bacterial polypetide isolated from the Sargasso Sea
YEKTAAYGHFGRTPESDGSFSWEKTDKSDVFSK

SEQ ID NO: 121897 - protein, 29 aa, Unknown
  Bacterial polypetide isolated from the Sargasso Sea
MAEMLFTSESVTEGHPDKIADQISDSVLD

SEQ ID NO: 121898 - protein, 122 aa, Unknown
  Bacterial polypetide isolated from the Sargasso Sea
MTKNYLFTSESVTEGHPDKVCDMISDSILDEYLKGDPDSRVAVETITTTDFVGVAGEVTSKSSFDIENVIRKTITEIGYDNPDLKFDSHSCEVMIKLDPQSPHISQGVTANDEKEQGAEIRD

SEQ ID NO: 121899 - protein, 108 aa, Unknown
  Bacterial polypetide isolated from the Sargasso Sea
MSSERLLFTSESVTAGHPDKLCDAISDAILDACLSQDPNARVACETLVKGTENNSKIVLAGEITCAQPEIDYATVARNAAKSIGYTDKAFGMDAATCEVEVMITTQSP

SEQ ID NO: 121900 - protein, 67 aa, Unknown
  Bacterial polypetide isolated from the Sargasso Sea
KVDETKIENLIPELFDLSPRGIREHLNLTNPIYVPTSAYGHFGRKPTTEGHFTWEKTDLVDSFKSAF

SEQ ID NO: 121901 - protein, 51 aa, Unknown
  Bacterial polypetide isolated from the Sargasso Sea
FDLSPRGIREMLSLNRPIYQSTSAYGHFGRKPSSDGSFSWEKTDKTTIFKK

SEQ ID NO: 121902 - protein, 66 aa, Unknown
  Bacterial polypetide isolated from the Sargasso Sea
MSNLKNFLFTSESVSEGHPDKVSDRISDMVVDSYLSGDPFSRVACETLTTTNKVVLAGEVRGPEIK

SEQ ID NO: 121903 - protein, 87 aa, Unknown
  Bacterial polypetide isolated from the Sargasso Sea
KSQITIEYKDGNPSSVKSVVISTQHSPEVNQAQVRDLVKPYIERSIPKELLSSLDENEIYVNPTGNFVIGGPDGDSGLTGRKIIVDT

SEQ ID NO: 121904 - protein, 52 aa, Unknown
  Bacterial polypetide isolated from the Sargasso Sea
NFDLSPRGIREMLGLNKPIYEKTAAYGHFGRIPDEQGSFSWEKTDKSDLFNR

SEQ ID NO: 121905 - protein, 27 aa, Unknown
  Bacterial polypetide isolated from the Sargasso Sea
MNKFIFTSESVSEGHPDKICDQISDSV

SEQ ID NO: 121906 - protein, 30 aa, Unknown
  Bacterial polypetide isolated from the Sargasso Sea
MKSNNYLFTSESVSEGHPDKVCDRISDMVV

SEQ ID NO: 121907 - protein, 64 aa, Unknown
  Bacterial polypetide isolated from the Sargasso Sea
ETGNLPEDEISQIVRDNFDLRPKNLINLLDLKRPIYKNTASYGHFGRENKDFSWENTDISSQIK

SEQ ID NO: 121908 - protein, 58 aa, Unknown
  Bacterial polypetide isolated from the Sargasso Sea
MKSKNYLFTSESVSEGHPDKVCDRISDMVVDTYISKDPFSRVACETLTTTNKVVLAGE

SEQ ID NO: 121909 - protein, 81 aa, Unknown
  Bacterial polypetide isolated from the Sargasso Sea
EPLSVYVNTHDTGKLSELEIINLIKTNFDLTPRGIREMLNLSNINYLPTAAYGHFGRESENNVSFTWEKTNKAVHLTGPSN

SEQ ID NO: 121910 - protein, 74 aa, Unknown
  Bacterial polypetide isolated from the Sargasso Sea
YVTQIILGKISDEELSKILRREVDLTPSGIRSCLGLNNSIYKPSAAYGHFGRVPDEEVKGSFSWEKTDLVSKIS

SEQ ID NO: 121911 - protein, 56 aa, Unknown
  Bacterial polypetide isolated from the Sargasso Sea
KIKENFDLSPRGIREMLNLNKPIYEKTAAYGHFGRTPQENGSFSWEKTDKINVFSK

SEQ ID NO: 121912 - protein, 70 aa, Unknown
  Bacterial polypetide isolated from the Sargasso Sea
FGTEKISEEKIVHLVNENFDLTPYGIMNMLDLLQPIYEKSAAYGHFGREDELFPWEKTDRSDALKEQSGL

SEQ ID NO: 121913 - protein, 114 aa, Unknown
  Bacterial polypetide isolated from the Sargasso Sea
SAAYVARYLAKNIVHSGISEKCLIQLSYAIGISEPLSIFVDLYGNNKVETSKVEKFIKDRFDLSPRGIINMLGLSNPIFSETSSYGHFGREPTDNGCFTWENLNISNEFKNEFL

SEQ ID NO: 121914 - protein, 47 aa, Unknown
  Bacterial polypetide isolated from the Sargasso Sea
MKDFLFTSESVSEGHPDKVSDRISHMVVDTYLSAEPVQSKVGRETLT

SEQ ID NO: 121915 - protein, 119 aa, Unknown
  Bacterial polypetide isolated from the Sargasso Sea
SVPVGGGAFSGKDPSKVDRSAAYAARHLAKNIVAHELAEECLVRVSYAIGKAEPYELTIETFDTLKVDEKKLNDFVRAFDMKPGAIIERLNLTSVNYKTDTLFSHFGHSNRNWEKIENI

SEQ ID NO: 121916 - protein, 44 aa, Unknown
  Bacterial polypetide isolated from the Sargasso Sea
IREMLKLNNPIYEVTSAYGHFGRKPSNKGQFTWEKTDKSDLFKL

SEQ ID NO: 121917 - protein, 38 aa, Unknown
  Bacterial polypetide isolated from the Sargasso Sea
MKKNFLFTSESVSEGHPDKVCDRISDMVVDSFLTSEPE

SEQ ID NO: 121918 - protein, 93 aa, Unknown
  Bacterial polypetide isolated from the Sargasso Sea
SNKCLIQLAYAIGVSKPLSIFIKLDEKDDSKIEKIKKIIEENFDLSPRGIREMLKLNNPIYEVTSSYGHFGRKPTNKGEFSWEKTDKIDLFKL

SEQ ID NO: 121919 - protein, 101 aa, Unknown
  Bacterial polypetide isolated from the Sargasso Sea
MSEKLQYDFTSESVSEGHPDKVCDKISDAILDELIRIDHQARVGCEVFATTNQVVVGGEVGLKNTMKIEDLSELVTETVRSTVKHIGYEQKRVSLERLKNF

SEQ ID NO: 121920 - protein, 45 aa, Unknown
  Bacterial polypetide isolated from the Sargasso Sea
HLKLNNPIYVPTSAYGHFGRIPDESVVGSFSWEKTDLVDDILKDI

SEQ ID NO: 121921 - protein, 93 aa, Unknown
  Bacterial polypetide isolated from the Sargasso Sea
MSRNDYFFTSESVSEGHPDKICDQISDAVVDAYLKEDPESRVGVETLTTTNKIVLAGEVRGPKKVLSEIEDIARNTVKKIGYEQVGFHGKMQM

SEQ ID NO: 121922 - protein, 37 aa, Unknown
  Bacterial polypetide isolated from the Sargasso Sea
MSKLKNYLFTSESVSEGHPDKVSDRISDMVVDTYLSN

SEQ ID NO: 121923 - protein, 283 aa, Unknown
  Bacterial polypetide isolated from the Sargasso Sea
YSEQDYEETLYQLKSKGFSDSQIARNTRTSIDKIRKTRIKENILPSYKLVDTCSAEFEAKTPYCYSTFDHENEIEPIQGKKVIILGGGPNRIGQGIEFDYCCVQAVFGLKELGYKTIMINCNPETVSTDFDLVDRLYFEPVTYEDVMNIIDFEKPEGVLVQFGGQTPLKISNELSNSGAPIIGTSPVNIDVAEDREKFGKILKNLNIACPTFGTGKSLDEVVAVADNIGYPVLARPSYVLGGRAMEIVYSQDQLIDYVSRSADVTKGHPILIDQFLENAFEFD

SEQ ID NO: 121924 - protein, 107 aa, Unknown
  Bacterial polypetide isolated from the Sargasso Sea
KVDRSAAYALRQVAKSLVHAGFCSYCEVQSSYAIGVVEPTSIFINTFESEQKPIEEIQKIVSESFDLTPAGIIENLNLLEPIYQKTASYGHFGREDQGFSWEDVKDL

SEQ ID NO: 121925 - protein, 41 aa, Unknown
  Bacterial polypetide isolated from the Sargasso Sea
MTKNYLFTSESVTEGHPDKVCDMISDSILDEYLKGDPLIPR

SEQ ID NO: 121926 - protein, 75 aa, Unknown
  Bacterial polypetide isolated from the Sargasso Sea
MAEPAQKKAKMERTFLFSSESVNEGHPDKLCDQVSDAVLDTCLTEDPKSKVACETATKDNMVMVAGHRHSANGRC

SEQ ID NO: 121927 - protein, 63 aa, Unknown
  Bacterial polypetide isolated from the Sargasso Sea
MNNLKNYLFTSESVSEGHPDKVSDRISDMVVDSFITADPYSRVACETLTTTNKVVLAGEVRGP

SEQ ID NO: 121928 - protein, 59 aa, Unknown
  Bacterial polypetide isolated from the Sargasso Sea
CRKLINENFDLSPRGIREMLSLNKPIYQKTAAYGHFGRTPESDGSFSWEKTDKSDVFTK

SEQ ID NO: 121929 - protein, 68 aa, Unknown
  Bacterial polypetide isolated from the Sargasso Sea
SELTQLVQDQFDLRPSAIIQAFDLQNLPSIRGGRFYRDTAAYGHFGRTDILLPWEDVSQKAKELSLLI

SEQ ID NO: 121930 - protein, 57 aa, Unknown
  Bacterial polypetide isolated from the Sargasso Sea
MKKDYLFTSESVSEGHPDKVCDRISDMVVDTYLALEPQSRVACETLTTTNKVVLAGK

SEQ ID NO: 121931 - protein, 51 aa, Unknown
  Bacterial polypetide isolated from the Sargasso Sea
MTEKNYLFTSESVSEGHPDKVCDKISDMVVDSYLSKDPFSRVACETLTTTN

SEQ ID NO: 121932 - protein, 31 aa, Unknown
  Bacterial polypetide isolated from the Sargasso Sea
YGHFGRRDLDLPWENVEEKAAKLVEASKVFL

SEQ ID NO: 121933 - protein, 57 aa, Unknown
  Bacterial polypetide isolated from the Sargasso Sea
KLIRENFDLSPRGIREMLSLNKPIYQKTAAYGHFGREPESDGSFSWEKTDKSNIFNN

SEQ ID NO: 121934 - protein, 52 aa, Unknown
  Bacterial polypetide isolated from the Sargasso Sea
MSNLKNFFFTSESVSEGHPDKVSDRISDMVVDSYLSGDPFSRVACETLTTTN

SEQ ID NO: 121935 - protein, 46 aa, Unknown
  Bacterial polypetide isolated from the Sargasso Sea
MKKNNYLFTSESVSEGHPDKVCDRISDMVVDSYLSKDPFSRVGCET

SEQ ID NO: 121936 - protein, 45 aa, Unknown
  Bacterial polypetide isolated from the Sargasso Sea
MKNNKYLFTSESVSEGHPDKVCDRISDMVVDLYLSQDPVSRVACE

SEQ ID NO: 121937 - protein, 63 aa, Unknown
  Bacterial polypetide isolated from the Sargasso Sea
KNKFVEEKIKDNFDLSPRGIREMLNLNKPIYEKTAAYGHFGRAPESDGAFSWEKTDKTSVFLK

SEQ ID NO: 121938 - protein, 53 aa, Unknown
  Bacterial polypetide isolated from the Sargasso Sea
NNFDLSPRGIREMLNLNRPIYESTAAYGHFGRKPREDGSFSWEKTDKISIFKK

SEQ ID NO: 121939 - protein, 26 aa, Unknown
  Bacterial polypetide isolated from the Sargasso Sea
MKKNFLFTSESVSEGHPDKVCDRISD

SEQ ID NO: 121940 - protein, 41 aa, Unknown
  Bacterial polypetide isolated from the Sargasso Sea
MSNLKNYLFTSESVSEGHPDKVSDRISDMVVDSFISGDPYS

SEQ ID NO: 121941 - protein, 38 aa, Unknown
  Bacterial polypetide isolated from the Sargasso Sea
LNKPIYEKSAAYGHFGRDPGSDGSFSWEKTDKASVFQK

SEQ ID NO: 121942 - protein, 66 aa, Unknown
  Bacterial polypetide isolated from the Sargasso Sea
MTYLFTSESVSEGHPDKLCDRISDSILDACLTMDSGARVAVETMVKGMDEESHIIVGGEVTISGED

SEQ ID NO: 121943 - protein, 93 aa, Unknown
  Bacterial polypetide isolated from the Sargasso Sea
CRQCLIQLAYAIGVSKPLSIYVDLFDNDLDKNKFVVEKIKENFDLSPRGIREMLNLNKPIYEKTSAYGHFGRVPEENGSFSWEKTDKINVFSK

SEQ ID NO: 121944 - protein, 80 aa, Unknown
  Bacterial polypetide isolated from the Sargasso Sea
MKKNFLFTSESVSEGHPDKVCDRISDMVVDSYLGAEPQSRVACETLTTTNKVVLAGEVRGPEIKKDDLIQKVRECIKDIG

SEQ ID NO: 121945 - protein, 99 aa, Unknown
  Bacterial polypetide isolated from the Sargasso Sea
TKCEIQLAYAIGVKEPVSVRVDTFGTNRYAEEIIEKAVINTFDMTPYGITKSLNLLKPVYETTAAFGHFGRELSEFSWEKTDKANELKKLCATQTQHDG

SEQ ID NO: 121946 - protein, 225 aa, Unknown
  Bacterial polypetide isolated from the Sargasso Sea
VLCAARVLRSNEFRSAFDAAGADFKIMGHRLGAHFGLTVALALVDRDVGSIEDYFTLKGRLAAYLAGCLPTACHIGINTLDDPATLDESGIYLTVTGLSAEHGDDGEVGRGNRVNGLITPYRPMSLEAAAGKNPAAHVGKLYNVLAHRLAASIHADIEGVDEVTVRLLSAIGHPVDQPQLVAIDLAAAGGFSAARQRQVRELTAQHLAALPALIRELATGAIAVF

SEQ ID NO: 121947 - protein, 105 aa, Unknown
  Bacterial polypetide isolated from the Sargasso Sea
IARYISKNIVASGVADKCTLQLAYAIGVSDPLSIYIDTHGTSKISDDELIKKIESNIDLTPRGIRDHLNLHKPIYKKSAAYGHFGREPEDDGSFSWEKIDISNKF

SEQ ID NO: 121948 - protein, 67 aa, Unknown
  Bacterial polypetide isolated from the Sargasso Sea
MKKNYLFTSESVSEGHPDKVCDRISDMVVDTYLGAEPQSRVACETLTTTNKVVLAGEVRGPEIKKMI

SEQ ID NO: 121949 - protein, 51 aa, Unknown
  Bacterial polypetide isolated from the Sargasso Sea
EEEFDLRPKSLINMLDLKRPIYFPTAAYGHFGRSDVDLTWERTDKADKISQ

SEQ ID NO: 121950 - protein, 34 aa, Unknown
  Bacterial polypetide isolated from the Sargasso Sea
MSKFLFTSESVTEGHPDKACDAISDAILDDILSK

SEQ ID NO: 121951 - protein, 44 aa, Unknown
  Bacterial polypetide isolated from the Sargasso Sea
IREMLALNKPIYERTAAYGHFGRKPGSDGSFSWEKTDKIGVFKK

SEQ ID NO: 121952 - protein, 84 aa, Unknown
  Bacterial polypetide isolated from the Sargasso Sea
YAIGVSKPLSIYVDLFFFDEEKNKHVEKLINENFDLSPRGIREMLGLNKPIYEKSAAYGHFGRDPESNGAFSWEKTDKAAVFNK

SEQ ID NO: 121953 - protein, 40 aa, Unknown
  Bacterial polypetide isolated from the Sargasso Sea
MKKNFLFTSESVSEGHPDKVCDRISDMVVDSFLASEPQAR

SEQ ID NO: 121954 - protein, 102 aa, Unknown
  Bacterial polypetide isolated from the Sargasso Sea
AKNVVASKIADKCLIQLAYAIGVSKPLSIYVDLFDNDEEKNRHVEKLINENFDLSPRGIREMLGLNKPIYEKTSAYGHFGREPEQDGSFSWEKTDKSDIFSK

SEQ ID NO: 121955 - protein, 73 aa, Unknown
  Bacterial polypetide isolated from the Sargasso Sea
MYYFTSESVSPGHPDKLCDHLSDAILDHVLSQDKESRVACETFVKGKSDDAGTVVVGGEITTQANLDIDELIR

SEQ ID NO: 121956 - protein, 91 aa, Unknown
  Bacterial polypetide isolated from the Sargasso Sea
MWHPGVSQNATIQLSYAIGVKEPVSLYVYCDGKVRNDISEWIYKNIDLTPLGIIRKFNLFKLDLTETTNYGHFGKNHLAWENTDIANQLNL

SEQ ID NO: 121957 - protein, 106 aa, Unknown
  Bacterial polypetide isolated from the Sargasso Sea
SRYLAKNIVASKITDKCLIQLAYAIGVSKPLSIYVDLFDNNEEKNKHVEKLINENFDLSPRGIREMLGLNKPIYEKTAAYGHFGRDPDSNGGFSWENTDKAYIFSK

SEQ ID NO: 121958 - protein, 35 aa, Unknown
  Bacterial polypetide isolated from the Sargasso Sea
MENNKYLFTSESVSEGHPDKVCDRISDMVVDSYLS

SEQ ID NO: 121959 - protein, 475 aa, Unknown
  Bacterial polypetide isolated from the Sargasso Sea
LGVSFTYARHEHCAVSMAMAYARVTGQPSLATVTCGPGLTQVMTGLSAAVRARIPLVLFVGESPLRASWYNQEIDQAPFVTACGAEYVRILHKPRVTRQIQDAFSRTQMSGTPVVIGMPFDLQESEWGNLNFTFEVASDFVPSAGKVFPDPGVVDAVTALVAQAKRPVLIGGRGAVLADAGPSCIRLADKIGAVLLTSLPARGLFHRSIHSLNVVGGFASDTAREACLESDLVIAVGTSLASHSADAGRLYPNAKILHIDTHPIIYQQGRVAAHHHLCADAKIGVDAILNALGDIKGCSSGSHEWRDELAAQQKAAEYPDALPFQVAPDVIDPRQMIKALDQKLPKDWFMVNSSGHCSYYAAHMTGRSADAFLTIREFGAIGNGLSYAIGVAAARSETQVVLIDGDGGFLMHAQELETIKRHGIKLLIIVMNDAAYGSEIHKLRVDGHDETGAAFGQTDLASVARGFGLGGVSFT

SEQ ID NO: 121960 - protein, 53 aa, Unknown
  Bacterial polypetide isolated from the Sargasso Sea
MKNYFFTSESVTEGHPDKVADLISDNVANYLINQNENHRAAIETMVSSNMVTI

SEQ ID NO: 121961 - protein, 44 aa, Unknown
  Bacterial polypetide isolated from the Sargasso Sea
MSYLFTSESVSEGHPDKVSDQISDGILDNFLAFDPKVKLLVKLL

SEQ ID NO: 121962 - protein, 84 aa, Unknown
  Bacterial polypetide isolated from the Sargasso Sea
MQLWVSKPLSIYVDLFDNDDEKNKHVEKLISQNFDLSPRGIREMLGLNKPIYEKTAAYGHFGRIPEDNGSFSWEKTDKSDIFSK

SEQ ID NO: 121963 - protein, 55 aa, Unknown
  Bacterial polypetide isolated from the Sargasso Sea
AFSGKDPTKVDRSAAYASRYLAKNVVASKISDKCLIQLAYAIVGIKTFIYLCRFI

SEQ ID NO: 121964 - protein, 84 aa, Unknown
  Bacterial polypetide isolated from the Sargasso Sea
TLLGVSKPLSIYVDLFDGDEEKSKHVEKLINDNFDLSPRGIREMLSLNKPIYECTSAYGHFGRKPGSNGEFSWEKTDKTAVFKK

SEQ ID NO: 121965 - protein, 394 aa, Unknown
  Bacterial polypetide isolated from the Sargasso Sea
MPSTANIVVCVRRAALHSDADTEMCEHKGVGHPDTLCDNAVEAAARALSLAYLDEYGAVQHFNLDKALLIGGLSAPKFRGGRLLRPMRLIVSGPVAELASQSAEAIIQEAIYAHLKATLDVDSSMIAVEPAVRASAPSLRRVNGPAAMPLANDTSFGVGYAPLSRLEQQVKAVADILNSDGLRSAFPAIGRDYKVMGHRVGDRIALTLAAAFVDRWVGDVADYFAVKARVAQRVGERLGPACTLRINTLDDPGAHDQSGLYLTVTGLSAEQGDDGEVGRGNRVNGLITPYRPMSLEAAAGKNPAAHVGKLYNVLAHQLAQRILNDVDGVVEVTVRLLSAIGQPIDQPQLAAVDVCAPDGLSPAQRRGIDELVEQGLSELPALTRQLVNAEIRIC

SEQ ID NO: 121966 - protein, 259 aa, Unknown
  Bacterial polypetide isolated from the Sargasso Sea
MYKTAETVSPGHPDKIADLISDYVLTEALSNNSKSRVAVETFLTGTTYGGLVVVGGEISDIAKIDDKGIEKIVKDALAKTIKTSFEDFQLDSLKIQNELTPQSEEIRSAVEDDEDLGAGDQGIMVGYATNETESFMPPTFDISRNIQMALWEIQNNDEKLDLDSKVQVTTGGEETKVVISTQHKKDIDIDELRINLEDMITKYVDGKFQFHLNPSGSFVKGGPAGDTGLTGRKIVVDAYGPTVPVGWWCIFLGKTHQKL

SEQ ID NO: 121967 - protein, 99 aa, Unknown
  Bacterial polypetide isolated from the Sargasso Sea
YCCFQIADKCLIQLAYAIGVSKPLSIYVDLFDNDEEKNRHVEKLIKENFDLSPRGIREMLGLNKPIYQKSAAYGHFGRDPESDGSFSWEKTDKSQIFNK

SEQ ID NO: 121968 - protein, 76 aa, Unknown
  Bacterial polypetide isolated from the Sargasso Sea
MSNLKNFLFTSESVSEGHPDKVSDRISDMVVDSYLSGDPFSRVACETLTTTNKVVLAGEVRGPEIKKNDLIEKVRH

SEQ ID NO: 121969 - protein, 51 aa, Unknown
  Bacterial polypetide isolated from the Sargasso Sea
MKKDFLFTSESVSEGHPDKVCDRISDMVVDTYLTKEPQSRVACETLTTTNK

SEQ ID NO: 121970 - protein, 94 aa, Unknown
  Bacterial polypetide isolated from the Sargasso Sea
MSYIFTSESVSAGHPDKVCDQISDAVLDAYLAEDPDSRVACETMIKNNMVYIAGEITSLGSPNLEPIVRQTINDIGYNTDEYGFNGDTCEFTNL

SEQ ID NO: 121971 - protein, 63 aa, Unknown
  Bacterial polypetide isolated from the Sargasso Sea
QKIEKSVQDLFDLSPRGIREHLKLTNAIYVPTSAYGHFGREPTDKGHFTWEKTDLVDSLKSIL

SEQ ID NO: 121972 - protein, 81 aa, Unknown
  Bacterial polypetide isolated from the Sargasso Sea
RRFKPLSIFIKLAEGDGSKEEKIKKIVQDNFNLSPRGIREMLKLNNPIYEVTSAYGHFGRKPTNNGEFTWEKTDKADLFRL

SEQ ID NO: 121973 - protein, 75 aa, Unknown
  Bacterial polypetide isolated from the Sargasso Sea
SIYVDLFDNNLDKNKFVVEKIKENFDLSPRGIREMLNLNKPIYQKTAAYGHFGRTPEENGSFSWEKTDKTNVFSK

SEQ ID NO: 121974 - protein, 37 aa, Unknown
  Bacterial polypetide isolated from the Sargasso Sea
QPIYEKSAAYGHFGREDEAFPWEKTDRSDALKEQSGL

SEQ ID NO: 121975 - protein, 39 aa, Unknown
  Bacterial polypetide isolated from the Sargasso Sea
GLNKPIYEKTAAYGHFGRIPDDKGSFSWKKTDKSDVFGS

SEQ ID NO: 121976 - protein, 84 aa, Unknown
  Bacterial polypetide isolated from the Sargasso Sea
MLFGVSKPLSIFIKLDEDNEDKVVNIKKIIDQNFDLSPRGIREMLKLNNPIYEITSAYGHFGRKSSNKGEFTWEKTDKAHLFKL

SEQ ID NO: 121977 - protein, 52 aa, Unknown
  Bacterial polypetide isolated from the Sargasso Sea
MSRSYLFTSESVSEGHPDKVCDRISDMVVDTYLSSGDPQTRVACETLTTTNK

SEQ ID NO: 121978 - protein, 60 aa, Unknown
  Bacterial polypetide isolated from the Sargasso Sea
HVEKLIKDNFDLSPRGIREMLDLNKPIYECTSAYGHFGRKPGSNGSFSWEKTDKTGVFKK

SEQ ID NO: 121979 - protein, 76 aa, Unknown
  Bacterial polypetide isolated from the Sargasso Sea
LSIFIKLSDGDEDKVSAVKKIIDKNFDLSPRGIREMLKLNNPIYEVTSAYGHFGRKPSNAGEFTWEKTDKSDLFKL

SEQ ID NO: 121980 - protein, 52 aa, Unknown
  Bacterial polypetide isolated from the Sargasso Sea
NFDLSPRGIREMLGLNKPIYEKTAAYGHFGRIPEKDGSFSWEKTDKSGVFVN

SEQ ID NO: 121981 - protein, 86 aa, Unknown
  Bacterial polypetide isolated from the Sargasso Sea
MCDYCEVQSSYAIGVVEPTSIFINTFESEKKPIEEIQAIVDESFDLTPAGIINNLNLLEPIYLKTASYGHFGREDQGFSWEDTKDL

SEQ ID NO: 121982 - protein, 198 aa, Unknown
  Bacterial polypetide isolated from the Sargasso Sea
MKKNFLFTSESVSEGHPDKVCDRISDMVVDTYLGMEPQARVACETLTTTNKVVLAGETRGPNIKKEELISKVRDCIKDIGYDQDGFSWKDSTKIETHLHSQSADIAMGVDSSGNKDEGAGDQGIMFGYACNETDVLMPAPIHYSHRILRLMAEDRKSGKLKGIEPDSKSQITIEYKDGVPNAVKSVVISTQHSKDVDL

SEQ ID NO: 121983 - protein, 235 aa, Unknown
  Bacterial polypetide isolated from the Sargasso Sea
LKIENLGNLKNIEPDSKSQITIEYKDGKPAAVKSVVISTQHSADVNQAQVRELVKPYIEKSIPKELLTGLDENEIYVNPTGNFVIGGPDGDSGLTGRKIIVDTYGGAAPHGGGAFSGKDPTKVDRSAAYASRYLAKNVVASKIADKCLIQLAYAIGVSKPLSIYVDLFDNDEEKNRHVEKLINENFDLSPRGIREMLGLNKPIYEKTAAYGHFGREPESDGSFSWEKTDKSGVFK

SEQ ID NO: 121984 - protein, 206 aa, Unknown
  Bacterial polypetide isolated from the Sargasso Sea
MKNNKYLFTSESVSEGHPDKVCDRISDMVVDSYLSLDPFSRVACETLTTTNKVVLAGETRGPKIEKEEIINKVRECIKDIGYDQKGFSWKSANIETFLHEQSSDIAMGVDSKDNKDEGAGDQGIMFGYACTETQELMPAPIHFSHKILRLMAEDRKKGILKGIEPDSKSQVTMLYQDNKPVKVTSVVISTQHSKDLNQEKVKDLVV

SEQ ID NO: 121985 - protein, 211 aa, Unknown
  Bacterial polypetide isolated from the Sargasso Sea
MGVPSKVTAVVISTQHSPKVSQSQVKEIVRPYLEKAIPKKLLMNLNDKDFYVNPTGQFIIGGPDGDTGLTGRKIIVDTYGGAARHGGGAFSGKDPSKVDRSAAYAARYVAKNVVASKIAKKCEIQLSYAIGVSKPLSIYVNLFDGDIEKEKHVEKLITNNFDLSPRGIREMLNLNRPIYESTASYGHFGRKPREDGSFSWEKTDKISIFKK

SEQ ID NO: 121986 - protein, 307 aa, Unknown
  Bacterial polypetide isolated from the Sargasso Sea
SYLFTSESVSEGHPDKIADQISDALIDNFLAFDPSSKVACETLVTTGQVVLAGEVKSNTNLDVEAISRDIINKIGYNKKEYMFDGNSCSVFSAIHEQSSDINQGVEKKTPQDQGAGDQGMMFGYACNETKNYMPLALDLSHKILIELADLRKENNEITYLRPDSKSQVTLQYSEDNIPEKIVAIVVSTQHDDFDNEDNMLAKIKHDIITILIPRLLEKYPDYKKFFNNKIEYHINPTGKFVIGGPHGDTGLTGRKIIVDTYGGKGAHGGGAFSGKDPSKVDRSAAYATRHIAKNLVAAGVANECLVQ

SEQ ID NO: 121987 - protein, 231 aa, Unknown
  Bacterial polypetide isolated from the Sargasso Sea
SGELSWLRPDAKSQVTILFEDGKPKSIDTVVLSTQHDENISMNDIQEGVMEHIIKPILPEGLLTDSTQYLINPTGNFIIGGPVGDCGLTGRKIIVDTYGGMARHGGGAFSGKDPSKVDRSAAYAARYVAKNVVAAGLADRCEIQVSYAIGVAKPTSVRIKTFGTEKISEEEIVHLVNENFDLTPYGIMNMLDLLQPIYEKSAAYGHFGREDEAFPWEKTDRSDALKEQSGL

SEQ ID NO: 121988 - protein, 251 aa, Unknown
  Bacterial polypetide isolated from the Sargasso Sea
ALMPLPIDLSHRLVRQQAEVMKSNGLSWLRPDAKSQVSAIYSDDGKTIEGLSAIVLSTQHDEDVTQDEIKEGVMENIIKPIVPQEWILDSTKIYINPTGKFVIGGPVGDCGLTGRKIIVDTYGGMARHGGGAFSGKDPSKVDRSAAYAARYVAKNIVAAGLADYCEIQVSYAIGVAKPTSINVNTFNSEKVSKEAIEKIVEEKFDLRPKSLINMLDLKRPIYLPTAAYGHFGRTDIDLSWEKTNKALEISQ

SEQ ID NO: 121989 - protein, 303 aa, Unknown
  Bacterial polypetide isolated from the Sargasso Sea
TVKEIGYTHSDMGFDADSCAVLNAIGKQSPDINQGVDRASLEEQGAGDQGLMFGYASDETDVLMPAPITYSHRLVQKQAEVRKSGKLDWLRPDAKSQITFKYENDKPVGIDAVVLSTQHCDSVSTETVREAVMEEIIKPVLPSEWIDGNTRFHINPTGRFVIGGPMGDCGLTGRKIIVDTYGGMARHGGGAFSGKDPSKVDRSAAYAGRYVAKNIVAAGLAKRCEIQVSYAIGVAEPTSISIDTFGTGVVDEKTLVALVREHFDLRPYGLIQMLDLERPIYRPTAAYGHFGRDEFPWEATDKA

SEQ ID NO: 121990 - protein, 48 aa, Unknown
  Bacterial polypetide isolated from the Sargasso Sea
MAKYLFTSESVTEGHPDKVCDAISDAILDSLLSQDKESHVACETLATN

SEQ ID NO: 121991 - protein, 221 aa, Unknown
  Bacterial polypetide isolated from the Sargasso Sea
MKKNFLFTSESVSEGHPDKVCDRISDMVVDTFLASEPQARVACETLTTTNKVVLAGEVRGPELKQDELISKVRHCIKDIGYDQDGFSWKEQTKIETHLHSQSADIAMGVDSAGNKDEGAGDQGIMFGYACNETDVLMPAPIHYSHKILRLMAEDRKTGNLKGIEPDSKSQITIQYKDGMPAAVTSVVISTQHSKDVNLAQVKDLCLPYIERSIPKNFIRKS

SEQ ID NO: 121992 - protein, 284 aa, Unknown
  Bacterial polypetide isolated from the Sargasso Sea
GAEPQSRVACETLTTTNKVVLAGEVRGPEIKKDELIQKVRDCIKDIGYDQEGFTWKEATKIESHLHSQSADIAMGVDSVGNKDEGAGDQGIMFGYACNETDVLMPAPIHYSHKILRLMAEDRKSGKLKSIEPDSKSQITIEYKDGKPANVKSVVISTQHSAEVNQSQVRELVKPYIEKSIPKNLLNGLQENEIYVNPTGNFVIGGPDGDSGLTGRKIIVDTYGGAAPHGGGAFSGKDPTKVDRSAAYASRYLAKNVVASKIADKCLIQLAYAIGVSKPLSIYVD

SEQ ID NO: 121993 - protein, 90 aa, Unknown
  Bacterial polypetide isolated from the Sargasso Sea
CLIQLAYAIGVSKPLSIYVDLFDNDLDKNKFVEEKIKENFDLSPRGIREMLELNKAIYEKTAAYGHFGRIPEKDGSFSWEKTDKINIFSK

SEQ ID NO: 121994 - protein, 226 aa, Unknown
  Bacterial polypetide isolated from the Sargasso Sea
NIEPDSKSQVTFEYIDGKPSKVKSVVISSQHSADVNQSQVKDLLRPYMLKSIPKFFFDGFNEDQFYVNPTGNFVIGGPDGDCGLTGRKIIVDTYGGAAPHGGGAFSGKDPTKVDRSAAYAARYIAKNVVSSKISEKCLIQLAYAIGVSKPLSIYVDLFDNDIDKNKFVVEKIKENFDLSPRGIREMLNLNKPIYEKTAAYGHFGRIPEDNGSFSWEKTDKTGIFSK

SEQ ID NO: 121995 - protein, 193 aa, Unknown
  Bacterial polypetide isolated from the Sargasso Sea
MLTLAQVKELCMPYIERSIPKNLLGSLDEKEIYINPTGNFVIGGPDGDSGLTGRKIIVDTYGGAAPHGGGAFSGKDPTKVDRSAAYASRYLAKNVVASKIADKCLIQLAYAIGVSKPLSIYVDLFDNDEEKNMHVEKLIKENFDLSPRGIREMLGLNKPIYEKTAAYGHFGRIPEGDGSFSWEKTDKSEVFAK

SEQ ID NO: 121996 - protein, 193 aa, Unknown
  Bacterial polypetide isolated from the Sargasso Sea
MSRYVFTSESVTEGHPDKICDQVSDAVLDALLAQDPASRVACETVVNTGLCMITGEVTSKAQVDFIHLVRNVIKEIGYSGARAGGFDANSCAVLVALDQQSPDIAQGVNEADDHAGDPLDLVGAGDQGIMFGYACNETPELMPLPISLAHRLARRLAEVRHNGSLDYLLPDGKTQVSVVYENDKPVAIDTILI

SEQ ID NO: 121997 - protein, 231 aa, Unknown
  Bacterial polypetide isolated from the Sargasso Sea
SAPGLEPDSKSQVTMLYENGKPSRVTSLVISSQHKEGLSPLEVKEIVKPYVYECIPNELLEGLKDEEFYVNPTGNFVIGGPDGDSGLTGRKIIVDTYGGAAPHGGGAFSGKDPSKVDRSAAYAARYLAKNVVAADLADQCTIQLSYAIGVSKPLSVYVNTNGTNKVDEQKIEKSVQDLFDLSPRGIREHLKLTNAIYVPTSAYGHFGREPTDQGHFTWEKTDLVDSLKSIT

SEQ ID NO: 121998 - protein, 245 aa, Unknown
  Bacterial polypetide isolated from the Sargasso Sea
MAHRLTERLTEVRKNGTLEYLRPDGKSQVTVRYVDGEPKSIEAVVISTQHSEDVSQEKLHEDIISNVINNVIPSKYLNGSPKFHINPTGLFVIGGPQGDCGLTGRKIIVDTYGGMGRHGGGAFSGKDPSKVDRSAAYAARHVAKNVVAAGLASRCEVQLAYAIGIAEPVSVSVDTFGTGRIEESKIINLIRDNFELKPAGLISYLKLLRPIYRKTSAYGHFGREVPEFTWESTEKADDLRTKAGI

SEQ ID NO: 121999 - protein, 49 aa, Unknown
  Bacterial polypetide isolated from the Sargasso Sea
MKKDFLFTSESVSEGHPDKVCDRISDMVVDTYLGMEPQARVACETLTTT

SEQ ID NO: 122000 - protein, 105 aa, Unknown
  Bacterial polypetide isolated from the Sargasso Sea
RYLAKNVVASKIADKCLIQLAYAIGVSKPLSIYVDLFDNDNEKNMHVEKLIHENFDLSPRGIREMLGLNKPIYEKTAAYGHFGRIPDNKGSFSWEKTDKSDIFSK

SEQ ID NO: 122001 - protein, 101 aa, Unknown
  Bacterial polypetide isolated from the Sargasso Sea
VAAGLCDQCTIHLSYAIGVAKPLSIYVNTQGTNKIDEAKIVAAIPEIMNLSPRGIREKLQLNKPIYEQTAAYGHFGRTHDSSTGAFSWESLDLVSDFKSLA

SEQ ID NO: 122002 - protein, 289 aa, Unknown
  Bacterial polypetide isolated from the Sargasso Sea
LTTTNKVVLAGETRGPKIHKDELISNVKNCIKDIGYDQEGFSWKTANIETFLHEQSSDIAMGVDSKDNKDEGAGDQGIMFGYACKETEDLMPAPIHFSHKILRLMAEDRKKGILKGIEPDSKSQVTMQYENNKPVKVTSVVISSQHSKDLSQEKVRELVIPYISKSIPSKYLQDLDKQEIYINPTGQFIIGGPDGDTGLTGRKIIVDTYGGAAPHGGGAFSGKDPTKVDRSAAYASRYLAKNIVAAGVSEKCLIQLAYAIGVSKPLSIFIKLDEGDESKIEKILKIINQ

SEQ ID NO: 122003 - protein, 94 aa, Unknown
  Bacterial polypetide isolated from the Sargasso Sea
MAKHLFTSESVSEGHPDKIADQISDAVLDAILEQDPKARVACETYVKTGMVLVGGEITTSAWVDIEEITRNTVREIGYVHSDMGFDANSCAVLS

SEQ ID NO: 122004 - protein, 259 aa, Unknown
  Bacterial polypetide isolated from the Sargasso Sea
MSNLKNFLFTSESVSEGHPDKVSDRISDMVVDSYLSGDPFSRVACETLTTTNKVVLAGEVRGPEIKENDLIEKVRHCIKDIGYDQDGFTWKEATKIESHLHSQSSDIAMGVDSSGNKDEGAGDQGIMFGYACNETEELMPAPIHYSHKILRLMAEDRKSGKLKNIEPDSKSQVTFEYVDGKPTKVKSVVISSQHSADVNQMQVRELLRPYMINSIPKIFLDGFNEGEFYVNPTGNFVIGGPDGDCGLTGRKIIVDTYGG

SEQ ID NO: 122005 - protein, 183 aa, Unknown
  Bacterial polypetide isolated from the Sargasso Sea
MSNLKNYLFTSESVSEGHPDKVSDRISDMVVDSFISRDPYSRVACETLTTTNKVVLAGEVRGPEIKKDELIEKVRNCIKDIGYDQEGFTWKEATKIESHLHSQSADIAMGVDSSGNKDEGAGDQGIMFGYACNETDVLMPAPIHYSHKILRLMAEDRKSGKLKNIEPDSKSQVTFQYVDGKPS

SEQ ID NO: 122006 - protein, 196 aa, Unknown
  Bacterial polypetide isolated from the Sargasso Sea
MSNLKNYLFTSESVSEGHPDKVSDRISDMVVDSFISGDPYSRVACETLTTTNKVVLAGEIRGPEIKKDELIQKVRNCIKDIGYDQEGFTWKEATKIESHLHSQSADIAMGVDSSGNKDEGAGDQGIMFGYACNETDVLMPAPIHYSHKILRLMAEDRKSGKLKNIEPDSKSQVTFEYIDKRPSKVKSVVISSQHSA

SEQ ID NO: 122007 - protein, 309 aa, Unknown
  Bacterial polypetide isolated from the Sargasso Sea
GSPDLEPVVRKTINDIGYNSDEYGFNGDTCEFTNLVFEQSPDISQGVTEGEGENLEQGAGDQGLMFGYACKETESLMPLPIDLSHRLVKKQADVMKSGEIKWLRPDSKSQVSVIYSDDGKTIEGLSAVVLSTQHDEDVSQEEIKIEVMDKIIKPIVPEEWLLDSTNIFINPTGKFVIGGPVGDCGLTGRKIIVDTYGGMARHGGGAFSGKDPSKVDRSAAYASRYVAKNIVAAGLADYCEIQVSYAIGVAKPTSIHVETFNSEKISKEAIVKIVEEEFDLRPKSLINMLDLKRPIYLPTAAYGHFEDQT

SEQ ID NO: 122008 - protein, 91 aa, Unknown
  Bacterial polypetide isolated from the Sargasso Sea
VQVAYAIGVARPVSVLVETFGTENVDPERINSAINEVFDLRPAAILRDLDLRRPIFQPTASYGHFGRDASDEMFTWERTDRVDDLRSALGL

SEQ ID NO: 122009 - protein, 280 aa, Unknown
  Bacterial polypetide isolated from the Sargasso Sea
SADNNAHVACETLATKGVVVVSGEIRTSFSPDVDQIVKNTIKEIGYHKENSGIDPAEVKVISMLHEQSPEIAQGVDSENLREQGAGDQGLMFGYACKETPELMPLPIQISQRLTEKLSELRKDGSLSWVRPDGKSQVSVNYENGNPISVDRVVIATQHDDMLAKYETEEKELAFVKEEVINKIIKPVLDSYGYPYSKDFIVNGTGRFVYGGPEADTGLTGRKIIVDTYGGYAPHGGGAFSGKDPSKVDRSATYMARYIAKNIVASELADRCEVQLSYSIG

SEQ ID NO: 122010 - protein, 230 aa, Unknown
  Bacterial polypetide isolated from the Sargasso Sea
MSKKTYLFTSESVSEGHPDKVCDRISDMVVDSYLAKEPFSRVACETLTTTNKVVLAGETRGPDIKKDDLIQKVRDCIKDIGYEQKGFHWKNCNIDVHLHSQSADIAMGVDSKGNKDEGAGDQGIMFGYACNETEVLMPAPIYYSHKILELMAEDRKKGIADKLEPDSKSQVTMQYENGKPSKVTSVVISTQHSADVNQSKVKEIVRPYLEKSIQKKLLSGLKEEEFYVNP

SEQ ID NO: 122011 - protein, 95 aa, Unknown
  Bacterial polypetide isolated from the Sargasso Sea
DAKSQVSVIYDDNGKSIKGLSAIVLSTQHDEGISQDDLKEAVLEEIIKPVIPSNWLLDETKIFINPTGKFVIGGPVGDCGLTGRKIIVDTYGGMA

SEQ ID NO: 122012 - protein, 139 aa, Unknown
  Bacterial polypetide isolated from the Sargasso Sea
MKRSYLFTSESVSEGHPDKVCDRISDMVVDTYLSSGDPQTRVACETLTTTNKVVLAGEVRGPSVSKDQIISQVRDCIKDIGYEQDGFHWQNCDIESFLHEQSADIAMGVDSGSNKDEGAGDQGIMFGFACKDTESLMPA

SEQ ID NO: 122013 - protein, 240 aa, Unknown
  Bacterial polypetide isolated from the Sargasso Sea
SAIYYSHKITKVLSTARHSGQDWMGPDGKAQVTVEYSNVNEPVRISNVICSTQHSKDLKDNPGEVQKRVEEIIKPELNNMFDSNTIFQVNPTGNFVTGGPDGDTGVTGRKIIVDTYGGYAPHGGGAFSGKDCTKVDRSGAYMARYLAKNIVASGVSQNATIQLSYAIGVKEPVSLYVYCDGKVRNDISDWIYKNIDLTPLGIIRKFNLFKLDLTETTNYGHFGKNHLAWEKTDIANQLNF

SEQ ID NO: 122014 - protein, 252 aa, Unknown
  Bacterial polypetide isolated from the Sargasso Sea
KKSAQGAGDQGIMFGYASNETESLIPLPLYLSHKILIELAKLRKENNEITYLRPDSKSQVTIKYDNNNKPLCIDTIVVSTQHDEFNNNEQLMLDKIKSDVINILIPRVIKKSQPNIQKLFGEDIIYHVNPTGKFVIGGPHGDTGLTGRKIIVDTYGGKGGHGGGAFSGKDPSKVDRSAAYAARHMAKNLVAAGIADEMLVQLSYAIGVVEPTSIFVDTYGSSKLELSDTQIAAKAAALFDMRPYAIEQRLKL

SEQ ID NO: 122015 - protein, 102 aa, Unknown
  Bacterial polypetide isolated from the Sargasso Sea
MSRFLFTSESVTEGHPDKACDAFSDAILDNILSKDNEAHVACESLATKGLVVISGEIRTTATVNVEKVVKDTIKEIGYHKTNSGIDPDDVEVLSKLHEQSPE

SEQ ID NO: 122016 - protein, 196 aa, Unknown
  Bacterial polypetide isolated from the Sargasso Sea
VLPAISKQSPDIAMGVDRADKKEQGAGDQGLMFGYATNETKELMPATIQLSHQLVKRHADVRRSGELSWLRPDAKSQVTILFEDGKPKSIDTVVLSTQHDENISMNDIQEGVMEHIIKPILPEGLLTDSTQYLINPTGNFIIGGPVGDCGLTGRKIIVDTYGGMARHGGGAFSGKDPSKVDRSAAYAARYVAKNVV

SEQ ID NO: 122017 - protein, 94 aa, Unknown
  Bacterial polypetide isolated from the Sargasso Sea
MSNLKNYLFTSESVSEGHPDKVSDRISDMVVDSFISRDPYSRVACETLTTTNKVVLAGEVRGPEIKKDELIEKVRNGIKDIGYDQEGFTGKKQQ

SEQ ID NO: 122018 - protein, 201 aa, Unknown
  Bacterial polypetide isolated from the Sargasso Sea
VVLSTQHSKDVTLSDVKDFVMEEIIKTTIPKNLLSNTTKIHINPTGNFVIGGPNGDCGLTGRKIIVDTYGGMARHGGGAFSGKDPSKVDRSAAYMARYIAKNIVATKLADKCEIQLSYAIGVAEPTSISVDTFGTSKIENSKISSAVSKVFNLTPKGIIDTLDLLNVKYQPTAAFGHFGRDDKNFTWEQKDKVDILMNELG

SEQ ID NO: 122019 - protein, 190 aa, Unknown
  Bacterial polypetide isolated from the Sargasso Sea
IPATEDLEIKPNVHTTRFLVNPTGKFVVGGPQGDAGLTGRKIIVDTYGGYARHGGGAFSGKDPTKVDRSAAYAARYVAKSIVTAKLAKKVEVQLSYAIGVAKPISILVETFDTGVISQANLTEIINKYFDLRPAAIIKEFDLRNLPKKMGGTFFRKTASYGHFGRRDLNLPWEKVEEKSAQLAEASKVFL

SEQ ID NO: 122020 - protein, 105 aa, Unknown
  Bacterial polypetide isolated from the Sargasso Sea
MKKNFLFTSESVSEGHPDKVCDRISDMVVDSYLSAEPQSRVACETLTTTNKVVLAGEVRGPEIKKNDLIQKVRECIKDIGYDQAGFTWKEATQIECHLHSPIYLI

SEQ ID NO: 122021 - protein, 278 aa, Unknown
  Bacterial polypetide isolated from the Sargasso Sea
MEQDEGAGDQGIMFGYACNETDMLMPAPIHYSHKILRLMAEDRKSGKLKNIEPDSKSQVTFEYVDGKPNKVRSVVISSQHSPDINQVQVRDLLRPYLLKSIPKNFLEGFDEKEFYVNPTGNFVIGGPDGDCGLTGRKIIVDTYGGAAPHGGGAFSGKDPTKVDRSAAYAARYIAKNVVASKIAEKCLIQLAYAIGVSKPLSIYVDLFDKDLEKIKFVTEKIKENFDLSPRGIREMLNLNKPIYEKTAAYGHFGRSPEDNGSFSWEKQINQAFFSNSFC

SEQ ID NO: 122022 - protein, 273 aa, Unknown
  Bacterial polypetide isolated from the Sargasso Sea
VTAETVSPGHPDKIADFISDNVLTKALENNSSSRVAVETFLTGTKKGGLVLVGGEISEIANITTEDIVSIVKEALNKTIKTSFEDFNLQNLSIFNELTPQSEEIRAAVEDDKDQGAGDQGIMVGFATNKTESFMPPTFDKSRNIQKDMWELQNSNEFLDLDSKVQVTSGGEKTRIVVSTQHHKDIDMENLHDEVSKIVSKHVSGNFELDLNPSGSFIKGGPAGDTGLTGRKIVVDSYGPTVPVGGGAFSGKDPSKVDRSAAYAARHLAKNIVA

SEQ ID NO: 122023 - protein, 195 aa, Unknown
  Bacterial polypetide isolated from the Sargasso Sea
STQHDEDVTQDEIKEGVMENIIKPIVPQEWILDSTKIYINPTGKFVIGGPVGDCGLTGRKIIVDTYGGMARHGGGAFSGKDPSKVDRSAAYAARYVAKNIVAAGLADYCEIQVSYAIGVAKPTSINVNTFDSEKVSKDAIEKIVEEKFDLRPKSLINMLDLKRPIYLPTAAYGHFGRTDIDLSWENTDKASEISQ

SEQ ID NO: 122024 - protein, 289 aa, Unknown
  Bacterial polypetide isolated from the Sargasso Sea
YDTDEYGFNGDTCEFTNLVFEQSPDISQGVTEGEGENLEQGAGDQGLMFGYACTETESLMPLPIDLSHRLVKKQADVMKSNELSWLRPDAKSQVSAIYSDDGKTIEGLSAIVLSTQHDEDVSQEEIKEGVMEKIIKPIVPEEWILDSTKIYINPTGKFVIGGPVGDCGLTGRKIIVDTYGGMARHGGGAFSGKDPSKVDRSAAYAARYVAKNIVAAGLADYCEIQVSYAIGVAKPTSINVNTFNSEKISKEAIEKIVEDKFDLRPKSLINMLDLERPIYLPTAAYGHFG

SEQ ID NO: 122025 - protein, 101 aa, Unknown
  Bacterial polypetide isolated from the Sargasso Sea
MKKNFLFTSESVSEGHPDKVCDRISDMVVDTYLGAESQSRVACETLTTTNKVVLAGEVRGPEINRDELIQKVRGCIKDIGYDQEGFTWRDATSVECHLHSQ

SEQ ID NO: 122026 - protein, 224 aa, Unknown
  Bacterial polypetide isolated from the Sargasso Sea
MSKYLFTSESVTEGHPDKVCDAISDAILDNLLSQDQESHVACETLATNGLVVVSGEVRSAGSLDIPSIVKNTLSDIGYTDEARGMDNNSVEIKEIIHEQSPEIAQGVDSEDISEQGAGDQGLMFGFACEETEELMPLPIQISQRLTEMLAKVRKDSTLPWLRPDGKSQVTVEYDGFKPVRVTKVVIATQHDDMLEKYGTEDEELNFVKKEVIDHIIIPVLKNYD

SEQ ID NO: 122027 - protein, 289 aa, Unknown
  Bacterial polypetide isolated from the Sargasso Sea
MGKQSQDIAQGVNEGEGEDLEQGAGDQGLMFGYATNETEVLMPAPITYSHRLVEQQAFIRKSNKLSWLRPDAKSQVSFVYGEDGKPQSISAVVLSTQHDPDVSQEDLKEGVMEEIIKPILPSNWLNEHTKYFINPTGRFEIGGPVGDCGLTGRKIIVDTYGGMARHGGGAFSGKDPSKVDRSAAYAGRYVAKNIVAAGLADRCEIQVSYAIGVAEPTSISVNTFGTSKIDEEKISDLVREHFDLRPRQLINMLDLKRPIYQSTAAYGHFGREESAFTWEKTDKVEALKG

SEQ ID NO: 122028 - protein, 150 aa, Unknown
  Bacterial polypetide isolated from the Sargasso Sea
MNRSYLFTSESVSEGHPDKVCDRISDMVVDTYLSSGDPQTRVACETLTTTNKVVLAGEVRGPSISKDQIISQVRDCIKDIGYEQEGFHWKNCDIESFLHEQSADIAMGVDSGSNKDEGAGDQGIMFGYACKDTEILMPAPIHYSHQILHK

SEQ ID NO: 122029 - protein, 289 aa, Unknown
  Bacterial polypetide isolated from the Sargasso Sea
QSADIAMGVDSNEKKDDGAGDQGIMFGYACKETDDLMPAPIHFSHKILRLMAEDRKTGKLIGIEPDSKSQVTMLYENGIPKDVTSVVISTQHSETVNQKKVKELILPYIEKSIPKNLLSGLKENNIYINPTGQFIIGGPDGDTGLTGRKIIVDTYGGASPHGGGAFSGKDPTKVDRSAAYVARYIAKNIVAAGVSNKCLIQLSYAIGVSKPLSIYLKLSEKDEDKTHELIKIINNNFDLSPRGIRELLGLNKPIYKITAAYGHFGRKSNEKGEFSWEKTDKTQIFKLLS

SEQ ID NO: 122030 - protein, 154 aa, Unknown
  Bacterial polypetide isolated from the Sargasso Sea
MKKNYLFTSESVSEGHPDKVCDRISDMVVDTYLGAEPQSRVACETLTTTNKVVLAGEVRGPEIKKDDLIEKVRHCIKDIGYDQDGFTWKEATKIESHLHAQSADIAMGVDSSGNKDEGAGDQGIMFGYACNETDVLMPAPIHYSHKILRLMAAD

SEQ ID NO: 122031 - protein, 136 aa, Unknown
  Bacterial polypetide isolated from the Sargasso Sea
MKNNKYLFTSESVSEGHPDKVCDRISDMVVDSYLSKDPVSRVACETLTTTNKVVLAGETRGPKIKKEEIISKVRDCIKDIGYDQEGFSWKTANVETFLHEQSTDIAMGVDSKDNKDEGAGDQGIMFGYACNETDEL

SEQ ID NO: 122032 - protein, 206 aa, Unknown
  Bacterial polypetide isolated from the Sargasso Sea
KAVKSVVISTQHSKDVNLAQVKELCMPYIERSIPKNLLGNLDENEIYINPTGNFVIGGPDGDSGLTGRKIIVDTYGGAAPHGGGAFSGKDPTKVDRSAAYASRYLAKNIVASKIADKCLIQLAYAIGVSKPLSIYVDLFSNDEEKNKHVEKLINENFDLSPRGIREMLGLNKPIYEKSAAYGHFGREPESNGAFSWENTDKASVFN

SEQ ID NO: 122033 - protein, 280 aa, Unknown
  Bacterial polypetide isolated from the Sargasso Sea
VLAGEVRGPEIKKDELIEKVRNCIKDIGYDQEGFTWKEATKIESHLHSQSADIAMGVDSSGNKDEGAGDQGIMFGYACNETDVLMPAPIHYSHKILRLMAEDRKSGKLKNIEPDSKSQVTFEYVDGKPSKVKSVVISSQHSPDVNQSQVRDLLRPYMLKSIPENFLDGFNEDEFYVNPTGNFVIGGPDGDCGLTGRKIIVDTYGGAAPHGGGAFSGKDPTKVDRSAAYAARYIAKNVVGSKIVEKCLIQLAYAIGVSKPLSIYVDLFDNDLDKNKFVVEK

SEQ ID NO: 122034 - protein, 209 aa, Unknown
  Bacterial polypetide isolated from the Sargasso Sea
MPAAVTSVVISTQHSKDVSLAQVKELCMPYIERSIPKNLLGSLDEKEIYINPTGNFVIGGPDGDSGLTGRKIIVDTYGGAAPHGGGAFSGKDPTKVDRSAAYASRYLAKNVVASKIADKCLIQLAYAIGVSKPLSIYVDLFDNDEEKNLHVEKLIKENFDLSPRGIREMLGLNKPIYEKTAAYGHFGRIPENDGSFSWEKTDKSGVFSK

SEQ ID NO: 122035 - protein, 273 aa, Unknown
  Bacterial polypetide isolated from the Sargasso Sea
QSVDIARGVDKGGAGDQGMMFGYACNENDSLMPSAIYYSHKITKALSNARHSGQEWMGPDGKAQVTVEYSSVNKPVRISNVICSTQHSKDLKDNPDEVKKRVEKIIKPELNDMLDKNTVFKVNPTGNFVTGGPDGDTGVTGRKIIVDTYGGYAPHGGGAFSGKDCTKVDRSGAYMARYLAKNIVASGVSQNATIQLSYAIGVKEPVSLYVYCDGKVRNDISDWIYKNIDLTPLGIIRKFNLFKLDLTETTNYGHFGKKHLAWENTDLANQLNF

SEQ ID NO: 122036 - protein, 136 aa, Unknown
  Bacterial polypetide isolated from the Sargasso Sea
VDTYGGAAPHGGGAFSGKDPTKVDRSAAYASRYLAKNVVASKVADKCLIQLAYAIGVSKPLSIYVDLFDNDEEKNRHVEKLINDNFDLSPRGIREMLGLNKAIYEKTAAYGHFGRDPGSDGSFSWEKTDKAGVFKK

SEQ ID NO: 122037 - protein, 294 aa, Unknown
  Bacterial polypetide isolated from the Sargasso Sea
METMVSSNMVTIAGEVKTDLMDNKETIEELVRQTVKDIGYEQENFHWDTLSFKNLIHNQSIDIARGTDNFGAGDQGMMFGYACNENDSLMPSAIFYSHKITKALSTARHSGQDWMGPDGKAQVTVEYSNVNEPVRISNVICSTQHSKDLKDSPGEVQKRVEEIIKPELNNMFDDNTIFQVNPTGNFVTGGPDGDTGITGRKIIVDTYGGYAPHGGGAFSGKDCTKVDRSGAYMARYLAKNIVASGISYNATIQLSYAIGVKEPVSLYVYCDGRVRNDISEWIYKNIDLTPLGII

SEQ ID NO: 122038 - protein, 133 aa, Unknown
  Bacterial polypetide isolated from the Sargasso Sea
MSNLKNFLFTSESVSEGHPDKVSDRISDMVVDSYISGDPYSRVACETLTTTNKVVLAGEVRGPEIKKDELIEKVRNCIKDIGYDQEGFTWKEATKIESHLHSQSTDIAMGVDSSGNKDEGAGDQGIMFGYACN

SEQ ID NO: 122039 - protein, 269 aa, Unknown
  Bacterial polypetide isolated from the Sargasso Sea
AGDQGIMFGYACNETDVLMPAPIHYSHKILRLMAEDRKSGKLKNIEPDSKSQVTFEYVDGKPSKVKSVVISSQHSPDVNQSQVRDLLRPYMLKSIPENFLDGFNEDEFYVNPTGNFVIGGPDGDCGLTGRKIIVDTYGGAAPHGGGAFSGKDPTKVDRSAAYAARYIAKNVVGSKIAEKCLIQLAYAIGVSKPLSIYVDLFDNDLDKNKFVVNKIKENFDLSPRGIREMLNLNKPIYEKTASYGHFGRSPEENGSFSWEKTNKTSVFSK

SEQ ID NO: 122040 - protein, 177 aa, Unknown
  Bacterial polypetide isolated from the Sargasso Sea
MSNLKNYLFTSESVSEGHPDKVSDRISDMVVDSYLSKDPFSRVACETLTTTNKVVLAGEIRGPEIKKDSLIESVRKCIKDIGYDQEGFTWKEATKIECHLHSQSTDIAMGVDSSGNKDEGAGDQGIMFGYACNETEELMPAPIHYSHKILRLMAEDRKSGNLKNIEPDSKSQVTFEY

SEQ ID NO: 122041 - protein, 229 aa, Unknown
  Bacterial polypetide isolated from the Sargasso Sea
DTYLSSGDPQTRVACETLTTTNKVVLAGEVRGPSVSKDQIISQVRDCIKDIGYEQDGFHWQNCDIESFLHEQSADIAMGVDSGSNKDEGAGDQGIMFGFACKDTETLMPAPIHYSHQILYKMAQARKDGSASGLEPDSKSQVTMLYENGKPSKVTSLVISSQHKEGLSPEDVKEIVKPYVYECIPNHLLEDLKDEEFYVNPTGNFVIGGPDGDSGLTGRKIIVDTYGGA

SEQ ID NO: 122042 - protein, 258 aa, Unknown
  Bacterial polypetide isolated from the Sargasso Sea
MTAKRKDGTLDYLRPDGKTQVTIRYDEDDRPTGIDTIVVSSQHAADVDLDATLIPDVRRHVVVPILETFDIDSRDYRLLVNPTGRFEVGGPMGDAGLTGRKIIVDTYGGMARHGGGAFSGKDPSKVDRSATYAMRWVAKNVVAAGLASRCEVQVAYAIGVSHPVGVFVQTFGTGVMSDEQIQEAVLAVFDLRPAAIIRDLGLLRPIYRTTSAYGHFGRPQGVNQLLDADEPSRRTEVGPTFTWESTDRAADLRTAAGV

SEQ ID NO: 122043 - protein, 165 aa, Unknown
  Bacterial polypetide isolated from the Sargasso Sea
EDEFYVNPTGNFVIGGPDGDCGLTGRKIIVDTYGGAAPHGGGAFSGKDPTKVDRSAAYAARYIAKNVVGSKISEKCLIQLAYAIGVSKPLSIYVDLFDNDLDKNKFVVEMIKENFDLSPRGIREMLNLNKPIYEKTAAYGHFGRASEKNGSFSWEKTDKTNVFSK

SEQ ID NO: 122044 - protein, 241 aa, Unknown
  Bacterial polypetide isolated from the Sargasso Sea
MKKNFLFTSESVSEGHPDKVCDRISDMVVDSYLGAEPQSRVACETLTTTNKVVLAGEVRGPEIKKEDLIQKVRDCIKDIGYDQDGFSWKDTTKIETHLHAQSADIAMGVDSSGNKDEGAGDQGIMFGYACNETDVLMPAPIHYSHRILRLMAEDRKSGKLKGIEPDSKSQITIEYKDGLPNAVKSVVISTQHSKDVDLARVKELCMPYIERSIPKNLLGNLDEKEIYINPTGNFVIGGPEW

SEQ ID NO: 122045 - protein, 278 aa, Unknown
  Bacterial polypetide isolated from the Sargasso Sea
VVDTFLASEPQARVACETLTTTNKVVLAGEVRGPELNKDELISKVRDCIKDIGYDQDGFSWKEQTKIETYLHSQSADIAMGVDSSGNKDEGAGDQGIMFGYACNETDVLMPAPIHYSHKILRLMAEDRKSGKLNGIEPDSKSQITIEYKNGMPAAVTSVVISTQHSKDVNLAKVKELCMPYIERSVPKNLLGSLDEKEIYINPTGNFVIGGPDGDSGLTGRKIIVDTYGGAAPHGGGAFSGKDPTKVDRSAAYASRYLAKNVVASKIADKCLIQLAYA

SEQ ID NO: 122046 - protein, 147 aa, Unknown
  Bacterial polypetide isolated from the Sargasso Sea
WRHWLTGRKIIVDTYGGAAPHGGGAFSGKDPTKVDRSAAYASRYLAKNIVAAGISEKCLIQLAYAIGVSKPLSIFIKLANGDEEKISRVKKIIEDNFNLSPRGIREMLKLNNPIYEVTSAYGHFGRKATNKGEFTWEKTDKTELFKL

SEQ ID NO: 122047 - protein, 114 aa, Unknown
  Bacterial polypetide isolated from the Sargasso Sea
VDRSAAYASRYLAKNIVASNISDKCLIQLAYAIGVSKPLSIYVDLFDNDEEKNMHVEKLIKENFDLTPRGIREMLGLNKAIYEKTAAYGHFGRVPESDGSFSWEKTDKSGVFSK

SEQ ID NO: 122048 - protein, 230 aa, Unknown
  Bacterial polypetide isolated from the Sargasso Sea
MSNLKNYIFTSESVSEGHPDKVSDRISDMVVDSYISGDPYSRVACETLTTTNKVVLAGEVRGPEIKKDELIEKVRNCIKDIGYDQKGFTWKEATKIESHLHSQSADIAMGVDSSGNKDEGAGDQGIMFGYACNETDVLMPAPIHYSHKILRLMAEDRKSGKLKNIEPDSKSQVTFEYVDGKPSKVKSVVISSQHSPDVNQAEVRDLLRPYMLKSIPENFLQGFDEDEFYV

SEQ ID NO: 122049 - protein, 229 aa, Unknown
  Bacterial polypetide isolated from the Sargasso Sea
KLKEIEPDSKSQVTFEYIDGKPAKIKSVVISSQHSSSINQSQVRELLRPYMLKAVPESFLESFNEDEFYVNPTGNFVIGGPDGDCGLTGRKIIVDTYGGAAPHGGGAFSGKDPTKVDRSAAYAARYIAKNVVASKIADKCLIQLSYAIGVSKPLSIYVDLFDSNLEKNKFVVEKIKSNFDLSPRGIREMLKLNNPIYEKTAAYGHFGRNPEDDGSFSWEKTDKISFFSK

SEQ ID NO: 122050 - protein, 182 aa, Unknown
  Bacterial polypetide isolated from the Sargasso Sea
MKRSFLFTSESVSEGHPDKVCDRISDMVVDSYLSKDPLSRVACETLTTTNKVVLAGEIRGPSITKEEIITKVRECIKDIGYEQDGFHWQHSDIECHLHEQSSDIAMGVDSGSNKDEGAGDQGIMFGFACRDTEELMPAPIHYSHQILLKMATSRKKGQSKELEPDSKSQITMLYENGKPSKV

SEQ ID NO: 122051 - protein, 147 aa, Unknown
  Bacterial polypetide isolated from the Sargasso Sea
DSGLTGRKIIVDTYGGSSPHGGGAFSGKDPTKVDRSAAYISRYMAKNVVAANLAEKCTIQLSYAIGVSEPLSLYVNTSNTGKLSDVELSNILRKEIDLTPSGIRSKLGLNNAIYTPSASYGHFGRIPDEIVKGSFTWEKTDLVDKIS

SEQ ID NO: 122052 - protein, 156 aa, Unknown
  Bacterial polypetide isolated from the Sargasso Sea
NPTGKFVIGGPVGDCGLTGRKIIVDTYGGMARHGGGAFSGKDPSKVDRSAAYAARYVAKNIVAAGLADYCEIQVSYAIGVAKPTSINVNTFNSEKISKEAIESIVEEKFDLRPKSLINMLDLKRPIYLPTAAYGHFGRTDIDLSWEKTDKASEISQ

SEQ ID NO: 122053 - protein, 228 aa, Unknown
  Bacterial polypetide isolated from the Sargasso Sea
KKYLNLDSKSQITIEYKDGKPASVKSVVISTQHSPDVNQAQVRDLVKPYIERSIPKNLVNGLDENEIYVNPTGNFVIGGPDGDSGLTGRKIIVDTYGGAAPHGGGAFSGKDPTKVDRSAAYASRYLAKNVVASKIADKCLIQLAYAIGVSKPLSIYVDLFDNDEEKNRHVEKLIQENFDLSPRGIREMLGLNKPIYEKTSAYGHFGRDPESNGSFSWEKTDKSDVFNK

SEQ ID NO: 122054 - protein, 123 aa, Unknown
  Bacterial polypetide isolated from the Sargasso Sea
MSNLKNYLFTSESVSEGHPDKVSDRISDMVVDSFILGDPYSRVACETLTTTNKVVLAGEVRGPEIRKDELIEKVRNCIRDIGYDQEGFTWKEATKIESHLHSQSADIAMGVDSSGNKDEGAGD

SEQ ID NO: 122055 - protein, 224 aa, Unknown
  Bacterial polypetide isolated from the Sargasso Sea
EPDSKSQVTMQYENGVPTKVTSVVISTQHSAEVNQAQVKEIVRPYLEKSIPKNLLADLRDEEFYVNPTGQFIIGGPDGDSGLTGRKIIVDTYGGAAPHGGGAFSGKDPSKVDRSAAYAARYVAKNVVASKIANKCLIQLAYAIGVSKPLSIYVDLFDGDEEKSKHVENLIKENFDLSPRGIREMLSLNKPIYERTAAYGHFGRKSGSDGSFSWEKTDKTAVFTK

SEQ ID NO: 122056 - protein, 277 aa, Unknown
  Bacterial polypetide isolated from the Sargasso Sea
MNIQAIARDVIKKIGYNKSEYLFDGNSCGILSYLHEQSTDINRGVDKKNIEDQGAGDQGIMFGYATNETENYMPLTLDLSNKILRELTELRRENTQIKYLRPDSKSQVTIQYSDDNKPEKIKTIVISTQHDDFDEDEIMLKKIKSDMISILIPRILKKYPNYKKFFNKEIEYFINPTGKFVIGGPHGDSGLTGRKIIVDTYGGKGAHGGGAFSGKDPSKVDRSAAYAARHIAKNLVAAGVSDECLVQISYAIGVAEPTALYVNTNGTSKTELSDTEI

SEQ ID NO: 122057 - protein, 234 aa, Unknown
  Bacterial polypetide isolated from the Sargasso Sea
MSKDEYIFTSESVSEGHPDKVCDQISDTVLDLFLAEDKSSRVACETMATTNRVILAGEVRGPSNITNDIIAEKIREKIRDIGYEQNGFHWENVDISILLHEQSTDIAMGVDASGNKDEGAGDQGIMFGHACRETDVLMPAPIQFSHLILKKMADARRSNLIKGLGPDSKSQVSLLYENGKPIRATSIVISTQHDDDLEQAEIREIVRPFVEQTLPKGWMCPENEFYVNPTGALC

SEQ ID NO: 122058 - protein, 285 aa, Unknown
  Bacterial polypetide isolated from the Sargasso Sea
KDELISKVRDCIKDIGYDQEGFTYKEATKIECHLHSQSADIAIGVDSSGNKDEGAGDQGIMFGYACNETDVLMPAPIHFSHRILRLMAEDRKSGKLKGIEPDSKSQITIEYKDGVPKAVKSVVISTQHSKDVNLAQVKELCMPYIEKSIPKNLLGNLDENEIYINPTGNFVIGGPDGDSGLTGRKIIVDTYGGAAPHGGGAFSGKDPTKVDRSAAYASRYLAKNIVASKIADKCLIQLAYAIGVSKPLSIYVDLFSNDEEKNLHVEKLIKENFDLSPRGIREMLV

SEQ ID NO: 122059 - protein, 79 aa, Unknown
  Bacterial polypetide isolated from the Sargasso Sea
MSDFIFTSESVTEGHPDKICDQISDAVLDALLTEDPESRVACETVVNTGLCLLTGEITSKAKVDYIKLVRNVIKEIGYE

SEQ ID NO: 122060 - protein, 143 aa, Unknown
  Bacterial polypetide isolated from the Sargasso Sea
GGYARHGGGAFSGKDPTKVDRSAAYAARYVAKSIVKAKLAKKAEVQLSYAIGVAKPISILVETFDTGVISQANLTELIKEHFDLRPAAIIKEFNLRNLPKKMGGKFFRKTASYGHFGRRDLELPWENVEGKAAQLEEASKIFL

SEQ ID NO: 122061 - protein, 186 aa, Unknown
  Bacterial polypetide isolated from the Sargasso Sea
NIVEPYIREILPEEWIGQETEWHINPTGKFVIGGPDGDAGLTGRKIIVDTYGGAAPHGGGAFSGKDPTKVDRSAAYAARYLAKNVVAAGLAEKCCIQLSYAIGIDRPLSIFAETYGTGTVSRELIEKAISESMDLSPKGIIDHLRLRRPIYSRTAAYGHFGRDPESDGGFSWEKLDLIDEIKSNSR

SEQ ID NO: 122062 - protein, 147 aa, Unknown
  Bacterial polypetide isolated from the Sargasso Sea
GDTGLTGRKIIVDTYGGAAPHGGGAFSGKDPTKVDRSAAYAARYLAKNIVSSGASDKCLIQLAYAIGVSKPLSIFIKLGNGDENKVEKINKIISENFDLSPRGIREMLKLNNPIYEVTSAYGHFGRKPNDNGEFSWEKTDKADLFKL

SEQ ID NO: 122063 - protein, 181 aa, Unknown
  Bacterial polypetide isolated from the Sargasso Sea
MNNLKNYLFTSESVSEGHPDKVCDRISDMVVDTYLRAEPQSRVACETLTTTNKVVLAGEVRGPEIKNDDLIQKVRECIKDIGYDQKGFTWREPTKIESHLHSQSADIAMGVDATGNKDEGAGDQGIMFGYACRETDVLMPAPIHFSHKILRLMAQDRKSGKLKNIEPDSKSQITIEYKDGI

SEQ ID NO: 122064 - protein, 123 aa, Unknown
  Bacterial polypetide isolated from the Sargasso Sea
PTKVYRSAAYAARYVAKCLVAAGLAERAEVQLSYAIGVAKPVSILVESFGTSKLANDALTALVENNFDLRPGAIIETFGLRNLPQQRGGRFYQDTAAYGHFGRNDLKAPWEDVETKAAELRKA

SEQ ID NO: 122065 - protein, 286 aa, Unknown
  Bacterial polypetide isolated from the Sargasso Sea
SSDIAMGVDSSGNKDEGAGDQGIMFGYACNETEELMPAPIHYSHKILRLMAEDRKSGKLKNIEPDSKSQVTFEYVDGKPTKVKSVVISSQHSADVNQTQVRDLLRPYMINSIPKNFLDGFNEEEFYVNPTGNFVIGGPDGDCGLTGRKIIVDTYGGAAPHGGGAFSGKDPTKVDRSAAYAARYIAKNVVASKIANKCLIQLAYAIGVSKPLSIYVDLFDNDVEKNKFVIEKIDDNFNLSPRGIREMLNLNKPIYEKTAAYGHFGRSPEENGSFSWEKTDKIKAFLK

SEQ ID NO: 122066 - protein, 291 aa, Unknown
  Bacterial polypetide isolated from the Sargasso Sea
RDVIKSIGYEQNTFHWNNVSIDINLHAQSPDISMGVDAVGKNEEGAGDQGIMFGYATDETKALMPLPIQLSHQLLKTIREKRLKSQIVGLGPDAKSQFSIIYEGNKPIGVHSIVLSIQHINSYKTDDIKQLVLPLVDNILPEGWKCPEENIFINPTGRFEIGGPHGDAGLTGRKIVVDTYGGICPHGGGAFSGKDPSKVDRSGAYAARYIAKNLVAAGIAKKCTIQLAYVIGIADPVSIFLDTHETSDVENTKIVDVIKKVFELKPAGIRKMLNLARPIYQKTSYFGHFVE

SEQ ID NO: 122067 - protein, 289 aa, Unknown
  Bacterial polypetide isolated from the Sargasso Sea
MKSKVFTSESVSEGHPDKICDQISDAILDAVILLDNKARVACETFVKSEEGSVGVVVLGGEITTSANIDYETIVRQTIKEIGYDSDDLGFNSKTVEFINKIGLQSADIAQGVDRVKDEDQGAGDQGLMFGYANNETDVLMPAPITYSHRLVHKLAQLRKAGDVNWLRPDAKSQVTIKYDNGKIHSIDTVVISSQHSPNVSQKEIKDYIFETVMKDVLPLPYLTKDTKIYINPTGSFEIGGPVGDCGLTGRKIIVDTYGGMARHGGGAFSGKDPSKVDRSAAYAARYVAK

SEQ ID NO: 122068 - protein, 259 aa, Unknown
  Bacterial polypetide isolated from the Sargasso Sea
MAKYLFTSESVTEGHPDKVCDAISDAILDSLLSQDKESHVACETLATNGLVVVSGEVRSSGSLDVESIVKTTLEDIGYTDEARGMDSDNIEIRSIIHEQSPEIAQGVDSDDLSEQGAGDQGLMFGFACKETEELMPLPIQIAQRLTEKLARIRKDGTLPWLRPDGKSQVTVEYDGFTPVRVTKVVIATQHDDMLEEYGSEEDELKFVKKEVIDHIIIPVLDSYGIPYENEFIVNGTGRFVYGGPAADTGLTGRKIIVDT

SEQ ID NO: 122069 - protein, 298 aa, Unknown
  Bacterial polypetide isolated from the Sargasso Sea
MVVDTYLAAEPQSRVACETLTTTNKVVLAGEVRGPEIKKEDLIEKVRHCIKDIGYDQEGFTWKEATSVESHLHAQSADIAMGVDSSGNKDEGAGDQGIMFGYACNETDVLMPAPIHYSHKILRLMAEDRKSGKLKNIEPDSKSQITIEYKDGKPSSVKSVVISTQHSPDVNQAQVRDLVKPYIQRSIPKELLSSLDENEIYVNPTGNFVIGGPDGDSGLTGRKIIVDTYGGAAPHGGGAFSGKDPTKVDRSAAYASRYLAKNVVASKIADKCLIQLAYAIGVSKPLSIYVDLFDNDDE

SEQ ID NO: 122070 - protein, 227 aa, Unknown
  Bacterial polypetide isolated from the Sargasso Sea
MTKNYLFTSESVTEGHPDKVCDMISDSILDEYLKGDPDSRVAVETITTTNFVGVAGEVTSKSSFDIESVIRKTITDIGYDNPDLKFDSHSCEVMIKLDPQSPHISQGVTANDEKEQGAGDQGLMFGYATNETEELMPLPILLAHKLTKKLTDVRKSNELTWVRPDGKSQVSVRYEDNKPQAIEAIVVSTQHSPEITNEEITSQLIEHVIKPVCGNLWNDNIKIHVNP

SEQ ID NO: 122071 - protein, 264 aa, Unknown
  Bacterial polypetide isolated from the Sargasso Sea
MNKYTFTSESVSEGHPDKVCDAISDAILDEYLNQDANSRVACETLATTGTVFVSGEVTSAGTVDVQAIVKNTLDDIGYNDQAYGMDAKSVKVISMLDKQSPEIAQGVNEGSGLHDEQGAGDQGLMFGFACNETKELMPLPIHLSHRLVEKMTNHRKSGKIPWLRPDSKSQVSVSYEDDKPISISKVVIATQHDDMLDKFEDESEEHKFVEKEIIDHVIKPVLDESGFPYNDDFIVNGTGRFVFGGPEADTGLTGRKIIVDTYGG

SEQ ID NO: 122072 - protein, 227 aa, Unknown
  Bacterial polypetide isolated from the Sargasso Sea
MSRFLFTSESVTEGHPDKACDAFSDAILDNILSNDNEAHVACESLATKGLVVISGEIRTTADVDVDKIVKDTIKEIGYNKANSGIDPDDVEVLSKLHEQSTEIAQGVDSEDVSEQGAGDQGLMFGFACRETPELMPLPIQIAHRLTERLTQLRKDETLPWLRPDGKSQVSVSYENGNPVSIDKTVIATQHDDMLNKYGTENKELDFVKEEVVEHIIRPVLDSYGYAY

SEQ ID NO: 122073 - protein, 274 aa, Unknown
  Bacterial polypetide isolated from the Sargasso Sea
EGLDLNQGAGDQGLMFGFACNETDVLMPFPITYSHRLVKRQAEVRKKGVLPWLRPDAKSQVTVAYEEGKPVAIDTVVLSTQHNPEIEHKDLEEAIIEEVIKPVLPENMITDKTRYLVNPTGRFVIGGPVGDCGLTGRKIIVDTYGGMARHGGGAFSGKDPSKVDRSAAYAARYVAKNIVAAGLADRCEIQVSYAIGVAEPTSISVETFGTGKVEEAKLVELIREHFDLRPKGIIQMLDLLQPIYRPTAAYGHFGRSDIDLPWERTDKAEVLSKA

SEQ ID NO: 122074 - protein, 256 aa, Unknown
  Bacterial polypetide isolated from the Sargasso Sea
MSDFIFTSESVTEGHPDKICDQISDAVLDALLTEDPESRVACETVVNTGLCLLTGEITSKAKVDYIKLVRNVIKEIGYEGYKAGGFDANSCAVLVALDEQSPDISQGVNEADDVNDDLEDNTGAGDQGIMFGYACDETPELMPLPISLAHRLAIQLAKVRHEEVLNYLLPDGKTQVSIDYEKGLPVSINTILISTQHNPEIDGITNEEEIRQRIKEDLWTHVVIPATEDLEIKPNINKTRFLVNPTGKFVVRGPQG

SEQ ID NO: 122075 - protein, 294 aa, Unknown
  Bacterial polypetide isolated from the Sargasso Sea
SFLHEQSADIAMGVDSGSNKDEGAGDQGIMFGFACKDTESLMPAPIHYSHQILFKMAQARKDGSASGLEPDSKSQVTMLYENGKPSKVTSLVISSQHKEGLSPADVKEIVKPYVYECIPNKLLEGFKDEEFYVNPTGNFVIGGPDGDSGLTGRKIIVDTYGGAAPHGGGAFSGKDPSKVDRSAAYAARYLAKNVVAADLADECTIQLSYAIGVSKPLSVYVNTNGTNKVDEQKIEKSLQDLFDLSPRGIREHLKLTNAIYVPTSAYGHFGREPSDKGHFTWEKTDLVEALKDIA

SEQ ID NO: 122076 - protein, 102 aa, Unknown
  Bacterial polypetide isolated from the Sargasso Sea
MKKNYLFTSESVSEGHPDKVCDRISDMVVDTYLGAEPHSRVACETLTTTNKVVLAGEVRGPEIKKDDLIEKVRNCIKDIGYDQDGFTYKEATKIESHFTCSI

SEQ ID NO: 122077 - protein, 260 aa, Unknown
  Bacterial polypetide isolated from the Sargasso Sea
MNSKNYLFTSESVSEGHPDKVCDRISDMVVDTYISKDPFARVACETLTTTNKVILAGEVRGPETSKEDMISKVRECIKDIGYEQKGFHWKNCNIDVHLHSQSSDIAMGVDSKGNKDEGAGDQGIMFGYACNETDVLMPAPIYYSHKILELMALDRKKGIAKDLEPDSKSQVTMIYENGKPIKVKSIVISTQHSPKVDQKKVKEIVRPYLEKSIPKKFLSELKEEEFYVNPTGQFIIGGPDGDSGLTGRKIIVDTYGGAAP

SEQ ID NO: 122078 - protein, 153 aa, Unknown
  Bacterial polypetide isolated from the Sargasso Sea
MSDYSLFTSESVSEGHPDKMSDQISDAILDTYLTKDPDARVAVETMVKTGMVVVAGEVTTSGTVTTGELEEVIRRTVLDIGFDSSDVCFDGNTCAVINAIGQQSADIALGTHEADEANQGAGDQGLMFGFASDETDVLMPAPIHYSHRLVERQ

SEQ ID NO: 122079 - protein, 162 aa, Unknown
  Bacterial polypetide isolated from the Sargasso Sea
INPTGKFVIGGPDGDAGLTGRKIIVDTYGGAAPHGGGAFSGKDPTKVDRSAAYISRYLAKNIVAAGVAPKCLIQLSYAIGVAEPLSIYVDTYGTASKYEKKLEEILPKIVDLSPKGIIEKLGLRKPIYEKTAAYGHFGRKPDVEGGFSWEKTDLVDQLSEHL

SEQ ID NO: 122080 - protein, 44 aa, Unknown
  Bacterial polypetide isolated from the Sargasso Sea
PKSLINMLDLKRPIYLPTAAYGHFGRTDIDLSWEKTDKASEISQ

SEQ ID NO: 122081 - protein, 252 aa, Unknown
  Bacterial polypetide isolated from the Sargasso Sea
GYACKETPELMPLPIALAHKLMLKHSEIRKSKGLGLRPDAKSQVSIEYDSNYQPKRIDSIVLSTQHSDDLDLEDLREIVKTQIIDSCLPEKLLDNKTKYLINPAGRFVIGGPVGDCGLTGRKVIVDTYGGMARHGGGGFSGKDPTKVDRSAAYGLRQVAKSLIKNDLCDYCEVQASYAIGISEPVSIYINTFESEKICLDKINKIVNENFDLSPSGLIENLDLITPIYLKTASYGHFGREDQGFTWEKSKKL

SEQ ID NO: 122082 - protein, 123 aa, Unknown
  Bacterial polypetide isolated from the Sargasso Sea
AFSGKDPTKVDRSAAYASRYLAKNIVASKIADKCLIQLAYAIGVSKPLSIYVDLFSNDEDKNLHVEKLIKENFDLSPRGIREMLGLNKPIYEKSAAYGHFGRDPENDGSFSWEKTDKASVFQK

SEQ ID NO: 122083 - protein, 159 aa, Unknown
  Bacterial polypetide isolated from the Sargasso Sea
WQICFGGPEADTGLTGRKIIVDTYGGYAPHGGGAFSGKDPSKVDRSAAYMARYIAKNIVAAELADKCEVQFSYSIGVAEPTSFYVKTFGTGSISDEELTDIAKAVFPLKPAGIIEHLQLKHPRYQITSAYGHFGREEDSFTWEQTGMVEALKLKLTERN

SEQ ID NO: 122084 - protein, 217 aa, Unknown
  Bacterial polypetide isolated from the Sargasso Sea
MNPGNFLFTSESVSEGHPDKMADQISDSILDAILAKDQTARVACETMITTGFVVIAGEISTNCYVEMPKIIRNTIKNIGYTQSDMGFDFETCGVQIALDEQSKDIARGVNDDKHEQGAGDQGMMFGYASKETPELMPMPIMYSHKLVKKLADVRKKGALSYLRPDSKSQVSVRYENNKPICIETVVISTQHNPSVTTKQIKADVTEMVINKVIPKNL

SEQ ID NO: 122085 - protein, 203 aa, Unknown
  Bacterial polypetide isolated from the Sargasso Sea
SVVISTQHSSDVNQAQVRDLVKPYIERSIPKELLNSLDEKEIYINPTGNFVIGGPDGDSGLTGRKIIVDTYGGAAPHGGGAFSGKDPTKVDRSAAYASRYLAKNVVASKIADKCLIQLAYAIGVSKPLSIYVDLFDNDDEKNKYVEKLISENFDLSPRGIREMLGLNKPIYEKTAAYGHFGRIPDNKGSFSWEKTDKSDIFSK

SEQ ID NO: 122086 - protein, 42 aa, Unknown
  Bacterial polypetide isolated from the Sargasso Sea
TGRKIIVDTYGGAAPHGGGAFSGKDPTKVDRSAAYASRYLAK

SEQ ID NO: 122087 - protein, 212 aa, Unknown
  Bacterial polypetide isolated from the Sargasso Sea
DTYLSAEPQSRVACETLTTTNKVVLAGETRGPNINKDDLILKVRECIKDIGYDQKGFTWKEETKIESHLHSQSADIAMGVDSSGNKDEGAGDQGIMFGYACNETDVLMPAPIHYSHKILRLMAEDRKSGKLKNIEPDSKSQITIEYKDGKPSSVKSVVISTQHSADINQSQVRELVKPYIEKSIPKNLINGLDDTEIYVNPTGNFVIGGPDG

SEQ ID NO: 122088 - protein, 165 aa, Unknown
  Bacterial polypetide isolated from the Sargasso Sea
MKKNFLFTSESVSEGHPDKVCDRISDMVVDSFLASEPQARVACETLTTTNKVVLAGEVRGPELKEDELIAKVRNCIKDIGYDQDGFSYKDQTKIETHLHAQSADIAMGVDSSGNKDEGAGDQGIMFGYACNETDVLMPAPIHYSHKILRLMAEDRKSGKLNGIEP

SEQ ID NO: 122089 - protein, 287 aa, Unknown
  Bacterial polypetide isolated from the Sargasso Sea
PQTRVACETLTTTNKVVLAGEVRGPSVSKDQIISQVRDSIKDIGYEQDGFHWQTCDIESFLHEQSADIAMGVDSGSNKDEGAGDQGIMFGFACKDTESLMPAPIHYSHQILYKMAQARKDGSASGLEPDSKSQVTMLYENGKPSKVTSLVISSQHKEGLSPDDVKEIVKPYVYECIPNNLLEGLKDEEFYVNPTGNFVIGGPDGDSGLTGRKIIVDTYGGAAPHGGGAFSGKDPSKVDRSAAYAARYLAKNVVAADLADECTIQLSYAIGVSKPLSVYVNTNGTNKV

SEQ ID NO: 122090 - protein, 264 aa, Unknown
  Bacterial polypetide isolated from the Sargasso Sea
MFGYACKETSELMPAPIYYSHKILRLLAEARHSGKIKGIKPDSKSQLTLQYKNGIPIEASSIVISTQHDEGLSQEEIRTIVEPYVVEALPEGWMCNKNNFFVNPTGKFVVGGPDGDAGLTGRKIIVDTYGGAAPHGGGAFSGKDPTKVDRSAAYAARYLAKNIVAANFADKCSIQLSYAIGVSHPLSVYVDTYGTGKVSDSQIEEVLKKVMDLSPRGIREHLQLNKPIYQKTASYGHFGRKPEGDGSFSWEKLDLVEDLKSNLS

SEQ ID NO: 122091 - protein, 268 aa, Unknown
  Bacterial polypetide isolated from the Sargasso Sea
MKDYIFTSESVSEGHPDKVCDQISDAVLDAYLKEDPESRVACETMIKNNLVIIAGEITSDGNPDLESIVRNVINDIGYNDDNLGFNGNTCDFINHITKQSPDIAQGVNEGEGEDINQGAGDQGLMFGYACNETDSLMPAPIDLSHKLVKKQSEVRKSGTLEWLRPDAKSQVSVVYDQERKSIKRLSAIVLSTQHNEDISYQELKDGVFDHIISPVIPKNWITNETKILINPTGKFVIGGPVGDCGLTGRKIIVDTYGGMARHGGGAFF

SEQ ID NO: 122092 - protein, 93 aa, Unknown
  Bacterial polypetide isolated from the Sargasso Sea
MSDLKNYLFTSESVSEGHPDKVSDRISDMVVDTYISGDPYSRVACETLTTTNKVVLAGEVRGPEIKKDELIEKVRACIKDIGYDQDGVYLERS

SEQ ID NO: 122093 - protein, 241 aa, Unknown
  Bacterial polypetide isolated from the Sargasso Sea
MKKDFLFTSESVSEGHPDKVCDRISDMVVDTYLSSEPQSRVACETLTTTNKVVLAGETRGPDINKDDLISKVRECIKDIGYDQKGFTWKEATKIESHLHSQSSDIAMGVDSSGNKDEGAGDQGIMFGYACNETDVLMPAPIHYSHKILRLMAEDRKSGKLKNIEPDSKSQITIEYKDGKPSSVKSVVISTQHSADINQSQVRELVKPYIEKSIPKNLINGLDDTEIYVNPTGNFVIGGPDG

SEQ ID NO: 122094 - protein, 87 aa, Unknown
  Bacterial polypetide isolated from the Sargasso Sea
DELVSKVRDCIKDIGYYQDGFSWRDATKIECHLHSQSADIAMGVDSSRNKDEGAGDQGIMFGYACNETDVLMPAPIHYSHKILRLMC

SEQ ID NO: 122095 - protein, 209 aa, Unknown
  Bacterial polypetide isolated from the Sargasso Sea
MSDFIFTSESVTEGHPDKICDQISDAVLDALLTEDPESRVACETVVNTGLCLLTGEITSKAKVDYIKLVRNVIKEIGYEGYKAGGFDANSCAVLVALDEQSPDISQGVNKADDVNDDLEDNTGAGDQGIMFGYACDETPELMPLPISLAHRLAIQLSKVRHENVLNYLLPDGKTQVSIDYKNGVPLSINTILISTQHNPEIDGMTNEEE

SEQ ID NO: 122096 - protein, 183 aa, Unknown
  Bacterial polypetide isolated from the Sargasso Sea
MSDFIFTSESVTEGHPDKICDQISDAVLDALLTEDPESRVACETVVNTGLCLLTGEITSKAKVDYIKLVRNVIKEIGYEGYRAGGFDANSCAVLVALDEQSPDISQGVNEADDVNDDLEDNTGAGDQGIMFGYACDETPELMPLPISLAHRLAIQLAKVRHEEVLNYLLPDGKTQVSIDYEKG

SEQ ID NO: 122097 - protein, 308 aa, Unknown
  Bacterial polypetide isolated from the Sargasso Sea
KNFLFTSESVSEGHPDKVSDRISDMVVDSYISGDPFSRVACETLTTTNKVVLAGEVRGPEIKENDLIEKVRHCIKDIGYDQDGFTWKEATKVESHLHSQSADIAMGVDSSGNKDEGAGDQGIMFGFACDETEELMPAPIQYSHKILRLMAQDRKSGKLKNIEPDSKSQVTFEYVDGKPTKVKSVVISSQHSADVNQTQVRDLLRPYMINSIPEKFLDGFDEEEFYVNPTGNFVIGGPDGDCGLTGRKIIVDTYGGAAPHGGGAFSGKDPTKVDRSAAYAARYIAKNVVASKIADKCLIQLAYAIGVSK

SEQ ID NO: 122098 - protein, 297 aa, Unknown
  Bacterial polypetide isolated from the Sargasso Sea
MVSLVREATKIESHLHSQSADIAMGVDSSGNKDEGAGDQGIMFGYACNETDVLMPAPIHYSHKILRLMAEDRKSGKLNGIEPDSKSQITIEYKNGVPSAVKSVVISTQHSKDVNLAKVKELCMPYIERSIPKNLLGNLDQNEIYINPTGNFVIGGPDGDSGLTGRKIIVDTYGGAAPHGGGAFSGKDPTKVDRSAAYASRYLAKNVVASGVADKCLIQLAYAIGVSKPLSIYVDLFDNDEEKNAHVEQLINENFDLSPRGIREMLGLNKAIYHKTAAYGHFGREHESDVSFSWEKTD

SEQ ID NO: 122099 - protein, 268 aa, Unknown
  Bacterial polypetide isolated from the Sargasso Sea
WRQGIMFGYACNETDVLMPAPIHYSHRILRLMAEDRKSGKLKGIEPDSKSQITIEYKDGLPNAVKSVVISTQHSKDVNLAKVKELCMPYIERSIPKNLLGNLDEKEIYINPTGNFVIGGPDGDSGLTGRKIIVDTYGGAAPHGGGAFSGKDPTKVDRSAAYASRYLAKNVVASKIADKCLIQLAYAIGVSKPLSIYVDLFDNDEEKNRHVEKLISENFDLSPRGIREMLGLNKPIYEQTAAYGHFGREHGSNGSFSWEKTDKANVFSK

SEQ ID NO: 122100 - protein, 286 aa, Unknown
  Bacterial polypetide isolated from the Sargasso Sea
MSDFIFTSESVTEGHPDKICDQISDAVLDALLTEDPESRVACETVVNTGLCLLTGEITSKAKVDYIKLVRNVIKEIGYEGYKAGGFDANSCAVLVAIDEQSPDISQGVNEADDVNDDLENNTGAGDQGIMFGYACDETPELMPLPISLAHRLAIQLAKVRHEKVLNYLLPDGKTQVSIDYEKGVPVSINTILISTQHNPEIDGIKNEEEIRQRIKEDLWTNVVIPATEDLEIKPKIHKTRFLVNPTGKFVVGGPQGDAGLTGRKIIVDTYGGYARHGGWCILGKRP

SEQ ID NO: 122101 - protein, 295 aa, Unknown
  Bacterial polypetide isolated from the Sargasso Sea
LEPQSRVACETLTTTNKVVLAGEVRGPEIKKDDLISKVRDCIKDIGYDQDGFSWKEETKVECHLHSQSSDIAMGVDSSGNKDEGAGDQGIMFGYACNETDVLMPAPLHYSHKILRLMAEDRKSGKLKNIEPDSKSQITIEYKDGKPASVKSVVISTQHSADVNQSQVRELVKPYIERSIPKNLINGLDDNEIYVNPTGNFVIGGPDGDSGLTGRKIIVDTYGGAAPHGGGAFSGKDPTKVDRSAAYASRYIAKNIVASGLSDKCLIQLAYAIGVSKPLSIYVDLFENDERKNKHA

SEQ ID NO: 122102 - protein, 244 aa, Unknown
  Bacterial polypetide isolated from the Sargasso Sea
MKKDYLFTSESVSEGHPDKVCDRISDMVVDTYLAAEPQSRVACETLTTTNKVVLAGEVRGPEIKKEDLIQKVRHCIKDIGYDQDGFTWKEATSIESHLHAQSADIAMGVDSSGNKDEGAGDQGIMFGYACNETDVLMPAPIHYSHKILRLMAEDRKSGKLKNIEPDSKSQITIEYKNGKPSSVKSVVISTQHSPDVNQAQVRDLVKPYIERSIPKELLSSLDEKEIYVNPTGNFVIGGPDGDSG

SEQ ID NO: 122103 - protein, 268 aa, Unknown
  Bacterial polypetide isolated from the Sargasso Sea
KASVDIQEVVRNTVADIGYDDPTFGFDYRSCGVLVALDQQSPDISQGVTEGEGLYHQQGAGDQGMMFGYACRETPQLMPLPIMLAHKLLLHLTKLRKGKKLQYLLPDAKSQVSVEYVDNKPRRIDSVVISTQHRPNVTHKRIERDMISQIVKKVIPSKFLDAETKYHINPTGRFVVGGPHGDCGLTGRKIIVDTYGGMCPHGGGAFSGKDPSKVDRSAHYMARYVAKNVVAARLAERCQVQLAYAIGVPEPVSVLIDTYGSGKKADEE

SEQ ID NO: 122104 - protein, 265 aa, Unknown
  Bacterial polypetide isolated from the Sargasso Sea
ELIEKVRNCIKDIGYDQKGFSWKTANIEAHLHKQSSDIAMGVDSKGNKDEGAGDQGIMFGYACKETKDLMPAPIHFSHKILRLMADDRKKGIIEGIEPDSKSQVTMLYENGIPKKVTSVVISTQHSKDLDQKKVKDLVFPYISKSIPKDLIQELDEKDVYVNPTGQFIIGGPDGDTGLTGRKIIVDTYGGAAPHGGGAFSGKDPTKVDRSAAYVARYIAKNIVAAGISDKCLIQLAYAIGVSKPLSVYVKLSDEDKNKNEDIKKI

SEQ ID NO: 122105 - protein, 117 aa, Unknown
  Bacterial polypetide isolated from the Sargasso Sea
PTKVDRSAAYAARYIAKNVVASKIADKCLFQLSYAIGVSKPLSIYVDLFDNDLDKNKFVVEKIKENFDLSPRGIREMLNLNKPIYEKTAAYGHFGRTPESDGSFSWEKTDKIAFFSK

SEQ ID NO: 122106 - protein, 291 aa, Unknown
  Bacterial polypetide isolated from the Sargasso Sea
AEPHSRVACETLTTTNKVVLAGEVRGPEINKDDLIQKVRECIKDIGYDQKGFSWKDATKIESHLHLQSADIAMGVDSSGNKDEGAGDQGIMFGYACNETDVLMPAPIHYSHKILRLMAEDRKSGKLNNIEPDSKSQITIEYKNGIPANVKSVVISTQHSADVNQTQVRELVKPYIERSIPKNLLNGLDDNEIYVNPTGNFVIGGPDGDSGLTGRKIIVDTYGGAAPHGGGAFSGKDPTKVDRSAAYASRYLAKNVVASKIADKCLIQLAYAIGVSKPLSIYVDLFDKDEEK

SEQ ID NO: 122107 - protein, 252 aa, Unknown
  Bacterial polypetide isolated from the Sargasso Sea
DKVSDRISDMVVDTYISKDPYSRVACETLTTTNKVVLAGEVRGPEIKKDELIEKVRACIKDIGYDQEGFTWRDATKIESYLHSQSADIAMGVDSSGNKDEGAGDQGIMFGYACNETEELMPAPIHYSHKILRLMAEDRKSGKLKNIEPDSKSQVTFEYVDGKPSKVKSVVISSQHSADINQSQIRDLLRPYLSKSMPENFLNDFSEDEFYVNPTGNFVIGGPDGDCGLTGRKIIVDTYGGAAPHGGGAFSGK

SEQ ID NO: 122108 - protein, 172 aa, Unknown
  Bacterial polypetide isolated from the Sargasso Sea
NYLEGLKQNEIYINPTGQFIIGGPDGDTGLTGRKIIVDTYGGAAPHGGGAFSGKDPTKVDRSAAYASRYLAKNIVSSGITDKCLIQLAYAIGVSKPLSIFVKLADNDYLKVEKIKKIINDNFDLSPRGIRELLKLNNPIYEVTSSYGHFGRKPTNKGEFSWEKTDKADLFKL

SEQ ID NO: 122109 - protein, 201 aa, Unknown
  Bacterial polypetide isolated from the Sargasso Sea
MVDQSRNYFFTSESVSEGHPDKICDKISDTILDAYLSEDKDSRVAVETLVTTNLVVISGEVRSEAKISENDIESITRNVIKDIGYNFGDFNYQNVTIMTRLHEQSPDIARGVDAVGNSSEGAGDQGIMFGYACNETTELMPATLSYSHQILKNLADKRKNNIIQGLLPDSKSQLTLFYENDQPKYIDSIVVSSQHTEDTTQ

SEQ ID NO: 122110 - protein, 168 aa, Unknown
  Bacterial polypetide isolated from the Sargasso Sea
MNKEYLFTSESVSEGHPDKVCDIISDYIVDDFLAQPNSENWRVALETLVTTNQVVVSGEVRGPEGFNCDYESLAREAVKHIGYEQDKFHWQNFNFTSYVHGQSGDIAMGVDAKDNKDQGAGDQGIMFGYACKETPVLMPAPIYYSHLILRNLAEARKNKTISGIQPDS

SEQ ID NO: 122111 - protein, 299 aa, Unknown
  Bacterial polypetide isolated from the Sargasso Sea
DYLFTSESVSEGHPDKVCDRISDMVVDTYLGMEPQARVACETLTTTNKVVLAGETRGPDINKDELISKVRDCIKDIGYDQDGFTWRDATKIESHLHSQSADIAMGVDSSGNKDEGAGDQGIMFGYACNETDVLMPAPIHYSHKILRLMAEDRKSGNLNGIEPDSKSQITIEYKNGKPSAVKSVVISTQHSKDVNLAKVKELCMPYIEKSIPKNLLGSLDENEIYINPTGNFVIGGPDGDSGLTGRKIIVDTYGGAAPHGGGAFSGKDPTKVDRSAAYASRYLAKNVVASGVADKMFNSI

SEQ ID NO: 122112 - protein, 129 aa, Unknown
  Bacterial polypetide isolated from the Sargasso Sea
APHGGGAFSGKDPTKVDRSAAYASRYLAKNVVASGVSEKCLIQLAYAIGVSKPLSIFIKLANGDESKVDKVKKLIEDNFNLSPRGIREMLKLNNPIYEITSAYGHFGRKPGNNGEFTWEKTDKTDLFKL

SEQ ID NO: 122113 - protein, 85 aa, Unknown
  Bacterial polypetide isolated from the Sargasso Sea
MLFTSESVSEGHPDKLCDQVSDAILDACLKEDPDSKVACETSAKTGFIIVFGEITTKANLNFQEIVRNTVRKIGYNDSSTSFDAD

SEQ ID NO: 122114 - protein, 47 aa, Unknown
  Bacterial polypetide isolated from the Sargasso Sea
MSEYKLFTSESVSEGHPDKMADQISDAVLDAMLKDDPDSRVACETLV

SEQ ID NO: 122115 - protein, 249 aa, Unknown
  Bacterial polypetide isolated from the Sargasso Sea
APIHYSHKILRLMAEDRKSGKLKNIEPDSKSQITIEYKDGVPANVKSVVISTQHSADVNQSKVRELVKPYIEKAIPKSLLSGLDEKEIYVNPTGNFVIGGPDGDSGLTGRKIIVDTYGGAAPHGGGAFSGKDPTKVDRSAAYASRYLAKNVVASNIADKCLIQLAYAIGVSKPLSIYVDLFDNDEEKNRHVEKLIKENFDLSPRGIREMLGLNKPIYEKTAAYGHFGRNSEKNGSFSWEKTDKADVFNK

SEQ ID NO: 122116 - protein, 280 aa, Unknown
  Bacterial polypetide isolated from the Sargasso Sea
GVDSSGNKDEGAGDQGIMFGYACNETDVLMPAPIHYSHKILRLMAEDRKSGKLKNIEPDSKSQVTFEYVDGKPSKVKSVVISSQHSPDVNQSQVRDLLRPYMLKSIPENFLDGFNEDEFYVNPTGNFVIGGPDGDCGLTGRKIIVDTYGGAAPHGGGAFSGKDPTKVDRSAAYAARYIAKNVVGSKISEKCLIQLAYAIGVSKPLSIYVDLFDNDLDKNKFVVEKIKENFDLSPRGIREMLNLNKPIYEKTAAYGHFGRAPEENGSFSWEKTNKTNVFSK

SEQ ID NO: 122117 - protein, 190 aa, Unknown
  Bacterial polypetide isolated from the Sargasso Sea
MKKNFLFTSESVSEGHPDKVCDRISDMVVDSFLSLEPQARVACETLTTTNKVVLAGEVRGPELKKDELISKVRDCIKDIGYDQDGFSWRDQTKIETHLHSQSADIAIGVDSAGNKDEGAGDQGIMFGYACNETDVLMPAPIHYSHKILRLMAEDRKSGKLNGIEPDSKSQITIEYKDGMPSAVTSVVIST

SEQ ID NO: 122118 - protein, 201 aa, Unknown
  Bacterial polypetide isolated from the Sargasso Sea
MTYLFTSESVSEGHPDKLCDNISDYILDACLRIDRNARVAVETMVKGMAEESYIIVGGEVTVSTDEAIDYESIARKAAAEIGYTNHEVGMDATNTENCNVKVLISQQSGDIAQGVDEGKGLHLEQGAGDQGLMFGYASNESEEFSELRGTFMPLPAILSQRLTLKLSESMKDGTLPWARPDSKSQVTIEYNDDGSPNRLKR

SEQ ID NO: 122119 - protein, 251 aa, Unknown
  Bacterial polypetide isolated from the Sargasso Sea
MPATIQLSHQLVKRHADVRRSGDLEWLRPDAKSQVTILFEDGKPKSIDTVVLSTQHDENISMNDIQEGVMEHIIKPILPEDLLTDSTQYLINPTGNFIIGGPVGDCGLTGRKIIVDTYGGMARHGGGAFSGKDPSKVDRSAAYAARYVAKNVVAAGLADRCEIQVSYAIGVAKPTSVRIKTFGTEKISEEEIVHLVNENFDLTPYGIMNMLDLLQPIYEKSAAYGHFGREDEAFPWEKTDRSDALKEQSGL

SEQ ID NO: 122120 - protein, 99 aa, Unknown
  Bacterial polypetide isolated from the Sargasso Sea
MLKKYFFTSESVSEGHPDKVCDRISDMVVDTYLSNDPYSRVACETLTTTNKVVLAGETRGPEIKKDEIIEKVRSCIKDIGYEQKGFHWKNCDIDTYLHS

SEQ ID NO: 122121 - protein, 199 aa, Unknown
  Bacterial polypetide isolated from the Sargasso Sea
MNNLKNYLFTSESVSEGHPDKVCDRISDMVVDTYLGAEPYSRVACETLTTTNKVVLAGEVRGPEIKKEDLIQKVRDCIKDIGYDQKGFTWRENTKIESHLHSQSADIAMGVDASGNKDEGAGDQGIMFGYACRETDVLMPAPIHYSHKILRLMAEDRKSGKLKDIEPDSKSQITIEYKDGLPSNVKSVVISTQHSADVN

SEQ ID NO: 122122 - protein, 315 aa, Unknown
  Bacterial polypetide isolated from the Sargasso Sea
TGMVLVGGEITTSAWVDIEELTRSTIRDIGYVHSDMGFDANSCAVLSAIGKQSPDINQGVDKKNEDPSEQGAGDQGLMFGYASNETDVLMPAPITYSHRLVQQQAKVRKDGTLSWLRPDAKSQLSFVYENGKPVGIDAVVLSTQHCDTISTADLREAVMEHIIKPVLPAEWLSNKTKYFINPTGRFVIGGPMGDCGLTGRKIIVDSYGGMARHGGGAFSGKDPSKVDRSAAYAARYVAKNIVAAGLAERCEIQVSYAIGVAEPTSISVETFGTSKLSEDQLIALIRRHFDLRPYGLIQMLQLERPIYRATAAYGH

SEQ ID NO: 122123 - protein, 227 aa, Unknown
  Bacterial polypetide isolated from the Sargasso Sea
PCGVDAIVLSTQHDPEIDQEDLRKMIKREVIEQVIPAEWLDANTQYHINPTGKFVIGGPVGDCGLTGRKIIVDTYGGMARHGGGAFSGKDPSKVDRSAAYAGRYVAKNVVAAGLADKCEIQVSYAIGVAEPTSVSIDTFGTGKIDDAKIVDLVREHFDLRPYAITKMLDLLHPMYRLTAAYGHFGREPFEHSYSWVDDKGETHTETFTAFPWEKTDKADALRQAAGL

SEQ ID NO: 122124 - protein, 204 aa, Unknown
  Bacterial polypetide isolated from the Sargasso Sea
LVISSQHKEGLSPTDVKEIVKPYVYECIPNELLEGLKDEEFYVNPTGNFVIGGPDGDSGLTGRKIIVDTYGGAAPHGGGAFSGKDPSKVDRSAAYAARYLAKNIVAADLADQCTIQLSYAIGVSKPLSVYVNTNGTNKVDEQKIEKSVQDLFDLSPRGIREHLKLTNAIYVPTSAYGHFGREPSDQGHFTWEKTDLVDSLKSLT

SEQ ID NO: 122125 - protein, 208 aa, Unknown
  Bacterial polypetide isolated from the Sargasso Sea
NKIVGIDAIVLSTQHSPDIAQADLIEGVMETIIKPVLPAQWLNKDTKYFINPTGRFVIGGPMGDCGLTGRKIIVDTYGGMARHGGGAFSGKDPSKVDRSAAYAARYVAKNIVAAGLADRCEIQVSYAIGVAEPTSISVETFGTGKVSEEVLIKLVRQHFDLRPYGLTEMLNLARPIYQATAAYGHFGRNEFPWEATDKADALRADAGL

SEQ ID NO: 122126 - protein, 261 aa, Unknown
  Bacterial polypetide isolated from the Sargasso Sea
MKDIQEDFEFTSESVSEGHPDKVCDQISDTILDLFMEKNSNSRVACETLATTNRIVLAGEINLKKKKDDLSESLIEEVVRKKVRDIGYEQDGFHWKNLKIENLLHDQSSDISQGVDKDESNEMYGAGDQGIMFGYACNETDSLMPAPIDYSHRILKTLANYRHNNDSFFGPDSKSQVSVLYKNNKPKNISSIVVSSQHLESANNDEIRKKILEIIEEAIPNLVLPSEKKILINPTGRFVIGGPDGDAGLTGRKIIVDTYGG

SEQ ID NO: 122127 - protein, 127 aa, Unknown
  Bacterial polypetide isolated from the Sargasso Sea
HGGGAFSGKDPTKVDRSAAYASRYLAKNIVASKIADKCLIQLAYAIGVSKPLSIYVDLFSNDEEKNKHVEKLIKDNFDLSPRGIREMLGLNKPIYEKSAAYGHFGREPESNGAFSWEKTDKASIFNK

SEQ ID NO: 122128 - protein, 157 aa, Unknown
  Bacterial polypetide isolated from the Sargasso Sea
MSNFFTSESVSEGHPDKIADQISDSILDNFLAFDPQSKVACETLVTTGQVILAGEIKSNTYIDLQDIARKTINKIGYTKGEYQFSGDSCGVMSLIHEQSEDINQGVVKDEKKNQGAGDQGIMFGYACSETDNYMPLALDLSNQILKTLADFRRENKD

SEQ ID NO: 122129 - protein, 210 aa, Unknown
  Bacterial polypetide isolated from the Sargasso Sea
DGRPEKIDTVVLSTQHSIDVTLSDVKDFVMEEIIKTTIPKNLLSNTTKIHINPTGNFVIGGPNGDCGLTGRKIIVDTYGGMARHGGGAFSGKDPSKVDRSAAYMARYIAKNIVATKLADKCEIQLSYAIGVAEPTSISVDTFGTSKIENSKISSAVSKVFNLTPKGIIDTLDLLNVKYQPTAAFGHFGRDDKNFTWEQKDKVDILMNELG

SEQ ID NO: 122130 - protein, 290 aa, Unknown
  Bacterial polypetide isolated from the Sargasso Sea
RVACETLTTTNKVVLAGETRGPELNKDELILKVRDCIKDIGYDQDGFSWKDTTKIETHLHSQSADIAMGVDSSGNKDEGAGDQGIMFGYACNETDVLMPAPIHYSHRILRLMAEDRKSGKLKGIEPDSKSQITIEYKEGVPNAVKSVVISTQHSKDVDLAKVKELCTPYIEKSIPKNLLGNLDEKEIYINPTGNFVIGGPDGDSGLTGRKIIVDTYGGAAPHGGGAFSGKDPTKVDRSAAYASRYLAKNVVASGIADKCLIQLAYAIGVSKPLSIYVDLFDNDEEKNAHV

SEQ ID NO: 122131 - protein, 128 aa, Unknown
  Bacterial polypetide isolated from the Sargasso Sea
GMARHGGGAFSGKDPSKVDRSAAYASRYVAKNIVAAGLADFCEIQVSYAIGVAKPTSIFVETFNSEKVAKEVIVKLVEEEFDLRPKSIIEMLDLKRPIYQQTAAYGHFGRTDIELSWEKTDRAEKLKK

SEQ ID NO: 122132 - protein, 173 aa, Unknown
  Bacterial polypetide isolated from the Sargasso Sea
TLPWLEPDAKSQLTMRYSNGKPEGIDAVVLSTQHRDEVSLSELREAVMEEIIKPVLPAHWIDEGTKYFINPTGRFVIGGPQGDCGLTGRKIIVDTYGGMARHGGGAFSGKDPSKVDRSAAYLARYIAKNLVAANLAERCELQLSYAIGIAEPTSISVETFGTGKISDERIVAL

SEQ ID NO: 122133 - protein, 251 aa, Unknown
  Bacterial polypetide isolated from the Sargasso Sea
MANKNYLFTSESVSEGHPDKVCDRISDMVVDTYLSKDPVSRVACETLTTTNKVVLAGETRGPKLDKEELITQVRNCIKDIGYDQKGFSWKTADIETHLHEQSSDIAMGVDSKENKDEGAGDQGIMFGYACKETEDLMPAPIHFSHKILRLMASDRKDGSLKGIEPDSKSQVTMMYENGKPKKVTSIVVSTQHSRDLRQEEVRELIIPYIKKSIPDNYLEELDNNEIYINPTGQFIIGGPDGDTGLTGRKIL

SEQ ID NO: 122134 - protein, 217 aa, Unknown
  Bacterial polypetide isolated from the Sargasso Sea
ITIEYRDGIPAAVKSVVISTQHSADVDQKKVRELVKPYIEKSIPKNLLGELKEEEIYVNPTGNFVIGGPDGDSGLTGRKIIVDTYGGAAPHGGGAFSGKDPTKVDRSAAYASRYLAKNVVASKIAKRCLIQLAYAIGVSKPLSIYVDLFDNDENKNMHVEKLINENFDLSPRGIREMLGLNKPIYQKTAAYGHFGRVAESDGSFSWEKTDKSNIFNK

SEQ ID NO: 122135 - protein, 166 aa, Unknown
  Bacterial polypetide isolated from the Sargasso Sea
MKRKFYVNPTGNFVIGGPDGDSGLTGRKIIVDTYGGAAPHGGGAFSGKDPTKVDRSAAYASRYLAKNVVASKIANKCLIQLAYAIGVSKPLSIYVDLFDNDDEKNKYVEKLIHENFDLSPRGIREMLGLNKPIYEKTAAYGHFGRIPDDKGSFSWEKTDKSDLFSK

SEQ ID NO: 122136 - protein, 280 aa, Unknown
  Bacterial polypetide isolated from the Sargasso Sea
MSYLFTSESVSEGHPDKVADQISDGILDHFLAFDPNSRVAVETLVTTGQVILSGEVSSSAYLDVQNIAREIISSIGYNNSEYKFTGESCAVMSLIHEQSVDISRGVVADNKEDQGAGDQGIMFGYACNDTENAIPLTLEISNEILKELALLRKEKVLDYLRPDSKSQVTIKYGDDDDPIMIDTIVISTQHDEFDKDENKMLSVIKDDMINKLMPRVIDKFPDAIKKLFSEKIKYFINPTGKFVIGGPHGDTGLTGRKIIIDTYGGKGAHGGGAFSGKDPS

SEQ ID NO: 122137 - protein, 308 aa, Unknown
  Bacterial polypetide isolated from the Sargasso Sea
NYIFTSESVSEGHPDKVSDRISDAVVDHFISKDPFARVACETLTTTNKVVLSGEVRGPVQEDKDEIISKVRECIKDIGYEQDGFHWQTADIQYLLHGQSADIAMGVDSSSDKDEGAGDQGIMFGYACTETPELMPAPIFYSHKILEIMAKGRKDGSLKGLEPDSKSQVTLKYVDGKPSAVTSVVISTQHADGLSPADVKEIVNPALKESIPEELLKNLDDKEYYVNPTGNFVIGGPDGDTGLTGRKIIVDTYGGAAPHGGGAFSGKDPTKVDRSAAYASRYLAKNIVAAGLCDQCTIPVVLCNRCSQT

SEQ ID NO: 122138 - protein, 295 aa, Unknown
  Bacterial polypetide isolated from the Sargasso Sea
VVDSYLSKDPFSRVACETLTTTNKVVLAGEIRGPKIDKEEIISKVRECIKDIGYDQQGFSWRTSNVETFLHEQSADIAMGVDSKDNKDEGAGDQGIMFGYACDETEELMPAPIHFSHKILRSMAEDRKKGDLKGIEPDSKSQVTMLYEDNKPIKVTSVVISTQHSKDLNQEKVKDLIIPYINKCIPKNYIKELNPKEIYINPTGQFIIGGPDGDTGLTGRKIIVDTYGGAAPHGGGAFSGKDPTKVDRSAAYAARYLAKNIVSAGVSTKCLIQLAYAIGVSKPLSIFIKLAEGDE

SEQ ID NO: 122139 - protein, 115 aa, Unknown
  Bacterial polypetide isolated from the Sargasso Sea
MKKNYLFTSESVSEGHPDKVCDRISDMVVDSYLGAEPQSRVACETLTTTNKVVLAGEVRGPEIKKDDLIQKVRECIKDIGYDQDGFSWKDTTKIETHLHAQSADIAMGVDSSGNK

SEQ ID NO: 122140 - protein, 89 aa, Unknown
  Bacterial polypetide isolated from the Sargasso Sea
FDTLSYAIGVSKPLSIYVDLFDGDEEKAKHVEKLIKDNFDLSPRGIREMLLLNKPIYECTAAYGHFGRKPDSKGSFSWEKTDKIGIFKK

SEQ ID NO: 122141 - protein, 211 aa, Unknown
  Bacterial polypetide isolated from the Sargasso Sea
MSKFLFTSESVTEGHPDKACDAISDAILDNILSKDNNAHVACETLATKGLVVVSGEIRTTASIDVEKVVKNTIGEIGYHKGNSGVDPNEVEVLSKLHEQSPEIAQGVDSKDISKQGAGDQGLMFGFACNETKELMPLPIQIAQRLTEKLTELRKSGTLPWLRPDGKSQVSVDYENGKPISIQKTVIATQHDDMIDQYGSEEKELEFLKMKL

SEQ ID NO: 122142 - protein, 271 aa, Unknown
  Bacterial polypetide isolated from the Sargasso Sea
NNISQREFFFTSESVTEGHPDKVCDCISDGVLDSILSLDPDARVACETMASAEKIILSGEISTKLNLDKDFYIDVARKSLNEIGYSCNSAGMIGDKVDVEVNIVKQSPDIARGLSQKNKKNQGAGDQGLMFGFACKETKQLMPLPIQMSHQLAEQLTEVRKSNILDFLQPDGKTQVTIKYKGYTPIEISKIVIATQHNDLLKKFSNSTAKEQKFIRESLIKEVINPIIGKYEIDFNDNVIVNGTGRFVKGGPGADTGLTGRKIMSIHMVDM

SEQ ID NO: 122143 - protein, 285 aa, Unknown
  Bacterial polypetide isolated from the Sargasso Sea
SDIAMGVDSSGNKDEGAGDQGIMFGYACNETEELMPAPIHYSHKILRLMAEDRKSGKLKNIEPDSKSQVTFEYVDGKPTKVKSVVISSQHSADVNQTQVRELLRPYMINSIPKNFLDGFNEGEFYVNPTGNFVIGGPDGDCGLTGRKIIVDTYGGAAPHGGGAFSGKDPTKVDRSAAYAARYIAKNVVASKIANKCLIQLAYAIGVSKPLSIYVDLFDNDVEKNKFVVEKINDNFNLSPRGIREMLNLNKPIYEKTAAYGHFGRSPEENGSFSWEKTDKIKAFLK

SEQ ID NO: 122144 - protein, 112 aa, Unknown
  Bacterial polypetide isolated from the Sargasso Sea
MARHGGGAFSGKDPSKVDRSAAYAGRYVAKNIVAAGLADRCEIQVSYAIGVAEPTSISVNTFGTSKIDEEKISDLIREHFDLRPRQLINMLDLKRPIYQSTAAYGHFGREEA

SEQ ID NO: 122145 - protein, 115 aa, Unknown
  Bacterial polypetide isolated from the Sargasso Sea
MSNLKNFLFTSESVSEGHPDKVSDRISDMVVDSYLLGDPFSRVACETLTTTNKVVLAGEVRGPEIKKNDLIEKVRHCIKDIGYDQDGFTWKEATKIESHLHSQSADIAMGVDSSG

SEQ ID NO: 122146 - protein, 271 aa, Unknown
  Bacterial polypetide isolated from the Sargasso Sea
DQGAGDQGLMFGYASNETEQLMPAPIYYSHRLVEKQTKLLKSKKVDWLLPDAKSQITFVYENGRPEKIDTVVLSTQHSKDVTLSDVKDFVMEEIIKTTIPKNLLSSATKIHINPTGNFVIGGPNGDCGLTGRKIIVDTYGGMARHGGGAFSGKDPSKVDRSAAYMARYIAKNIVATELADKCEIQLSYAIGVAEPTSISVDTFGTSKIENSKISSAVSKVFNLTPKGIIDTLDLLNVKYQPTAAFGHFGRDDKNFTWEQKDKVDILMNELG

SEQ ID NO: 122147 - protein, 284 aa, Unknown
  Bacterial polypetide isolated from the Sargasso Sea
DIAMGVDSKDNKDEGAGDQGIMFGYACDETKELMPAPIHYSHKILRLMAEDRKKGILEGIEPDSKSQVTMLYENERPIKVTSIVVSTQHSKDLNQEKVREAIIPYIKKSIPENFLKELDPKEIYINPTGQFIIGGPDGDTGLTGRKIIVDTYGGAAPHGGGAFSGKDPTKVDRSAAYVSRYLAKNIVAGGVSKKCLIQLAYAIGVSKPLSIFIKLANGDEKKVDKVKKIIEDNFNLSPRGIREMLKLNKPIYEVTSAYGHFGRNHTNKGEFTWEKTDKSDLFKL

SEQ ID NO: 122148 - protein, 272 aa, Unknown
  Bacterial polypetide isolated from the Sargasso Sea
DEGAGDQGIMFGYACDETDVLMPAPIHYSHKILRLMAEDRKSGKLKSIEPDSKSQITIEYKDGKPAAVKSVVISTQHSADVNQADVRELVKPYIEKSIPKNLLSDLREDEIYVNPTGNFVIGGPDGDAGLTGRKIIVDTYGGAAPHGGGAFSGKDPTKVDRSAAYASRYLAKNIVASKISDRCLIQLAYAIGVSKPLSIYVNLFNNNEEQNRHVEKLIRENFDLSPRGIREMLSLNKPIYQKTAAYGHFGREPESDGSFSWEKTDKSNIFNS

SEQ ID NO: 122149 - protein, 230 aa, Unknown
  Bacterial polypetide isolated from the Sargasso Sea
MRPYFFTSESVSEGHPDKVCDRISDMVVDTYLSSGDPNTRVACETLTTTNKVVLAGEVRGPSISKDQIISQVRECIRDIGYEQNGFHWKNCEIDYHLHPQSSDIAMGVDSGSNKDEGAGDQGIMFGFACKDTDTLMPAPIHYSHQILYKMAEARKNGSAAGLEPDSKSQVTMLYENGKPTRVTSLVISSQHKEGLSPTDVKEIVKPYVYESIPNHLLEDLKDEEFYVNPT

SEQ ID NO: 122150 - protein, 255 aa, Unknown
  Bacterial polypetide isolated from the Sargasso Sea
MTNKTYLMTSESVGEGHPDKMADQISDAILDAILAQDKGCRVAVETLVKTGLVVLGGEITTTADVDYEAIARRTIKRIGYDKEELGFDDQSCEVLVAISKQSPDIAMGVDRADEKEQGAGDQGLMFGYATNETKQLMPATIQLSHQLVKRHADVRRSGELSWLRPDAKSQVTILFDDGKPKSIDTVVLSTQHDEDVSMDEIQAGVLEHIIKPILPEELLTETTQYLINPTGNFIIGGPVGDCGLTGRKIMWILMA

SEQ ID NO: 122151 - protein, 231 aa, Unknown
  Bacterial polypetide isolated from the Sargasso Sea
MADQISDGILDACLEQDPDSKVACETATKTNMVMVFGEITTKAKVDYEAVVRQVCRDVGFISDETGLDGNKCRVLVELHDQSPDIGQGVHGMGTKSDEDVGAGDQGHMFGYATDETPELMPLTHVLATKLGHRLTVVRKDGTCPWVLPDGKTQVTIEYENENGAMVPKRVHTILISTQHIEGVTNEKIADDLMNEVIKKVVPEKYLDADTIFHLNPSGRFVIGGPHGDAGL

SEQ ID NO: 122152 - protein, 101 aa, Unknown
  Bacterial polypetide isolated from the Sargasso Sea
MKKDFLFTSESVSEGHPDKVCDRISDMVVDTYLGLEPQSRVACETLTTTNKVVLAGEVRGPEIKKDDLIQKVRECIKDIGYDQKGFTWKDATKIESHLHSQ

SEQ ID NO: 122153 - protein, 98 aa, Unknown
  Bacterial polypetide isolated from the Sargasso Sea
VASKISDRCLIQLAYAIGVSKPLSIYVNLFTNDEEQNRHVEKLIRENFDLSPRGIREMLSLNKPIYQKTAAYGHFGREPESDGSFSWEKTDKSNIFNS

SEQ ID NO: 122154 - protein, 208 aa, Unknown
  Bacterial polypetide isolated from the Sargasso Sea
NEEEIRQRIKKDLWTSVLIPATEDLEIKPNINKTRFLVNPTGKFVVGGPQGDAGLTGRKIIVDTYGGYARHGGGAFSGKDPTKVDRSAAYAARYVAKSIVKAKLAKKAEVQLSYAIGVAKPISILVETFDTGVISQANLTQLVKEHFDLRPSAIIKEFNLRNLPKKMGGKFFRKTASYGHFGRRDLELPWENVEEKAAQLAEASKIFF

SEQ ID NO: 122155 - protein, 187 aa, Unknown
  Bacterial polypetide isolated from the Sargasso Sea
MKKNYLFTSESVSEGHPDKVCDRISDMVVDSYLGAEPQSRVACETLTTTNKVVLAGEVRGPEIKKDDLIQKVRECIKDIGYDQDGFSWRDTTKIETHLHSQSADIAMGVDSSGNKDEGAGDQGIMFGYACNETDVLMPAPIHYSHRILRLMAEDRKSGKLKGIEPDSKSQITVEYKDGLPNAVKSVV

SEQ ID NO: 122156 - protein, 320 aa, Unknown
  Bacterial polypetide isolated from the Sargasso Sea
ESVSEGHPDKVSDRISDMVVDSYLSGDPFSRVACETLTTTNKVVLAGEVRGPEIKENDLIEKVRHCIKDIGYDQDGFTWKEATKIESHLHSQSADIAMGVDSSSNKDEGAGDQGIMFGYACNETEELMPAPIHYSHKILRLMAEDRKSGKLKNIEPDSKSQVTFEYVDGKPTKVKSVVISSQHSADVNQTQVRDLLRPYMINSIPNSFLDGFNEEEFYVNPTGNFVIGGPDGDCGLTGRKIIVDTYGGAAPHGGGAFSGKDPTKVDRSAAYAARYIAKNVVASKITNKCLIQLAYAIGVSKPLSIYVDLFDKDVEKNKFV

SEQ ID NO: 122157 - protein, 267 aa, Unknown
  Bacterial polypetide isolated from the Sargasso Sea
KKRNIVSKVRDCIKDIGYEQEGFHWKNCSIDVHLHAQSSDIAMGVDSKGNKDEGAGDQGIMFGYACNETDVLMPAPIYYSHKILELMAEDRKKGISKDLEPDSKSQVTMEYENGKPVRVKSIVISTQHSPKVNQKEVKEIVRPYLEKSIPKKLLAELKEEEFYVNPTGQFIIGGPDGDSGLTGRKIIVDTYGGAAPHGGGAFSGKDPSKVDRSAAYAARYVAKNIVASGITDKCLIQLAYAIGVSKPLSIYVNLYDGNEKKSKQVEK

SEQ ID NO: 122158 - protein, 308 aa, Unknown
  Bacterial polypetide isolated from the Sargasso Sea
SESVSEGHPDKVCDRISDMVVDSYLGAEPQSRVACETLTTTNKVVLAGEVRGPEIKKDDLIQKVRECIKDIGYDQDGFSWKDTTKIETHLHSQSADIAMGVDSSGNKDEGAGDQGIMFGYACNETDVLMPAPIHYSHRILRLMAEDRKSGKLKGIEPDSKSQITIEYKDGVPNAVKSVVISTQHSKDVDLAKVKELCTPYIERSIPKNLLGSLDEKEIYINPTGNFVIGGPDGDSGLTGRKIIVDTYGGAAPHGGGAFSGKDPTKVDRSAAYASRYLAKNVVASKIADKCLIQLAYAIGVSKPLSIYV

SEQ ID NO: 122159 - protein, 194 aa, Unknown
  Bacterial polypetide isolated from the Sargasso Sea
MSHFLFSSESVSEGHPDKLCDQVSDAVLDAALAGDPNSRVAVETFATTGLIVVGGEITTTTSMNVQDLVRETVENIGYTNPEFGIDARSCAVLVTLHKQSPDIAQGVDTGAGLFQEQGAGDQGIMFGYACKQTENYMPLPINLSHALVRRLAECRKTGVLPYLRPDSKAQVTVEFNENREPVAVKTVVVSTQHS

SEQ ID NO: 122160 - protein, 266 aa, Unknown
  Bacterial polypetide isolated from the Sargasso Sea
FTSESFSEGHPDKICDRISDTILDAYLSLDKNSRVAIETLVTTNLVVISGEIRSTKIISDSEIESLARNAIKEIGYDFGDFNYENVKIMIHLHEQSPDIARGVDAIGDNSEGAGDQGIMFGYACNETKELMPATLSFSHKILKDLADKRKNNIITGILPDSKSQLTLFYENDKPKYIDSIVVSSQHTQETTQEYLHEEINKLCKKILPDVWYTADTKLLVNPTGNFVIGGPVGDTGLTGRKIIVDTYGGASPHGGGAFSGKDPTKV

SEQ ID NO: 122161 - protein, 245 aa, Unknown
  Bacterial polypetide isolated from the Sargasso Sea
MFGYACLETENYMPMAIYLCHKILERVQDERKNHAWILPDNKSQVTLTYNDINKPKNIEKIVCSTQHAEDVDIEYVRKKIEEIIRDEIKEDLSSTEFLINPTGRFVIGGPDGDTGLTGRKIIVDTYGGYAPHGGGAFSGKDCTKVDRSGAYMARYLAKNIVSSGRASNATVQLSYAIGVVEPTSVYVYADGKVRPDLANWIKENVDLSPKGIIDKFSLFELDLTETTLYGHFGRDNLPYERLDLF

SEQ ID NO: 122162 - protein, 176 aa, Unknown
  Bacterial polypetide isolated from the Sargasso Sea
MSYLFTSESVSEGHPDKMADQISDAVLDAILQKDPGARVACECLVKTGLALVAGEITTNSWVDIENLVRDVIVDIGYTSSDMGFDGRSCSVLNAIGKQSFDIAQGVDGHRRGIGAGDQGIMFGYACNETDTLMPAPITLAHRLTKRLAQLRKDQVLSWLRPDAKSQVTLRYEDTNP

SEQ ID NO: 122163 - protein, 140 aa, Unknown
  Bacterial polypetide isolated from the Sargasso Sea
RKIIVDTYGGAAPHGGGAFSGKDPTKVDRSAAYVSRYLAKNIVAAGASNKCLIQLAYAIGVSKPLSIFIKLDNGDESKIEKIKKVINDNFDLSPRGIREMLNLNNPIYEITSAYGHFGRKPSNKGQFSWEKTDKVDLFKV

SEQ ID NO: 122164 - protein, 270 aa, Unknown
  Bacterial polypetide isolated from the Sargasso Sea
VSKVRDCIKDIGYDQEGFSWKEQTKIETHLHSQSADIAMGVDSAGNKDEGAGDQGIMFGYACNETDVLMPAPIHYSHKILRLMAEDRKSGKLKGIEPDSKSQITIEYKDGMPAAVTSVVISTQHSKDVNLAKVKELCMPYIDRSIPKNLLGNLDEKEIYINPTGNFVIGGPDGDSGLTGRKIIVDTYGGAAPHGGGAFSGKDPTKVDRSAAYASRYLAKNVVASKIADKCLIQLAYAIGVSKPLSIYVDLFDNDEEKNMHVEKLIKENFD

SEQ ID NO: 122165 - protein, 193 aa, Unknown
  Bacterial polypetide isolated from the Sargasso Sea
VVIPATEDLEIKPDMHKTRFLVNPTGKFVIGGPQGDAGLTGRKIIVDTYGGYARHGGGAFSGKDPTKVDRSAAYAARYVAKSIVKAKLAKKAEVQLSYAIGVAKPISILVETFDTGVISQANLTEIIKEHFDLRPAAIINEFNLRNLPKKSGGKFFIKTASYGHFGRRDLELPWENVEEKAAQLVKASKIFLK

SEQ ID NO: 122166 - protein, 82 aa, Unknown
  Bacterial polypetide isolated from the Sargasso Sea
MGHLFTSESVSEGHPDKLCDRVSDTVLDLFLAEEAEARVACETFATTNRVIIGGEVRASKDKLAGILSSVEGAVRGAVADIG

SEQ ID NO: 122167 - protein, 247 aa, Unknown
  Bacterial polypetide isolated from the Sargasso Sea
MSYKLVTSESVSDGHPDKIADQISDAVLDQALMLDKDARVACETIIKGKWIGLAGELTASSEINYSDAVCSVLSEVYNRKVCASELELLIHMGLQSKEIAHGVDHYRDARIGAGDQGVMFGYACNENNLFMPYSVVLSHQLMRQQKKVRQSNPLLGADAKAQVTMAYTEHQPSYVDTVLISTQHVEELSLSELRSLVKKDIIDPVIPLDLVTEDTQFVINPAGSFIEGGPDADCGLTGRKIIVDTYG

SEQ ID NO: 122168 - protein, 143 aa, Unknown
  Bacterial polypetide isolated from the Sargasso Sea
MTGRKIIVDTYGGAAPHGGGAFSGKDPTKVDRSAAYASRYLAKNIVASGISDKCLIQLSYAIGISKPLSIYLKLSDKDENKVEDVKKIIKKNFDLSPRGIREMLDLNKPIYEVTSAYGHFGRKPTDKGEFSWEKTDKKSLFQL

SEQ ID NO: 122169 - protein, 271 aa, Unknown
  Bacterial polypetide isolated from the Sargasso Sea
MKKNFLFTSESVSEGHPDKVCDRISDMVVDSYLGSEPQSRVACETLTTTNKVVLAGEVRGPEIKKDDLIQRVRDCIKDIGYDQDGFTWKEATKIESHLHSQSADIAMGVDSSGNKDEGAGDQGIMFGYACNETDVLMPAPIHYSHKILRLMAEDRKSGKLQNIEPDSKSQITIEYKDGKPASVKSVVISTQHSADVNQSQVRDLVKPYIERSIPKNLINGLDESEIYVNPTGNFVIGGPDGDSGLTGRKIIVDTYGGAAPHGGGAFSGKDP

SEQ ID NO: 122170 - protein, 241 aa, Unknown
  Bacterial polypetide isolated from the Sargasso Sea
MKKNYLFTSESVSEGHPDKVCDRISDMVVDSYLGAESQSRVACETLTTTNKVVLAGEVRGPEIKKEDLIQKVRECIKDIGYDQKGFTWRDATKIECHLHSQSADIAMGVDSSGNKDEGAGDQGIMFGYACNETDVLMPAPIHYSHKILRLMAEDRKSGKLKSIEPDSKSQITIEYKDGKPAKVKSVVISTQHSADVNQSKVREVVKPYIEKSIPKNLLNGLEENEIYVNPNRKFCNRWPRW

SEQ ID NO: 122171 - protein, 123 aa, Unknown
  Bacterial polypetide isolated from the Sargasso Sea
AFSGKDPTKVDRSAAYAARYIAKNIVASKISEKCLIQIAYAIGVSKPLSIYVDLFDKNIEKNKFVVEKINENFDLSPRGIREMLNLNKPIYEKTAAYGHFGRSPEENGSFSWEKTDKINAFLK

SEQ ID NO: 122172 - protein, 169 aa, Unknown
  Bacterial polypetide isolated from the Sargasso Sea
KDLKEEEIYINPTGQFIIGGPDGDTGLTGRKIIVDTYGGSAPHGGGAFSGKDPTKVDRSAAYASRYLAKNIVAAGVSDNCLIQLAYAIGVSKPLSIFLRLDEKDKDKSEKILKIIHENFDLSPRGIREMLKLNKPIYEVTSSYGHFGRKLGKNGEFSWENTDKKDLFKL

SEQ ID NO: 122173 - protein, 322 aa, Unknown
  Bacterial polypetide isolated from the Sargasso Sea
ISDAVLDAYLAEDPNSRVACETMIKNNMVFIAGEITSLGSPDLEPVVRKTINDIGYNTDEYGFNGDTCEFTNLVFEQSPDISQGVTEGEGENLEQGAGDQGLMFGYACTETESLMPLPIDLSHRLVKKQADVMKANGLSWLRPDAKSQVSAIYSDDGKTIEGLSAIVLSTQHDEDVTQDDIKEGVMEEIIKPIVPAEWILDSTKIYINPTGKFVIGGPVGDCGLTGRKIIVDTYGGMARHGGGAFSGKDPSKVDRSAAYAARYVAKNIVAAGLADYCEIQVSYAIGVAKPTSINVNTFDSEKISKEAIEKIVEEKFDLRPKS

SEQ ID NO: 122174 - protein, 310 aa, Unknown
  Bacterial polypetide isolated from the Sargasso Sea
KIYLFTSESVSEGHPDKVCDRISDMVVDSYLSKDPFSRVACETLTTTNKVVLAGETRGPEINKNELEEKVRNCIKDIGYEQDGFHWKNCSVDINLHSQSSDIAMGVDSKGNKDEGAGDQGIMFGYACDETEVLMPAPIYYSHKILELMAIDRKNGKANKLEPDSKSQVTLQYEDGVPSKVTAVVISTQHSPKVSQSQVKEIVRPYLEKAIPKKLLTNLNDKDFYVNPTGQFIIGGPDGDTGLTGRKIIVDTYGGAARHGGGAFSGKDPSKVDRSAAYAARYVAKNVVASKIAKKCEIQLSYAIGFQSRYL

SEQ ID NO: 122175 - protein, 130 aa, Unknown
  Bacterial polypetide isolated from the Sargasso Sea
MKKNYLFTSESVSEGHPDKVCDRISDMVVDTYLGAEPHSRVACETLTTTNKVVLAGEVRGPEIKKDDLIEKVRKCIKDIGYDQDGFTYKEATKIESHLHAQSSDIAMGVDSSGNKDEGAGDQGIMFGYAC

SEQ ID NO: 122176 - protein, 249 aa, Unknown
  Bacterial polypetide isolated from the Sargasso Sea
NETDILMPAPITYAHALVKRQSEVRKDGTLPWLRPDAKSQVTFAYEDNKIVGIDAIVLSTQHSPDIAQADLIEGVMETIIKPVLPAQWLNKDTKYFINPTGRFVIGGPMGDCGLTGRKIIVDTYGGMARHGGGAFSGKDPSKVDRSAAYAARYVAKNIVAAGLADRCEIQVSYAIGVAEPTSISVETFGTGKVSEEVLIKLVRQHFDLRPYGLTEMLNLARPIYQATAAYGHFGRNEFPWEATDKADAL

SEQ ID NO: 122177 - protein, 217 aa, Unknown
  Bacterial polypetide isolated from the Sargasso Sea
ITIEYKDGKPAHVKSVVISTQHSADVNQSQVRELVKPYIEKSIPKNLINGLEESEIYVNPTGNFVIGGPDGDSGLTGRKIIVDTYGGAAPHGGGAFSGKDPTKVDRSAAYASRYLAKNVVASKIADKCLIQLAYAIGVSKPLSIYVDLFDNDEEKNRHVEKLINDNFDLSPRGIREMLNLNKPIYEKTSAYGHFGRDTGSDGSFSWEKTDKANVFNK

SEQ ID NO: 122178 - protein, 115 aa, Unknown
  Bacterial polypetide isolated from the Sargasso Sea
SPDIAQGVNEGEGEDLDQGAGDQGLMFGYACSETPVLMPAPINLSHELVLKQSEVRKNGELSWLRPDAKSQVSVVYKDDRKTVDYVSAIVLSTQHDEDISQDEIKAKVREKIINP

SEQ ID NO: 122179 - protein, 251 aa, Unknown
  Bacterial polypetide isolated from the Sargasso Sea
AGDQGLMFGYACLETENYMPMAIYLCHKILERVQNERENHTWILPDNKSQVTLTYNDINKPKNIEKIVCSTQHAEDTDIEHVRKKIEEIIRDEIKEDLSSTEFLINPTGRFVVGGPDGDTGLTGRKIIVDTYGGYAPHGGGAFSGKDCTKVDRSGAYMARYLAKNIVSSGKASNATVQLSYAIGVVEPTSVYVYADGKVRPDLANWIKENVDLSPKGIIDKFSLFELDLTQTTLYGHFGRDNLPYEKLDLF

SEQ ID NO: 122180 - protein, 109 aa, Unknown
  Bacterial polypetide isolated from the Sargasso Sea
AYAARYIAKNIVASKIADKCLIQLAYAIGVSKPLSIYVDLFDNDLDKNKFVVEKIKENFDLSPRGIREMLNLNKPIYEKTAAYGHFGRSPNDDGSFSWEKTDKSSFFTK

SEQ ID NO: 122181 - protein, 302 aa, Unknown
  Bacterial polypetide isolated from the Sargasso Sea
FTWKEATKIECHLHSQSSDIAMGVDSSGNKDEGAGDQGIMFGYACNETDVLMPAPIHYSHKILRLMAEDRKSGKLKNIEPDSKSQVTFEYVDGKPTKVKSVVISSQHSADVNQAQVRDLLRPYMLNSIPGNFLEGFNEDEFYVNPTGNFVIGGPDGDCGLTGRKIIVDTYGGAAPHGGGAFSGKDPTKVDRSAAYAARYIAKNVVASKISDKCLIQLAYAIGVSKPLSIYVDLFDNDLDKNKFVIEKINENFDLSPRGIREMLNLNKPIYEKTAAYGHFGRVPENDGSFSWEKTDKTNVFSK

SEQ ID NO: 122182 - protein, 246 aa, Unknown
  Bacterial polypetide isolated from the Sargasso Sea
HYSHKILRLMAEDRKSGKLKNIEPDSKSQVTFEYIDGKPSKVKSVVISSQHSADVNQTQVKDLLRPYMLKSIPKNFLDGFNEDEFYVNPTGNFVIGGPDGDCGLTGRKIIVDTYGGAAPHGGGAFSGKDPTKVDRSAAYAARYIAKNVVGSEISKRCLIQLAYAIGVSKPLSIYVDLFDNDLDKNKFVVEKIKENFDLSPRGIREMLNLNKPIYEKTAAYGHFGRSPEDNGSFSWEKTDKIGIFSK

SEQ ID NO: 122183 - protein, 269 aa, Unknown
  Bacterial polypetide isolated from the Sargasso Sea
NTGLCLLTGEITSKAKVDYIKLVRNVIKEIGYEGYKAGGFDANSCAVLVALDEQSPDISQGVNEADDVNDDLEDNTGAGDQGIMFGYACDETPELMPLPISLAHRLAIQLAKVRHENVLNYLLPDGKTQVSIDYEKGLPVSINTILISTQHNPEIDGMTNEEEIRQRIKEDLWKHVVIPATEDLEIKPNIIKTRFLVNPTGKFVVGGPQGDAGLTGRKIIVDTYGGYARHGGGAFSGKDPTKVDRSAAYAARFVAKSIVNAKLAKKAEV

SEQ ID NO: 122184 - protein, 152 aa, Unknown
  Bacterial polypetide isolated from the Sargasso Sea
MKKDYLFTSESVSEGHPDKVCDRISDMVVDTYLASEPQSRVACETLTTTNKVVLAGETRGPEIKKDELISKVRDCIKDIGYDQDGFSWKDTTKIETHLHSQSADIAMGVDSSGNKDEGAGDQGIMFGYACNETDVLMPAPIHYSHRILRLMA

SEQ ID NO: 122185 - protein, 194 aa, Unknown
  Bacterial polypetide isolated from the Sargasso Sea
HSEDISQNDLVEAVMETIIKPVLPAELITSATKFFINPTGRFVIGGPMGDCGLTGRKIIVDTYGGMARHGGGAFSGKDPSKVDRSAAYAARYVAKNVVAAGLADKCELQVSYAIGVAEPTSISVETFGTGKLEEARLIELIREHFDLRPYGLIQMLDLERPIYLPTAAYGHFGRDEFPWERTDKADALRAAAGL

SEQ ID NO: 122186 - protein, 276 aa, Unknown
  Bacterial polypetide isolated from the Sargasso Sea
QGLMFGFACNETKELMPLPIHLSHRLVERMTDLRKNGTISWLRPDSKSQVSVAYENETPIAIKKVVIATQHDDMLNKFDNENDEHDFVEKEIINHVIKPVLDESGLPYDESFIVNGTGRFVFGGPEADTGLTGRKIIVDTYGGYAPHGGGAFSGKDPSKVDRSAAYMARYIAKNFVAANLATKCEVQLSYSIGVAEPTSFYVKSFGTSELSDEQLTDIAKSVFELKPGQIINHLNLKYPRYRITAANGHFGRENDLFTWEKTDKVDELKAAVSERK

SEQ ID NO: 122187 - protein, 279 aa, Unknown
  Bacterial polypetide isolated from the Sargasso Sea
ELISKVRDCIKDIGYDQDGFSWRDQTKIEAHLHSQSADIAMGVDSAGNKDEGAGDQGIMFGYACNETDVLMPAPIHYSHKILRLMAEDRKSGKLNGIEPDSKSQITIEYKDGMPSAVTSVVISTQHSKDVNLAQVKELCMPYIERSIPKNLLGSLDEKEIYINPTGNFVIGGPDGDSGLTGRKIIVDTYGGAAPHGGGAFSGKDPTKVDRSAAYASRYLAKNVVASKIADKCLIQLAYAIGVSKPLSIYVDLFDNDEEKNVHVEKLIKENFDLSPRGIR

SEQ ID NO: 122188 - protein, 241 aa, Unknown
  Bacterial polypetide isolated from the Sargasso Sea
DQGIMVGYAINETESLMPPTFDKSRNIQQALWDIQHSDEMLDLDSKVQVTTGGDKTKVVVSTQHQSEIDIDDLHSRVFELVGNYISEEYILDLNPSGSFVKGGPAGDTGLTGRKIVVDAYGPSVPVGGGAFSGKDPSKVDRSAAYAARHLAKNIVSHGLSDECLVRVSYAIGKADPYELTVETFGTEKSENKVLDDFTSKFDMKPGAIIERLNLLEVDYKEDTLFSHFGHNDRNWEKIENL

SEQ ID NO: 122189 - protein, 132 aa, Unknown
  Bacterial polypetide isolated from the Sargasso Sea
SGKDPTKVDRSAAYAARYVAKSIVKAKLAKKVEVQLSYAIGVAKPISILVETFDTGVISQANLTELVKKYFDLRPAAIIKEFDLRNLPKKMGGKFFRETASYGHFGRRDLDLPWENVEEKASQLAKASKVFL

SEQ ID NO: 122190 - protein, 113 aa, Unknown
  Bacterial polypetide isolated from the Sargasso Sea
MSNLKNYLFTSESVSEGHPDKVSDRISDMVVDSYLSNDPFSRVACETLTTTNKVVLAGEVRGPEIKKDELIEKVRDCIKDIGYDQKGFTWREATKIESHLHSQSVDIAIGVDS

SEQ ID NO: 122191 - protein, 287 aa, Unknown
  Bacterial polypetide isolated from the Sargasso Sea
SRVACETVVNTGLCLLTGEITSRAKLDYIKLVRKVIKEIGYEGSKAGGFDSNSCAVLVALDEQSPDISQGVNEADDMNEDLENNTGAGDQGIMFGYACDETPELMPLPISLAHRLAIQLAKVRHEKVLDYLLPDGKTQVSIDYKKGVPVSINTILISTQHTAEIDGITNEEEIRQKIKEDLWINVVLPATEDLEIKPSSHKTRFLVNPTGKFVVGGPQGDAGLTGRKIIVDTYGGYARHGGGAFSGKDPTKVDRSAAYAARYVAKSIVNAKLAKKAEVQLSYAIGVA

SEQ ID NO: 122192 - protein, 215 aa, Unknown
  Bacterial polypetide isolated from the Sargasso Sea
MLYDDGKPKKVTSIVISTQHSKDLDQKKVKDLVYPYISKSIPKELIKDLNEENVYVNPTGQFIIGGPDGDTGLTGRKIIVDTYGGAAPHGGGAFSGKDPTKVDRSAAYVARYVAKNVVASGVSDKCLIQLAYAIGVSKPLSVYVKLSDQDKNKTEDVKKIINQNFDLSPRGIRELLGLNKPIYEITSAYGHFGRDPSNNGEFSWEKTDKKDIFIK

SEQ ID NO: 122193 - protein, 210 aa, Unknown
  Bacterial polypetide isolated from the Sargasso Sea
MSRFLFTSESVTEGHPDKACDAFSDAILDNILSKDNEAHVACESLATKGLVVISGEIRTTATINVEKVVKDTIKEIGYHKTNSGIDPDEVEVLSKLHEQSPEIAQGVDSEDISAQGAGDQGLMFGFACKETPELMPLPIQISHRLTERLTQLRKDGTLPWLRPDGKSQVSVNYEDGRPVSIDKTVIATQHDDMIGEYGSKNKELEFVNKE

SEQ ID NO: 122194 - protein, 160 aa, Unknown
  Bacterial polypetide isolated from the Sargasso Sea
INPTGNFVIGGPDGDSGLTGRKIIVDTYGGAAPHGGGAFSGKDPTKVDRSAAYASRYLAKNVVASKIADKCLIQLAYAIGVSKPLSIYVDLFDNDEEKNRHVEKLINDNFDLSPRGIREMLGLNKAIYEKTAAYGHFGRDPGSDGSFSWEKTDKADVFRK

SEQ ID NO: 122195 - protein, 51 aa, Unknown
  Bacterial polypetide isolated from the Sargasso Sea
MSDFIFTSESVTEGHPDKICDQISDAVLDALLTEDPESRVACETVVNTGLC

SEQ ID NO: 122196 - protein, 258 aa, Unknown
  Bacterial polypetide isolated from the Sargasso Sea
NSKNYLFTSESVSEGHPDKVCDRISDMVVDTYISKDPLSRVACETLTTTNKVILAGEVRGPETKKEDIEVKVRDCIKDIGYEQKGFHWKNCSVEVHLHAQSSDIAMGVDSKGNKDEGAGDQGIMFGYACNETDVLMPAPIYYSHKILELMAEDRKKGISKDLEPDSKSQVTMEYENGKPVKVKSIVISTQHSPEVDQKKVKEIVRPYLEKSIPKKLLKELKEEEFYVNPTGQFIIGGPDGDSGLTGRKIIVDTYGGAA

SEQ ID NO: 122197 - protein, 268 aa, Unknown
  Bacterial polypetide isolated from the Sargasso Sea
GDQGIMFGYACNETDVLMPAPIHYSHKILRLMAEDRKSGKLNGIEPDSKSQITIEYKEGMPAAVTSVVISTQHSKDVSLAQVKELCMPYIERSIPKNLLGSLNEKEIYINPTGNFVIGGPDGDSGLTGRKIIVDTYGGAAPHGGGAFSGKDPTKVDRSAAYASRYLAKNIVASKISDKCLIQLAYAIGVSKPLSIYVDLFDNDEEKNMHVEKLIKENFDLSPRGIREMLGLNKAIYEKTSAYGHFGRVPESDGSFSWEKTDKSEVFSK

SEQ ID NO: 122198 - protein, 100 aa, Unknown
  Bacterial polypetide isolated from the Sargasso Sea
RYVARNIVAAGLADKCEVQVSYAIGIADPTSISVNTFETGKISEEQILSLIREKFDLRPKGLIAMLDLLKPIYQETAAYGHFGREQFPWEKTDKIEELKS

SEQ ID NO: 122199 - protein, 244 aa, Unknown
  Bacterial polypetide isolated from the Sargasso Sea
SHKILRLMAEDRKSGKLNGIEPDSKSQITIEYKDGMPASVTSVVISTQHSKDVSLAQVKELCMPYIERSIPKKLLGSLDEKEIYINPTGNFVIGGPDGDSGLTGRKIIVDTYGGAAPHGGGAFSGKDPTKVDRSAAYASRYLAKNIVASKIADKCLIQLAYAIGVSKPLSIYVDLFDNDEEKNMHVEKLIKENFDLSPRGIREMLGLNKPIYEKTAAYGHFGRIPEDDGSFSWEKTDKSGVFSK

SEQ ID NO: 122200 - protein, 144 aa, Unknown
  Bacterial polypetide isolated from the Sargasso Sea
MSYIFTSESVSAGHPDKICDQISDAVLDACLIQDKNSRVACETMVKNNNVVLAGEITSIAEIDYEQIARSVVKNIGYDHEGLGFSYDSFKFTNYISEQSQDISEGIAKGEQLGSGDQGIMFGYACRETPELMPLPIALAHQLTR

SEQ ID NO: 122201 - protein, 169 aa, Unknown
  Bacterial polypetide isolated from the Sargasso Sea
MNNLKNYLFTSESVSEGHPDKVCDRISDMVVDSYLGADPNSRVACETLTTTNKVVLAGEVRGPEIKKDELIQKVRECIKDIGYDQEGFTWKDATKIESHLHSQSADIAMGVDASGNKDEGAGDQGIMFGYACRETEVLMPAPIHYSHKILRLMAEDRKSGKLKNIEPDS

SEQ ID NO: 122202 - protein, 245 aa, Unknown
  Bacterial polypetide isolated from the Sargasso Sea
MGRLFTSESVSEGHPDKISDQISDAVLDAMLAQDSRSRVACETLVTTGQVIVSGEVTSKALVDVPVLVRDTIKRIGYTDSDYGFDYQSCGVLVALHQQSPDISQGVSSGEGLHEDQGAGDQGMMFGYACRETPELMPMPIMMSHKLVQKLAQLRKNKSIPYLRPDSKSQVTVEYDEKDKPVRVHTVVISTQHDDKVSHSRITNDMVKQVIQKVIPARFLDKDTVYHINPTGRFVVGGPHGDTGLT

SEQ ID NO: 122203 - protein, 295 aa, Unknown
  Bacterial polypetide isolated from the Sargasso Sea
TIDVQAIVKNTLNDIGYYDEAYGMDAKNVKVISMLDKQSPEIAQGVNEGSGLHDEQGAGDQGLMFGFACNETKELMPLPIHLSHRLVEKMTDHRKSGKIPWLRPDSKSQVSVAYDDDKPISISKVVIATQHDDMLDKFQDESEEHKFVEKEIIDHVIKPVLNESGHPYNDDFIVNGTGRFVFGGPEADTGLTGRKIIVDTYGGYAPHGGGAFSGKDPSKVDRSAAYMARYIAKNIVAAKLADKCEVQFSYSIGIANPTSFYAKTFGTGTMSDEKLTELAQSVFPLKPAGIIDHLN

SEQ ID NO: 122204 - protein, 229 aa, Unknown
  Bacterial polypetide isolated from the Sargasso Sea
ITGILPDSKSQLTLFYENDKPKYIDSIVVSSQHTEETTQEYLYEEINKLCKNILPDEWYTADTKLLVNPTGNFVIGGPVGDTGLTGRKIIVDTYGGASPHGGGAFSGKDPTKVDRSAAYAARYLSKNIVHAGISERCTIQLSYAIGISEPLSIFVDLHGNNRVDSNRVEKFIKDRFDLSPRGIIDMLGLCNPIFSETSSYGHFGREPNDKGCFTWENIDLSSEFKNELL

SEQ ID NO: 122205 - protein, 100 aa, Unknown
  Bacterial polypetide isolated from the Sargasso Sea
MSVNEFIFSSESVTEGHPDKVADQISDSVLDEILKEDPNARVACETLITRNRVILSAEIKSNVKVDYEQIVKNTLLNIGYDDESKGFDANSCIIDLYIEE

SEQ ID NO: 122206 - protein, 210 aa, Unknown
  Bacterial polypetide isolated from the Sargasso Sea
MSNKYLFTSESVSEGHPDKVCDIISDSVVDDFLSQENPENSRVAMETLVTTNKVVMAGEVRGPENYKCDYETLARNAVKEIGYEQEGFHWEKFSFDCSGVHSQSADIAMGVDASGNKDQGAGDQGIMFGYACKETPSLMPAPIYYSHKILEEMALKRKKGETPGIQPDSKSQVTLQYNNGSPEKCTKIVVSTQHDENLDQRGVSEIIISI

SEQ ID NO: 122207 - protein, 186 aa, Unknown
  Bacterial polypetide isolated from the Sargasso Sea
REAVIPYIKKSIPENFLTDLNSKEIYINPTGQFIIGGPDGDTGLTGRKIIVDTYGGAAPHGGGAFSGKDPTKVDRSAAYASRYLAKNIVAAGVSSKCLIQLAYAIGVSKPLSIFIKLADDDEGKVDKVKKIIEDNFNLSPRGIREMLQLNNPIYEITSAYGHFGRKSTNKGEFTWEKTDKIDLFKL

SEQ ID NO: 122208 - protein, 184 aa, Unknown
  Bacterial polypetide isolated from the Sargasso Sea
EIKTEVMDKIIKPIVPEEWLLDSTNIFINPTGKFVIGGPVGDCGLTGRKIIVDTYGGMARHGGGAFSGKDPSKVDRSAAYASRYVAKNIVAAGLADYCEIQVSYAIGVAEPTSIHVETFNSEKISKEAIVKIVKEKFDLRPKSLINMLDLKRPIYLPTAAYGHFGRSDIELSWEKTDKAADISE

SEQ ID NO: 122209 - protein, 154 aa, Unknown
  Bacterial polypetide isolated from the Sargasso Sea
RFVYGGPEADTGLTGRKIIVDTYGGYAPHGGGAFSGKDSSKVDRSATYMARYIAKNIVAADLADRCEVQLSYGIGVAEPTSFYVKTQGTGKKDDQTLTEIARDVFPIKPGEIVAHLDLKKPRYRDTAAYGHFGRELEKFTWERTDMVETLLKRL

SEQ ID NO: 122210 - protein, 222 aa, Unknown
  Bacterial polypetide isolated from the Sargasso Sea
DSKSQITIEYKDGLPAAVTSVVISTQHSKDVNLTKVKELCLPYIERSIPKNLLGNLDEKEIYINPTGNFVIGGPDGDSGLTGRKIIVDTYGGAAPHGGGAFSGKDPTKVDRSAAYASRYLAKNIVASKIADKCLIQLAYAIGVSKPLSIYVDLFDNDEEKNMHVEKLIKENFDLSPRGIREMLSLNRPIYEKTAAYGHFGRIPETDGSFSWEKTDKSEVFSK

SEQ ID NO: 122211 - protein, 77 aa, Unknown
  Bacterial polypetide isolated from the Sargasso Sea
MTSESVGEGHPDKMADQISDAILDAILEQDKGCRVAVETLVKTGLVVLGGEITTTADVDYEAIARRTIKRIGYDKEE

SEQ ID NO: 122212 - protein, 219 aa, Unknown
  Bacterial polypetide isolated from the Sargasso Sea
MSKNSENFIFTSESVSEGHPDKICDQISDLVVDLYMKADKNSRVACETLATTNRVILSGEVKINQNHQEVKNEIIDQKIREKIKDIGYEQDGFHWENIEIENYLHKQSEDISQGVDSSETLGAGDQGIMFGYACSETDYLMPAPIHYSHKILQNLSNYRKNNDSFFGPDSKSQVSMQYEDNKPKNITSIVVSTQHFEDVQNEEIRKKVIQIIEESIPVQ

SEQ ID NO: 122213 - protein, 208 aa, Unknown
  Bacterial polypetide isolated from the Sargasso Sea
PDSKSQVTMSYDGINEPKDIKKIVCSTQHLESITIEQIREQVEEIIRDEISEYDLSKTKFLINPTGRFVIGGPDGDTGVTGRKIIVDTYGGYAPHGGGAFSGKDCSKVDRSAAYMSRYLAKNIVSSGKADNCTVQLSYAIGVVEPTSVYVYADGKVRTDFTNWIIDNVDLTPKGIIDRFGLFNLDLTMTTLYGHFGKSHLPFEKLDLY

SEQ ID NO: 122214 - protein, 275 aa, Unknown
  Bacterial polypetide isolated from the Sargasso Sea
KMTEKNYLFTSESVSEGHPDKVCDRISDMVVDSYLSKDPFSRVACETLTTTNKVVLAGEIRGPNINKNDIIEKVRNCIKDIGYDQEGFSWKDQTKIESHLHEQSTDIAMGVDSKDNKDEGAGDQGIMFGYACTETEDLMPAPIFYSHKILRLMAKDRKSGVLKGIEPDSKSQVTMEYQNGKPIKVTSVVISTQHSKDLDQEKVKELILPYIDRSIPKELINDLKKTEIYINPTGQFIIGGPDGDTGLTGRKIIVDTYGGAAPHGGGAFSGKDPTK

SEQ ID NO: 122215 - protein, 260 aa, Unknown
  Bacterial polypetide isolated from the Sargasso Sea
DCIKDIGYDQEGFSWKKANVETFLHEQSADIAMGVDSKGNKDEGAGDQGIMFGYACTETEDLMPAPIHFSHKILRLMAEDRKKGALKGIEPDSKSQVTMLYQDNKPMKVTSVVISTQHSKDLNLEQVKELVLPYIKKSIPEKYVKDLNSKEIYINPTGQFIIGGPDGDTGLTGRKIIVDTYGGAAPHGGGAFSGKDPTKVDRSAAYAARYLSKNIVSAGVSEKCLIQLAYAIGVSKPLSIFIKLAEGDEDKVTEVKKIID

SEQ ID NO: 122216 - protein, 217 aa, Unknown
  Bacterial polypetide isolated from the Sargasso Sea
MSYIFTSESVSEGHPDKVCDQISDAILDSYLAQDPNSRVACETLIKNNTVIVAGEITSSGTPDIEEVIRNTVNEIGYDHDDLGFNGNNCEIQNLISKQSLDIAQGVNEGEGEDLDQGAGDQGLMFGYACSETPVLMPTPINLSHELVLKQSKVRKNEELGWLRPDAKSQVSVVYKDDIKTVDYVSAIVLSTQHDEDVSQDEIKAKVREKIIDPNNSN

SEQ ID NO: 122217 - protein, 175 aa, Unknown
  Bacterial polypetide isolated from the Sargasso Sea
IPENFLEGFNEDEFYVNPTGNFVIGGPDGDCGLTGRKIIVDTYGGAAPHGGGAFSGKDPTKVDRSAAYAARYIAKNIVSSKIAEKCLIQLAYAIGVSKPLSIYVDLFDNDFDKNKFVVEKIKENFDLSPRGIREMLNLNKPIYEKTAAYGHFGRTPEDNGSFSWEKTDKTNVFSK

SEQ ID NO: 122218 - protein, 198 aa, Unknown
  Bacterial polypetide isolated from the Sargasso Sea
SQHSPDINQLEVRELLKPYMIKSIPKKFLEGFDESELYVNPTGNFVIGGPDGDTGLTGRKIIVDTYGGAAPHGGGAFSGKDPTKVDRSAAYAARYIAKNVVASKISDKCLIQLAYAIGVSKPLSIYVDLFDGDVEKNKFVVEKINENFDLSPRGIREMLNLNKPIYEKTAAYGHFGRSPEENGSFSWEKTDKIKTFFK

SEQ ID NO: 122219 - protein, 61 aa, Unknown
  Bacterial polypetide isolated from the Sargasso Sea
MSYIFTSESVSEGHPDKICDQISDAILDECLKQDRESRVACETLVKNNTIVVAGEISSKAS

SEQ ID NO: 122220 - protein, 163 aa, Unknown
  Bacterial polypetide isolated from the Sargasso Sea
MFLFTSESVSEGHPDKICDQLSDTLLDAFLAQDPLSRVAIECFITTGMVVIGGEVTSKAQVNVQDIVRSKLTAIGYNHPDIGFDASSCAVLVVLNKQSADIAQGVNENDGAFVEQGAGDQGLTFGYACDQTPELMPLPIQLSQQLTLKLAQIRKENKLSYLRP

SEQ ID NO: 122221 - protein, 208 aa, Unknown
  Bacterial polypetide isolated from the Sargasso Sea
MSRTNFTFTSESVSEGHPDKVCDRISDAVLDAFISEEPEARVACETFATTNRVVIGGEVGLSDKNILKEYMGRIEQIARSCIQDIGYEQEKFHHQTVEVTNLLHEQSAHIAQGVNAGANKDEGAGDQGIMFGYATDETEDLMPAPIQYSHAMLRRLAEVRKNGTEPTLGPDAKSQLSVKYQDGKPTSVTSIVLSTQHIDEKMTSKDVR

SEQ ID NO: 122222 - protein, 218 aa, Unknown
  Bacterial polypetide isolated from the Sargasso Sea
QITIEYKDGKPSSVKSVVISTQHSADVNQSQVRELVKPYIERAIPKNLINGLDDTEIYINPTGNFVIGGPDGDSGLTGRKIIVDTYGGAAPHGGGAFSGKDPTKVDRSAAYASRYLAKNIVASKIAEKCLIQLAYAIGVSKPLSIYVDLFSNDEEKNRHVEKLINDNFDLSPRGIREMLGLNKPIYEKSAAYGHFGRDPEADGAFSWEKTDKADVFNK

SEQ ID NO: 122223 - protein, 221 aa, Unknown
  Bacterial polypetide isolated from the Sargasso Sea
SKSQITIEYKDGKPASVKSVVISTQHSADINQSQVRDLVKPYIEKSIPKNLINGLDDTEIYVNPTGNFVIGGPDGDSGLTGRKIIVDTYGGAAPHGGGAFSGKDPTKVDRSAAYAARYLAKNVVASKIADKCLIQLAYAIGVSKPLSIYVDLFANDEEKNKHVEKLINENFDLSPRGIREMLGLNKAIYQKTAAYGHFGRDSKSDGSFSWEKTDKKDVFCK

SEQ ID NO: 122224 - protein, 176 aa, Unknown
  Bacterial polypetide isolated from the Sargasso Sea
PNELLEGLKDEEFYVNPTGNFVIGGPDGDSGLTGRKIIVDTYGGAAPHGGGAFSGKDPSKVDRSAAYAARYLAKNVVAADLADECTIQLSYAIGVSKPLSVYVNTNGTNKVDEQKIEKSVQDLFDLSPRGIREHLKLTNAIYVPTSAYGHFGRQPTDKGHFTWEKTDLVEALKGIA

SEQ ID NO: 122225 - protein, 203 aa, Unknown
  Bacterial polypetide isolated from the Sargasso Sea
MKKNYLFTSESVSEGHPDKVCDRISDMVVDSYLGAEPQSRVACETLTTTNKVVLAGEVRGPEIKKDDLIQKVRDCIKDIGYDQEGFTYKEATKIESHLHAQSSDIAMGVDSSGNKDEGAGDQGIMFGYACNETDVLMPAPIHYSHKILRLMAEDRKSGKLKNIEPDSKSQITIEYKDGKPSNVKSVVISTQHSANVNQSQVRD

SEQ ID NO: 122226 - protein, 183 aa, Unknown
  Bacterial polypetide isolated from the Sargasso Sea
MKQNYLFTSESVSEGHPDKVCDRISDMVVDTYIGAEPQSRVACETLTTTNKVVLAGEVRGPEIKKEDLIQKVRDCIKDIGYDQDGFTYKEATKIESHLHSQSADIAMGVDSSGNKDEGAGDQGIMFGYACNETDVLMPAPIHYSHKILRLMAEDRKSGKLKNIEPDSKSQITIEYKDGKPFNV

SEQ ID NO: 122227 - protein, 295 aa, Unknown
  Bacterial polypetide isolated from the Sargasso Sea
MSNLKNYLFTSESVSEGHPDKVSDRISDMVVDTFISRDPYSRVACETLTTTNKVVLAGEVRGPEIKKDELIEKVRGCIKDIGYDQEGFSWKQATKIESHLHSQSVDIAMGVDSSGNKDEGAGDQGIMFGYACNETEVLMPAPIHYSHKILRLMSEDRKSGKLKNIEPDSKSQVTFEYVEGKPSKVKSVVISSQHSADINQSQVRDLLRPYLLKSIPQNFLKDFNEDEFYVNPTGNFVIGGPDGDCGLTGRKIIVDTYGGAAPHGGGAFSGKDPTKVDRSAAYAARYIAKNIVGLK

SEQ ID NO: 122228 - protein, 216 aa, Unknown
  Bacterial polypetide isolated from the Sargasso Sea
SQITMEYKSDGTPLRIDTVVISTQHSPNVNQELIKNDLKEYVCNETIPSELIDNNTRFIFNPSGQFIVGGPHGDAGLTGRKIIVDTYGGSCRHGGGAFSGKDCTKVDRTGAYAARWVAKNCVAAGLAERMEVQLSYAIGMAEPISILVDAHGTNKVSIDEITNKIRNNFDLSPGGIIESLNLRRPIYKQTAAYGHFGRIDLDLPWENLNKVDNLRI

SEQ ID NO: 122229 - protein, 53 aa, Unknown
  Bacterial polypetide isolated from the Sargasso Sea
MSDYVFTSESVSEGHPDKVCDAISDAILDNLLDQDPESHVACETLATTGTVIV

SEQ ID NO: 122230 - protein, 108 aa, Unknown
  Bacterial polypetide isolated from the Sargasso Sea
YAARYIAKNVFASKIANKCLIQLAYAIGVSKPLSIYVDLFDNDLDKNKFVVEKINENFDLSPRGIREMLNLNRPIYEKTAAYGHFGRTPEDDGSFSWEKTDKINVFSE

SEQ ID NO: 122231 - protein, 155 aa, Unknown
  Bacterial polypetide isolated from the Sargasso Sea
NFVIGGPDGDAGLTGRKIIVDTYGGAAPHGGGAFSGKDPTKVDRSAAYASRYLAKNIVASKISDRCLIQLAYAIGVSKPLSIYVNLFTNDEEQNRHVEKLIRENFDLSPRGIREMLSLNKPIYQKTAAYGHFGREPESDGSFSWEKTDKSNIFIS

SEQ ID NO: 122232 - protein, 150 aa, Unknown
  Bacterial polypetide isolated from the Sargasso Sea
MSKNNYLFTSESVSEGHPDKVSDKISDMVVDTYLSRDPYSRVACETLTTTNRVILAGETRGPKFDKEELVTKVRECIKEIGYDQKGFSWKNAQIESFLHEQSSDIAMGVDSKENKDDGAGDQGLMFGYACDETDELMPAPIHYSHKILRL

SEQ ID NO: 122233 - protein, 95 aa, Unknown
  Bacterial polypetide isolated from the Sargasso Sea
MSDLKNFRFTSESVSEGHPDKVSDRISDMVVDTYLSNDPYSRVACETLTTTNKVVLAGEVRGPEIKKDDLINKVRECIKDIGYDQDGFYLERSYK

SEQ ID NO: 122234 - protein, 275 aa, Unknown
  Bacterial polypetide isolated from the Sargasso Sea
EIKKDELISKVRGCIKDIGYDQDGFSWKETTKIETHLHSQSADIAMGVDSSGNKDEGAGDQGIMFGYACNETDVLMPAPIHYSHRILRLMAEDRKSGKLKGIEPDSKSQITIEYKDGKPANVKSVVISTQHSKDVDLAKVKELCTPYIEKSIPKNLLGNLDEKEIYINPTGNFVIGGPDGDSGLTGRKIIVDTYGGAAPHGGGAFSGKDPTKVDRSAAYASRYLAKNVVASKISDKCLIQLAYAIGVSKPLSIYVDLFDNDEEKNRHVEKIIKEN

SEQ ID NO: 122235 - protein, 261 aa, Unknown
  Bacterial polypetide isolated from the Sargasso Sea
DKVSDRISDAVVDHFIAKDPYARVACETLTTTNKVVLSGEIRGPVQEDKDEIISKVRNSIKDIGYEQDGFHWQTADIQYLLHGQSADIAMGVDSSSDKDEGAGDQGIMFGYACTETPELMPAPIYYSHKILELMAKGRKDGSMKGLEPDSKSQVTLKYVDGKPNAVTSVVISTQHADGLSPSDVKEIVNPALKQSIPEELLKNLDDSEYYVNPTGNFVIGGPDGDTGLTGRKIIVDTYGGAAPHGGGAFSGKDPTKVDRSA

SEQ ID NO: 122236 - protein, 135 aa, Unknown
  Bacterial polypetide isolated from the Sargasso Sea
MKKNFLFTSESVSEGHPDKVCDRISDMVVDSYLGAEPQSRVACETLTTTNKVVLAGEVRGPEIKKDDLIQKVRECIKDIGYDQDGFSWKDTTKIETHLHAQSADIAMGVDSSGNKDEGAGDQGIMFGYACNETDV

SEQ ID NO: 122237 - protein, 155 aa, Unknown
  Bacterial polypetide isolated from the Sargasso Sea
YGGKGAHGGGAFSGKDPTKVDRSAAYAARHISKNLVKAGVSDEILLQLGYAIGVSKPVSFNINTCGKSNLKISDSRLSEMINEIFDLRPFKIESRFKLRDPIYSETSSYGHMGRKSIKKTKSFYSKYSDKKNIEVELFPWEKLDYIEQISKTLKL

SEQ ID NO: 122238 - protein, 57 aa, Unknown
  Bacterial polypetide isolated from the Sargasso Sea
MSNLKNYLFTSESVSEGHPDKVCDRISDMVVDTYLGMEPQARVACETLTTTNKVVLA

SEQ ID NO: 122239 - protein, 213 aa, Unknown
  Bacterial polypetide isolated from the Sargasso Sea
MSNLKNFLFTSESVSEGHPDKVSDRISDMVVDSYLSGDPFSRVACETLTTTNKVVLAGEVRGPEIKETDLIEKVRHCIKDIGYDQVGFTWKEATKIESHLHSQSSDIAMGVDSSGNKDEGAGDQGIMFGYACNETEELMPAPIHYSHKILRLMAEDRKSGKLKNIEPDSKSQVTFEYVDGKPTKVKSVVISSQHSADVNQTQVRDLLRPYMIN

SEQ ID NO: 122240 - protein, 301 aa, Unknown
  Bacterial polypetide isolated from the Sargasso Sea
DAYLAEDPNSRVACETMIKNNMVYIAGEITSLGSPDLEPVVRKTINDIGYNSDDYGFNGDTCEFTNLVFEQSPDISQGVTEGEGENLEQGAGDQGLMFGYACKETESLMPLPIDLSHRLVKKQADVMKSGDIKWLRPDAKSQVSVIYSDDGKTIEGLSAVVLSTQHDEEVSQVEIKTEVMDKIIKPIVPEEWLLDSTNIFINPTGKFVIGGPVGDCGLTGRKIIVDTYGGMARHGGGAFSGKDPSKVDRSAAYASRYVAKNIVAAGLADYCEIQVSYAIGVAEPTSIHVETFNSEKISKEA

SEQ ID NO: 122241 - protein, 305 aa, Unknown
  Bacterial polypetide isolated from the Sargasso Sea
MGEITSKAKVDYIKLVRNVIKEIGYESYKAGGFDANSCAVLVALDEQSPDISQGVNEADDTNDDLENNTGAGDQGIMFGYACDETPELMPLPISLAHRLAIQLAAVRHKKILNYLLPDGKTQVSIDYKKGLPVSINTILISTQHNPEIDGIKNEEEIRQKIKEDLWKNVVIPATEDLEIKPNIQETRFLVNPTGKFVVGGPQGDAGLTGRKIIVDTYGGYARHGGGAFSGKDPTKVDRSAAYAARYVAKSIVKAQLAKKVEVQLSYAIGVAKPISILVETFDTGVISQANLTELIKEHFDLRPAA

SEQ ID NO: 122242 - protein, 268 aa, Unknown
  Bacterial polypetide isolated from the Sargasso Sea
MKRSYLFTSESVSEGHPDKVCDRISDMVVDAYLSSGDPQTRVACETLTTTNKVVLAGEVRGPSVSKDQIISQVRDCIKDIGYEQDGFHWQNCDIESFLHEQSADIAMGVDSGSNKDEGAGDQGIMFGFACKDTESLMPAPIHYSHQILYKMAQARKDGSASGLEPDSKSQVTMLYENGKPSKVTSLVISSQHKEGLSPEDVKEIVKPYVYECIPNNLLEGLKDEEFYVNPTGNFVIGGPDGDSGLTGRKIIVDTYGGAAPHGGGAFSG

SEQ ID NO: 122243 - protein, 268 aa, Unknown
  Bacterial polypetide isolated from the Sargasso Sea
SWKSANIETHLHEQSTDIAMGVDSKDNKDEGAGDQGIMFGYACTETEELMPAPIHFSHKILRLMAEDRKKGILKGIEPDSKSQVTMLYENNLPIKVTSIVISTQHAKDLNQEKVKELVLPYIKRSIPENYVQDLNPNEIYINPTGQFIIGGPDGDTGLTGRKIIVDTYGGAAPHGGGAFSGKDPTKVDRSAAYAARYLAKNIVYSGASKKCLIQLAYAIGVSKPLSIFIKLAEGDENKIDSVKKIIDQNFDLSPRGIREMLKLNNPNI

SEQ ID NO: 122244 - protein, 288 aa, Unknown
  Bacterial polypetide isolated from the Sargasso Sea
ESHLHAQSADIAMGVDSSGNKDEGAGDQGIMFGYACNETDVLMPAPIHYSHKILRLMAEDRKLGKLKNIEPDSKSQITIKYEDGKPSSIKSVVISTQHSPDVNQAQVRDLVKPYIERSIPKELLSSLDEKEIYVNPTGNFVIGGPDGDSGLTGRKIIVDTYGGAAPHGGGAFSGKDPTKVDRSAAYASRYLAKNVVASKIANKCLIQLAYAIGVSKPLSIYVDLFDNDDEKNKYVEKLIHENFDLSPRGIREMLGLNKPIYEKTAAYGHFGRIPDDKGSFSWGKTDKS

SEQ ID NO: 122245 - protein, 111 aa, Unknown
  Bacterial polypetide isolated from the Sargasso Sea
MNNLKNYLFTSESVSEGHPDKVSDRISDMVVDSYLSKDPFSRVACETLTTTNKVVLAGEIRGPEIKKDDLIQKVRDCIKDIGYDQDGFTWKEATKIESHLHSQSKDIAMGV

SEQ ID NO: 122246 - protein, 84 aa, Unknown
  Bacterial polypetide isolated from the Sargasso Sea
MAKYLFTSESVTEGHPDKVCDAISDAILDSLLSQDKESHVACETLATNGLVVVSGEVRSSGSLDVESIVKTTLEDIGYTDESKG

SEQ ID NO: 122247 - protein, 278 aa, Unknown
  Bacterial polypetide isolated from the Sargasso Sea
DSILDELIIIDNQARVGCEVFATTNQVVVGGEVGLKNKIKIEDLSELVVETVRSTVKNIGYEQKGFHWKDLKILNLLHQQSPDIAQGVDREGAGDQGIMFGYAVNETQELMPAPLQYSQAILKRLSIARKNELKDKLGPDSKSQLTVNYINGIPQSIKSIVVSIQHFDEMLTSDNIKEIITPYIFETLPDGWITKNTIWHVNPTGKFVIGGPDGDAGLTGRKIIVDTYGGAAPHGGGAFSGKDPTKVDRSAAYAARYLAKNIVSSGLATKCVIQLSYA

SEQ ID NO: 122248 - protein, 145 aa, Unknown
  Bacterial polypetide isolated from the Sargasso Sea
SGLTGRKIIVDTYGGAAPHGGGAFSGKDPSKVDRSAAYAARYVAKNVVASKIANKCLIQLSYAIGVSKPLSIYINLFDGDEEKEKHVENLIKSNFDLSPRGIREMLSLNRPIYECTAAYGHFGRKPDSKGSFSWEKTDKISIFQK

SEQ ID NO: 122249 - protein, 266 aa, Unknown
  Bacterial polypetide isolated from the Sargasso Sea
MGRQDYIFTSESVSEGHPDKICDRISDAVLDFCIKKDRLARVACETFTTTNTVVVGGEVGFSSDVDIKSFEFEIAELVKNVVKKIGYEQEGFHWNKLNISNFIHQQSSDISQGVDRDGAGDQGIMFGYAVDETEELMPAPIHYSHLILKALAEVRHKKIETNLGPDSKSQLTVKYENGKPVGVQSVVLSTQHTDPSLSSEDVKSIVKPYIIDILPEHWITKNTVWHINPTGKFVIGGPDGDAGLTGRKIIVDTYGGAAPHGGGAFS

SEQ ID NO: 122250 - protein, 134 aa, Unknown
  Bacterial polypetide isolated from the Sargasso Sea
ARHGGGAFSGKDPSKVDRSAAYAARYVAKNVVAAGLASRCEVQVSYAIGIPDPVSVTVDTFGTNVIPEARIEQLVEAHFDLSVSGIIDSLDLLRPIYRETAAYGHFGRSNPQFTWEKTDKAELLKAEINSASCA

SEQ ID NO: 122251 - protein, 99 aa, Unknown
  Bacterial polypetide isolated from the Sargasso Sea
NIVAAGLADKCELQVSYAIGVAKPTSISIDTFGTSKIEESKIVHIIKEVFDLRPWGIINMLNLLEPIYKGTAAYGHFGRSDLNLPWERIDQVDKIKSLL

SEQ ID NO: 122252 - protein, 167 aa, Unknown
  Bacterial polypetide isolated from the Sargasso Sea
MANKNYLFTSESVSEGHPDKVCDRISDMVVDSYLSKDPVSRVACETLTTTNKVVLAGETRGPKTDKEELINQIRNCIKDIGYDQKGFSWKTANIETHLHEQSSDIAMGVDSKENKEEGAGDQGIMFGYACKETEDLMPAPIHYSHKILRLMAEDRKNGSLKGIEPDS

SEQ ID NO: 122253 - protein, 299 aa, Unknown
  Bacterial polypetide isolated from the Sargasso Sea
KESMAKTSLFTSESVSEGHPDKVADQISDSIVDAIFNEDPSARIACETMINTGMVVLSGEITTSANIDYETVARDTIREIGYTSDEIGFDSDNCEVLISIDKQSPDIAQGVNEGQGMDLDQGAGDQGLMFGYACDETDVLMPCPITYAHLLVKKQADIRKSGALEWLRPDAKSQVTVVYENETPVSIDTIVLSTQHDPEIEHEEIEKAVINEIIKPVLPENMINNETRFLVNPTGRFVIGGPVGDCGLTGRKIIVDTYGGMSRHGGGAFSGKDPSKVDRSAAYAARYVAKNVVAAGLLS

SEQ ID NO: 122254 - protein, 230 aa, Unknown
  Bacterial polypetide isolated from the Sargasso Sea
MTKKTYLMTSESVGEGHPDKMADQISDAILDAILTQDKGCRVAVETLVKTGLVVLGGEITTTADVDYEAIARRTIKRIGYDKEELGFDDQSCEVLVAISKQSPDIAMGVDRADEKEQGAGDQGLMFGYATNETKQLMPATIQLSHQLVKRHADVRRSGELSWLRPDAKSQVTILFDDGKPKSIDTVVLSTQHDEDVSMDEIQAGVLEHIIKPILPEELLTETTQYLINPT

SEQ ID NO: 122255 - protein, 246 aa, Unknown
  Bacterial polypetide isolated from the Sargasso Sea
MSDYSLFTSESVSEGHPDKMSDQISDAILDTYLTKDPDARVAVETLVKTGMVVVAGEVTTAGNVTPGELEEVIRQTVLDIGFDSSDVCFDGNTCAVINAIGQQSADIALGTHEADEANQGAGDQGLMFGFAADETDVLMPAPIHYSHRLVERQAELRKSGALPWLRPDAKSQLTMRYGADGKPERVEAVVLSTQHDPGFAQEDLREAVRREIIEPTLPAEWLHADTLFHINPTGNFVIGGPQGDCG

SEQ ID NO: 122256 - protein, 171 aa, Unknown
  Bacterial polypetide isolated from the Sargasso Sea
MLTSDTRFLVNPTGRFVIGGPHGDCGLTGRKIIVDTYGGSAHHGGGAFSGKDPSKVDRSAAYAMRYVAKNVVAAGLAEQCEAQVAYAIGVAEPVSLMVSTNGTAAIAEDKIEALIREHFDLRPKGIIEDLDLLRPIYRPTAAYGHFGRSEDGLFPWEQTDKADALRAAAGL

SEQ ID NO: 122257 - protein, 157 aa, Unknown
  Bacterial polypetide isolated from the Sargasso Sea
TGNFVIGGPDGDSGLTGRKIIVDTYGGAAPHGGGAFSGKDPTKVDRSAAYASRYLAKNVVASKIADKCLIQLAYAIGVSKPLSIYVDLFDNDEEKNRHVEKLINENFDLSPRGIREMLGLNKPIYEKTAAYGHFGRDAESNGAFSWEKTDKVDVFSK

SEQ ID NO: 122258 - protein, 118 aa, Unknown
  Bacterial polypetide isolated from the Sargasso Sea
YAARYVAKNVVAAGLARQCQVQVSYAIGVARPINITVYTEGTGVIPDDQIAKLVHEHFDLRPKGIVQMLDLLRPVYEKTAAYGHFGREEPEFSWEATDKALLLREAAGLTGQPAKAFA

SEQ ID NO: 122259 - protein, 198 aa, Unknown
  Bacterial polypetide isolated from the Sargasso Sea
TQHSKDVDLAKVKDLCTPYIERSIPKNLLGSLDEKEIYINPTGNFVIGGPDGDSGLTGRKIIVDTYGGAAPHGGGAFSGKDPTKVDRSAAYASRYLAKNVVASKIADKCLIQLAYAIGVSKPLSIYVDLFDNDEEKNRHVEKLINENFDLSPRGIREMLGLNKAIYEKTAAYGHFGREPESNGAFSWEKTDKANVFSK

SEQ ID NO: 122260 - protein, 288 aa, Unknown
  Bacterial polypetide isolated from the Sargasso Sea
TTNKVVLAGEVRGPEIKKEDLIQKVRECIKDIGYDQEGFTWKDATKIESHLHSQSADIAMGVDSSGNKDEGAGDQGIMFGYACNETDVLMPAPIHYSHKILRLMAEDRKSGKLKNIEPDSKSQITIEYKDGKPTHVKSVVISTQHSPDVNQSQVRELVKPYIEKSIPKNLINGLDESEIYVNPTGNFVIGGPDGDSGLTGRKIIVDTYGGAAPHGGGAFSGKDPTKVDRSAAYASRYLAKNVVASKIADKCLIQLAYAIGVSKPLSIYVDLFDNDEEKNKHVEKLIRE

SEQ ID NO: 122261 - protein, 175 aa, Unknown
  Bacterial polypetide isolated from the Sargasso Sea
IPKNLLGSLNEKEIYINPTGNFVIGGPDGDSGLTGRKIIVDTYGGAAPHGGGAFSGKDPTKVDRSAAYASRYLAKNIVASKISDKCLIQLAYAIGVSKPLSIYVDLFDNDEEKNMHVEKLIKENFDLSPRGIREMLGLNKAIYEKTAAYGHFGRVPESDGSFSWEKTDKSEVFSK

SEQ ID NO: 122262 - protein, 295 aa, Unknown
  Bacterial polypetide isolated from the Sargasso Sea
MSIGLDAKSCAVLVVLNRQSADIAQGVNEGEGEFSEQGAGDQGLTFGYACNQTDELMPLPIILSHKLMQKLTQLRKSGELTYLRPDSKAQVTVEYDENRQPTKVTAVVISTQHHPSVEQNQIKADIKSLVIDQVIPNELMEEDPTIYINPTGRFVVGGPQGDAGLTGRKIVVDTYGGWVPHGGGAFSGKDPSKIDRSAAYLSRYVAKNCVAAGLCEEMEIQAAYAIGVAKPVSIKVNTFGTSELSNEILLKIINDVFDFRPKALIESLNLLQPIYSKTAAYGHFGRSDIEFPWET

SEQ ID NO: 122263 - protein, 130 aa, Unknown
  Bacterial polypetide isolated from the Sargasso Sea
GYAPHGGGAFSGKDSSKVDRSATYMARYIAKNIVAADLADRCEVQLSYGIGVAEPTSFYVKTQGTGKKDDQTLTEIARDVFPIKPGEIVAHLDLKKPRYRDTAAYGHFGRELEKFTWERTDMVETLLKKL

SEQ ID NO: 122264 - protein, 137 aa, Unknown
  Bacterial polypetide isolated from the Sargasso Sea
DRSAAYATRHIAKNCVAAGLADRILVQVSYAIGVARPMGVFVDTYGSANVSLSDGEIARKLEQMDCFDLRPASIIDRLKLKTPIYSETAAYGHMGRNSENKTLTFKKSENEFQVNVETFTWEKLDCVDKVKEVFGLS

SEQ ID NO: 122265 - protein, 128 aa, Unknown
  Bacterial polypetide isolated from the Sargasso Sea
MSESNYLFTSESVSEGHPDKVCDLISDSIVDRYLSEDPEARVAVETMATTNLVMIAGETRGPEISPDEIERVARQVVRDIGYEQKGFHWRDSSVQVRLHSQSADIAVGVDAAENKDEGAGGQGMMFGY

SEQ ID NO: 122266 - protein, 320 aa, Unknown
  Bacterial polypetide isolated from the Sargasso Sea
ESVSEGHPDKVCDRISDMVVDTYLSSGDPQTRVACETLTTTNKVVLAGEVRGPSISKDQIISQVRECIKDIGYEQDGFHWQNCEIDYHLHPQSLDIAMGVDSGSDKEEGAGDQGIMFGFACKDTETLMPAPIHYSHQILYKMAQARKDGSASGLEPDSKSQVTMLYENGKPSRITSLVISSQHKEGLSPADVKEIVKPYVYECIPNELLEGLKDEEFYVNPTGNFVIGGPDGDSGLTGRKIIVDTYGGAAPHGGGAFSGKDPSKVDRSAAYAARYLAKNVVAADLADECTIQLSYAIGVSKPLSVYVNTNGTNKVDEKKN

SEQ ID NO: 122267 - protein, 246 aa, Unknown
  Bacterial polypetide isolated from the Sargasso Sea
MDKEYLFTSESVSEGHPDKVCDIISDYIVDDFLSQPNSENWRVALETLVTTNQVVVSGEVRGPDGFQCDYESLARAAVKEIGYEQEKFHWENFNFASFVHGQSGDIAMGVDAKDNKDQGAGDQGIMFGYACKETPVLMPAPIYYSHLILRNLAEARKNNTINGIQPDSKSQVTLKYNESSPIECTEVVVSTQHDKELELSDVEEIVTPFIKEALPENWLKNTQFHINPTGRFETGGPDGDTGLTGR

SEQ ID NO: 122268 - protein, 144 aa, Unknown
  Bacterial polypetide isolated from the Sargasso Sea
RSYWKKIIVDTYGGAAPHGGGAFSGKDPSKVDRSAAYAARYVAKNIVASKIADKCLIQLAYAIGVSKPLSIYVNLFDGDEEKSKNVEKIIKDNFDLSPRGIREMLSLNRPIYERTSAYGHFGRKPGSDGSFSWEKTDKVDIFKK

SEQ ID NO: 122269 - protein, 153 aa, Unknown
  Bacterial polypetide isolated from the Sargasso Sea
VIGGPDGDCGLTGRKIIVDTYGGAAPHGGGAFSGKDPTKVDRSAAYASRYIAKNVVASKIADKCLIQLAYAIGVSKPLSIYVDLFDNDLEKNKFVEEKIKENFDLSPRGIREMLSLNKPIYEKTAAYGHFGRTPETDGAFSWEKTDKASVFSR

SEQ ID NO: 122270 - protein, 50 aa, Unknown
  Bacterial polypetide isolated from the Sargasso Sea
MNSNNYFFTSESVSEGHPDKVCDRISDMVVDTYLSKDNNARVACETLTTT

SEQ ID NO: 122271 - protein, 244 aa, Unknown
  Bacterial polypetide isolated from the Sargasso Sea
MCKYVFTSESVSEGHPDKVCDAISDAILDNLLEQDSESHVACETLATTGTVVVSGEIRSSGSIDVEKVVKETLDEIGYTDKAYGMDSKEVKVISMLDDQSSEIAQGVDEGSGLHEEQGAGDQGLMFGFACNDTKELMPLPIHLSHRLVERMTDLRKNGEIPWLRPDSKSQVSVAYKDDKPVSITKVVIATQHDDMLNKFENQNAEHEFVEKEIIKHVIKPVLDECGLPYDESFIVNGTGRFVFG

SEQ ID NO: 122272 - protein, 220 aa, Unknown
  Bacterial polypetide isolated from the Sargasso Sea
MKKNYLFTSESVSEGHPDKVCDRISDMVVDSYLKSEPQSRVACETLTTTNKVVLAGEVRGPEIKKNDLIERVRDCIKDIGYDQEGFTWKEATKIESHLHAQSSDIAMGVDSSGNKDEGAGDQGIMFGYACTETDVLMPAPIHYSHKILRLMAQDRKSGKLKNIEPDSKSQITIEYIDGKPSKVKSVVISTQHSADVNQSQVRELVKPYIEKSIPKNLLND

SEQ ID NO: 122273 - protein, 110 aa, Unknown
  Bacterial polypetide isolated from the Sargasso Sea
MKKNYLFTSESVSEGHPDKVCDRISDMVVDTYLGMEPQARVACETLTTTNKVVLAGETRGPDVNKDELISKVRNCIKDIGYDQDGFTYKEATKKECHLHSQSADIAMGVD

SEQ ID NO: 122274 - protein, 104 aa, Unknown
  Bacterial polypetide isolated from the Sargasso Sea
MKKDYLFTSESVSEGHPDKVCDRISDMVVDTYLAAEPQSRVACETLTTTNKVVLAGEVRGPEIKKEDLIEKVRHCIKDIGYDQKGFTWKEATSVESHLHAQSSD

SEQ ID NO: 122275 - protein, 264 aa, Unknown
  Bacterial polypetide isolated from the Sargasso Sea
IRGPNIGKDEIIDKVRNCIKDIGYDQEGFSWKEQTKIESHLHEQSTDIAMGVDSKDNKDEGAGDQGIMFGYACNETDDLMPAPIFYSHKILRLMAQDRKSGALKGIEPDSKSQVTMLYENGKPKKVTSVVISTQHSKDLDQEKVKEIILPYINKSIPKELLSDLQSSEIYINPTGQFIIGGPDGDTGLTGRKIIVDTYGGAAPHGGGAFSGKDPTKVDRSAAYVSRYLAKNIVASGITEKCLIQLSYAIGVSKPLSIYVKLGDK

SEQ ID NO: 122276 - protein, 292 aa, Unknown
  Bacterial polypetide isolated from the Sargasso Sea
MAGRDRGPKINNEELISKVRDCIKDIGYDQDGFSWKETTKIETHLHSQSTDIAMGVDSSGNKDEGAGDQGIMFGYACNETDVLMPAPIHYSHRILRLMAEDRKSGKLKGIEPDSKSQITIEYKDGVPNAVKSVVISTQHSKDVNLAKVKELCMPYIERSIPKNLLGNLDENEIYINPTGNFVIGGPDGDSGLTGRKIIVDTYGGAAPHGGGAFSGKDPTKVDRSAAYASRYLAKNVVASKISNKCLIQLAYAIGVSKPLSIYVDLFDNDEEKNRHVEKLINENFDLSPRGIR

SEQ ID NO: 122277 - protein, 185 aa, Unknown
  Bacterial polypetide isolated from the Sargasso Sea
ADLREAVMEEIIKPVLPEEWLHKDTLYHVNPTGIFVIGGPMGDCGLTGRKIIVDTYGGMARHGGGAFSGKDPSKVDRSAAYAGRYVAKNIVAAGLASKCEIQVSYAIGVAEPTSISVNTFGTGKISDSAIVDLVREHFDLRPRGIIEMLDLRKPIYRPTASYGHFGREGFSWEKTDKTEALKAAL

SEQ ID NO: 122278 - protein, 284 aa, Unknown
  Bacterial polypetide isolated from the Sargasso Sea
DIAMGVDSSGNKDEGAGDQGIMFGYACDETDVLMPAPIYYSHKILRLMAEDRKSGKLKNIEPDSKSQVTFEYVNGRPFKVKSVVISSQHSSDVKQSHVRELLKPYMIKSIPENFLKDFNEEEFYVNPTGNFVIGGPDGDCGLTGRKIIVDTYGGAAPHGGGAFSGKDPTKVDRSAAYAARYIAKNVVASKITKRCLIQLAYAIGVSKPLSIYVDLFENDQDKNRFVEQKIRENFDLSPRGIREMLKLNKPIYEKTAAYGHFGRMPEQDGSFSWEKTDKKSIFSK

SEQ ID NO: 122279 - protein, 276 aa, Unknown
  Bacterial polypetide isolated from the Sargasso Sea
VDSAGNKDEGAGDQGIMFGYACNETDVLMPAPIHYSHKILRLMAEDRKSGKLNGIEPDSKSQITIEYKDGMPAAVTSVVISTQHSKDVSLAQVKKLCIPYIERSIPKNLLGSLDEKEIYINPTGNFVIGGPDGDSGLTGRKIIVDTYGGAAPHGGGAFSGKDPTKVDRSAAYASRYLAKNVVASKIADKCLIQLAYAIGVSKPLSIYVDLFDNDEEKNLHVEKLIKENFDLSPRGIREMLGLNKPIYEKTAAYGHFGRIPEKDGSFSWEKTDKSGV

SEQ ID NO: 122280 - protein, 122 aa, Unknown
  Bacterial polypetide isolated from the Sargasso Sea
MKKNFLFTSESVSEGHPDKVCDRISDMVVDTYLGMEPQARVACETLTTTNKVVLAGETRGPDINKDELISKVRDCIKDIGYDQEGFTWKEATKIESHLHSQSADIAMGVDSSGNRMKVLETR

SEQ ID NO: 122281 - protein, 282 aa, Unknown
  Bacterial polypetide isolated from the Sargasso Sea
MEYEFTSESVSIGHPDKVADLISDSVATFLLSKNISHRAAIETLVTTNMVTIAGEYKSNDFDKDEIEKIIRNVVAKIGYEQDGFHHERLNIYNELHGQSPDIALGTDNFGAGDQGLMFGYACLETENYMPMAIYLCHKILERIQDERENHSWILPDNKSQVTLSYSDINKPENIKKIVCSTQHAEDVDIEHVRKKIEEIIRDEITEDLSSTEFLINPTGRFVVGGPDGDTGLTGRKIIVDTYGGYAPHGGGAFSGKDCTKVDRSGAYMARYLAKNIVSSGRA

SEQ ID NO: 122282 - protein, 146 aa, Unknown
  Bacterial polypetide isolated from the Sargasso Sea
SGLTGRKIIVDTYGGSSPHGGGAFSGKDPTKVDRSAAYISRYMAKNVVAANLAEKCTIQLSYAIGVSEPLSLYVNTDNTGKISDDELSKILRSEVDLTPSGIRSCLGLNNSIYKPSAAYGHFGRVPDEEVKGSFSWEKTDLVSKIS

SEQ ID NO: 122283 - protein, 122 aa, Unknown
  Bacterial polypetide isolated from the Sargasso Sea
FSGKDPTKVDRSAAYASRYLAKNVVASKIADKCLIQLAYAIGVSKPLSIYVDLFVNDDEKNKHVEKLINENFDLSPRGIREMLGLNKPIYEKTSAYGHFGRMPDDMGCFSWEKTDKSDIFSK

SEQ ID NO: 122284 - protein, 155 aa, Unknown
  Bacterial polypetide isolated from the Sargasso Sea
NRRTDGDAGLTGRKIIVDTYGGACPHGGGAFSGKDPSKVDRSAAYAARYVAKNIVYAGIAERCTIQLAYAIGMVEPLSVYVNTYGTGKLSNIEIIDLINKTFDLTPRGIRDMLNLSNVNYLSTAAYGHFGRDSKSSEYFTWEKIDKAKLILESIR

SEQ ID NO: 122285 - protein, 184 aa, Unknown
  Bacterial polypetide isolated from the Sargasso Sea
MTNQTYLMTSESVGEGHPDKMADQISDAILDAIIEQDKGCRVAVETLVKTGLVVLAGEITTSANVDYEAIARKTIKRIGYDKEELGFDDQSCEVLSAISKQSPDIAMGVDRADKKEQGAGDQGLMFGYATNETKELMPATIQLSHQLVKRHADVRRSGELSWLRPDAKSQVTILFEDGKPKSID

SEQ ID NO: 122286 - protein, 318 aa, Unknown
  Bacterial polypetide isolated from the Sargasso Sea
SESVTEGHPDKVCDAISDAILDSLLSQDKESHVACETLATNGLVVVSGEVRSSGSLDVDNIVKTTLEDIGYTDEARGMDSDNIEIRSIIHEQSPEIAQGVDSDDVAEQGAGDQGLMFGFACKETEELMPLPIQIAQRLTEKLARIRKDGTLPWLRPDGKSQVTVEYDGFTPVRVTKVVIATQHDDMLEEYGSEEDELKFVKKEVIDHIIIPVLDSYGIPYENEFIVNGTGRFVYGGPAADTGLTGRKIIVDTYGGYAPHGGGAFSGKDPSKVDRSAAYMSRYIAKNVVAADLAERCEVQLSYGIGVAEPTSFYVKTFG

SEQ ID NO: 122287 - protein, 241 aa, Unknown
  Bacterial polypetide isolated from the Sargasso Sea
MPYLFTSESVSEGHPDKVSDQISDALIDNFLAFDPSSKVACETLVTTGQVVLAGEVKSSAYLDVQKIARDVINNIGYTKGEYMFDGNSCGVLSAIHEQSPDINQGVERKNKEEQGAGDQGMMFGYATNETDNYMPLPLEISHLLLKELAQIRKDGKEMTYLRPDSKSQVTIEYSDDNQPIKIDAIVVSTQHDDFDSEEAMLETIKNDVINILVPRIKNLLPEHIQNLFNDDINYHVNPTGT

SEQ ID NO: 122288 - protein, 134 aa, Unknown
  Bacterial polypetide isolated from the Sargasso Sea
MSRSYLFTSESVSEGHPDKVCDRISDMVVDTYLSSGDPQTRVACETLTTTNKVVLAGEVRGPSISKDQIISQVRDCIKDIGYEQDGFHWQNCDVDSFLHEQSSDIAMGVDSGIDKEEGAGDQGIMFGYACRDTE

SEQ ID NO: 122289 - protein, 250 aa, Unknown
  Bacterial polypetide isolated from the Sargasso Sea
ITSLGSPDLEPVVRKTINDIGYNSDAYGFNGDTCEFTNLVFEQSPDISQGVTEGEGENLEQGAGDQGLMFGYACTETESLMPLPIDLSHRLVKKQADVMKSGEIKWLRPDAKSQVSVIYSDDGKTIEGLSAVVLSTQHDEDVTQEEIKSEVMNKIIKPIVPEEWIFDSTNIFINPTGKFVIGGPVGDCGLTGRKIIVDTYGGMARHGGGAFSGKDPSKVDRSAAYASRYVAKNIVAAGLADYCEIQVSYA

SEQ ID NO: 122290 - protein, 318 aa, Unknown
  Bacterial polypetide isolated from the Sargasso Sea
MKTLIPRVACETLIKTGMVVVAGEVRTSASPDIEEIVRGTIADIGYDDMEIGFDASSCTFVNALGQQSTDIAMGVDESENHEQGAGDQGLMFGYASNETDSLMPAPIDYSHKLVKKQADARRSSLPFLRPDAKSQLTFSYDSEGKPSAIEAIVLSTQHNPEISQADLKEAVMEEIIKPVIPDNWMNKDTNVFINPTGQFIIGGPVGDCGLTGRKIIVDTYGGMARHGGGAFSGKDPSKVDRSAAYAGRYVAKNIVAAGLADKCELQVSYAIGVAEPTSISVETFGTGKIADEKIIDLIRENFDLRPKGLIAMLELKKP

SEQ ID NO: 122291 - protein, 86 aa, Unknown
  Bacterial polypetide isolated from the Sargasso Sea
MKKNYLFTSESVSEGHPDKVCDRISDMVVDSYLGAEPQSRVACETLTTTNKVVLAGEVRGPEIKKEDLIQKVRECIKDIGYDQDGF

SEQ ID NO: 122292 - protein, 132 aa, Unknown
  Bacterial polypetide isolated from the Sargasso Sea
MSNLKNYLFTSESVSEGHPDKVSDRISDMVVDTYLSNDPFSRVACETLTTTNKVVLAGEVRGPKINKDDLIQKVRDCIKDIGYDQDGFTWKDATKIESHLHSQSTDIAMGVDSSGNKDEGAGDQGKSMFGYA

SEQ ID NO: 122293 - protein, 238 aa, Unknown
  Bacterial polypetide isolated from the Sargasso Sea
LMAEDRKSGKLNGIEPDSKSQITIEYKNGMPSAVTSVVISTQHSKDVSLAQVKELCMPYIEKSIPKNLLGSLDEKEIYINPTGNFVIGGPDGDSGLTGRKIIVDTYGGAAPHGGGAFSGKDPTKVDRSAAYASRYLAKNVVASKIADKCLIQLAYAIGVSKPLSIYVDLFDNDEEKNMHVEKLIKENFDLSPRGIREMLGLNKPIYEKTAAYGHFGRIPEDDGSFSWEKTDKSGVFSK

SEQ ID NO: 122294 - protein, 282 aa, Unknown
  Bacterial polypetide isolated from the Sargasso Sea
MSEYSLFTSESVSEGHPDKIADQISDAVLDAIIAQDKYARVACETLVKTGVAIIAGEVTTSAWVDLEDLVRKVIIDIGYNSSDVGFDGATCAVMNIIGKQSVDIAQGVDRSKPEDQGAGDQGLMFGYASNETEVLMPAPICFSHRLVERQAEARKSGLLPWLRPDAKSQVTCRYENGKVVGIDAVVLSTQHNPEVSQKDLQEAVMELIVKHTLPAELLHKGTQYHINPTGNFIIGGPVGDCGLTGRKIIVDSYGGMARHGGGAFSGKDPSKVDRSAAYAGRY

SEQ ID NO: 122295 - protein, 183 aa, Unknown
  Bacterial polypetide isolated from the Sargasso Sea
MKKDYLFTSESVSEGHPDKVCDRISDMVVDTYLSLEPQARVACETLTTTNKVVLAGETRGPEINNDELISKVRGCIKDIGYDQSGFTWKEATKIESHLHSQSADIAMGVDSSSNKDEGAGDQGIMFGYACNETDVLMPAPIHYSHKILRLMAEDRKSGKLQNIEPDSKSQITIEYKDGKPSSV

SEQ ID NO: 122296 - protein, 260 aa, Unknown
  Bacterial polypetide isolated from the Sargasso Sea
MKQTNYLFTSESVSEGHPDKVCDRISDMVVDSYLSKDPFSRVACETLTTTNKVVLAGETRGPKINKDELVEKVRQCIKDIGYDQDGFSWKTAKIDIHLHEQSSDIAMGVDSKDNKDEGAGDQGIMFGYACSETENLMPAPIDFSHKILRLMATDRKNGSLIGIEPDSKSQVTMMYENGKPKSVTSVVISTQHSKNLNQEDVRNLIVPYIKKTIPKKYLEKLDTKEIYINPTGQFIIGGPDGDTGLTGRKIIVDTYGGAAP

SEQ ID NO: 122297 - protein, 128 aa, Unknown
  Bacterial polypetide isolated from the Sargasso Sea
RHGGGAFSGKDPSKVDRSAAYMGRYVAKNIVAAGLAARCEIQFAYAIGYPKPVSVHVDTFGTNTVAEGKIIRAVNKVFHLKPADIVKQLKLLRPIYSLTTNYGHFGKNQKDITWEKTDKVAALQRVLK

SEQ ID NO: 122298 - protein, 117 aa, Unknown
  Bacterial polypetide isolated from the Sargasso Sea
MNNLKNYLFTSESVSEGHPDKVCDRISDMVVDSYLSAEPHSRVACETLTTTNKVVLAGEVRGPEIKQDELIQKVRECIKDIGYDQDGFTWREATKIESHLHSQSADIAMGVDASGNK

SEQ ID NO: 122299 - protein, 167 aa, Unknown
  Bacterial polypetide isolated from the Sargasso Sea
MVSTFNDSNSFLFTSESVTEGHPDKVCDQISDAILDSVLAQDPNARVACETCVTTGLVIIMGEMTTKTYVDIPDIVRSTLKNIGYTDAEFGIDYNTCGVMVSVKEQSPEISSAVSKSLEARQSKNENENETIGAGDQGMMVGYACNETAELMPLPISLAHKLTRKLA

SEQ ID NO: 122300 - protein, 251 aa, Unknown
  Bacterial polypetide isolated from the Sargasso Sea
MNSNNYFFTSESVSEGHPDKVCDRISDMVVDAYISKDPYSRVACETLTTTNKVVLAGEIRGPEIKKDALIEKVRGCIKDIGYEQKGFHWKNCDIDVNLHSQSSDIAMGVDSKGNKDEGAGDQGIMFGYACNETEVLMPAPIYYSHKILELMALDRKKGVADKLEPDSKSQVTMKYEKGKPVKVTSVVISTQHSPKINQTEVKEIVRPYLEKAIPKILLSELKDEELYVNPTGQFIIGGPDGDTGLTGRKIM

SEQ ID NO: 122301 - protein, 95 aa, Unknown
  Bacterial polypetide isolated from the Sargasso Sea
MSNLKNFLFTSESVSEGHPDKVSDRISDMVVDTYLSGDPFSRVACETLTTTNKVVLAGEVRGPEIKNDDLINKVRNCIKDIGYDQDGFTGKRQQK

SEQ ID NO: 122302 - protein, 216 aa, Unknown
  Bacterial polypetide isolated from the Sargasso Sea
MTNKTYLMTSESVGEGHPDKMADQISDAILDAILAQDKGCRVAVETLVKTGLVVLGGEITTTADVDYEAIARRTIKRIGYDKEELGFDDQSCEVLVAISKQSPDIAMGVDRADEKEQGAGDQGLMFGYATNETKQLMPATIQLSHQLVKRHADVRRSGELSWLRPDAKSQVTILFDDGKPKSIDTVVLSTQHDEDVSMDEIQAGVLEHIIRPILPE

SEQ ID NO: 122303 - protein, 199 aa, Unknown
  Bacterial polypetide isolated from the Sargasso Sea
MSELLFTSESVTEGHPDKISDQISDAVLDALISKDDSSRVACETLVTTGMVVVAGEISTKAEVDMQKVVRDTIKSIGYSDSKMGFDYKTCAVLISLDKQSPNIAQGVNEGEGMHKEQGAGDQGLMFGYACDETPELMPLPIQLAHQLTQRLSDVRKNGLIDYLRPDGKSQVTVRYVDGEPRFVDAVVISTQHAEGIDQE

SEQ ID NO: 122304 - protein, 283 aa, Unknown
  Bacterial polypetide isolated from the Sargasso Sea
GFHWKNCDIDYHLHPQSSDIAMGVDSGSNKDEGAGDQGIMFGYACIDTDTLMPAPIHYSHQILLKMAELRKNGTRTEFEPDSKSQVTMLYQNGKPSKVTSVVVSTQHKEGLTPNQIKEIVRPIVHDCIPSDLMQELKDEEFYVNPTGNFVIGGPDGDSGLTGRKIIVDTYGGAAPHGGGAFSGKDPSKVDRSAAYAARYLAKNIVAAGLADECVIQLAYAIGVSKPLSIYVNTNGTSKVDETKIEKLVPELFDLSPRGIREHLKLSNPIYVPTSAYGHFWKNS

SEQ ID NO: 122305 - protein, 276 aa, Unknown
  Bacterial polypetide isolated from the Sargasso Sea
KKDELIEKVRTCIKDIGYDQEGFTWKEATKIESHLHSQSADIAMGVDSSGNKDEGAGDQGIMFGYACNETDVLMPAPIHFSHKILRLMAEDRKSGKLKNIEPDSKSQVTFEYIDGKPSKVKSVVISSQHSADVNQEQVRDLLRPYMLKSIPKNFLEDFNEDEFYVNPTGNFVIGGPDGDCGLTGRKIIVDTYGGAAPHGGGAFSGKDPTKVDRSAAYAARYIAKNVVASKISDKCLIQLAYAIGVSKPLSIYVDLFDGDLDKNKFIVEKIKENFDL

SEQ ID NO: 122306 - protein, 285 aa, Unknown
  Bacterial polypetide isolated from the Sargasso Sea
PDIAMGVDRADEKEQGAGDQGLMFGYATNETKQLMPATIQLSHQLVKRHADVRRSGELSWLRPDAKSQVTILFDDGKPKSIDTVVLSTQHDEDVSMDEIQAGVLEHIIKPILPEELLTETTQYLINPTGNFIIGGPVGDCGLTGRKIIVDTYGGMARHGGGAFSGKDPSKVDRSAAYAARYVAKNIVASGLADRCEIQVSYAIGVAKPTSVRVKTFGTEKVSEEKIVHLVNENFDLTPYGIMNMLDLLQPIYEKSAAYGHFGREDESFPWEKTDRSDALKEQSGL

SEQ ID NO: 122307 - protein, 103 aa, Unknown
  Bacterial polypetide isolated from the Sargasso Sea
IAKNIVASKISNKCLIQLAYAIGVSKPLSIYVDLFDDDLNKNKFVVEKIKENFDLSPRGIREMLSLNKPIYEKTAAYGHFGRTPEDDGSFSWEKTDKLSIFSK

SEQ ID NO: 122308 - protein, 302 aa, Unknown
  Bacterial polypetide isolated from the Sargasso Sea
ICDIGYDHNELGFNGNECEIITIINQQSPDIKMGVERNKKDDQGAGDQGLMFGYASNETEQLMPAPIYYSHRLVEKQTTLLKSKKVDWLLPDAKSQITFVYENGRPEKIDTVVLSTQHSKDVTLSDVKDFVMEEIIKTTIPKNLLSSTTKIHINPTGNFVIGGPNGDCGLTGRKIIVDTYGGMARHGGGAFSGKDPSKVDRSAAYMARYIAKNIVATKLADKCEIQLSYAIGVAEPTSISVDTFGTSKIENSKISSAVSKVFNLTPKGIIDTLDLLNVKYQPTAAFGHFGRDDKNFTLGTKG

SEQ ID NO: 122309 - protein, 300 aa, Unknown
  Bacterial polypetide isolated from the Sargasso Sea
EGFHWEKFSFDCSGVHSQSADIAMGVDASGNKDQGAGDQGIMFGYACKETASLMPAPIYYSHKILEEMAIRRKRGETPGIQPDSKSQVTLKYSNGLPEKCTKIVVSTQHDENLDQQGVSEIIIPIIKNIMPDEWVSNETEILINPTGKFVIGGPDGDTGLTGRKIIVDTYGGAAPHGGGAFSGKDPTKVDRSAAYITRYIAKNIVASGIADKCTLQLAYAIGVSEPLSIYVDTHGTSNISDEELIKKINSNIDLTPRGIRDHLNLHKPIYKKSAAYGHFGRDAESDGSFSWEKIDLANKL

SEQ ID NO: 122310 - protein, 324 aa, Unknown
  Bacterial polypetide isolated from the Sargasso Sea
TSESVSEGHPDKVCDRISDMVVDSFLASEPEARVACETLTTTNKVVLAGEVRGPQLNEDELISKVRNCIKDIGYDQDGFSWREQTKIETHLHSQSADIAMGVDSSGNKDEGAGDQGIMFGYACNETEELMPAPIHYSHKILRLMAQDRKSGQLDGIEPDSKSQITIKYADGKPSAVTSVVISTQHSKDISLAKVKEICMPYIEKSIPKSLLGSLDEKEIYINPTGNFVIGGPDGDSGLTGRKIIVDTYGGAAPHGGGAFSGKDPTKVDRSAAYASRYLAKNVVASKIADKCLIQLAYAIGVSKPLSIYVDLFDNDEEKNMHVEK

SEQ ID NO: 122311 - protein, 229 aa, Unknown
  Bacterial polypetide isolated from the Sargasso Sea
MGVDSSGNKDEGAGDQGIMFGYACNETDVLMPAPIHYSHKILRLMAEDRKSGNLNGIEPDSKSQITIEYKDGKPSAVKSVVISTQHSKDVNLAKVKELCTPYIEKSIPKNLLGNLDENEIYINPTGNFVIGGPDGDSGLTGRKIIVDTYGGAAPHGGGAFSGKDPTKVDRSAAYASRYLAKNVVASGIADKCLIQLAYAIGVSKPLSIYVDLFDNDEEKNMHVEKLINE

SEQ ID NO: 122312 - protein, 229 aa, Unknown
  Bacterial polypetide isolated from the Sargasso Sea
MKKNFLFTSESVSEGHPDKVCDRISDMVVDTYLGLEPQARVACETLTTTNKVVLAGETRGPEIKKDDLISKVRDCIKDIGYDQEGFSWKEATKVECHLHSQSSDIAMGVDSSGNKDEGAGDQGIMFGYACNETDVLMPAPIHYSHKILRLMAEDRKSGKLKNIEPDSKSQITIEYKDGKPASVKSVVISTQHSADVNQSQVRELVKPYIERSIPKNLVNGLDDSEIYIN

SEQ ID NO: 122313 - protein, 191 aa, Unknown
  Bacterial polypetide isolated from the Sargasso Sea
MNNLKNYLFTSESVSEGHPDKVSDRISDMVVDTYLSNDPFSRVACETLTTTNKVVLAGEVRGPEIKKDDLIQKVRNCIKDIGYDQEGFTWKEATKIECHLHSQSADIAMGVDSSGNKDEGAGDQGIMFGYACNETEELMPAPIHYSHKILRLMAHDRKSGKLKNIEPDSKSQVTFEYEKGKPKKVKSVVIL

SEQ ID NO: 122314 - protein, 46 aa, Unknown
  Bacterial polypetide isolated from the Sargasso Sea
MSYLFTSESVSEGHPDKIADQISDALVDNFLAFDKNSKVACETLVT

SEQ ID NO: 122315 - protein, 229 aa, Unknown
  Bacterial polypetide isolated from the Sargasso Sea
ARKDGSASGLEHDSKSQVTMLYENGKPSKVTSLVISSQHKEGLSPEDVKEIVKPYLYECIPNNLLEGLKDEEFYVNPTGNFVIGGPDGDSGLTGRKIIVDTYGGAAPHGGGAFSGKDPSKVDRSAAYAARYLAKNVVAADLADQCTIQLSYAIGVSKPLSVYVNTNGTNKVDEQKIEKSVQDLFDLSPRGIREHLKLTNAIYVPTSAYGHFGREPSDKGHFTWENNRFS

SEQ ID NO: 122316 - protein, 177 aa, Unknown
  Bacterial polypetide isolated from the Sargasso Sea
MKKDYLFTSESVSEGHPDKVCDRISDMVVDTYLAAEPQSRVACETLTTTNKVVLAGEVRGPEIKKKDLIEKVRHCIKDIGYDQEGFTWKEATSVESHLHSQSADIAMGVDSSGNKDEGAGDQGIMFGYACNETDVLMPAPIHYSHKILRLMAEDRKSGKLKNIEPDSKSPITIEYKE

SEQ ID NO: 122317 - protein, 233 aa, Unknown
  Bacterial polypetide isolated from the Sargasso Sea
MKKNYLFTSESVSEGHPDKVCDRISDMVVDTYLGMEPQARVACETLTTTNKVVLAGETRGPEIHNDELISKVRDCIKDIGYDQSGFSWKDSTKIETHLHSQSADIAMGVDSSGNKDEGAGDQGIMFGYACNETDVLMPAPIHYSHRILRLMAEDRKSGKLKGIEPDSKSQITIEYKDGLPNSVKSVVISTQHSKDVDLLKVKELCMPYIVRSIPKNLLGNLDEKGIYINPTGN

SEQ ID NO: 122318 - protein, 149 aa, Unknown
  Bacterial polypetide isolated from the Sargasso Sea
LSTQHDEDVTQDEIKEGVMENIIKPIVPQEWILDSTKIYINPTGKFVIGGPVGDCGLTGRKIIVDTYGGMARHGGGAFSGKDPSKVDRSAAYAARYVAKNIVAAGLADYCEIQVSYAIGVAKPTSINVNTFDSEKVSKEAIEKIVEEKF

SEQ ID NO: 122319 - protein, 147 aa, Unknown
  Bacterial polypetide isolated from the Sargasso Sea
VDTYGGYARHGGGAFSGKDPTKVDRSAAYAARYVAKSIVKAKLAKKAEVQLSYAIGVAKPISVLVETFDTGIISQANMTKLINKYFDLRPAAIIKEFNLRNLPKKMGGNFFRKTASYGHFGRRDLDLPWENVEEKASKLVEASKVFL

SEQ ID NO: 122320 - protein, 291 aa, Unknown
  Bacterial polypetide isolated from the Sargasso Sea
HLHSQSADIAMGVDSSGNKDEGAGDQGIMFGYACNETDVLMPAPIHYSHKILRLMAEDRKSGKLKNIEPDSKSQITIEYKDGKPANVKSVVISTQHSADVNQSQVRELVKPYIERSIPKELLNGLDEKEIYVNPTGNFVIGGPDGDSGLTGRKIIVDTYGGAAPHGGGAFSGKDPTKVDRSAAYASRYLAKNVVASKIAEKCLIQLAYAIGVSKPLSIYVDLFDNDEEKNRHVEKLISENFDLSPRGIREMLGLNKPIYEQTAAYGHFGRDHGANGSFSWEKTDKANVFNK

SEQ ID NO: 122321 - protein, 98 aa, Unknown
  Bacterial polypetide isolated from the Sargasso Sea
IVAAGLAQKCEIQISYAIGVAEPTSISIDTFGTATIDEAKIVHIIDEVFDLRPWGITNMLNLLNPIYKDTASYGHFGRVDLDLSWEKTDKIENIKSLI

SEQ ID NO: 122322 - protein, 136 aa, Unknown
  Bacterial polypetide isolated from the Sargasso Sea
GGASPHGGGAFSGKDPTKVDRSAAYLTRYLAKNVVASELASKCTIQISYAIGVSKPLSLYVNTEGTGKINDNEIEKILTNLVDMSPRGIRQHLKLNKPIYVPTSAYGHFGRLPNEFVEGSFTWEKTDLVDCILKET

SEQ ID NO: 122323 - protein, 45 aa, Unknown
  Bacterial polypetide isolated from the Sargasso Sea
MKKNFLFTSESVSEGHPDKVCDRISDMVVDTYLNLEPQARVACET

SEQ ID NO: 122324 - protein, 196 aa, Unknown
  Bacterial polypetide isolated from the Sargasso Sea
HSEDVSQEKLHADIKSKIINEVIPSEYLNGSPKFHINPTGLFVIGGPQGDCGLTGRKIIVDTYGGMGRHGGGAFSGKDASKVDRSAAYAARHVAKNVVAAGLASRCEVQLAYAIGVAEPVSISVDTFSTGRIEEEKIINLIRNNFELKPAGLISYLKLMRPIYRKTSAYGHFGREIPEFTWESTEKADDLRSQAGL

SEQ ID NO: 122325 - protein, 120 aa, Unknown
  Bacterial polypetide isolated from the Sargasso Sea
MKSNKYFFTSESVSEGHPDKVCDRISDMVVDTYLSKDPYSRVACETLTTTNKVVLAGETRGPEIKKDDIIENVRNCIKDIGYEQKGFHWKNCNIDVHLHSQSSDIAMGVDSKDNKDEGAG

SEQ ID NO: 122326 - protein, 244 aa, Unknown
  Bacterial polypetide isolated from the Sargasso Sea
DLSHRLVRQQAEVMKSNGLSWLRPDAKSQVSAIYSDDGKTIEGLSAIVLSTQHDEDVTQDEIKEGVMENIIKPIVPQEWILDSTKIYINPTGKFVIGGPVGDCGLTGRKIIVDTYGGMARHGGGAFSGKDPSKVDRSAAYAARYVAKNIVAAGLADYCEIQVSYAIGVAKPTSINVNTFDSEKVSKEAIEKIVEEKFDLRPKSLINMLDLKRPIYLPTAAYGHFGRTDIDLSWEKTDKASEISQ

SEQ ID NO: 122327 - protein, 264 aa, Unknown
  Bacterial polypetide isolated from the Sargasso Sea
IMFGYACNETDVLMPAPIHYSHKILRLMAEDRKSGKLKNIEPDSKSQVTFEYVDGKPSKVKSVVISSQHSPDVNQSQVRDLLRPYMLKSIPENFLDGFNEDEFYVNPTGNFVIGGPDGDCGLTGRKIIVDTYGGAAPHGGGAFSGKDPTKVDRSAAYAARYIAKNVVGSKIAEKCLIQLAYAIGVSKPLSIYVDLFDNDLDKNKFVVEKIKENFDLSPRGIREMLNLNKPIYEKTAAYGHFGRAPEENGSFSWEKTDKTNFFSK

SEQ ID NO: 122328 - protein, 138 aa, Unknown
  Bacterial polypetide isolated from the Sargasso Sea
MSDNYLFTSESVSEGHPDKICDQISDAVVDLYLKNSDQKDQVRVACETMVTTNKVIIAGEVRGPDISNAEIENITREVVKDIGYEQDNFHWKNFDFNCFLHAQSVDIAQGVDANNIRTEGAGDQGIMFGYACTETKKF

SEQ ID NO: 122329 - protein, 152 aa, Unknown
  Bacterial polypetide isolated from the Sargasso Sea
MKKDFLFTSESVSEGHPDKVCDRISDMVVDTYLGMEPQARVACETLTTTNKVVLAGETRGPDINKDELISKVRDCIKDIGYDQEGFTWKEATKIESHLHSQSADIAMGVDSSGNKDEGAGDQGIMFGYACNETDVLMPAPIHYSHKIFKVDG

SEQ ID NO: 122330 - protein, 143 aa, Unknown
  Bacterial polypetide isolated from the Sargasso Sea
GGYARHGGGAFSGKDPTKVDRSAAYAARYVAKSIVKAKLAKKVEVQLSYAIGVAKPISILVETFDSGVISQANLTELIKKHFDLRPAAIIKEFNLRNLPKKMGGNFFRKTASYGHFGRRDLQLPWENVEEKAAQLEEASKVFL

SEQ ID NO: 122331 - protein, 79 aa, Unknown
  Bacterial polypetide isolated from the Sargasso Sea
MSNYLLTSESVTEGHPDKMCDQVSDSILDAIMSQDPFARVACETATTTNLVVLLGEITTSAKVDYEKIARRYYFIYWVR

SEQ ID NO: 122332 - protein, 174 aa, Unknown
  Bacterial polypetide isolated from the Sargasso Sea
MKKNFLFTSESVSEGHPDKVCDRISDMVVDSYLGAEPQSRVACETLTTTNKVVLAGEVRGPEIKKEDLIQKVRDCIKDIGYDQEGFSWKDTTKIETHLHAQSADIAMGVDSSGNKDEGAGDQGIMFGYACNETDVLMPAPIHYSHRILRLMAEDRKSGNLKGIEPDSKAKLQLN

SEQ ID NO: 122333 - protein, 84 aa, Unknown
  Bacterial polypetide isolated from the Sargasso Sea
SLNTFGTGKISDDKIIELVRAHFDLRPYAITNMLDLLHPMYRATAAYGHFGRDPYEMTVGGKTFTAFPWEKTDRAAALKDAAGI

SEQ ID NO: 122334 - protein, 272 aa, Unknown
  Bacterial polypetide isolated from the Sargasso Sea
MANYFFTSESVSEGHPDKMCDQISDAILDECFRQDKFSRVACETAVGGQHGEGFAMVFGEITTNANLDYTKIIKDTVKNIGYTKDEYGYTPDSIKILNNIGKQSQDIKAGVDNSLETRGESAGDSNQQGAGDQGMMFGYACDETDEKMPLAITLAHDLLKRLSDARKNGEISYLRPDSKSQVTLEYDQNHNVVRVDTIVVSTQHDDNVSNQEIEKDIKEKIIDGVIKDDLLDKNTKIIINPSGRFVIGGPVGDAGLTGRKIIVDTYGGAAKK

SEQ ID NO: 122335 - protein, 212 aa, Unknown
  Bacterial polypetide isolated from the Sargasso Sea
RDGMPAAVTSVVISTQHSKDVNLAQVKELCMPYIERSIPKNLLGRLDEKEIYINPTGNFVIGGPDGDSGLTGRKIIVDTYGGAAPHGGGAFSGKDPTKVDRSAAYASRYLAKNVVASKIADKCLIQLAYAIGVSKPLSIYVDLFDNNEEKNLYVEKLIKENFDLSPRGIREMLGLNKPIYEKTAAYGHFGRIPESDGSFSWEKTDKFAVFSK

SEQ ID NO: 122336 - protein, 267 aa, Unknown
  Bacterial polypetide isolated from the Sargasso Sea
AGDQGLMFGFACDETDGLMPAPIYYAHKILKEMAKLRHNDKNCIILPDSKSQVTLEYRDGKPIKARSIVVSTQHVKGCSQDDIKALVKSIVNNVLPNGWMCHEDEFYVNPTGIFEIGGPDGDAGLTGRKIIVDTYGGASPHGGGAFSGKDPTKVDRSAAYLTRYLAKNVVAAKLASRCTIQIAYAIGVSKPLSLYVNTDGTGIIEDQKIEKILTDLIDMSPRGIREHLNLNNPIYVPTSAYGHFGREPDEIIQGSFSWEKTDIADLF

SEQ ID NO: 122337 - protein, 67 aa, Unknown
  Bacterial polypetide isolated from the Sargasso Sea
MTKKNYLFTSESVSEGHPDKVCDRISDMVVDSYLSKDPFARVACETLTTTNKVVLAGEIRGPNIGKH

SEQ ID NO: 122338 - protein, 197 aa, Unknown
  Bacterial polypetide isolated from the Sargasso Sea
MSNLKNYLFTSESVSEGHPDKVSDRISDMVVDSYISADPFSRVACETLTTTNKVVLAGEVRGPKIKTDDLINKVRNCIKDIGYDQDGFTWKDATKIESHLHSQSKDIAIGVDSSGNKDEGAGDQGIMFGYACNETEVLMPAPIHYSHKILRLMAEDRKSGKLRNIEPDSKSQVTFEYIDGKPSKVKSVVISSQHQQT

SEQ ID NO: 122339 - protein, 112 aa, Unknown
  Bacterial polypetide isolated from the Sargasso Sea
SAAYAARYVAKNVVAAGLADRCEIQVSYAIGVAKPTSVRIKTFGTEKISEEEIVHLVNENFDLTPYGIMNMLDLLQPIYEKSAAYGHFGREDEEFPWEKTDRSDALKEQSGL

SEQ ID NO: 122340 - protein, 93 aa, Unknown
  Bacterial polypetide isolated from the Sargasso Sea
MAYLFTSESVSEGHPDKVADQISDALIDNFLAFDSNSKVACETLVTTGQVVLAGEVKSKAYLDVQKIARDVINKIGYTKGDYMFDGNSCGVLS

SEQ ID NO: 122341 - protein, 247 aa, Unknown
  Bacterial polypetide isolated from the Sargasso Sea
MKKNFLFTSESVSEGHPDKVCDRISDMVVDSYLGAEPQSRVACETLTTTNKVVLAGEVRGPEIKKDDLIQKVRECIKDIGYDQDGFSWKDTTKIETHLHSQSADIAMGVDSSGNKDEGAGDQGIMFGYACNETDVLMPAPIHYSHRILRLMAEDRKSGKLKGIEPDSKSQITIEYKDGVPNAVKSVVISTQHSKDVDLAKVKELCIPYIDRSIPKNLLGNLDEKEIYINPTGNFVIGGPDGDSGLTG

SEQ ID NO: 122342 - protein, 126 aa, Unknown
  Bacterial polypetide isolated from the Sargasso Sea
GGGAFSGKDPTKVDRSAAYAARYIAKNIVASKVASKCLIQLAYAIGVSKPLSIYVDLFDNDLEKNKFVVEKINSNFDLSPRGIREMLNLNKPIYEKTSAYGHFGRIPDENGSFSWEKTDKLSVFSR

SEQ ID NO: 122343 - protein, 208 aa, Unknown
  Bacterial polypetide isolated from the Sargasso Sea
MKKNFLFTSESVSEGHPDKVCDRISDMVVDSFLASEPQARVACETLTTTNKVVLAGEVRGPELKEEELISKVRECIKDIGYDQDGFSWRDQTKIETHLHSQSADIAMGVDSAGNKDEGAGDQGIMFGYACNETDVLMPAPIHYSHKILRLMAEDRKSGKLNGIEPDSKSQITIEYKDGMPSAVTSVVISTQHSKDVNLAQVKELFYHT

SEQ ID NO: 122344 - protein, 210 aa, Unknown
  Bacterial polypetide isolated from the Sargasso Sea
GVPNAVKSVVISTQHSKDVDLPKVKELCMPYIERSVPKNLLGNLDENEIYINPTGNFVIGGPDGDSGLTGRKIIVDTYGGAAPHGGGAFSGKDPTKVDRSAAYASRYLAKNVVASKIADKCLIQLAYAIGVSKPLSIYVDLFDNDEEKNRHVEKLINDNFDLSPRGIREMLGLNKPIYEKTAAYGHFGRDPGADGSFSWEKTDKADVFNK

SEQ ID NO: 122345 - protein, 220 aa, Unknown
  Bacterial polypetide isolated from the Sargasso Sea
KVQITIEYKDGVPNAVKSVVISTQHSKDVDLAKVKELCMPYIERSIPKNLLGNLDEKEIYINPTGNFVIGGPDGDSGLTGRKIIVDTYGGAAPHGGGAFSGKDPTKVDRSAAYASRYLAKNVVASKIADKCLIQLAYAIGVSKPLSIYVDLFDNDEEKNRHVEKLINDNFDLSPRGIREMLGLNKPIYEKTAAYGHFGRDPGADGSFSWEKTDKADVFSK

SEQ ID NO: 122346 - protein, 116 aa, Unknown
  Bacterial polypetide isolated from the Sargasso Sea
SKVDRSAAYAARYVAKNIVASKIAKKCEIQLSYAIGVSKPLSIYVNLFDGDLEKEKYVEKLITNNFDLSPRGIREMLNLNRPIYESTAAYGHFGRKPREDGSFSWEKTDKISIFKK

SEQ ID NO: 122347 - protein, 93 aa, Unknown
  Bacterial polypetide isolated from the Sargasso Sea
MKKNFLFTSESVSEGHPDKVCDRISDMVVDTFLASEPQARVACETLTTTNKVVLAGEVRGPELKEDELISKVRGCIKDIGYDQDGFSWKEQTK

SEQ ID NO: 122348 - protein, 283 aa, Unknown
  Bacterial polypetide isolated from the Sargasso Sea
ETLVKDNLVVLAGEITSRSEPNLEALTRKVILDIGYDSLDVGCDGNTCEVVNAIGKQSQDIAQGVNEGEGEDLEQGAGDQGIMFGYATNETEVLMPAPITYSHRLVEQQAFIRKSNKLSWLRPDAKSQVSFVYGEDSKPQSISAVVLSTQHDPDVSQDDLKEGVMEEIIKPILPSNWLNEDTKYFINPTGKFEIGGPVGDCGLTGRKIIVDTYGGMARHGGGAFSGKDPSKVDRSAAYAGRYVAKNIVAAGLADRCEIQVSYAIGVAEPNSISVNTFGTSKIK

SEQ ID NO: 122349 - protein, 192 aa, Unknown
  Bacterial polypetide isolated from the Sargasso Sea
MNQEQIRELIIPYIKKSIPEKLIDELSQKEIYINPTGQFIIGGPDGDTGLTGRKIIVDTYGGAAPHGGGAFSGKDPTKVDRSAAYASRYLAKNIVSSGASEQCLIQLAYAIGVSKPLSIFIKLADGDEQKIGKLKKIIVDNFDLSPRGIREMLKLNNPIYQTTSAYGHFGRKPTDKGEFSWEKTDKADLFKL

SEQ ID NO: 122350 - protein, 175 aa, Unknown
  Bacterial polypetide isolated from the Sargasso Sea
IPKKLLSGLKEEEFYVNPTGQFIIGGPDGDSGLTGRKIIVDTYGGAAPHGGGAFSGKDPSKVDRSAAYAARYVAKNVVASNIADKCLIQLAYAIGISKPLSIYVNLFDGDEEKSKKVENLIKDNFDLSPRGIREMLSLNKPIYECTAAYGHFGRKPGPDGSFSWEKIDKTAVFKK

SEQ ID NO: 122351 - protein, 101 aa, Unknown
  Bacterial polypetide isolated from the Sargasso Sea
MSNLKNYLFTSESVSEGHPDKVSDRISDMVVDSFISGDPYSRVACETLTTTNKVVLAGEVRGPEIKKEELIEKVRNCIKDIGYDPEGFTWKEATKIESHLH

SEQ ID NO: 122352 - protein, 204 aa, Unknown
  Bacterial polypetide isolated from the Sargasso Sea
KSVVISTQHSPEVNQAQVRELVKPYIEKSIPKELLSSLDEKEIYVNPTGNFVIGGPDGDSGLTGRKIIVDTYGGAAPHGGGAFSGKDPTKVDRSAAYASRYLAKNVVASKIADKCLIQLAYAIGVSKPLSIYVDLFDNDDEKNKHVENLIRENFDLSPRGIREMLGLNKPIYEKTAAYGHFGRIPDDKGSFSWEKTDKSNVFSK

SEQ ID NO: 122353 - protein, 115 aa, Unknown
  Bacterial polypetide isolated from the Sargasso Sea
KVDRSAAYASRYLAKNIVASKIADKCLIQLAYAIGVSKPLSIYVDLFDNDEEKNRHVEKLIKENFDLSPRGIREMLGLNKPIYQKSAAYGHFGRDPESDGSFSWEKTDKSQVFNK

SEQ ID NO: 122354 - protein, 210 aa, Unknown
  Bacterial polypetide isolated from the Sargasso Sea
GKPANVKSVVISTQHSADVDQSQVRKLVMPYIEKSIPKNLLNNLDEKEIYINPTGNFVIGGPDGDSGLTGRKIIVDTYGGAAPHGGGAFSGKDPTKVDRSAAYASRYLAKNVVASKIADKCLIQLAYAIGVSKPLSIYVDLFDNDEEKNKHVEKLISENFDLSPRGIREMLGLNKPIYEKSAAYGHFGREPEGDGSFSWEKTDKKSVFSK

SEQ ID NO: 122355 - protein, 247 aa, Unknown
  Bacterial polypetide isolated from the Sargasso Sea
MSNLKNFLFTSESVSEGHPDKVSDRISDMVVDSYLSGDPFSRVACETLTTTNRVVLAGEVRGPEIEKDELIEKVRVCIKDIGYDQEGFTWREATKIESHLHSQSADIAMGVDSSGNKDEGAGDQGLMFGYACNETEELMPAPLHYSHKILRLMAEDRKSGMLKNIEPDNKSQITFEYINGKPTKVKSVVISSQHSPDISQSQVRDLLRPYMIKSIPKKFLENFDDSELYVNPTGNFVIGGPDGDTGL

SEQ ID NO: 122356 - protein, 308 aa, Unknown
  Bacterial polypetide isolated from the Sargasso Sea
DKVCDRISDMVVDSYLGAESQSRVACETLTTTNKVVLAGEVRGPEIKNDDLIQKVRECIKDIGYDQKGFTWKDATKIESHLHLQSADIAMGVDSSGNKDEGAGDQGIMFGYACNETEVLMPAPIHYSHKILRLMAEDRKSGKLNNIEPDSKSQITIEYKDGKPANVKSVVISTQHSADVNQSQVRELVKPYIERSIPKNLLNGLDDNEIYVNPTGNFVIGGPDGDSGLTGRKIIVDTYGGAAPHGGGAFSGKDPTKVDRSAAYASRYLAKNVVASKISDKCLIQLAYAIGVSKPFIIYVDLFDMMRKK

SEQ ID NO: 122357 - protein, 236 aa, Unknown
  Bacterial polypetide isolated from the Sargasso Sea
MRIVNLGKLKNIEPDSKSQITIEYKDGKPANVKSVVISTQHSAEVNQSQVRELVKPYIEKSIPKSLLSNLDENEIYVNPTGNFVIGGPDGDSGLTGRKIIVDTYGGAAPHGGGAFSGKDPTKVDRSAAYASRYLAKNVVASGIAEKCLIQLAYAIGVSKPLSIYVDLFDNNEEKNSHVEKLISENFDLTPRGIREMLGLNKPIYQKTAAYGHFGRDPGSDGSFSWEKTDKSAVFKK

SEQ ID NO: 122358 - protein, 84 aa, Unknown
  Bacterial polypetide isolated from the Sargasso Sea
MSKKSYLFTSESVSEGHPDKVCDRISDMVVDTYLSKEPFARVACETLTTTNKVVLAGETRGPEIKKEDLIQKVRSCIKDIGYEQ

SEQ ID NO: 122359 - protein, 221 aa, Unknown
  Bacterial polypetide isolated from the Sargasso Sea
KSQLTVNTKNGSPVSVKSIVLSTQHLDPLLSSHDVQEIVEPYILEVIPDEWISKDTVWHINPTGKFVIGGPDGDAGLTGRKIIVDTYGGAAPHGGGAFSGKDPTKVDRSAAYISRYLAKNIVAAEVAPKCLIQLSYAIGVAEPLSIYVDTYGTGTKYEKKLEEILPKIVDLSPKGIIEKLGLREPIYERTAAYGHFGRTPETDGGFSWEKTDLVDHLTKHL

SEQ ID NO: 122360 - protein, 225 aa, Unknown
  Bacterial polypetide isolated from the Sargasso Sea
DSKSQVTLEYRDGKPIKARSIVVSTQHVKGCSQQDIKALVKGIVNNVLPNGWMCPEDEFYVNPTGIFEIGGPDGDAGLTGRKIIVDTYGGASPHGGGAFSGKDPTKVDRSAAYLTRYLAKNVVAAKLASRCTIQIAYAIGVSKPLSLYVNTDGTGIIEDQKIEKILTDLIDMSPRGIREHLNLNNPIYVPTSAYGHFGREPNEMIQGSFSWEKTDISDLILRKSG

SEQ ID NO: 122361 - protein, 57 aa, Unknown
  Bacterial polypetide isolated from the Sargasso Sea
MTSESVGEGHPDKMADQISDAILDAILEQDKGCRVAVETLVKTGLVVLAGEITTSAN

SEQ ID NO: 122362 - protein, 159 aa, Unknown
  Bacterial polypetide isolated from the Sargasso Sea
IFINPTGRFVLGGPVGDCGLTGRKIIVDTYGGMARHGGGAFSGKDPSKVDRSAAYAARYVAKNIVAAKIAEKCEIQISYAIGVAEPTSIFVDTFGTSTVEQPELENIIRENFDLRPKGIIKMLDLKKPIYQDTAAYGHFGRDDKTFSWELTDKAKNLIT

SEQ ID NO: 122363 - protein, 279 aa, Unknown
  Bacterial polypetide isolated from the Sargasso Sea
YEQKGFHWKNCDIDVHLHSQSSDIAMGVDSKGNKDEGAGDQGIMFGYACDETEVLMPAPIYYSHKILELMALDRKKGIADKLEPDSKSQVTMMYQNGKPAKVTSVVISTQHSPSVNQSQVKEIVRPYLEKAIPNTLLSGLKEEEFYVNPTGQFIIGGPDGDTGLTGRKIIVDTYGGAAPHGGGAFSGKDPSKVDRSAAYAARYVAKNVVASKIASKCLIQLSYAIGVSKPLSIYVDLFDGDEKKAKRVEKLIKDNFDLSPRGIREMLSLNKPIYECTSA

SEQ ID NO: 122364 - protein, 152 aa, Unknown
  Bacterial polypetide isolated from the Sargasso Sea
MSRETYIFTSESVSEGHPDKVCDRISDAVLDAFIALEPEARVACETFATTNRVMVGGEVGLSDKNLLSKQMDQIDEIVRACIKDIGYEQKKFHHETVEITNLLHEQSAHIAQGVNADGDKEEGAGDQGIMFGYATDETPDLMPAPIHTVMLF

SEQ ID NO: 122365 - protein, 107 aa, Unknown
  Bacterial polypetide isolated from the Sargasso Sea
MSNLKNYLFTSESVSEGHPDKVSDRISDMVVDSYLNNDPFSRVACETLTTTNKVVIAGEVRGPEIKKDELIQKVRDCIKDIGYDQDGFSWKETTKIESHLHSQSADI

SEQ ID NO: 122366 - protein, 264 aa, Unknown
  Bacterial polypetide isolated from the Sargasso Sea
MKKDYLFTSESVSEGHPDKVCDRISDMVVDTYLGKEPQARVACETLTTTNKVVLAGETRGPEINKDELISKVRDCIKDIGYDQSGFTWKDATKIDLHLHSQSADIAMGVDSAGNKDEGAGDQGIMFGYACNETDVLMPAPIHYSHKILRLMAEDRKSGKLKNIEPDSKSQITIEYKDGKPSSVKSVVISTQHSADVNQAQVRELVKPYIEKSIPKNLINGLDDTEIYVNPTGNFVIGGPDGDSGLTGRKIIVDTYGGAAPHGGG

SEQ ID NO: 122367 - protein, 247 aa, Unknown
  Bacterial polypetide isolated from the Sargasso Sea
YSHQILYKMAQARKDGSASGLEPDSKSQVTMLYENGKPTKVTSLVISSQHKEGLSPEDVKEIVKPYVYECIPNNLLEGLKDEEFYVNPTGNFVIGGPDGDSGLTGRKIIVDTYGGAAPHGGGAFSGKDPSKVDRSAAYAARYLAKNVVAADLADECTIQLSYAIGVSKPLSVYVNTNGTNKVDEQKIEKSVQDLFDLSPRGIREHLKLTNAIYVPTSAYGHFGREPSDKGHFTWEKTDLVESLKGIA

SEQ ID NO: 122368 - protein, 286 aa, Unknown
  Bacterial polypetide isolated from the Sargasso Sea
MKKNFLFTSESVSEGHPDKVCDRISDMVVDTFLASEPQARVACETLTTTNKVVLAGEVRGPELKEDELISKVRDCIKDIGYDQDGFSWRDQTKIETHLHSQSADIAMGVDSSGNKDEGAGDQGIMFGYACNETDVLMPAPIHYSHNILRLMATDRKSGKLNGIEPDSKSQITIEYKDGMPAAVTSVVISTQHSKDVSLAQVKELCMPYIERSIPKNLLGSLDEKEIYINPTGNFVIGGPDGDSGLTGRKIIVDTYGGAAPHGGGAFSGKDPTKVDRSAAYASRYLA

SEQ ID NO: 122369 - protein, 249 aa, Unknown
  Bacterial polypetide isolated from the Sargasso Sea
SHEILKKLAELRHSGKADFLGPDSKSQLTIEYDNERPIKAHKIVVSSQHKDGFNQTELKDFIMSFVKSILPEKWMCHNDDFYVNPTGRFVIGGPDGDTGLTGRKIIVDTYGGSSPHGGGAFSGKDPTKVDRSAAYMTRYLAKNVVAAKLAKKCTIQIAYGIGISKPLSFYVNTQGTGEIEDLKIQKCLEKIVDLTPKGIRDHLALNNPIYVPSSSYGHFGRQPDEKVKGSFSWEKVDLVEKILNEINMF

SEQ ID NO: 122370 - protein, 288 aa, Unknown
  Bacterial polypetide isolated from the Sargasso Sea
KIETHLHSQSADIAMGVDSSGNKDEGAGDQGIMFGYACNETDVLMPAPIHYSHRILRLMAEDRKSGKLKGIEPDSKSQITIEYKDGVPSAVKSVVISTQHSKDVDLTKVKELCMPYIEKSIPKNLLGNLDEKEIYINPTGNFVIGGPDGDSGLTGRKIIVDTYGGAAPHGGGAFSGKDPTKVDRSAAYASRYLAKNVVASKISEKCLIQLAYAIGVSKPLSIYVDLFDNDEEKNRHVEKLINENFDLSPRGIREMLGLNKPIYQKTAAYGHFGRNPESDGSFSWEKTD

SEQ ID NO: 122371 - protein, 286 aa, Unknown
  Bacterial polypetide isolated from the Sargasso Sea
NTKYLFTSESVSEGHPDKVCDRISDMVVDSYLSKDPVSRVACETLTTTNKVVLAGETRGPKIDKDELISKVRNCIKEIGYDQDGFSWKTANIETYLHEQSADIAMGVDSKDNKDEGAGDQGIMFGYATNETDELMPAPIHYSHKILRLMAEDRKKGNLKGIEPDSKSQVTMLYENKKPIKVTSVVISTQHSKDLNQENVRELIIPYIKKSIPENYLTELDPKEVYINPTGQFIIGGPDGDTGLTGRKIIVDTYGGAAPHGGGAFSGKDPTKVDRSAAYASRYLAKN

SEQ ID NO: 122372 - protein, 82 aa, Unknown
  Bacterial polypetide isolated from the Sargasso Sea
MTSESVGEGHPDKMADQISDAILDAILEQDKGCRVAVETLVKTGLVVLAGEITTTANVDYEAIARRTIKRIGYDREELGFDD

SEQ ID NO: 122373 - protein, 51 aa, Unknown
  Bacterial polypetide isolated from the Sargasso Sea
MKKNFLFTSESVSEGHPDKVCDRISDMVVDTFLASEPQARVACETLTTTNK

SEQ ID NO: 122374 - protein, 167 aa, Unknown
  Bacterial polypetide isolated from the Sargasso Sea
MDENEIYINPTGNFVIGGPDGDSGLTGRKIIVDTYGGAAPHGGGAFSGKDPTKVDRSAAYASRYLAKNVVASGITDKCLIQLAYAIGVSKPLSIYVDLFDNDEEKNSHVEKLINENFDLSPRGIREMLGLNKPIYQKTAAYGHFGREPGKDGSFSWEKTDKSSVFKK

SEQ ID NO: 122375 - protein, 140 aa, Unknown
  Bacterial polypetide isolated from the Sargasso Sea
KKIIVDTYGGAAPHGGGAFSGKDPTKVDRSAAYASRYLAKNVVASKIADKCLIQLAYAIGVSKPLSIYVDLFDNDEEKNMHVEKLIKENFDLSPRGIREMLGLNKPIYEKTAAYGHFGRIPENDGSFSWEKTDKSEVFSK

SEQ ID NO: 122376 - protein, 199 aa, Unknown
  Bacterial polypetide isolated from the Sargasso Sea
MKKNYLFTSESVSEGHPDKVCDRISDMVVDTYLGMEPQARVACETLTTTNKVVLAGETRGPEINNDELISKVRNCIKDIGYDQDGFTYKEATKIECHLHSQSADIAMGVDSSGNKDEGAGDQGIMFGYACNETDVLMPAPIHFSHRILRLMAEDRKSGKLKGIEPDSKSQITIEYKDGIPANVKSVVISTQHSKDVNLT

SEQ ID NO: 122377 - protein, 243 aa, Unknown
  Bacterial polypetide isolated from the Sargasso Sea
MIKNNMVYIAGEITSLGSPDLESIVRKTINDIGYDTDEYGFNGDTCEFNNLVFEQSPDISQGVTEGEGENLEQGAGDQGLMFGYACTETESLMPLPIDLSHRLVKKQSDVMKNNELSWLRPDAKSQVSAIYSDDGKSIEGLSAIVLSTQHDEDVTQEDIKEGVMEKIIKPIVPEEWILDSTNIFINPTGKFVIGGPVGDCGLTGRKIIVDTYGGMARHGGGAFSGKDPSKVDRSAAYAARYVA

SEQ ID NO: 122378 - protein, 288 aa, Unknown
  Bacterial polypetide isolated from the Sargasso Sea
MSIFFTSESVSGGHPDKVCDQISDAILDSYLAEDPNSRVACETMIKNNMVFIAGEITSLGSPDLEPIVRKTINDIGYNSDEYGFNGDTCEFTNLVFEQSPDISQGVTEGEGENLEQGAGDQGLMFGYACTETDSLMPLPIDLSHRLVKKQADVMKSGEIKWLRPDAKSQVSVIYSDDGKTIEGLSAVVLSTQHDEDVTQEEIKTEVMDKIIKPIVPEEWILDSTNIFINPTGKFVIGGPVGDCGLTGRKIIVDTYGGMARHGGGAFSGKDPSKVDRSAAYASRYVAKN

SEQ ID NO: 122379 - protein, 62 aa, Unknown
  Bacterial polypetide isolated from the Sargasso Sea
MTKYSVFTSESVSEGHPDKVADQISDAILDSMLVGDPDSRVACEVLIKDNLVVLAGEITSIS

SEQ ID NO: 122380 - protein, 166 aa, Unknown
  Bacterial polypetide isolated from the Sargasso Sea
RVFELVGSHISEEYILDLNPSGSFVKGGPAGDTGLTGRKIVVDAYGPSVPVGGGAFSGKDPSKVDRSAAYAARHLAKNIVSHGLSDECLVRVSYAIGKADPYELTVETFGTEKSENKVLDDFTSKFDMKPGAIIERLNLLEVDYKEDTLFSHFGHNDRNWEKIENL

SEQ ID NO: 122381 - protein, 234 aa, Unknown
  Bacterial polypetide isolated from the Sargasso Sea
QSADIAMGVDSSGNKDEGAGDQGIMFGYACNETDVLMPAPIHYSHKILRLMAEDRKSGKLKNIEPDSKSQVTFEYVNGKPSKVKSVVISSQHSPDVNQSQVRDLLRPYMLKSIPKNFIEGFDENEFYVNPTGNFVIGGPDGDCGLTGRKIIVDTYGGAAPHGGGAFSGKDPTKVDRSAAYAARYIAKNIVGSKIAEKCLIQLAYAIGVSKPLSIYVDLFDNDIDKNKFVLEKIK

SEQ ID NO: 122382 - protein, 143 aa, Unknown
  Bacterial polypetide isolated from the Sargasso Sea
GLTGRKIIVDTYGGAAPHGGGAFSGKDPTKVDRSAAYASRYVAKNVVASGIADKCLIQLAYAIGVSKPLSIYVDLFDNDEEKNRHVEKLINENFDLSPRGIREMLGLNKAIYQKTAAYGHFGREPEPDGSFSWEKTDKYDVFK

SEQ ID NO: 122383 - protein, 247 aa, Unknown
  Bacterial polypetide isolated from the Sargasso Sea
IHFSHRILRLMAEDRKSGKLKGIEPDSKSQITIEYKDGVPKAVKSVVISTQHSKDVNLAQVKKLCMPYIERSIPKNLLGNLDENEIYINPTGNFVIGGPDGDSGLTGRKIIVDTYGGAAPHGGGAFSGKDPTKVDRSAAYASRYLAKNIVASKIADKCLIQLAYAIGVSKPLSIYVDLFSNDEEKNKHVEKLINENFDLSPRGIREMLALNKPIYEKSAAYGHFGRDPESNGAFSWENTDKASVFNK

SEQ ID NO: 122384 - protein, 46 aa, Unknown
  Bacterial polypetide isolated from the Sargasso Sea
MKKNFLFTSESVSEGHPDKVCDRISDMVVDTYLSLEPQARVACETL

SEQ ID NO: 122385 - protein, 284 aa, Unknown
  Bacterial polypetide isolated from the Sargasso Sea
MSNLKNFLFTSESVSEGHPDKVSDRISDMVVDSYLSGDPFSRVACETLTTTNKVVLAGEVRGPEIKENDLIEKVRHCIKDIGYDQDGFTWKEATKIESHLHSQSSDIAMGVDSSGNKDEGAGDQGIMFGYACNETEELMPAPIHYSHKILRLMAEDRKSGKLKNIEPDSKSQVTFEYVDGKPTKVKSVVISSQHSADVNQTQVRELLRPYMINSIPKNFLDGFNEGEFYVNPTGNFVIGGPDGDCGLTGRKIIVDTYGGAAPHGGGAFSGKDPTKVDRSAAYAA

SEQ ID NO: 122386 - protein, 206 aa, Unknown
  Bacterial polypetide isolated from the Sargasso Sea
MVAKNYLFTSESVSEGHPDKVCDQISDSIVDLYLSADPLSRVAVETLCTTNKVVLAGEVRGPKEISHADLEQTARDCVKKIGYEQDGFHWETLDVSVYVHSQSTDIAQGVDASGGKDEGAGDQGIMFGYACNETEALMPAPIFYSHAILERLSKARHSREEVGLGPDSKSQITLAYENGKPVRAHSIVVSTQHASDLNQEDVREIV

SEQ ID NO: 122387 - protein, 129 aa, Unknown
  Bacterial polypetide isolated from the Sargasso Sea
LSFSHKILKDLAYKRKNNIITGILPDSKSQLTLFYENDKPKYIDSIVVSSQHTEETTQEYLHEEINKLCKKILPDEWYTDDTKLLVNPTGKFVIGGPVGDTGLTGRKIIVDTYGGASPHGGGAFSGKDP

SEQ ID NO: 122388 - protein, 268 aa, Unknown
  Bacterial polypetide isolated from the Sargasso Sea
DTTKIETHLHSHSADIAMGVDSSGNKDEGAGDQGIMFGYACNETDVLMPAPIHYSHRILRLMAEDRKSGKLKGIEPDSKSQITIEYKDGLPNAVKSVVISTQHSKDVNLAKVKELCIPYIERSIPKSLLGNLDEKEIYINPTGNFVIGGPDGDSGLTGRKIIVDTYGGAAPHGGGAFSGKDPTKVDRSAAYASRYLAKNVVASKVADKCLIQLAYAIGVSKPLSIYVDLFDNDEEKNRHVEKLISENFDLSPRGIREMLGLINPYMSK

SEQ ID NO: 122389 - protein, 137 aa, Unknown
  Bacterial polypetide isolated from the Sargasso Sea
IVDTYGGMARHGGGAFSGKDPSKVDRSAAYMARYIAKNIVATKLADKCEIQLSYAIGVAEPTSISVDTFGTSKIENSKISSAVSKVFNLTPKGIIDTLDLLNVKYQPTAAFGHFGRDDKNFTWEQKDKVDILMNELG

SEQ ID NO: 122390 - protein, 105 aa, Unknown
  Bacterial polypetide isolated from the Sargasso Sea
MGRDDFIFTSESVSEGHPDKICDRISDAILDFCLEKDKLARVACETFSTTNTVVVGGEVGFSTGLEFNSLKPEIDELVRKVVKEIGYEQKGFHWKNLEISNFIHQ

SEQ ID NO: 122391 - protein, 252 aa, Unknown
  Bacterial polypetide isolated from the Sargasso Sea
MSNLKNYLFTSESVSEGHPDKVSDRISDMVVDSYLSKDPFSRVACETLTTTNKVVLAGEVRGPEINKDELIEKVRNCIKDIGYDQEGFTWKDATNIECHLHSQSADIAMGVDSSGNKDEGAGDQGIMFGYACNETDVLMPAPIHYSHKILKLMAEDRKSGKLKHIEPDSKSQVTFEYVNGKPTKVKSVVISSQHSSDVDQVQVRNLLRPYMLKSIPENLLEGFDENEFYVNPTGNFVIGGPRWRLWTYWKKN

SEQ ID NO: 122392 - protein, 255 aa, Unknown
  Bacterial polypetide isolated from the Sargasso Sea
TDVLMPAPIYYSHKILELMALDRKNGKADKLEPDSKSQVTLKYENGTPTKVTAVVISTQHSSDVDQATVKKIVRPYLEKAIPTNLLSGLKDENFYVNPTGQFIIGGPDGDSGLTGRKIIVDTYGGAARHGGGAFSGKDPSKVDRSAAYAARYVAKNVVASKIAKKCEIQLSYAIGVSKPLSIYVNLFDGDIEKEKHVEDLIKNNFDLSPRGIREMLNLNRPIYECTAAYGHFGRKPGSDGTFSWEKMDKTSIFKK

SEQ ID NO: 122393 - protein, 112 aa, Unknown
  Bacterial polypetide isolated from the Sargasso Sea
MKKNFLFTSESVSEGHPDKVCDRISDMVVDSYLGAEPQSRVACETLTTTNKVVLAGEVRGPEIKKDDLIQKVRECIKDIGYDQDGFSWEDTTKIETHLHAQSADIAMGVDSS

SEQ ID NO: 122394 - protein, 211 aa, Unknown
  Bacterial polypetide isolated from the Sargasso Sea
MSEYKLFTSESVSEGHPDKMADQISDAVLDAMLKDDPDSRVACETLVKDNLVVLAGEITSRSEPDLEALTRKVILDIGYNSLEVGCDGNTCEVVNAIGKQSQDIAQGVNEGEGEDLEQGAGDQGLMFGYATNETEVLMPAPITYSHRLVEQQAFIRKSGKLSWLRPDAKSQVSFVYGEDGKPESISAVVLSTQHDSDVSQKDLKERCDGRK

SEQ ID NO: 122395 - protein, 250 aa, Unknown
  Bacterial polypetide isolated from the Sargasso Sea
SVLSALHEQSQDIAQGVNEGEGAFKEAGAGDQGMMFGYACKQTPELMPLPVLLSHKLMRELTRVRKNKDIPYLRPDAKAQVTIEFSDDNTPQRVDAVVISTQHDPDVSLETIKEDVIEKVIKTVIPSQYIDENTRYFINPTGRFVIGGPHGDAGLTGRKIIVDTYGGWGAHGGGAFSGKDSTKVDRSGAYMARYVAKNIVAADLADEVEVQLAYAIGVAEPVSVRITTSGTGKVSDEALVKLVRDNFDLT

SEQ ID NO: 122396 - protein, 143 aa, Unknown
  Bacterial polypetide isolated from the Sargasso Sea
GRKIIVDTYGGAAPHGGGAFSGKDPSKVDRSAAYASRYLAKNIVAANLADECTIQLSYAIGVSKPLSVYVNTNGTNKVDEQKIEKSVQDLFDLSPRGIREHLKLTNAIYVPTSAYGHFGREPTDQGHFTWEKTDLVDSLKSLI

SEQ ID NO: 122397 - protein, 207 aa, Unknown
  Bacterial polypetide isolated from the Sargasso Sea
LEQGAGDQSLMFGYATNETEVLMPAPITYSHILVEQQAFIRKSNKLSWLRPDAKSQVSFVYREDGKPQSISAVVLSTQHDPDISQEDLKEGVMEEIIKPILPSNWLNKDTKYFINPTGRFEVGGPVGDCRLTGRKIIVDTYGGMARHGGGAFSGKDPSKVDRSAAYAGRYITQNIVSAGLSDRCEIQVSYAIGVAEPTSISVNTFGT

SEQ ID NO: 122398 - protein, 149 aa, Unknown
  Bacterial polypetide isolated from the Sargasso Sea
MSNLKNYLFTSESVSEGHPDKVSDRISDMVVDTYISGDPYSRVACETLTTTNKVVLAGEVRGPEIKKDELIEKVRGCIKDIGYDQDGFTWKEATKIESHLHSQSTDIAMGVDSSGNKDEGAGDQGIMFGYACSETEELMPAPIHYSHKI

SEQ ID NO: 122399 - protein, 291 aa, Unknown
  Bacterial polypetide isolated from the Sargasso Sea
YLHAQSADIAMGVDSSGNKDEGAGDQGIMFGYACNETDVLMPAPIHYSHKILRLMAADRKSGKLKNIEPDSKSQITIEYKDGKPANVKSVVISTQHSADVDQTQVRKLVMPYIEKSIPKNLLSKLDEKEIYINPTGNFVIGGPDGDSGLTGRKIIVDTYGGAAPHGGGAFSGKDPTKVDRSAAYASRYLAKNVVASKIADKCLIQLAYAIGVSKPLSIYVDLFDNDEEKNKHVEKLISENFDLSPRGIREMLGLNKPIYEKSAAYGHFGREPEGDGSFSWEKTDKKLVFSK

SEQ ID NO: 122400 - protein, 312 aa, Unknown
  Bacterial polypetide isolated from the Sargasso Sea
RGCIKDIGYDQEGFTYKEATKIECHLHSQSADIAMGVDSSGNKDEGAGDQGIMFGYACNETDVLMPAPIHFSHRILRLMAEDRKSGKLKGIEPDSKSQITIEYKDGKPKAVKSVVISTQHSKDVNLAKVKELCIPYIERSIPKNLLGNLDENEIYINPTGNFVIGGPDGDSGLTGRKIIVDTYGGAAPHGGGAFSGKDPTKVDRSAAYASRYLAKNIVASKIADKCLIQLAYAIGVSKPLSIYVDLFSNDEEKNLHVEKLIKENFDLSPRGIREMLGLNKPIYEKSAAYGHFGRDPGSDGSFFWEKTDKASV

SEQ ID NO: 122401 - protein, 269 aa, Unknown
  Bacterial polypetide isolated from the Sargasso Sea
AGDQGIMFGYACNETDVLMPAPIHFSHRILRLMAEDRKSGKLKGIEPDSKSQITIEYKDGKPKAVKSVVISTQHSKDVNLAQVKDLCMPYIERSIPKNLLGSLDENEIYINPTGNFVIGGPDGDSGLTGRKIIVDTYGGAAPHGGGAFSGKDPTKVDRSAAYASRYLAKNIVASKIADKCLIQLAYAIGVSKPLSIYVDLFSNDEEKNLHVEKLIKENFDLSPRGIREMLGLNKPIYEKSAAYGHFGREPGSDGSFSWEKTDKASVFQK

SEQ ID NO: 122402 - protein, 168 aa, Unknown
  Bacterial polypetide isolated from the Sargasso Sea
MNKDTNVFINPTGQFIIGGPVGDCGLTGRKIIVDTYGGMARHGGGAFSGKDPSKVDRSAAYAGRYVAKNIVSAGLADKCELQVSYAIGVAEPTSISVETFGTGKIADEKIIDLIRENFDLRPKGLIAMLELKKPIYKKTAAYGHFGRIEDEFSWEKTDKKEALASALP

SEQ ID NO: 122403 - protein, 201 aa, Unknown
  Bacterial polypetide isolated from the Sargasso Sea
VISSQHSPDVNQSDVKELLRPYMLKSIPKEFMEEFKEDEFYVNPTGNFVIGGPDGDCGLTGRKIIVDTYGGAAPHGGGAFSGKDPTKVDRSAAYAARYIAKNVVASKITEKCLIQLAYAIGVSKPLSIYVDLFDSDLDKNKFVVDKIKENFDLSPRGIREMLGLNKPIYEKTACYGHFGRVPEKDGAFSWENTDKTEVFLK

SEQ ID NO: 122404 - protein, 143 aa, Unknown
  Bacterial polypetide isolated from the Sargasso Sea
SKAKVDYIKLVRNVIKEIGYEGYKAGGFDANSCAVLVALDEQSPDISQGVNEADDINDDLENNTGAGDQGIMFGYACDETPELMPLPISLAHRLAIQLAKVRHEKVLNYLLPDGKTQVSIDYEKGVPVSINTILISTQHNPEI

SEQ ID NO: 122405 - protein, 274 aa, Unknown
  Bacterial polypetide isolated from the Sargasso Sea
MIHLHEQSPDIARGVDAIGDNSEGAGDQGIMFGYACNETKELMPATLSFSHKILKDLADKRKSNIITGILPDSKSQLTLFYENDKPKYIDSIVVSSQHTEETTQEYLYEEINKLCKNILPNEWYTADTKLLVNPTGNFVIGGPVGDTGLTGRKIIVDTYGGASPHGGGAFSGKDPTKVDRSAAYAARYLSKNIVHAGISERCTIQLSYAIGISEPLSIFVDLHGNNRVDSNRVEKFIKDRFDLSPRGIIDMLGLCNPIFSETSSYGHFGRDQTT

SEQ ID NO: 122406 - protein, 181 aa, Unknown
  Bacterial polypetide isolated from the Sargasso Sea
MQNRKYLFTSESVSEGHPDKVCDRISDMVVDSYLSKDPVSRVACETLTTTNKVVIAGETRGPIIEKDELISKVRECIKDIGYDQDGFSWKTANIEILLHEQSEDIAMGVDSKDNKDEGAGDQGIMFGYACNETQELMPAPIYYSHKILRLMAEDRKSGNLKGIEPDSKSQVTMLYENEKPV

SEQ ID NO: 122407 - protein, 144 aa, Unknown
  Bacterial polypetide isolated from the Sargasso Sea
MSESNYLFTSESVSEGHPDKVCDLISDSIVDRYLSEDPQARVAVETMATTDLVMIAGETRGPEISPDEIERVARQAVRDIGYEQKGFHWRDSSVQVRLHSQSADIAVGVDAIGNKDEGAGDQGMMFGYACRETEALMPAPIFFS

SEQ ID NO: 122408 - protein, 300 aa, Unknown
  Bacterial polypetide isolated from the Sargasso Sea
AVLDNLFQQDPESHVACETLATTGTVVVSGEVRSNGDVDVEKIVKNTLGEIGYTNKAYGMDNNEVKVISMLDEQSPEIAQGVDEGSGLHEEQGAGDQGLMFGFACDETKELMPLPIHLSHRLVERMTDLRKDGTIPWLRPDSKSQVSVAYEEDRPVSITKVVIATQHDDMIEKFGNEDAEHDFVEEEIIHNVIKPVLDASGLPYSESFIVNGTGRFVFGGPEADTGLTGRKIIVDTYGGYAPHGGGAFSGKDPSKVDRSAAYMARYIAKNIVAAGVATKCEVQLSYSIGVAEPTSFYVKS

SEQ ID NO: 122409 - protein, 263 aa, Unknown
  Bacterial polypetide isolated from the Sargasso Sea
MASKNYLFTSESVSEGHPDKVCDRISDMVVDTYLGKDPFSRVACETLTTTNKVVLAGETRGPEIKKDNLIEKVRSCIKDIGYEQKGFHWKNCSIDVHLHSQSSDIAMGVDSKGNKDEGAGDQGIMFGYACNETEVLMPAPIYYSHKILELMAADRKNGKADKLEPDSKSQVTLMYENGKPIKVTSVVISTQHSPEVNQSQVKEIVRPYLEKSIPRELLSGLKEDEFYVNPTGQFIIGGPDGDSGLTGRKIIVDTYGGAAPHGG

SEQ ID NO: 122410 - protein, 227 aa, Unknown
  Bacterial polypetide isolated from the Sargasso Sea
LEPDSKVKVTMLYENGKPSKVTSLVISSQHKEGLSPADVKEIVKPYVYECIPNELLEGLKDEEFYVNPTGNFVIGGPDGDSGLTGRKIIVDTYGGAAPHGGGAFSGKDPSKVDRSAAYAARYLAKNIVAADLADQCTIQLSYAIGVSKPLSVYINTNGTNKVDEHKIEKSVQDLFDLSPRGIREHLKLTNAIYVPTSSYGHFGREPSDQGHFTWEKTDLVDALKGIA

SEQ ID NO: 122411 - protein, 174 aa, Unknown
  Bacterial polypetide isolated from the Sargasso Sea
PKNLLGKLEENEIYINPTGNFVIGGPDGDSGLTGRKIIVDTYGGAAPHGGGAFSGKDPTKVDRSAAYASRYLAKNIVASKIADKCLIQLAYAIGVSKPLSIYVDLFSNNEEKNKHVEKLIKDNFDLSPRGIREMLGLNKPIYEKSAAYGHFGRDPESNGAFSWEKTDKSAIFSK

SEQ ID NO: 122412 - protein, 172 aa, Unknown
  Bacterial polypetide isolated from the Sargasso Sea
LLSDLKDSEIYINPTGQFIIGGPDGDTGLTGRKIIVDTYGGAAPHGGGAFSGKDPTKVDRSAAYVSRYLAKNIVASGLTDKCLIQLSYAIGVSKPLSTYVKLGDNDQDKTSKVEKIIKENFDLSPRGIRELLNLNKPIYEITSSYGHFGRKPTNKGEFSWEKTDKTSLFKTV

SEQ ID NO: 122413 - protein, 109 aa, Unknown
  Bacterial polypetide isolated from the Sargasso Sea
MKKDYLFTSESVSEGHPDKVCDRISDMVVDTYLGLEPESRVACETLTTTNKVVLAGETRGPEIKKDELISKVRDCIKDIGYDQEGFTYKEATKIECHLHSQSADIAMGS

SEQ ID NO: 122414 - protein, 298 aa, Unknown
  Bacterial polypetide isolated from the Sargasso Sea
MADQISDAILDAILEQDKGCRVAVETLVKTGLVVLGGEITTSADVDYEAIARRTIKRIGYDKEELGFDDQSCEVLVKISKQSPDIAMGVDRADEKEQGAGDQGLMFGYATNETKQLMPATIQLSHQLVKRHADVRRSGELSWLRPDAKSQVTILFDDGKPKSIDTVVLSTQHDEDVSMDEIQAGVMEHIIKPILPEELLTETTQYLINPTGNFIIGGPVGDCGLTGRKIIVDTYGGMARHGGGAFSGKDPSKVDRSAAYAARYVAKNIVAAGLADRCEIQVSYAIGVAKPTSVRVKTF

SEQ ID NO: 122415 - protein, 116 aa, Unknown
  Bacterial polypetide isolated from the Sargasso Sea
KVDRSAAYMSRYIAKNVVAADLAERCEVQLSYGIGVAKPTSFYVKSYGTGRLPDEELTKICADIFPLRPGEIVKHLDLKKPRYYVTSSYGHFGRNGNNFTWELTDLAEKLSLVAKI

SEQ ID NO: 122416 - protein, 287 aa, Unknown
  Bacterial polypetide isolated from the Sargasso Sea
GIEALVTSNLVLLAGETSLINFREKIDLEDLVRNCIREIGYEDENFHWEKIEIIDKIHGQSGDIAQGVVETENKNQGAGDQGIMFGYATDETDSYMPAPLYFAHQILSKISIERKAGNLPELGPDAKSQVTMLYENDYPLYADKIIVSNQHNESAENSHVRDILVDVILTALPEGWIKNNKDLIINPTGRFVIGGPDGDAGLTGRKIIVDTYGGAAPHGGGAFSGKDPSKVDRSAAYMARYIAKNIVHAKIAKKCQIQISYAIGLSYPMSFYLKLDNSANIDTKKLS

SEQ ID NO: 122417 - protein, 137 aa, Unknown
  Bacterial polypetide isolated from the Sargasso Sea
MSKLKNYLFTSESVSEGHPDKVSDRISDMVVDSFISGDPYSRVACETLTTTNKVVLAGEVRGPEIKKDELIEKVRNCIKDIGYDQEGFTWKEATKIESHLHSQSADIAMGVDSSGNKDEGAGDQGIMFGYACNETDV

SEQ ID NO: 122418 - protein, 252 aa, Unknown
  Bacterial polypetide isolated from the Sargasso Sea
MSNLKNYLFTSESVSEGHPDKVSDRISDMVVDSYLSNDPFSRVACETLTTTNKVVLAGEVRGPEISKDEIIHKVRNCIKDIGYDQEGFTWRDATKIECHLHAQSVDIAMGVDSSGNKDEGAGDQGIMFGYACNETDILMPAPIHYSHKILRLMAEDRKSGKLKNIEPDSKSQVTFEYIDGKPTRVKSLVISSQHASDVNQAQVRDLLRPYMLKSIPKHFLQGFDENEFYVNPTGNFVIGGPDGDCGLTGRKI

SEQ ID NO: 122419 - protein, 161 aa, Unknown
  Bacterial polypetide isolated from the Sargasso Sea
IEPDSKSQVTFEYVDGKPIKVKSVVISSQHSSDVNQAQVRDLLRPYMLKSIPEKFLKDFNEEEFYVNPTGNLVIGGPDGDCGLTGRKIIVDTYGGAAPHGGGAFSGKDPTKVDRSAAYAARYIAKNVVASKIADKCLIQLAYAIGVSKPLSIYVDLFDDDL

SEQ ID NO: 122420 - protein, 278 aa, Unknown
  Bacterial polypetide isolated from the Sargasso Sea
CIKEIGYDQQGFSWKTANIETHLHAQSADIAMGVDSKGNKDEGAGDQGIMFGYACKETEEFMPAPIHFSHKILRLMAEDRKKGSLKGIEPDSKSQVTMLYEEKKPIKVKSVVISTQHSKDLNQDDVKNLVIPYIKKSIPDKYLQDLKNNEIYINPTGQFIIGGPDGDTGLTGRKIIVDTYGGAAPHGGGAFSGKDPTKVDRSAAYASRYLAKNIVAAGISQRCLIQLSYAIGVSKPLSVFIKLDEGKESKIEKIKNIIDKNFDLSPRGIRQMLKLNNP

SEQ ID NO: 122421 - protein, 149 aa, Unknown
  Bacterial polypetide isolated from the Sargasso Sea
MGRKIIVDTYGGASPHGGGAFSGKDPTKVDRSAAYLTRYLAKNVVASGLASRCTIQIAYAIGVSKPLSLYVNTDGTGKINDNRIEKILTNLVDMSPRGVREHLKLNKPIYVPTSAYGHFGRDPNEGVEGSFTWEKTDLVDLILDELNKS

SEQ ID NO: 122422 - protein, 141 aa, Unknown
  Bacterial polypetide isolated from the Sargasso Sea
EEKIIVDTYGGAAPHGGGAFSGKDPSKVDRSAAYAARYVAKNVVASKIADKCLIQLAYAIGVSKPLSIYVDLFDGDEEKSKHVEKLINDNFDLSPRGIREMLSLNKPIYECTSAYGHFGRKPGSKGEFSWEKTDKIAVFTK

SEQ ID NO: 122423 - protein, 134 aa, Unknown
  Bacterial polypetide isolated from the Sargasso Sea
MTSKNYLFTSESVSEGHPDKVCDRISDMVVDSYLKKDPVSRVACETLTTTNKVVLAGETRGPKISKDELISKVRECIKDIGYDQEGFSWKTAKIDTFLHEQSKDIAMGVDSKDNKDEGACDQGIMFGYACNETE

SEQ ID NO: 122424 - protein, 320 aa, Unknown
  Bacterial polypetide isolated from the Sargasso Sea
PYSRVACETLTTTNKVVLAGEVRGPEIKKEDLIEKVRNCIKDIGYDQEGFTWKEATKIESHLHSQSTDIAMGVDSSGNKDEGAGDQGIMFGYACNETDVLMPAPIHYSHKILRLMAEDRKKGKLKNIEPDSKSQVTFEYKDGKPSKVKSVVISSQHSAEVNQTQVRELLRPYILKSIPEKFLEDFDDKEFYVNPTGNFVIGGPDGDCGLTGRKIIVDTYGGAAPHGGGAFSGKDPTKVDRSAAYAARYIAKNIVGSKISEKCLIQLAYAIGVSKPLSIYVDLFDNDLDKNKFVVEKINENFDLSPRGIREMLNLNNPIYE

SEQ ID NO: 122425 - protein, 87 aa, Unknown
  Bacterial polypetide isolated from the Sargasso Sea
MANNSYLFTSESVSEGHPDKVCDRISDMVVDSYLSKDPVSRVACETLTTTNKVVLAGETRGPSINKEDLINKVRDCIKDIGYDQKGF

SEQ ID NO: 122426 - protein, 147 aa, Unknown
  Bacterial polypetide isolated from the Sargasso Sea
EDFNEDEFYVNPTGNFVIGGPDGDCGLTGRKIIVDTYGGAAPHGGGAFSGKDPTKVDRSAAYAARYIAKNIVGSKVADKCLIQLAYAIGVSKPLSIYVDLFDKDLDKNKFVLEKINENFDLSPRGIREMLNLNKPIYEKTAAYGHFG

SEQ ID NO: 122427 - protein, 112 aa, Unknown
  Bacterial polypetide isolated from the Sargasso Sea
DRSAAYAARYVAKNLVAAGVAEKCEIQISYAIGVAKPTSISVDTFGTSASSEEKIVKIINDVFDLTPWGIISMLNLLNPLYRPTAAYGHFGRDDIDLPWEKTDKIEAIKSLL

SEQ ID NO: 122428 - protein, 100 aa, Unknown
  Bacterial polypetide isolated from the Sargasso Sea
MVVASKIADKCLIQLAYAIGVSKPLSIYVDLFDNDEEKNRHVEKLINENFDLSPRGIREMLGLNKAIYQKTAAYGHFGREAENDGSFSWEKTDKSKVFNK

SEQ ID NO: 122429 - protein, 86 aa, Unknown
  Bacterial polypetide isolated from the Sargasso Sea
MSKKSYLFTSESVSEGHPDKVCDRISDMVVDTYLSKEPLARVACETLTTTNKVVLAGETRGPEIKKNDLIEKVRGCIKDIGYEQKG

SEQ ID NO: 122430 - protein, 213 aa, Unknown
  Bacterial polypetide isolated from the Sargasso Sea
MYPIRIDTIVVSTQHAPHVSNEEIQTYIIEKIIKPELPDDLDTSDITYHINPTGRFVVGGPHGDAGLTGRKIIVDTYGGWGRHGGGAFSGKDPTKVDRSAAYMARYVAKNIVAAGLADRCEVQLAYAIGVTEPVSVHIDTAGSGKVDDERLCSLVREHFPLTPRGIIEHLDLRRPIFRRTAAGGHFGRDEFPWEKTDKANALAEAASTTAVAN

SEQ ID NO: 122431 - protein, 83 aa, Unknown
  Bacterial polypetide isolated from the Sargasso Sea
PPELMPLPIALSHRILNRLADARLQADVDWLRPDSKSQVTVEYDGDKPIRIDTIVVSTQHAPHVSNPNRYYRCLHATRAPCIQ

SEQ ID NO: 122432 - protein, 215 aa, Unknown
  Bacterial polypetide isolated from the Sargasso Sea
IEYKDGKPAHVKSVVISTQHSADVNQSQVRELVKPYIEKSIPKNLINGLDESEIYVNPTGNFVIGGPDGDSGLTGRKIIVDTYGGAAPHGGGAFSGKDPTKVDRSAAYASRYLAKNVVASKIADKCLIQLAYAIGVSKPLSIYVDLFDNDEEKNRHVEKLINENFDLSPRGIREMLGLNKPIYEKTAAYGHFGREVESNGAFSWEKTDKTGVFKN

SEQ ID NO: 122433 - protein, 209 aa, Unknown
  Bacterial polypetide isolated from the Sargasso Sea
MNRNYLFTSESVSEGHPDKVCDRISDMVVDTYMSSGDPQTRVACETLTTTNKVVLAGEVRGPSISKDQIISQVRDCIKDIGYEQDGFHWQNCDIDSFLHEQSTDIAMGVDSGSEKDEGAGDQGIMFGFACKDTESLMPAPIHYSHQILYKMAQARKDGSASGLEPDSKSQVTMLYENGQPTKVTSLVISSQHKEGLSPADVKEIVKPYV

SEQ ID NO: 122434 - protein, 199 aa, Unknown
  Bacterial polypetide isolated from the Sargasso Sea
MRKDYIFTSESVSEGHPDKVSDRISDAVVDHFIAKDPFARVACETLTTTNKVVLSGEVRGPVQEDKEEIISKVRDCIKDIGYEQDGFHWKTADIQYLLHGQSADIAMGVDSSSDKDEGAGDQGIMFGYACNETTELMPAPIFYSHKILEIMAKGRKDGSLKGLEPDSKSQVTLKYVDGKPNAVTSVVISTQHADGLSPA

SEQ ID NO: 122435 - protein, 134 aa, Unknown
  Bacterial polypetide isolated from the Sargasso Sea
APHGGGAFSGKDPTKVDRSAAYACRYLAKNVVAAGLAEKCTIQLAYAIGVAEPVSLYADTHKTGSIDDARLQDILAQSMNLTPRGIRQHLSLNAPIYAPSSSYGHFGRDAGEAGVGSFSWEATNLVGALQSALA

SEQ ID NO: 122436 - protein, 184 aa, Unknown
  Bacterial polypetide isolated from the Sargasso Sea
LLRPYVIKSIPKNFLDGFNEDEFYVNPTGNFVIGGPDGDCGLTGRKIIVDTYGGAAPHGGGAFSGKDPTKVDRSAAYAARYIAKNIVGSKIAEKCLIQLAYAIGVSKPLSIYVDLFDNDLDKNKFVVEKIKENFDLSPRGIREMLNLNKPMYEKTAAYGHFGRAPEENGSFSWEKTDKINVFSK

SEQ ID NO: 122437 - protein, 204 aa, Unknown
  Bacterial polypetide isolated from the Sargasso Sea
PNKCTKIVVSTQHDEKLDQQGVSEIIIPIIKRIMPQEWMSNETEILINPTGKFVIGGPDGDTGLTGRKIIVDTYGGAAPHGGGAFSGKDPTKVDRSAAYISRYIAKNIVASGLADKCTLQLAYAIGVSDPLSIYIDTHGSSKLSDDELLKKITANIDLTPRGIRDHLNLHKPIYKKSAAYGHFGRDPQKDGSFSWEKIDIADKF

SEQ ID NO: 122438 - protein, 189 aa, Unknown
  Bacterial polypetide isolated from the Sargasso Sea
TQVKDLLRPYMLKSIPKNFLEEFNEDEFYVNPTGNFVIGGPDGDCGLTGRKIIVDTYGGAAPHGGGAFSGKDPTKVDRSAAYAARYIAKNVVGSKIAEKCLIQLAYAIGVSKPLSIYVDLFDNDLEKNKFVVEKIKENFDLSPRGIREMLNLNKPIYEKTAAYGHFGRVAEENGSFSWEKTDKTEVFSK

SEQ ID NO: 122439 - protein, 215 aa, Unknown
  Bacterial polypetide isolated from the Sargasso Sea
IIYKDNKPVNIHSLVLSVQHHSSYKNEDIRNLVAPLIEKTIPKGWKCSAENIFINPTGRFEIGGPHGDAGLTGRKIVVDTYGGVCPHGGGAFSGKDPSKVDRSGAYVARYIAKNLVAAGVARKCTIQLAYIIGVSEPISIFLNTHNTSSLNNKKIIGAIREIFDLKPAGIRKMLDLARPIYQKTASFGHFGRNAEKEGYFSWENLNKVEELKKLL

SEQ ID NO: 122440 - protein, 244 aa, Unknown
  Bacterial polypetide isolated from the Sargasso Sea
VSEGHPDKVCDRISDMVVDTYISKDPFSRVACETLTTTNKVILAGEVRGPEIKKDDLIQKVRNCIKDIGYEQKGFHWKNCNIDVHLHSQSSDIAMGVDSKGNKDEGAGDQGIMFGYACNETEVLMPAPIYYSHKILELMALDRKKGIAKDLEPDSKSQVTMFYDNGRPVKVKSVVISTQHSSKVDQNKVKEIVRPYLEKSIPKQLLSELKDEEFYVNPTGQFIIGGPDGDSGLTGRKIIVDTYG

SEQ ID NO: 122441 - protein, 243 aa, Unknown
  Bacterial polypetide isolated from the Sargasso Sea
QEPEKVANDYFFTSESVSEGHPDKVADQISDAILDAILEQDKYSRVAAETLCNTGLVVLAGEITTTANIDYIQIARDTIKRIGYDNTDYGIDYKGCAVLVAYDKQSPDIAQGVDRAHDDNLDQGAGDQGLMFGYACDETPELMPLPIYLSHRLVERQASLRRDGRLQWLRPDAKSQVTVRYVDGKPDSIDTVVLSTQHAPDIELPALREAVIEEIIKPTLPADLIKGDIKFLVNPTGRFVIGG

SEQ ID NO: 122442 - protein, 229 aa, Unknown
  Bacterial polypetide isolated from the Sargasso Sea
KLKNIEPDSKSQITIEYKDGVPANVKSVVISTQHSADVNQTQVRKLVEPYIEKAIPKNLLNGLNENEIYVNPTGNFVIGGPDGDSGLTGRKIIVDTYGGAAPHGGGAFSGKDPTKVDRSAAYASRFLAKNVVASKIADKCLIQLAYAIGVSKPLSIYVDVFENDEEKNKHIEKLINENFDLSPRGIREMLNLNKAIYEKTAAYGHFGRDPEENGAFSWEKTDKANIFKS

SEQ ID NO: 122443 - protein, 172 aa, Unknown
  Bacterial polypetide isolated from the Sargasso Sea
MRPYFFTSESVSEGHPDKVCDRISDMVVDTYLSSGDPNTRVACETLTTTNKVVLAGEVRGPSISKDQIISQVRDCIKDIGYEQDGFHWKNCEIDYHLHPQSSDIAMGVDSGNNKDEGAGDQGIMFGFACKDTDTLMPAPIHYSHQILYKMAEARKNGSAAGLEPDSKSQVTM

SEQ ID NO: 122444 - protein, 132 aa, Unknown
  Bacterial polypetide isolated from the Sargasso Sea
DVTQDDIKEGVMEHIIKPIVPSEWILDSTKIYINPTGKFVIGGPVGDCGLTGRKIIVDTYGGMARHGGGAFSGKDPSKVDRSAAYAARYVAKNIVAAGLADYCEIQVSYAIGVAKPTSININTFDSEKIFKD

SEQ ID NO: 122445 - protein, 125 aa, Unknown
  Bacterial polypetide isolated from the Sargasso Sea
GAFSGKDPSKVDRSACYMCRYVAKNIVAAELADRCEVQVAYAIGVAEPVSLMVNTFGTNKIDEKKIEELVRKNFDMRPAGIVSELDLKRPIYKKTAAYGHFGRNEPEFNWEKTDKAEKLKTESGI

SEQ ID NO: 122446 - protein, 109 aa, Unknown
  Bacterial polypetide isolated from the Sargasso Sea
AYASRYLAKNVVASKIADKCLIQLAYAIGVSKPLSIYVDLFDNDEEKNRHVEKLINDNFDLSPRGIREMLGLNKAIYEKTAAYGHFGREPESNGAFSWEKTDKADVFKK

SEQ ID NO: 122447 - protein, 227 aa, Unknown
  Bacterial polypetide isolated from the Sargasso Sea
KNIEPDSKSQVTFEYVDGKPSKVKSVVISSQHSADVNQAQVRDLLRPYMLKSIPENFLDGFNDDEFYVNPTGNFVIGGPDGDCGLTGRKIIVDTYGGAAPHGGGAFSGKDPTKVDRSAAYAARYIAKNVVGSKIAEKCLIQLAYAIGVSKPLSIYVDLFDSDLDKNKFVVEKIKENFDLTPRGIRELLNLNKPIYEKTAAYGHFGRTPEENGSFSWEKTDKTNVFSK

SEQ ID NO: 122448 - protein, 256 aa, Unknown
  Bacterial polypetide isolated from the Sargasso Sea
MFGYACNETDVLMPAPIHYSHKILRLMAEDRKSGKLKNIEPDSKSQITIEYKDGKPSSVKSVVISTQHSSDVNQSQVRELVKPYIEKSIPKNLINGLDETEIYVNPTGNFVIGGPDGDSGLTGRKIIVDTYGGAAPHGGGAFSGKDPTKVDRSAAYASRYLAKNIVASKIADKCLIQLAYAIGVSKPLSIYVDLFDNDEEKNKHVENLINENFDLSPRGIREMLGLNKPIYSKTAAYGHFGREPESDGSFSWEKTD

SEQ ID NO: 122449 - protein, 145 aa, Unknown
  Bacterial polypetide isolated from the Sargasso Sea
LTGRKIIVDTYGGAAPHGGGAFSGKDPSKVDRSAAYAARYLAKNIVAADLADQCTIQLSYAIGVSKPLSVYVNTNGTNKVDEQKIEKSVQDLFDLSPRGIREHLKLTNAIYVPTSAYGHFGREPSDQGHFTWEKTDLVDSLKNII

SEQ ID NO: 122450 - protein, 245 aa, Unknown
  Bacterial polypetide isolated from the Sargasso Sea
HLILSDLAELRKSGNAKGILPDSKSQVTLLYNQDNKPIGCDNVVVSTQHESGMSKSKIYDYLYPIIQNILPEEWMPPEEKIFINPTGKFEIGGPDGDAGLTGRKIIVDTYGGACPHGGGAFSGKDPSKVDRSAAYAARYVAKNIVYAGIAERCTIQLAYAIGMVEPLSVYVNTYGTGKLSDTEIIDLINKTFDLTPRGIRDMLNLSNVNYLSTAAYGHFGRDSKSNEYFTWEKIDKAKSILESIS

SEQ ID NO: 122451 - protein, 125 aa, Unknown
  Bacterial polypetide isolated from the Sargasso Sea
MSDFIFTSESVTEGHPDKICDQISDAVLDALLTEDPESRVACETVVNTGLCLLTGEITSKAKVDYIKLVRNVIKEIGYEGSKAGGFDANSCAVLVALDEQSPDISQGVNEADDINNDLENNTRAG

SEQ ID NO: 122452 - protein, 103 aa, Unknown
  Bacterial polypetide isolated from the Sargasso Sea
AARWVAKNCVAAGLADRMEVQLSYAIGVSEPISIMVDTHRTNKIPENEIVKKINQNFDLSPGGIIENLNLRRPIYKQTASYGHFGRNDINLPWEELNMVEKLQ

SEQ ID NO: 122453 - protein, 301 aa, Unknown
  Bacterial polypetide isolated from the Sargasso Sea
GYDRDSLDFNGSTCGVMVTLDEQSPDIAQGVNDSEEVRSGKAGEEDALDRQGAGDQGMMFGYACRETDALMPLPIHVAHRMAEQLTEARKSGQVPYLRPDGKTQVSFEYEDGRPVKLKTVLVSTQHNPGIDRDGMIRPDLIDHVIRPAVPAEFADDDYEVFVNPTGNFVVGGPVGDCGLTGRKIIVDTYGGYARHGGGAFSGKDPSKVDRSAAYATRWVAKNLVAAGAADRCEVQVAYAIGVARPVSVLVETFGSEHVDPDRIASAVNEVFDLRPAAILRDLDLRRPIFQPTAAYGHFGRD

SEQ ID NO: 122454 - protein, 228 aa, Unknown
  Bacterial polypetide isolated from the Sargasso Sea
SRLGYYLDAKSQITFVYENGRPQKIDTVVLSTQHSKDVTLSDVKDFVMEEIIKTTIPKNLLSSTTKIHINPTGNFVIGGPNGDCGLTGRKIIVDTYGGMARHGGGAFSGKDPSKVDRSAAYMARYIAKNIVATKLADKCEIQLSYAIGVAEPTSISVDTFGTSKIENSKISSAVSKVFNLTPKGIIDTLDLLNVKYQPTAAFGHFGRDDKNFTWEQKDKVDILMNELG

SEQ ID NO: 122455 - protein, 207 aa, Unknown
  Bacterial polypetide isolated from the Sargasso Sea
MKKNFLFTSESVSEGHPDKVCDRISDMVVDSYLGSEPQSRVACETLTTTNKVVLAGEVRGPEIKKDDLIQKVRDCIKDIGYDQDGFTWKEATKIESHLHSQSADIAMGVDSSGNKDEGAGDQGIMFGYACNETDVLMPAPIHYSHKILRLMAEDRKSGKLQNIEPDSKSQITIEYKDGKPASVKSVVISTQHSADVNQSQVRDLVKP

SEQ ID NO: 122456 - protein, 209 aa, Unknown
  Bacterial polypetide isolated from the Sargasso Sea
MTKNSYLFTSESVSEGHPDKVCDRISDMVVDSYLSKDPVSRVACETLTTTNKVVLAGEVRGPKIENEELISKVRDCIKDIGYDQEGFSWKTANIETFLHEQSKDIAMGVDSKDNKDEGAGDQGIMFGYACNETDELMPAPIYYSHKILRLMAEDRKKGILKGIEPDSKSQVTMLYENERPVKVTSLVISTQHSKDLNQEKVREAIIPYI

SEQ ID NO: 122457 - protein, 270 aa, Unknown
  Bacterial polypetide isolated from the Sargasso Sea
EGAGDQGIMFGHACRETDVLMPAPIQFSHQILKNMADARRAGSIKGLGPDSKSQVSLLYENGKPTKATSIVISTQHDANLEQSEIREIVRPFIEQTLPKGWMCPENEFYVNPTGRFVVGGPDGDAGLTGRKIIVDTYGGAAPHGGGAFSGKDPSKVDRSAAYAARWVAKNVVAAGLAEKCTIQLSYAIGVSKPLSVYVNTYGTGTAPEVKLSEYIQEKVDLSPRGIRERLQLNQAIFARTAAYGHFGREPEMDGGFSWEKLDLVEEFQNL

SEQ ID NO: 122458 - protein, 260 aa, Unknown
  Bacterial polypetide isolated from the Sargasso Sea
YACKETPELMPLPIQLAHRLTERLTEVRKNGTLEYLRPDGKSQVTVRYVDGEPKSIDAVVISTQHSEDVSQEKLHEDIISNVINNVIPSKYLNGSPRFHINPTGLFVIGGPQGDCGLTGRKIIVDTYGGMGRHGGGAFSGKDPSKVDRSAAYAARHVAKNVVAAGLASRCEVQLAYAIGVAEPVSVFVDTFDTGRIEESKIINLIRDNFELKPAGLISYLKLLRPIYRKTSTYGHFGREVPEFTWESTEKADDLRTQAGI

SEQ ID NO: 122459 - protein, 179 aa, Unknown
  Bacterial polypetide isolated from the Sargasso Sea
MAKYLFTSESVTEGHPDKVCDAISDAILDSLLSQDKESHVACEALATNGLVVVSGEVRSSGSLDVDNIVKTTLEDIGYTDEARGMDSENIEIRSIIHEQSPEIAQGVDSDDVSEQGAGDQGLMFGFACKETEELMPLPIQIAQRLTEKLARIRKDGTLPWLRPDGKSQVTVEYDGFTPA

SEQ ID NO: 122460 - protein, 192 aa, Unknown
  Bacterial polypetide isolated from the Sargasso Sea
MIRRDGVSRWTFTSESVTEGHPDKMADQISDAILDAMLRQDPNSRVACETMVTTGLVVVAGEITTSGFVDIASVVRETINDIGYDRDSLDFNGSTCGVMVSLDEQSPDIAQGVNDSEEVRSGKAGEEDELDRQGAGDQGMMFGYACRETDVLMPLPIHVAHRMAEQLTEARKSGQVPYLRPDGKTQVSFEYE

SEQ ID NO: 122461 - protein, 165 aa, Unknown
  Bacterial polypetide isolated from the Sargasso Sea
EKEIYINPTGNFVIGGPDGDSGLTGRKIIVDTYGGAAPHGGGAFSGKDPTKVDRSAAYASRYLAKNVVASKISDKCLIQLAYAIGVSKPLSIYVDLFDNDEEKNRHVEKLINENFDLSPRGIREMLGLNKPIYQKTAAYGHFGRVPESDGSFSWEKTDKSGVFAK

SEQ ID NO: 122462 - protein, 280 aa, Unknown
  Bacterial polypetide isolated from the Sargasso Sea
VRGPTISKDQIISQVRDCIKDIGYEQDGFHWKNCEIDYHLHPQSSDIAMGVDSGSNKDEGAGDQGIMFGFACKDTDTLMPAPIHYSHQILYKMAEARKNGSAPGLEPDSKSQVTMLYENGKPTRVTSLVISSQHKEGLSPTDVKEIVKPYVYECIPNQLLEDLKDEEFYVNPTGNFVIGGPDGDSGLTGRKIIVDTYGGAAPHGGGAFSGKDPSKVDRSAAYAARYLAKNIVAADLADQCTIQLSYAIGVSKPISVYVNTNGTNKVDETKIESSVQDMFD

SEQ ID NO: 122463 - protein, 288 aa, Unknown
  Bacterial polypetide isolated from the Sargasso Sea
MSYIFTSESVSAGHPDKVCDQISDAVLDAYLAEDPNSRVACETMIKNNMVYIAGEITSLGSPDLEPVVRKTINDIGYDTDEYGFNGDTCEFTNLVFEQSPDISQGVTEGEGENLEQGAGDQGLMFGYACTETDSLMPLPIDLSHRLVKKQADVMKSNGLAWLRPDAKSQVSAIYSDDGKTIEGLSAIVLSTQHDEDVTQEEIKEGVMEQIIKPIVPEEWILDSTKIYINPTGKFVIGGPVGDCGLTGRKIIVDTYGGMARHGGGAFSGKDPSKVDRSAAYAARYVAKN

SEQ ID NO: 122464 - protein, 301 aa, Unknown
  Bacterial polypetide isolated from the Sargasso Sea
KYLFTSESVTEGHPDKVCDAISDAILDSLLSQDKESHVACETLATNGLVVVSGEVRSSGSLDVESIVKTTLEDIGYTDEARGMDSDNIEIRSIIHEQSPEIAQGVDSDDLSEQGAGDQGLMFGFACKETKELMPLPIQIAQRLTEKLATIRKDGTLPWLRPDGKSQVTVEYDGFTPVRVTKVVIATQHDDMLEEYGSEEDELKFVKKEVIDHIIIPVLDSYDIPYENEFIVNGTGRFVYGGPAADTGLTGRKIIVDTYGGYAPHGGGAFSGKDPSKVDRSAAYMSRYIAKNIVAADLAERC

SEQ ID NO: 122465 - protein, 310 aa, Unknown
  Bacterial polypetide isolated from the Sargasso Sea
KNSRVAVETFLTGTEKGGLVVVGGEISEIANITDEAVVSIVKEALEKTIKTSFPDFDLDNLTIQNELTPQSEEIRAAVEDDQDQGAGDQGIMVGYAINETESLMPPTFDKSRNIQQALWEMQHSDEMLDLDSKVQVTTGGDKTKVVVSTQHQKEIDIDDLYSRVFELAGGYVKEEYTLDLNPSGSFVKGGPAGDTGLTGRKIVVDAYGPSVPVGGGAFSGKDPSKVDRSAAYAARHLAKNIVSHGLADECLVRVSYAIGKAEPYELTVETFGSEKSENKVLVDFISKFDMKPGSIIERLNLLEVNYKEDT

SEQ ID NO: 122466 - protein, 276 aa, Unknown
  Bacterial polypetide isolated from the Sargasso Sea
HSRVACETMITTGMVVLAGEITSKSIVDFQEVVRKKVLDIGYDDSAKGFDGNTCSVLVSLDKQSPDIAQGVNQGEGSYKEQGAGDQGLMFGYAVNETKSYMPLTIDLSHQLSKKLTDVRKNGIIPELRPDGKTQVSAEYANGTLKRIEAIVVSSQHSENFSLKQVQESIREEVINKTVPAELMDEKTKIYINPTGKFVIGGPMGDCGLTGRKIIVDTYGGHGAHGGGAFSGKDPSKVDRSAAYAARQVAKHVVAAGLADKALVQVAYAIGVAEPMS

SEQ ID NO: 122467 - protein, 119 aa, Unknown
  Bacterial polypetide isolated from the Sargasso Sea
MNKNNYLFTSESVSEGHPDKVSDKISDMVVDSYLSRDPYSRVACETLTTTNRVILAGETRGPKFDKEELVTKVRECIKEIGYDQKGFSWKNAQIESFLHEQSTDIAMGVDSKENKDDGA

SEQ ID NO: 122468 - protein, 307 aa, Unknown
  Bacterial polypetide isolated from the Sargasso Sea
IADQISDSVLDAMLMDYPKSRVACETLVTTGMAFVAGEVTTKAQVDFQRIVRDTIREIGYTDSKMGFDCDTCAVMVSLDKQSPNIKQGVDNDPEKSKEQGAGDQGLMFGYACDETPELMPLPINMSHRLTEKLSLVRKNGTMPELRPDGKSQVTVKYVNGKPVEVTAVVISTQHKEGQDQGQLKKNIIENVIRPVIPAEFLTDTTDFHINPTGIFEIGGPQGDCGLTGRKIIVDTYGGMGRHGGGAFSGKDPSKVDRSAAYAARHVAKNVVAAGLASRCEVQVAYAIGVADPVSVSVDTFGTAIVDE

SEQ ID NO: 122469 - protein, 107 aa, Unknown
  Bacterial polypetide isolated from the Sargasso Sea
ARYVAKNVVAAGLADRCEIQVSYAIGVAKPTSVRIKTFGTEKVSEEEIVHLVNENFDLTPYGIMNMLNLLQPIYEKSAAYGHFGREDEEFPWEKTDRSDALKEQSGL

SEQ ID NO: 122470 - protein, 228 aa, Unknown
  Bacterial polypetide isolated from the Sargasso Sea
LNGIEPDSKSQITIEYKDGVPTAVKSVVISTQHSKDVNLAQVKELCVPYIERSIPKNLLGNLDEGEIYINPTGNFVIGGPDGDSGLTGRKIIVDTYGGAAPHGGGAFSGKDPTKVDRSAAYASRYLAKNVVASKIADKCLIQLAYAIGVSKPLSIYVDLFDNDEEKNMHVEKIIKENFDLSPRGIREMLGLNKPIYEKTAAYGHFGRTPESDGSFSWEKTDKSDVFSK

SEQ ID NO: 122471 - protein, 111 aa, Unknown
  Bacterial polypetide isolated from the Sargasso Sea
MKRSYLFTSESVSEGHPDKVCDRISDMVVDTYLSSGDPQTRVACETLTTTNKVVLAGEVRGPSVSKDQIISQVRDCIKDIGYEQDGFHWQNCDIESFLHEQSADIAMGVDS

SEQ ID NO: 122472 - protein, 266 aa, Unknown
  Bacterial polypetide isolated from the Sargasso Sea
MNSKNYLFTSESVSEGHPDKVCDRISDMVVDTYISKDPLSRVACETLTTTNKVILAGEVRGPETKKEDIETKVRDCIKDIGYEQKGFHWKNCSIDVHLHAQSSDIAMGVDSKGNKDEGAGDQGIMFGYACNETDVLMPAPIYYSHKILELMAEDRKKGISKDLEPDSKSQVTMEYENGKPVKVKSIVISTQHSPEVDQKKVKEIVRPYLEKSIPKKLLKELKEEEFYVNPTGQFIIGGPDGDSGLTGRKIIVDNYGGAAPHGGGAF

SEQ ID NO: 122473 - protein, 240 aa, Unknown
  Bacterial polypetide isolated from the Sargasso Sea
SKQSPDIAQGVNEGEGEDLDQGAGDQGLMFGYACSETPVLMPAPINLSHELVLKQSEVRKKGELSWLRPDAKSQVSVVYKDDRKTVDYVSAIVLSTQHDEDISQDEIKAKVREKIINPIIPTEWIKEDTKIYINPTGKFVIGGPVGDCGLTGRKIIVDTYGGMARHGGGAFSGKDPSKVDRSAAYACRYVAKNIVAAGLAERCEVQVSYAIGIAEPTSITVDTLGTGNLSENEISQIVRD

SEQ ID NO: 122474 - protein, 118 aa, Unknown
  Bacterial polypetide isolated from the Sargasso Sea
MSEYKLFTSESVSEGHPDKMADQISDAVLDAMLKDDPDSRVACETLVKDNLVVLAGEITSRSEPDLESLTRKVILDIGYNSLEVGCDGNTCEVVNAIGKQSQDIAQGVNEGEGEDLEQ

SEQ ID NO: 122475 - protein, 129 aa, Unknown
  Bacterial polypetide isolated from the Sargasso Sea
MTSESVGEGHPDKMADQISDAILDAIIEQDKGCRVAVETLVKTGLVVLGGEITTTANVDYEAIARQTIKRIGYDKEELGFDDQSCEVLVAISKQSPDIAMGVDRSDEKEQGAGDQGLMFGYATNGNKTM

SEQ ID NO: 122476 - protein, 190 aa, Unknown
  Bacterial polypetide isolated from the Sargasso Sea
MTNKTYLMTSESVGEGHPDKMADQISDAILDAILAQDKGCRVAVETLVKTGLVVLGGEITTTADVDYEAVARRTIKRIGYDKEELGFDDQSCEVLVAISKQSPDIAMGVDRADEKQQGAGDQGLMFGYATNETKQLMPATIQLSHQLVKRHADVRRSGELSWLRPDAKSQVTILFDDGKPKSIDTVFYQH

SEQ ID NO: 122477 - protein, 284 aa, Unknown
  Bacterial polypetide isolated from the Sargasso Sea
DLIEKVRHCIKDIGYDQNGFTWKEATKIESHLHAQSADIAMGVDSSGNKDEGAGDQGIMFGYACNETDVLMPAPIHYSHKILRLMAADRKSGKLKSIEPDSKSQITIEYKDGKPSNVKSVVISTQHSADVDQAQVRKLVMPYIEKSIPKNLLNNLDEKEIYINPTGNFVIGGPDGDSGLTGRKIIVDTYGGAAPHGGGAFSGKDPTKVDRSAAYASRYLAKNVVASKIADKCLIQLAYAIGVSKPLSIYVDLFDNDEEKNKHVEKLISENFDLSPRGIREMLGL

SEQ ID NO: 122478 - protein, 172 aa, Unknown
  Bacterial polypetide isolated from the Sargasso Sea
PILPQNWLNQNTKYFINPTGRFEIGGPVGDCGLTGRKIIVDTYGGMARHGGGAFSGKDPSKVDRSAAYAGRYVAKNIVAAGLADRCEIQVSYAIGVAEPTSISVNTFGTSKIDENKISELIREHFDLRPRQLIKMLDLKRPIYQATAAYGHFGREENAFTWEKTDKIEALKG

SEQ ID NO: 122479 - protein, 111 aa, Unknown
  Bacterial polypetide isolated from the Sargasso Sea
MSYLFTSESVSEGHPDKIADQISDAILDNFLAFDPMSKVACETMVTTGQVILSGEVKSNTYIDVQKITRDVIKKIGYSKSDYKFDYKSCGILSMIHEQSEDISRGIVKKND

SEQ ID NO: 122480 - protein, 219 aa, Unknown
  Bacterial polypetide isolated from the Sargasso Sea
SQVTMLYDDDKPVKVTSVVISTQHSKDLNQDQVKELIIPYIKKSIPEKYLKDLNQKEIYINPTGQFIIGGPDGDTGLTGRKIIVDTYGGAAPHGGGAFSGKDPTKVDRSAAYASRYLAKNIVSSGVSEKCLIQLAYAIGVSKPLSVFIKLAEGDEGKVDKVKKIINENFDLSPRGIREMLKLNNPIYQVTSAYGHFGRKPTNKGEFSWEKTDKANLFKL

SEQ ID NO: 122481 - protein, 254 aa, Unknown
  Bacterial polypetide isolated from the Sargasso Sea
DQTEELMPLPIVLSHKLIQELILLRKSNQLTYLRPDSKSQVTVEYNNNREAVRVSAVVISTQHSPEVSQEQIRKDIKEILIDKVIPSHLLNGEPPKIYINPTGRFVTGGPQGDAGLTGRKIVVDTYGGWVPHGGGAFSGKDPSKIDRSAAYFGRYVAKNCVAAGLCKEMEIQIAYAIGVAEPVSIKVNTFGTSEYSNEQLLEIINQVFKFKPKDIVDGLNLLTPIYEETSVCGHFGRSDVELPWEALDKVQQLK

SEQ ID NO: 122482 - protein, 91 aa, Unknown
  Bacterial polypetide isolated from the Sargasso Sea
EGEGEDLDQGAGDQGLMFGYACSETPVLMPAPINLSHELVLKQSEVRKRGELSWLRPDAKSQVRVVYKDERKTVEYVSAIVLSTQHDEEIS

SEQ ID NO: 122483 - protein, 262 aa, Unknown
  Bacterial polypetide isolated from the Sargasso Sea
FGYACNETEVLMPAPIYYSHKILELMAADRKSGKANKLEPDSKSQVTMQYENGKPVKVTSVVISTQHSPDVNQAQVKEIVRPYLERSIPKNLLASLKDEEFYVNPTGQFIIGGPDGDSGLTGRKIIVDTYGGAAPHGGGAFSGKDPSKVDRSAAYAARYVAKNVVASKIADKCLIQLAYAIGVSKPLSIYVDLFDGDEEKSKHVEKLINENFNLSPRGIREMLTLTRPIYECTAAYGHFGRKPGSDGSFSWEKTDKTAVFKK

SEQ ID NO: 122484 - protein, 225 aa, Unknown
  Bacterial polypetide isolated from the Sargasso Sea
MKKNFLFTSESVSEGHPDKVCDRISDMVVDTFLASEPQARVACETLTTTNKVVLAGEVRGPELKQDELISKVRHCIKDIGYDQDGFSWKEQTKIETHLHSQSADIAMGVDSAGNKDEGAGDQGIMFGYACNETDVLMPAPIHYSHKILRLMAEDRKTGNLKGIEPDSKSQITIQYKDGMPAAVTSVVISTQHSKDVNLAQVKDLCLPYIERSIPKNLLGSLDEKG

SEQ ID NO: 122485 - protein, 145 aa, Unknown
  Bacterial polypetide isolated from the Sargasso Sea
MSNLRNYLFTSESVSEGHPDKVSDRISDMVVDSYISEDPYSRVACETLTTTNKVVLAGEVRGPEIKKDELIEKVRNCIKDIGYDQEGFTWKEATKIESHLHSQSADIAMGVDSSGNKDEGAGDQGIMFGYACNETDVLMPAPIHY

SEQ ID NO: 122486 - protein, 302 aa, Unknown
  Bacterial polypetide isolated from the Sargasso Sea
VEVLSKLHEQSPEFAQGVDSTDLTEQGAGDQGLMFGFACKETPELMPVPIQIAHRLTERLTKLRKDGTLPWLRPDGKSQVSVKYDDKQPISIDKTVIATQHDDMIAEYGNEASELEFVKSQVIEHVIRPILDSYEYDYEDNFIVNGTGRFVYGGPEADTGLTGRKIIVDTYGGYAPHGGGAFSGKDSSKVDRSATYMARYIAKNLVAADLAERCEVQLSYGIGVAEPTSFYVKTQGTGKKDDDELTKLARDVFPIKPGEIVAHLDLKKPRYRQTAAYGHFGRELDQFTWEKTDMVENLLNKL

SEQ ID NO: 122487 - protein, 278 aa, Unknown
  Bacterial polypetide isolated from the Sargasso Sea
VVDSFLASEPQARVACETLTTTNKVVLAGEVRGPELKEDELISKVRDCIKDIGYDQDGFSWRDQTKIETHLHSQSADIAMGVDSAGNKDEGAGDQGIMFGYACNETDVLMPAPIHYSHKILRLMAEDRKSGKLNGIEPDSKSQITIQYKDGMPAAVTSVVISTQHSKDVNLAQVKELCIPYIEKSIPKNLLGSLDEKEIYINPTGNFVIGGPDGDSGLTGRKIIVDTYGGAAPHGGGAFSGKDPTKVDRSAAYASRYLAKNVDASKIADKCLIQLSLC

SEQ ID NO: 122488 - protein, 106 aa, Unknown
  Bacterial polypetide isolated from the Sargasso Sea
MTIDKFCDIVSDAVLDACLQQDPESKVACETCCKTGMVMIFGEITTKATVNYEQVIRDAIKGIGYDDAEKGFDYKSASVVVAIEEQSPDIAQGVHIGKKVEEIGAG

SEQ ID NO: 122489 - protein, 170 aa, Unknown
  Bacterial polypetide isolated from the Sargasso Sea
MFGYACKETPEFMPLPIALAHKLMLKHAEVRKTRGLGLRPDAKSQVSIEYNSNYQPKRIDSIVLSAQHSDDLDLEDLRKIVKTQIIETCLPKKLIDNETKYLINPAGRFVIGGPVGDCGLTGRKIIVDTYGGMARHGGGGFSWKDPTKVDRSAAYGLKQVAKSLVKNDLC

SEQ ID NO: 122490 - protein, 265 aa, Unknown
  Bacterial polypetide isolated from the Sargasso Sea
MFGFACKDTESLMPAPIHYSHQILYKMAQARKDGSASGLEPDSKSQVTMLYENGKPSKVTSLVISSQHKEGLSPEDVKEIVKPYVYECIPNNLLEGLKDEEFYVNPTGNFVIGGPDGDSGLTGRKIIVDTYGGAAPHGGGAFSGKDPSKVDRSAAYAARYLAKNVVAADLADECTIQLSYAIGVSKPLSVYVNTNGTNKVDEQKIEKAVQDLFDLSPRGIREHLKLTNAIYVPTSAYGHFGREPSDKGHFTWEKTDLVEALKGIS

SEQ ID NO: 122491 - protein, 199 aa, Unknown
  Bacterial polypetide isolated from the Sargasso Sea
MSKFLFTSESVTEGHPDKACDAFSDAILDEILSKDNNAHVACESLATKGLVVISGEVRTYASFDVDKVVKDTIRTIGYDKSNSGIDPEDVEVLSKLHEQSTEIAQGVDSDDVAEQGAGDQGLMFGFACKETPELMPLPIQIAQRLTERLTTLRKEGTLPWLRPDGKSQVSVKYNDTLPISIEKTVIATQHDDMLDKYGQ

SEQ ID NO: 122492 - protein, 391 aa, Unknown
  Bacterial polypetide isolated from the Sargasso Sea
MINDFFFTSESVSEGHPDKICDRISDAVVDLMLSKYPEARVACETLVSTNRTILAGEYRLPEGINITDDEIEQLVRRTVRDIGYEQEGYHWENMHFECHLHSQSSNIAIGVDKSGNKDEGAGDQGLMFGYASNETEVLMPAPIYYAHEILKELATIRHENKNSILLPDSKSQITLEYKDGKPVKTSSVVVSTQHKKNCSQDDIREIVREVVIKTLPDDWMCLEDEFYVNPTGIFEIGGPDGDAGLTGRKIIVDTYGGASPHGGGAFSGKDPTKVDRSAAYLTRYLAKNVVAAGLASKCTIQIAYAIGISKPLSLYVNTEGTGKIDDSKIEKVLLNLVDMSPRGIREHLNLNKPIYVPTSAYGHFGRIPNEKIDGSFSWEKTDLVESILKEI

SEQ ID NO: 122493 - protein, 383 aa, Unknown
  Bacterial polypetide isolated from the Sargasso Sea
MAKLFTSESVSEGHPDKIADQISDAVLDAILKQDTKARVACETLVKTGMVMVAGEVTTTAWVDIEQIVRDTVRDIGYTHSDMGFDADSCAVLNAIGKQSPDINQGVDRSDPLEQGAGDQGLMFGYATNETDVLMPAPITYSHLLVKRQAEVRKNGTLPWLRPDAKSQLTFAYDDAGKIIGVDAVVLSTQHAESISHKDLVEAVREEIIKPVLPAEWVNKDTKYFINPTGRFVIGGPMGDCGLTGRKIIVDTYGGMARHGGGAFSGKDPSKVDRSAAYAARYVAKNIVAAGLADRCEIQISYAIGVAEPTSISVETFGTAKVAEDLLVKLVREHFELRPYGLIQMLDLKRPIYQATAAYGHFGRNEFPWEQTDKAELLRSAAGL

SEQ ID NO: 122494 - protein, 364 aa, Unknown
  Bacterial polypetide isolated from the Sargasso Sea
VCDRISDMVVDSYLSKDPFSRVACETLTTTNKVVLAGEIRGPKIEKDEIISKVRECIKDIGYDQKGFSWKTASIETFLHEQSADIAMGVDSKNNKDEGAGDQGIMFGYACNETDDLMPAPIFFSHKILRLMAEDRKKKSLLGIEPDSKSQVSMLYENNKPVKVTSVVISTQHSKDLNQEKVKDLVIPYIRKSIPEEFVKDLDPKEIYINPTGQFIIGGPDGDTGLTGRKIIVDTYGGAAPHGGGAFSGKDPTKVDRSAAYVARYLAKNIVSAGVSEKCLIQLAYAIGVSKPLSIFIKLAEGDEDKVNSVKKIIDENFDLSPRGIREMLKMNNAIYEITSSYGHFGRKPTNKGEFTWEKTDKAEL

SEQ ID NO: 122495 - protein, 247 aa, Unknown
  Bacterial polypetide isolated from the Sargasso Sea
YSHLILSDLAKLRKSGNAKGILPDSKSQVTLLYNPDNKPIGCDNVVVSTQHEPDMTKSKIFDCIYPIIQNILPDEWMPPEEKIFINPTGKFEIGGPDGDAGLTGRKIIVDTYGGACPHGGGAFSGKDPSKVDRSAAYAARYVAKNIVYAGIAERCTIQLAYAIGMVEPLSVYVNTYGTGKLSDIEIIDLINKTFDLTPRGIRDMLNLSKVNYLSTAAYGHFGRDSESSEYFTWEKIDKAKSILESIS

SEQ ID NO: 122496 - protein, 351 aa, Unknown
  Bacterial polypetide isolated from the Sargasso Sea
MKKNFLFTSESVSEGHPDKVCDRISDMVVDSYLGAEPQSRVACETLTTTNKVVLAGEVRGPEIKKDDLIQKVRECIKDIGYDQDGFSWKDTTKIETHLHSQSADIAMGVDSSGNKDEGAGDQGIMFGYACNETDVLMPAPIHYSHRILRLMAEDRKSGKLKGIEPDSKSQITIEYKDGVPNAVKSVVISTQHSKDVDLVKVKELCTPYIERSIPKNLLGSLDEKEIYINPTGNFVIGGPDGDSGLTGRKIIVDTYGGAAPHGGGAFSGKDPTKVDRSAAYASRYLAKNVVASKIADKCLIQLAYAIGVSKPLSIYVDLFDNDEEKNRHVEKLINENFDLSPRGIREMLGLN

SEQ ID NO: 122497 - protein, 360 aa, Unknown
  Bacterial polypetide isolated from the Sargasso Sea
MYKTAETVSPGHPDKIADLISDYVLTEALSNNKKSRVAVETFLTGTSYGGLVVVGGEISEIANIDDETINKIVKEALSKTIKTSFEDFQLDNLKIQNELTPQSEEIRSAVEDDKDLGAGDQGIMVGYATNETKSLMPQTFDISRNIQMSLWDIQNNDESLDLDSKVQVTTGGKKTKVVISTQHKKDIDIDGLRNNLEEMIGELVNNDFQFDLNPSGSFVKGGPAGDTGLTGRKIVVDAYGPTVPVGGGAFSGKDPSKVDRSAAYAARHLAKNIVAHKLAEICQVRVAYAIGKAEPYELSIETFDTSKKDDLVLNDFVSKFDMMPGMIIERLDLLNVNYKKDTLFSHFGHDDRNWEKIEDL

SEQ ID NO: 122498 - protein, 387 aa, Unknown
  Bacterial polypetide isolated from the Sargasso Sea
MKKDFLFTSESVSEGHPDKVCDRISDMVVDSYLGAESQSRVACETLTTTNKVVLAGEVRGPEIKKEDLIQKVRECIKDIGYDQKGFTWKEATKIECHLHSQSADIAIGVDSSGNKDEGAGDQGIMFGYACNETDVLMPAPIHYSHKILRLMAEDRKSGKLKSIEPDSKSQITIEYKDGKPAKVKSVVISTQHSVDVNQSQVRELVKPYIEKSIPKNLLNGLKENEIYVNPTGNFVIGGPDGDSGLTGRKIIVDTYGGAAPHGGGAFSGKDPTKVDRSAAYASRYLAKNVVASKITNKCLIQLAYAIGVSKPLSIYVDLFDNDEEKNRHVEKLINENFDLSPRGIREMLGLNKPIYEKTAAYGHFGRDPGNDGSFSWEKTDKKDIFSK

SEQ ID NO: 122499 - protein, 238 aa, Unknown
  Bacterial polypetide isolated from the Sargasso Sea
MSDFIFTSESVTEGHPDKICDQISDAVLDALLTEDPESRVACETVVNTGLCLLTGEITSKAKVDYIKLVRNEIKEIGYEGYRAGGFDANSCAVLVALDEQSPDISQGVNEADDINDDLEDNTGAGDQGIMFGYACDETPELMPLPISLAHRLAIQLAKVRHEEVLNYLLPDGKTQVSIDYKKGLPVSINTILISTQHNPEIDGMTNEEEIRQRIKEDLWTHVVIPATEDLEIFLLLKI

SEQ ID NO: 122500 - protein, 293 aa, Unknown
  Bacterial polypetide isolated from the Sargasso Sea
MKKNFLFTSESVSEGHPDKVCDRISDMVVDTFLASEPQARVACETLTTTNKVVLAGEVRGPELKEDELISKVRDCIKDIGYDQDGFSWKEQTKIETHLHSQSADIAMGVDSAGNKDEGAGDQGIMFGYACNETDVLMPAPIHYSHKILRLMAEDRKSGKLNGIEPDSKSQITIQYKEGMPAAVTSVVISTQHSKDVSLAQVKELCMPYIERSIPKNLLGSLNEKEIYINPTGNFVIGGPDGDSGLTGRKIIVDTYGGAAPHGGGAFSGKDPTKVDRSAAYASRYLAKNIVASK

SEQ ID NO: 122501 - protein, 384 aa, Unknown
  Bacterial polypetide isolated from the Sargasso Sea
MSYIFTSESVSAGHPDKVCDQISDAVLDAYLAEDPNSRVACETMIKNNMVYIAGEITSLGSPDLEPVVRKTINDIGYDTDEYGFNGDTCEFTNLVFEQSPDISQGVTEGEGENLEQGAGDQGLMFGYACTETDSLMPLPIDLSHRLVKKQADVMKSNELSWLRPDAKSQVSAIYSDDGKSIEGLSAIVLSTQHDEDVTQEEIKEGVMEKIIKPIVPEEWILDSTKIYINPTGKFVIGGPVGDCGLTGRKIIVDTYGGMARHGGGAFSGKDPSKVDRSAAYAARYVAKNIVAAGLADYCEIQVSYAIGVAKPTSINVNTFNSEKISKEAIEKIVEEKFDLRPKSLINMLDLKRPIYLPTAAYGHFGRTDIDLSWERTDKASEISQ

SEQ ID NO: 122502 - protein, 270 aa, Unknown
  Bacterial polypetide isolated from the Sargasso Sea
RCWRQGIMFGYACNETDVLMPAPIHYSHRILRLMAQDRKSGKLKGIEPDSKSQITIEYKDGVPNAVKSVVISTQHSKDVNLAKVKELCMPYIEKSIPKNLLGNLDEKEIYINPTGNFVIGGPDGDSGLTGRKIIVDTYGGAAPHGGGAFSGKDPTKVDRSAAYASRYLAKNVVASKIADKCLIQLAYAIGVSKPLSIYVDLFDNDEEKNRHVEKLINENFDLSPRGIREMLGLNKAIYEKTAAYGHFGRDPESNGAFSWEKTDKAGVFNK

SEQ ID NO: 122503 - protein, 272 aa, Unknown
  Bacterial polypetide isolated from the Sargasso Sea
MPLPISLAHRLAIQLAKVRHEEVLNYLLPDGKTQVSIDYEKGVPVSINTILISTQHNPEIDGVTNEEEIRQRIKKDLWTNVVIPATEDLEIKPNIHKTRFLVNPTGKFVVGGPQGDAGLTGRKIIVDTYGGYARHGGGAFSGKDPTKVDRSAAYAARYVAKSIVKAKLAKKAEVQLSYAIGVAKPISILVETFDTGVISQANLTRLIKEHFDLRPAAIIKEFNLRNLPKEMGGKFFRKTASYGHFGRRDLDLPWENVEEKAAQLAEASKIFL

SEQ ID NO: 122504 - protein, 260 aa, Unknown
  Bacterial polypetide isolated from the Sargasso Sea
MFGYATNETEVLMPAPITYSHRLVEQQAFIRKSGKLSWLRPDAKSQVSFVYGDDGKPESISAVVLSTQHDPEVSQEDLKEGVMEEIVKPILPSNWLNANTKYFINPTGRFEIGGPVGDCGLTGRKIIVDTYGGMARHGGGAFSGKDPSKVDRSAAYAGRYVAKNIVAAGLADRCEIQISYAIGVAEPTSISVNTFGTAKIDENKISDLIREHFDLRPRQLINMLDLKRPIYQATAAYGHFGREESAFTWEKTDKADALKG

SEQ ID NO: 122505 - protein, 389 aa, Unknown
  Bacterial polypetide isolated from the Sargasso Sea
MKRDYIFTSESVSEGHPDKVCDRISDMVVDSYLASGDPQTRVACETLTTTNKVVLAGEVRGPSISKDQIISQVRDCIKDIGYEQDGFHWQNCEIDYHLHPQSSDIAMGVDSGSNKDEGAGDQGIMFGYACKDTDSLMPAPIHYSHQILLKMAELRKNGTRNEFEPDSKSQVTMLYQNGKPSKVTSIVVSTQHKEGLTPDQIKEVVKPIVDECIPSHLMQELKDEEFYVNPTGNFVIGGPDGDSGLTGRKIIVDTYGGAAPHGGGAFSGKDPSKVDRSAAYAARYLAKNIVAAELADECVIQLAYAIGVSKPLSIYVNTNGTNKVDETKIENLIPELFDLSPRGIREHLNLTNPIYVPTSAYGHFGRKPTTEGHFTWEKTNLVDSFKSAF

SEQ ID NO: 122506 - protein, 389 aa, Unknown
  Bacterial polypetide isolated from the Sargasso Sea
MSNLKNYLFTSESVSEGHPDKVSDRISDMVVDSYLSRDPFSRVACETLTTTNKVVIAGEVRGPEIKKDELIEKVRKCIKDIGYDQEGFTWKEATKIESHLHSQSADIAIGVDSSGNKDEGAGDQGIMFGYACNETDVLMPAPIHYSHKILKLMADDRKSGKLKNIEPDSKSQVTFEYIDGKPVKIKSVVISSQHSKDVNQAQVIDLLRPYMLKAIPKNFLDGFNDEEFYVNPTGNFVIGGPDGDCGLTGRKIIVDTYGGAAPHGGGAFSGKDPTKVDRSAAYAARYIAKNIVASKISNRCLIQLAYAIGVSKPLSIYVDLFDNDLDRNKFVIEKIKENFDLSPRGIREMLQLNKPIYEKTSAYGHFGRTPENNGSFSWEKTDKLSIFSK

SEQ ID NO: 122507 - protein, 310 aa, Unknown
  Bacterial polypetide isolated from the Sargasso Sea
KKIGYEQAGFHWETLDVSIYVHSQSTDIAQGVDASGGKDEGAGDQGIMFGYACNETEALMPAPIFYSHAILERLSKARHSGEEVGLGPDSKSQITLAYENGKPVRAHSIVVSTQHASDLNQEDVREIVRPYVAEVLPQGWMCDDSEFYVNPTGRFVIGGPDGDAGLTGRKIIVDTYGGAACHGGGAFSGKDPSKVDRSAAYAARYLAKNVVAAKLADRCSIQLSYAIGVSKPLSVYVDCHGTGKQDEEKISSLIQEALDLSPRGIREHLNLSQPIYARTAAYGHFGRPVDSDGGFSWESTDLVDLLKGLV

SEQ ID NO: 122508 - protein, 271 aa, Unknown
  Bacterial polypetide isolated from the Sargasso Sea
MKKNYLFTSESVSEGHPDKVCDRISDMVVDTYLGAEPQSRVACETLTTTNKVVLAGEVRGPEIKKDELINKVRDCIKDIGYDQEGFTWREATKIESHLHAQSADIAMGVDSSGNKDEGAGDQGIMFGYACNETDVLMPAPIHYSHKILRLMAEDRKSGKLEGIEPDSKSQITIEYKNGKPAAVKSVVISTQHSKDVNLAKVKELCVPYIHKAIPKNLLGSLDDNEIYINPTGNFVIGGPDGDSGLTGRKIIVDTYGGAAPHGGGAFSGKDP

SEQ ID NO: 122509 - protein, 165 aa, Unknown
  Bacterial polypetide isolated from the Sargasso Sea
MEGNYLFTSESVSEGHPDKVCDIVSDTVLDLCLSKDPQARVACETMTTTNRTVLAGELRVPESCMASDGKELSSDFKHEIENAVRQAVKDIGYEQDGYHWKNMVVENHLHGQSPDIAMGVDAGDNKEEGAGDQGIMFGYACKDTDVLMPAAIHYSHKILQSLANA

SEQ ID NO: 122510 - protein, 387 aa, Unknown
  Bacterial polypetide isolated from the Sargasso Sea
MKKNFLFTSESVSEGHPDKVCDRISDMVVDTYLGMEPQARVACETLTTTNKVVLAGETRGPDINKDELISKVRDCIKDIGYDQDGFTWRDATKIESHLHSQSADIAMGVDSSGNKDEGAGDQGIMFGYACNETDVLMPAPIHYSHKILRLMAKDRKSGNLNGIEPDSKSQITIEYKDGKPSAVKSVVISTQHSKDVNLAKVKELCIPYIEKSIPKNLLGNLDENEIYINPTGNFVIGGPDGDSGLTGRKIIVDTYGGAAPHGGGAFSGKDPTKVDRSAAYASRYLAKNVVASGIADKCLIQLAYAIGVSKPLSIYVDLFDNDEQKNMYVEKLINENFDLSPRGIREMLGLNKAIYQKTAAYGHFGREPESDGSFSWEKTDKSDVFKK

SEQ ID NO: 122511 - protein, 198 aa, Unknown
  Bacterial polypetide isolated from the Sargasso Sea
MNKNYIFTSESVTEGHPDKVCDKVSDAILDEFLRGDPDSRVAVETLTTTGFVGVAGEVTSKANFDIEQVIRKTISEIGYNDPDLKFDSNSCEVMIKLDSQSSDISQGVTANENKEQGAGDQGLMFGYASNETEELMPLPILLAQKLTKKLTDVRKSGQLSWVRPDGKSQVSVRYENDKPTKLEAVVISTQHSPEISQE

SEQ ID NO: 122512 - protein, 184 aa, Unknown
  Bacterial polypetide isolated from the Sargasso Sea
MSNLKNYLFTSESVSEGHPDKVCDRISDMVVDTYLGMEPQARVACETLTTTNKVVLAGETRGPNINKDELISKVRDCIKDIGYDQDGFTWKEATKIESHLHSQSADIAMGVDSSGNKDEGAGDQGIMFGYACKETEALMPAPIYYSHKILRLMAQDRKSGNLNGIEPDSKSQITIEYKDGKPSA

SEQ ID NO: 122513 - protein, 225 aa, Unknown
  Bacterial polypetide isolated from the Sargasso Sea
IEPDSKSQITIEYKDGKPFNVKSVVISTQHSADVNQSQVRDLVKPYIEKSIPKELLKNLSDKEIYVNPTGNFVIGGPDGDSGLTGRKIIVDTYGGAAPHGGGAFSGKDPTKVDRSAAYASRYLAKNIVASKIADKCLIQLAYAIGVSKPLSIYVDLFDNDEEKNKHVESLIQKNFDLSPRGIREMLGLNKPIYEKSAAYGHFGRDPGPDGSFSWEKVDKKDIFSK

SEQ ID NO: 122514 - protein, 389 aa, Unknown
  Bacterial polypetide isolated from the Sargasso Sea
MSNLKNFLFTSESVSEGHPDKVSDRISDMVVDSYISGDPYSRVACETLTTTNKVVLAGEVRGPEIKKDDLIEKVRNCIKDIGYDQEGFTWKEATKIESHLHSQSADIAMGVDSSGNKDEGAGDQGIMFGYACNETDVFMPAPIHYSHKILRLMAEDRKSGKLKNIEPDSKSQVTFEYVDGKPTKVKSVVISSQHSSDVNQAQVRELLRPYMLKSIPEKFLKDFNEEEFYVNPTGNFVIGGPDGDCGLTGRKIIVDTYGGAAPHGGGAFSGKDPTKVDRSAAYAARYIAKNVVASKIADKCLIQLAYAIGVSKPLSIYVDLFDNDLDKNKFVVEKINENFDLSPRGIREMLNLNRPIYEKTAAYGHFGRTPGDDGSFSWEKTDKINVFSK

SEQ ID NO: 122515 - protein, 273 aa, Unknown
  Bacterial polypetide isolated from the Sargasso Sea
MSYIFTSESVSAGHPDKVCDQISDAVLDAYLAEDPNSRVACETMIKNNMVFIAGEITSTGSPDLEPVVRQTINDIGYDNDEYGFNGDTCEFTNLVFEQSPDISQGVTEGEGENLEQGAGDQGLMFGYACTETEALMPLPIDLSHRLVRQQAEVMKSDGLSWLRPDAKSQVSAIYSDDGKTIEGLSAIVLSTQHDEDVSQDEIKEGVMENIIKPIVPQEWILDSTKIYINPTGKFVIGGPVGDCGLTGRKIIVDTYGGMARHGGGAFSGKDPSK

SEQ ID NO: 122516 - protein, 387 aa, Unknown
  Bacterial polypetide isolated from the Sargasso Sea
MSEMLFTSESVTEGHPDKMSDQISDAILDALLEQDSSSRVACETLVTTGMVVVAGEVTSKATVDMQKVVRNTIEEIGYLDSNMGFDFNTCAVLISLDKQSENIAQGVNEGEGAHTEQGAGDQGLMFGYACKETPELMPLPIQLAHRLTERLTEVRKNGTLEYLRPDGKSQVTVRYVDGEPKSIDAVVISTQHSEDVSQEKLHEDIINNVINNVIPSKYLNGSPKFHINPTGLFVIGGPQGDCGLTGRKIIVDTYGGMGRHGGGAFSGKDPSKVDRSAAYAARHVAKNVVAAGLASRCEVQLAYAIGVAEPVSVSVDTFSTGRIEESKIINLIRNNFELKPAGLISYLKLLRPIYRKTSAYGHFGREFPEFTWESTEKADDLRTQAGI

SEQ ID NO: 122517 - protein, 249 aa, Unknown
  Bacterial polypetide isolated from the Sargasso Sea
MSYLFTSESVSEGHPDKIADQISDGILDHFLAFDPNSRVAIETLVTTGQVILSGEVSSSAYIDVQNIARDIISSVGYNNSEYKFTGESCAVMSLIHEQSEDISRGIINDKKEEQGAGDQGIMFGYACNETENAIPLTLEISNEILKELSLLRKEKILDYLRPDSKSQVTIEYDDNDNPIAIHTIVISTQHDEFDKDENRMLSLIKDDMIKKLMPRVIDKFPDRIKKLFSEKIKYFINPTGKVCYWGPSW

SEQ ID NO: 122518 - protein, 211 aa, Unknown
  Bacterial polypetide isolated from the Sargasso Sea
KVVIATQHDDMLEKYGSEEDELKFVKKEVINHIIIPVLDSYGIPYENEFIVNGTGRFVYGGPAADTGLTGRKIIVDTYGGYAPHGGGAFSGKDPSKVDRSAAYMSRYIAKNVVAADLAERCEVQLSYGIGVAEPTSFYVKTFGTSTMSDQELTSLCSEIFPLRPGEIVKHLDLKNPRYYVTSSYGHFGRDGDTFTWEKTDLSDLLRSKANN

SEQ ID NO: 122519 - protein, 325 aa, Unknown
  Bacterial polypetide isolated from the Sargasso Sea
MAEYDIFTSESVSEGHPDKVADQVSDAIVDAMIEQDPDSRVACETMIKTGMVAVAGETRSQSKINVEEIVRKTVADIGYDNEEVGFNANDCTVINALGMQSTDIAMGVDESGAHEQGAGDQGLMFGYATNETDTLMPAPIHYAHRLVEKQAEVRRTKLDFLRPDAKSQLTFKYDADGKPAQIDAVVLSTQHSADISQEELRAKVLSDIIEPILPSNWLSSETKIFINPTGQFIIGGPVGDCGLTGRKIIVDTYGGMARHGGGAFSGKDPSKVDRSAAYAGRYVAKNIVAAGLAERCEIQISYAIGIAEPTSISLNTFGTGKIPDK

SEQ ID NO: 122520 - protein, 339 aa, Unknown
  Bacterial polypetide isolated from the Sargasso Sea
MSKFTFTSESVTEGHPDKVCDAISDAIVDSLLHEDKDSHIACETLATKNLVVVSGEVRSKGNIDVENIVRDTLEDIGYTDSNRGMDNKSVDIMIKVQEQSTEIAQGVDQSEDHEQGAGDQGLMFGYACNETAELMPMPIYLAHRLTERLSILRKDGTLPWLGPDGKSQVSVDYVNGIPTSISKVVIATQHDDMLEKFGTEELEHRFVQEEVIEKVIKPIIEKSGLKTSDSFIVNGTGRFVFGGPDADTGLTGRKIIVDTYGGYAPHGGGAFSGKDPSKVDRSAAYMARYIAKNIVAADLASKCEVQFSYSIGVAEPTSFYVKSFNTGKISDEELTDLAK

SEQ ID NO: 122521 - protein, 133 aa, Unknown
  Bacterial polypetide isolated from the Sargasso Sea
MSDYSLITSESVSEGHPDKMSDQISDAILDTYLTKDPDARVAVETLVKTGMVVVAGEVTTAGNVTPGELEDVIRQTVLDIGFDSSDVCFDGNTCAVINAIGQQSADIALGTHEADEANQGAGDQGLMFGFASD

SEQ ID NO: 122522 - protein, 35 aa, Unknown
  Bacterial polypetide isolated from the Sargasso Sea
MAQHIFTSESVSEGHPDKIADQISDAVLDAIVETD

SEQ ID NO: 122523 - protein, 222 aa, Unknown
  Bacterial polypetide isolated from the Sargasso Sea
PDSKSQITIEYKDGKPASVKSVVVSTQHSADVNQSQVRDLVKPYIEKSIPKNLINGLDDNEIYVNPTGNFVIGGPDGDSGLTGRKIIVDTYGGAAPHGGGAFSGKDPTKVDRSAAYASRYLAKNVVASKIADKCLIQLAYAIGVSKPLSIYVDLFDNDEEKNRHVEKLINENFDLSPRGIREMLGLNKPIYSKTAAYGHFGREAESNGSFSWEKTDKSHIFT

SEQ ID NO: 122524 - protein, 291 aa, Unknown
  Bacterial polypetide isolated from the Sargasso Sea
MNLKNYLFTSESVSEGHPDKVCDRISDMVVDTYISKDPYSRVACETLTTTNKVVLAGETRGPDIKKNDLIEKVRNCIKDIGYEQKGFHWKNCNIDVHLHSQSSDIAMGVDSKENKDEGAGDQGIMFGYACDETEVLMPAPIYYSHKILELMAEDRKNGKAPKLEPDSKSQVTLRYENGIPVKVTAVVISTQHSPDVSQTQVKEIVRPYLEKAIPKQLLSELKDENFYVNPTGQFIIGGPDGDSGLTGRKIIVDTYGGAARHGGGAFSGKDPSKVDRSAAYAARYVAKNIVA

SEQ ID NO: 122525 - protein, 367 aa, Unknown
  Bacterial polypetide isolated from the Sargasso Sea
MSNLKNYLFTSESVSEGHPDKVSDRISDMVVDSYLSNDPYSRVACETLTTTNKVVLAGEVRGPEIKKDELIQKVRDCIKDIGYDQEGFTWKDATKIECHLHSQSADIALGVDSSGNKDEGAGDQGIMFGYACKETDELMPAPIYYSHKILRLMAEDRKSGKLKNIEPDSKSQVTFEYENGKPKKVKSVVISSQHSADINQTQVRDLLRPYMLNSIPNFFLEGFNEDEFYVNPTGNFVIGGPDGDCGLTGRKIIVDTYGGAAPHGGGAFSGKDPTKVDRSAAYASRYIAKNVVSSKIADKCLIQLAYAIGVSKPLSIYVDLFDNDLEKNKFVEEKIKENFDLSPRGIREIMGLNKPIYEKTAAYGHLE

SEQ ID NO: 122526 - protein, 332 aa, Unknown
  Bacterial polypetide isolated from the Sargasso Sea
MSNLKKYLFTSESVSEGHPDKVSDRISDMVVDNYLSHDPYSRVACETLTTTNKVVLAGEVRGPEIDKEELIQKVRNCIKDIGYDQDGFTWRDATKIECHLHSQSTDIAMGVDSSGNKDEGAGDQGIMFGYACNETEELMPAPIFYSHKILRLMAEDRKSGNLNNIEPDSKSQVTFEYENGKPKKVKSIVISSQHTSNVNQTQVRELLRPYMLKSIPENFLDGFKEDEFYVNPTGNFVIGGPDGDCGLTGRKIIVDTYGGAAPHGGGAFSGKDPTKVDRSAAYASRYIAKNVVASKIANKCLIQLAYAIGVSKPLSIYVDLFDNDLEKNKFVE

SEQ ID NO: 122527 - protein, 177 aa, Unknown
  Bacterial polypetide isolated from the Sargasso Sea
LIKGDIKFLVNPTGRFVIGGPQGDCGLTGRKIIVDTYGGAAPHGGGAFSGKDPSKVDRSAAYAGRYVAKNIVAAGLASRCLIQVSYAIGVAQPTSVMVNTFGTGRVSDATITKLVQEHFDLRPKGIIQMLDLLRPIYEKSAAYGHFGREEPEFTWEATDKALALAEAAGTEPVAALA

SEQ ID NO: 122528 - protein, 258 aa, Unknown
  Bacterial polypetide isolated from the Sargasso Sea
MSYLFTSESVSEGHPDKVSDQISDGILDSFLAFDPNSKVACETLVTTGQVILSGEVSSNTYLDVQEIARHIIKDIGYNNDQYKFSGESCAVMSLIHEQSEDILRGVERNIKEEQGAGDQGIMFGYACNETENSIPLTLDIANRLLLELSKLRRSKEIPYLRPDSKSQVTIEYDNNDIPIRIDTIVVSTQHDEFDSNDEKMLNKIREDIIKILIPIVRDTYAPEIQKLFNNNIKFYVNPTGKFVIGGPHGDTGLTGQKI

SEQ ID NO: 122529 - protein, 146 aa, Unknown
  Bacterial polypetide isolated from the Sargasso Sea
MTGRKIIVDTYGGVSPHGGGAFSGKDPTKVDRSAAYAARYLSKNIVHAGISERCTIQLSYAIGVPEPLSIFVDLHDTNNVDTNRVEKFIRDRFDLSPRGIIDMLGLSNPIFSETSSYGHFGREPNDKGCFTWENLDISSEFKNELL

SEQ ID NO: 122530 - protein, 385 aa, Unknown
  Bacterial polypetide isolated from the Sargasso Sea
MTKNYLFTSESVTEGHPDKVCDMISDSILDEYLKGDPNSRVAVETMTTTDFVGVAGEVTSKASFDIESVVRKTITEIGYDNPDLKFDSHSCEVMVKLDPQSPHISQGVTGTDEKEQGAGDQGLMFGYASNETEELMPLPILLAHKLTKKLTDVRKNNQLPWARPDGKSQVSIRYEDDKPKAIEAIVLSTQHSPEITNEEISSQLIEHVIKPVCGDLWNENIKIHVNPTGKFEIGGPHGDAGLTGRKIIVDSYGGMGRHGGGAFSGKDPSKVDRSACYMCRYVAKNIVAAGLADRCEVQVAYAIGVAEPVSLMVNTFGTNKISEDKIEELVNNNFDMRPAGIVAQLDLKRPIYKKTAAYGHFGRNEPEFNWEKTDKAQKLKEESGI

SEQ ID NO: 122531 - protein, 159 aa, Unknown
  Bacterial polypetide isolated from the Sargasso Sea
MSYIFTSESVSEGHPDKVCDQISDAILDSYLAQDPNSRVACETLIKNNTVIVAGEITSNGMPNIEEVIRNTINEIGYNHDDLGFNGNNCEIQNLISKQSPDIAQGVNEGEGEDLDQGAGDQGLMFGYACSETPVLMPAPINLSHELVLKQSEVRKNGEL

SEQ ID NO: 122532 - protein, 387 aa, Unknown
  Bacterial polypetide isolated from the Sargasso Sea
MKKNFLFTSESVSEGHPDKVCDRISDMVVDTYLSLEPQARVACETLTTTNKVVLAGETRGPEIKKDDLISKVRDCIKDIGYDQDGFSWKEATKVECHLHSQSSDIAMGVDSSGNKDEGAGDQGIMFGYACNETDVLMPAPIHYSHKILRLMAEDRKSGKLKNIEPDSKSQITIEYKDGKPESVKSVVISTQHSADVNQSQVRELVKPYIERSIPKNLVNGLDDNEIYINPTGNFVIGGPDGDSGLTGRKIIVDTYGGAAPHGGGAFSGKDPTKVDRSAAYASRYLAKNIVASKIADKCLIQLAYAIGVSKPLSIYVDLFDNDEEKNRHVEKLIKENFDLSPRGIREMLGLNKPIYQKSAAYGHFGRDPESDGSFSWEKTDKSEVFNK

SEQ ID NO: 122533 - protein, 187 aa, Unknown
  Bacterial polypetide isolated from the Sargasso Sea
MFTSESVSEGHPDKLCDMISDAILDECLSIDPGARVAVETMVKGTDSRSYIFIGGEVTIASNKAVDYERVARRTAREIGYDDHSVGMDAASEDLCQVVVRITQQSPDISQGVDQGKGLHLEQGAGDQGLMFGFASNETEGFEDLEGMFMPLPAALAQLLTSKMSASMKDGSLPWARPDSKSQVTIRY

SEQ ID NO: 122534 - protein, 314 aa, Unknown
  Bacterial polypetide isolated from the Sargasso Sea
MKRSYLFTSESVSEGHPDKVCDRISDMVVDTYLSSGDPQTRVACETLTTTNKVVLAGEVRGPSVSKDQIISQVRDCIKDIGYEQDGFHWQNCDIESFLHEQSADIAMGVDSGSNKDEGAGDQGIMFGFACKDTESLMPAPIHYSHQILYKMAQARKDGSASGLEPDSKSQVTMLYENGKPSKVTSLVISSQHKEGLSPEDVKEIVKPYVYECIPNTLLEDLKDEEFYVNPTGNFVIGGPDGDSGLTGRKIIVDTYGGAAPHGGGAFSGKDPSKVDRSAAYAARYLAKNVVAADLADECTIQLSYAIGVSKPLSV

SEQ ID NO: 122535 - protein, 373 aa, Unknown
  Bacterial polypetide isolated from the Sargasso Sea
MKKDYLFTSESVSEGHPDKVCDRISDMVVDTYLGMEPQARVACETLTTTNKVVLAGETRGPDIKKDELISKVRGCIKDIGYDQEGFTYKEATKIECHLHSQSADIAMGVDSSGNKDEGAGDQGIMFGYACNETDVLMPAPIHFSHRILRLMAEDRKSGKLKGIEPDSKSQITIEYKDGVPKAVKSVVISTQHSKDVNLAQVKELCMPYIERSIPKNLLGNLDENEIYINPTGNFVIGGPDGDSGLTGRKIIVDTYGGAAPHGGGAFSGKDPTKVDRSAAYASRYLAKNIVASKIADKCLIQLAYAIGVSKPLSIYVDLFSNDEEKNLHVEKLIKENFDLSPRGIREMLGLNKPIYEKSAAYGHFGRDPGKDGS

SEQ ID NO: 122536 - protein, 384 aa, Unknown
  Bacterial polypetide isolated from the Sargasso Sea
MAKHLFTSESVSEGHPDKIADQISDAVLDAILEQDPKARVACETYVKTGMVLVGGEITTSAWVDIEEITRNTVREIGYVHSDMGFDANSCAVLSAIGKQSPDINQGVDRADPLEQGAGDQGLMFGYATNETDVLMPAPITYAHRLVQRQAEVRKNGTLSWLRPDAKSQVTFQYDDGKIVGIDAVVLSTQHSEDIDQKSLQEAVMEEIIKPVLPTEWLTASTKFFINPTGRFVIGGPMGDCGLTGRKIIVDTYGGMARHGGGAFSGKDPSKVDRSAAYAARYVAKNIVAAGLADRCEIQVSYAIGVAEPTSIMVETFGTEKVPSEQLTLLVREFFDLRPYGLIQMLDLLHPIYKETAAYGHFGREHFPWEKTDKAALLREAAGLK

SEQ ID NO: 122537 - protein, 136 aa, Unknown
  Bacterial polypetide isolated from the Sargasso Sea
MSNLKNFLFTSESVSEGHPDKVSDRISDMVVDSYLSGDPFSRVACETLTTTNKVVLAGEVRGPEIKENDLIEKVRHCIKDIGYDQDGFTWKEATKIESHLHSQSSDIAMGVDSSGNKDEGAGDQGIMFGYACNETE

SEQ ID NO: 122538 - protein, 389 aa, Unknown
  Bacterial polypetide isolated from the Sargasso Sea
MSNLKNFLFTSESVSEGHPDKVSDRISDMVVDSYLSGDPFSRVACETLTTTNRVVLAGEVRGPEIQKDELIEKVRVCIKDIGYDQEGFTWREATKIESHLHSQSADIAMGVDSSGNKDEGAGDQGLMFGYACNETEELMPAPIHYSHKILRLMAEDRKSGILKNIEPDNKSQITFEYINGKPTKVKSVVISSQHSPDISQSQVRDLLRPYMIKSIPKKFLENFDDSELYVNPTGNFVIGGPDGDTGLTGRKIIVDTYGGAAPHGGGAFSGKDPTKVDRSAAYAARYIAKNVVASKISEKCLIQIAYAIGVSKPLSIYVDLFDNDIEKNKFVVEKINENFDLSPRGIREMLNLNKPIYEKTAAYGHFGRSPEENGSFSWEKTDKINAFLK

SEQ ID NO: 122539 - protein, 390 aa, Unknown
  Bacterial polypetide isolated from the Sargasso Sea
MRKNYIFTSESVSEGHPDKVSDRISDAVVDHFISKDPFARVACETLTTTNKVVLSGEVRGPVQEDKDEIISKVRECIKDIGYEQDGFHWQTADIQYLLHGQSADIAMGVDSSSDKDEGAGDQGIMFGYACTETPELMPAPIFYSHKILEIMAKGRKDGSLKGLEPDSKSQVTLKYVDGKPSAVTSVVISTQHADGLSPADVKEIVNPALKESIPEELLKNLDDKEYYVNPTGNFVIGGPDGDTGLTGRKIIVDTYGGAAPHGGGAFSGKDPTKVDRSAAYASRYLAKNIVAAGLCDQCTIQLSYAIGVAKPLSIYVNTQGTNKIDEAKIESAIPDIMNLSPRGIREKLQLNKPIYEQTAAYGHFGRIYDSSSGAFSWEALDLVSDFKSLA

SEQ ID NO: 122540 - protein, 342 aa, Unknown
  Bacterial polypetide isolated from the Sargasso Sea
MTKEYLFTSESVSEGHPDKVCDIISDSIVDDFLSQENPENARVAMETLVTTNKVVIAGEVRGPEGYNCNYEELARNAVKEIGYEQDGFHWKNLSFDSSGVHSQSADIAMGVDASGNKDQGAGDQGIMFGYACKETPSLMPAPIYYSHKILELMASERKSGNTIGIQPDSKSQVTLKYKNGEPEICTKIVVSTQHDAELDQQAVSDLVIPLIKTVMPQEWMDNNTEILINPTGKFVIGGPDGDTGLTGRKIIVDTYGGAAPHGGGAFSGKDPTKVDRSAAYISRYIAKNIVAAGLADRCTLQLAYAIGVSEPLSIYVDTHGTSQIKDDDLIKKITDNIDLSPR

SEQ ID NO: 122541 - protein, 387 aa, Unknown
  Bacterial polypetide isolated from the Sargasso Sea
MAEMLFTSESVTEGHPDKIADQISDSVLDAMLMDDPKSRVACETLVTTGMAFLAGEVTTKAQVDFQRIVRDTIREIGYTDSKMGFDCDTCAVMVSLDKQSPNIKQGVDNDPEKSKEQGAGDQGLMFGYACDETPELMPLPINMSHRLTEKLSQVRKNGTMPELRPDGKSQVTVKYVNGKPVEVTAVVISTQHKEGQDQGQLKKNIIENVIRPVIPAEFLTDTTDFHINPTGIFEIGGPQGDCGLTGRKIIVDTYGGMGRHGGGAFSGKDPSKVDRSAAYAARHVAKNVVAAGLASRCEVQVAYAIGVADPVSVSVDTFGTAIIEEEKISMLIQETFDLKPASIIQRLNLLRPIYRQTAAYGHFGRELEDFTWEKTDYAGELRKKAGI

SEQ ID NO: 122542 - protein, 351 aa, Unknown
  Bacterial polypetide isolated from the Sargasso Sea
MGYIFTSESVSEGHPDKVCDQISDAILDSYLAQDPNSRVACETLIKNNTVIVAGEITSNGTPNIEEVIRNTVNEIGYNHDDLGFNGNNCEIQNLISKQSPDIAQGVNEGEGEDLDQGAGDQGLMFGYACSETSVLMPAPINLSHELVLKQSEVRKNAELDWLRPDAKSQVSVVYKDDRKTVDYVSAIVLSTQHDEDISQDEIKAKVREKIINPIIPTEWIKEDTKIYINPTGKFVIGGPVGDCGLTGRKIIVDTYGGMARHGGGAFSGKDPSKVDRSAAYACRYVAKNIVAAGLAERCEVQVSYAIGIAEPTSITVDTLGTGSLSENEISQIVRDNFDLRPKNLINLLDLK

SEQ ID NO: 122543 - protein, 388 aa, Unknown
  Bacterial polypetide isolated from the Sargasso Sea
MKRDYLFTSESVSEGHPDKVCDRISDMVVDTYLSKDPLSRVACETLTTTNKVVLAGEIRGPSINKEEIISQVRECIKDIGYEQDGFHWKNCNIDYHLHEQSSDIAMGVDSGSNKDEGAGDQGIMFGFACNDTDTLMPAPIHYSHQILLKMAELRKDGSRKEFEPDSKSQITMQYQNGKPTKVTSVVVSTQHKEGLTPSQIKEVVKPIVNDCIPSELMQELNDEEFYVNPTGNFVIGGPDGDSGLTGRKIIVDTYGGAAPHGGGAFSGKDPSKVDRSAAYAARYLAKNIVAAGLSDECIIQLSYAIGVSKPLSIYINTNGTNKVDEKKIEKIIPELFDLSPRGIREHLKLSNPIYVPTSAYGHFGRMPTQEGHFTWEKTDLIEEFKKAF

SEQ ID NO: 122544 - protein, 187 aa, Unknown
  Bacterial polypetide isolated from the Sargasso Sea
MKRSYLFTSESVSEGHPDKVCDRISDMVVDTYLSSGDPQTRVACETLTTTNKVVLAGEVRGPSVSKDKIISQVRDCIKDIGYEQDGFHWQNCDVESFLHEQSADIAMGVDSGSNKDEGAGDQGIMFGFACKDTESLMPAPIHYSHQILYKMAQARKDGSASGLEPDSKSQVTMLYENGKPSKVTSLV

SEQ ID NO: 122545 - protein, 413 aa, Unknown
  Bacterial polypetide isolated from the Sargasso Sea
MSDFIFTSESVTEGHPDKICDQISDAVLDALLTEDPESRVACETVVNTGLCLLTGEITSKAKVDYIKLVRNVIKEIGYEGYRAGGFDANSCAILVALDEQSPDISQGVNEADDVNDDLEDNTGAGDQGIMFGYACDETPELMPLPISLAHRLAIQLARVRHENVLNYLLPDGKTQVSIDYEKGLPVSINTILISTQHNPEIDGLTNEEEIRQRIKEDLWKHVVIPATEDLEIKPNIIKTRFLVNPTGKFVVGGPQGDAGLTGRKIIVDTYGGYARHGGGAFSGKDPTKVDRSAAYAARYVAKSIVKAKLAKKAEVQLSYAIGVAKPISILVETFDTSVISQANLTELIKKYFDLRPAAIIKEFDLRNLPQKMGGTFFRKTASYGHFGRRDLNLPWEKVEEKSAQLAEASKVFL

SEQ ID NO: 122546 - protein, 427 aa, Unknown
  Bacterial polypetide isolated from the Sargasso Sea
MPGPGNPLKRRRFRPNEAGYVKPTVTTQEPEKVANDYFFTSESVSEGHPDKVADQISDAILDAILEQDKYSRVAAETLCNTGLVVLAGEITTTANIDYIQIARDTIKRIGYDNTDYGIDYKGCAVLVAYDKQSPDIAQGVDRAHDDNLDQGAGDQGLMFGYACDETPELMPLPIYLSHRLVERQASLRRDGRLQWLRPDAKSQVTVRYVDGKPDSIDTVVLSTQHAPDIELPALREAVIEEIIKPTLPADLIKGDIKFLVNPTGRFVIGGPQGDCGLTGRKIIVDTYGGAAPHGGGAFSGKDPSKVDRSAAYAGRYVAKNIVAAGLASRALIQVSYAIGVAEPTSVMVNTFGTGRVSDAVITKLVREHFDLRPKGIIKMLDLLRPIYEKTAAYGHFGREEPEFSWEATDKALALAEAAGVEPTARVA

SEQ ID NO: 122547 - protein, 140 aa, Unknown
  Bacterial polypetide isolated from the Sargasso Sea
MTNKTYLMTSESVGEGHPDKMADQISDAILDAILAQDKGCRVAVETLVKTGLVVLGGEITTTADVDYEAIARRTIKRIGYDKEELGFDDQSCEVLVAISKQSPDIAMGVDRADEKEQGAGDQGLMFGYETNETKQLMPAT

SEQ ID NO: 122548 - protein, 327 aa, Unknown
  Bacterial polypetide isolated from the Sargasso Sea
GPETSKEDLIGKVRECIKDIGYEQKGFHWKNCNIDVHLHSQSSDIAMGVDSKGNKDEGAGDQGIMFGYACNETEVLMPAPIYYSHKILELMASDRKKGIAKNLEPDSKSQVTMLYENGKPIKVKSVVISTQHSSKVDQKQVKEIVRPYLEKAIPKKLLSELNEEEFYVNPTGKFVIGGPDGDSGLTGRKIIVDTYGGAAPHGGGAFSGKDPSKVDRSAAYAARYVAKNVVASKIADKCLIQLAYAIGVSKPLSIYVNLFDGDEEKSKKVEKLIKNNFDLSPRGIREMLSLNKPIYECTSAYGHFGRKPGSDGSFSWEKTDKIEVFKK

SEQ ID NO: 122549 - protein, 219 aa, Unknown
  Bacterial polypetide isolated from the Sargasso Sea
KPISISKVVIATQHDDMLDKFKDETAEHKFVEKEIIDHIIKPVLDESGLPYGDDFIVNGTGRFVFGGPEADTGLTGRKIIVDTYGGYAPHGGGAFSGKDPSKVDRSAAYMARYIAKNIVAAKLADKCEVQFSYSIGIADPTSFYVKTFGTGIMSDEKLTELARSIFPLKPAGIIDHLNLKHPRYRQTAAYGHFGREEELFTWEQTDMVDKLQLIANERK

SEQ ID NO: 122550 - protein, 385 aa, Unknown
  Bacterial polypetide isolated from the Sargasso Sea
MSNKYLFTSESVSEGHPDKVCDIISDSVVDDFLSQENPENSRVAMETLVTTNKVVMAGEVRGPENYKCDYETLARNAVKEIGYEQEGFHWEKFSFDCSGVHSQSADIAMGVDASGNKDQGAGDQGIMFGYACKETPSLMPAPIYYSHKILEEMAFKRKKGETPGIQPDSKSQVTLQYNNGSPEKCTKIVVSTQHDENLDQRGVSEIIIPIIKNIMPEEWISNETEILINPTGKFVIGGPDGDTGLTGRKIIVDTYGGAAPHGGGAFSGKDPTKVDRSAAYITRYIAKNVVASGIADKCTLQLAYAIGVSDPLSIYVDTHGTSQISDEDLIKKITSNIDLTPRGIRDHLNLHKPIYKKSAAYGHFGREAESDGSFSWENIDLAKKL

SEQ ID NO: 122551 - protein, 104 aa, Unknown
  Bacterial polypetide isolated from the Sargasso Sea
MSRYVFTSESVTEGHPDKICDQVSDAVLDALLAQDPSSRVACETVVNTGLCMITGEVTSKAQVDFIHLVRNVIKEIGYSGARAGGFDANSCAVLVALDQQSPDI

SEQ ID NO: 122552 - protein, 384 aa, Unknown
  Bacterial polypetide isolated from the Sargasso Sea
MSYIFTSESVSAGHPDKVCDQISDAVLDAYLAEDPDSRVACETMIKNNMVYIAGEITSLGSPDLEPIVRQTINDIGYNTDEYGFNGDTCEFTNLVFEQSPDISQGVTEGEGENLEQGAGDQGLMFGYACTETESLMPLPIDLSHRLVKKQADVMKSGELEWLRPDAKSQVSAIYSDDGKTIEGLSAIVLSTQHDEDVTQEEIKDQVMEKIIKPIVPNEWILESTNIYINPTGKFVIGGPVGDCGLTGRKIIVDTYGGMARHGGGAFSGKDPSKVDRSAAYAARYVAKNIVAAGLADYCEIQVSYAIGVAKPTSINVNTFNSEKISKEAIEKIVEDNFDLRPKSLINMLDLKRPIYLPTAAYGHFGRTDIDLSWEKTDKASEISQ

SEQ ID NO: 122553 - protein, 171 aa, Unknown
  Bacterial polypetide isolated from the Sargasso Sea
LFESIPKNFLDEFNEKEFYVNPTGNFVIGGPDGDCGLTGRKIIVDTYGGAAPHGGGAFSGKDPTKVDRSAAYASRYIAKNIVSSKISDKCLIQLAYAIGVSKPLSIYVNLFDNDLEKNKFVEEKIKENFDLSPRGIREMLSLNKPIYEKTSAYGHFGRSPESDGSFFLGKN

SEQ ID NO: 122554 - protein, 387 aa, Unknown
  Bacterial polypetide isolated from the Sargasso Sea
MKSNNYFFTSESVSEGHPDKVCDRISDMVVDTYISKDPYSRVACETLTTTNKVVLAGETRGPDIKKDHLIEKVRNCIKDIGYEQKGFHWKNCDVDVHLHSQSSDIAMGVDSKGNKDEGAGDQGIMFGYACDETEVLMPAPIYYSHKILELMAIDRKKGVANKLEPDSKSQVTMKYENGKPTKITSVVISTQHSSDVNQSQVKEIVRPYLEKAVPKNLLSELKEEEFYVNPTGQFIIGGPDGDTGLTGRKIIVDTYGGAAPHGGGAFSGKDPSKVDRSAAYAARYVAKNIVASQIAKRCLIQLSYAIGVSKPLSIYVDLFDGDDEKAKHVEKLIKDNFDLSPRGIREMLSLNKPIYECTAAYGHFGRKPDNKGSFSWEKTDKSQIFKK

SEQ ID NO: 122555 - protein, 140 aa, Unknown
  Bacterial polypetide isolated from the Sargasso Sea
MSYIFTSESVSAGHPDKVCDQISDAVLDAYLSEDPNSRVACETMIKNNMVFIAGEITSSGSPDLEPVVRKTINDIGYDTDDYGFNGDTCEFTNLVFEQSPDISQGVTEGEGENLEQGAGDQGLMFGYACTETESLMPLPI

SEQ ID NO: 122556 - protein, 376 aa, Unknown
  Bacterial polypetide isolated from the Sargasso Sea
MKNYLFTSESVTEGHPDKVADLISDNVANYLINQNESYRAAIETMVSSNMVTIAGEVKTSLIDNTDSIEELVRQTVKDIGYEQENFHWNTLSFKNLIHNQSIDIAKGTDNFGAGDQGMMFGYACNENDSFMPSAIYYSHKITKALSIARRNGENWMGPDGKAQVTIEYSNVNKPLRISNVICSTQHSEDLKDNPAEVQKRVERIIKPELDDMFDDDTVFQVNPTGNFITGGPDGDTGVTGRKIIVDTYGGYAPHGGGAFSGKDCTKVDRSGAYMARYLAKNIVASGVSQNATIQLSYAIGVKDPVSLYVYCDGKVRNDISDWISQNIDLTPLGIIRKFNLFKLNLTETTNYGHFGKNQLAWENIDMANQLNFKEEK

SEQ ID NO: 122557 - protein, 389 aa, Unknown
  Bacterial polypetide isolated from the Sargasso Sea
MSNLKNFLFTSESVSEGHPDKVSDRISDMVVDSFISGDPYSRVACETLTTTNKVVLAGEVRGPEIKKDELIQKVRNCIKDIGYDQEGFTWKEATKIESHLHSQSADIAMGVDSSGNKDEGAGDQGIMFGYACNETDVLMPAPIHYSHKILRLMAEDRKSGKLKNIEPDSKSQVTFEYVDGKPSKVKSVVISSQHSADVNQAQVRDLLRPYMLKSIPENFLNGFNEDEFYVNPTGNFVIGGPDGDCGLTGRKIIVDTYGGAAPHGGGAFSGKDPTKVDRSAAYAARYIAKNVVGSKIAEKCLIQLAYAIGVSKPLSIYVDLFDNEIDKNKFVVEKIKENFDLSPRGIREMLNLNKPIYEKTAAYGHFGRAPEENGSFSWEKTDKTQVFSK

SEQ ID NO: 122558 - protein, 227 aa, Unknown
  Bacterial polypetide isolated from the Sargasso Sea
DEFDSDDKKMLAKIRQDIIEVLIPVVKESYPESIQKLFNDSIKYHVNPTGKFVIGGPHGDTGLTGRKIIIDTYGGRGAHGGGAFSGKDPSKVDRSAAYAARHISKNLVKAGVSDEILIQVGYAIGVAEPVSLNVNTCGKSKLNISDSKLSNIVKEIFDLKPHSIESRFKLRDPIYLETASYGHMGRKSEKKIKKFNSKYSGVKKIEVELFPWEKLEYVEQIIKSLKL

SEQ ID NO: 122559 - protein, 417 aa, Unknown
  Bacterial polypetide isolated from the Sargasso Sea
MSYLFTSESVSEGHPDKVSDQISDGILDNFLAFDPNSKVACETLVTTGQVVLSGEVTSSTYIDVQNVAREIIKDIGYNNDLYKFSGESCAVMSLIHEQSEDILRGVESDIKEEQGAGDQGIMFGYACNETQESIPLTLDIANKLLFELSSLRRSKIIPYLRPDSKSQVTIEYDKNDNPLRIDTIVISTQHDDFDSDDKKMLDKIRQDIIELLIPIVKESYPESIQKLFNNSIKYHINPTGKFVIGGPHGDTGLTGRKIIIDTYGGRGAHGGGAFSGKDPSKVDRSAAYAARHISKNLVKAGVSDEILIQVGYAIGVAEPVSLNVNTCGKSKLNISDSKLSKIVKEIFDLKPHSIESRFKLRDPIYLETASYGHMGRKSEKKIKTFNSKYSGVKKIEVELFPWEKLEYVEQIIKSLKL

SEQ ID NO: 122560 - protein, 385 aa, Unknown
  Bacterial polypetide isolated from the Sargasso Sea
MSEYKLFTSESVSEGHPDKMADQISDAVLDAMLKDDPESRVACETLVKDNLVVLAGEITSASEPDLEALTRKVILDIGYNSLDVGCDGNTCEVVNAIGKQSQDIAQGVNEGEGESLEQGAGDQGLMFGYATNETEVLMPAPITYSHRLVEQQAFIRKSGKLSWLRPDAKSQVSFVYGDDGKPESISAVVLSTQHNPDVSQKDLKEGVMEEIVKPILPSNWLNQNTKYFINPTGRFEIGGPVGDCGLTGRKIIVDTYGGMARHGGGAFSGKDPSKVDRSAAYAGRYVAKNIVAADLADRCEIQVSYAIGVAEPTSISVNTFGTSKIDENKISELIREHFDLRPRQLIKMLDLKRPIYQATAAYGHFGREENAFTWEKTDKIEALKG

SEQ ID NO: 122561 - protein, 360 aa, Unknown
  Bacterial polypetide isolated from the Sargasso Sea
MYKTAETVSPGHPDKIADLISDYVLTEALSNNSKSRVAVETFLTGTTYGGLVVVGGEISDIAKIDDKGIEKIVKDALAKTIKTSFEDFQLDSLKIQNELTPQSEEIRSAVEDDEDLGAGDQGIMVGYATNETESFMPPTFDISRNIQMALWEIQNNDEKLDLDSKVQVTTGGEETKVVISTQHKKDIDIDELRINLEDMIAKYVNGKYQFDLNPSGSFVKGGPAGDTGLTGRKIVVDAYGPTVPVGGGAFSGKDPSKVDRSAAYAARHLAKNIVAHNLADKCQIRVAYAIGKAEPYELSVDTFGSQKEKDSVVNDFVSRFGMKPGVIIERLDLLNVNYREDTLFSHFGHENRNWEKIEDI

SEQ ID NO: 122562 - protein, 385 aa, Unknown
  Bacterial polypetide isolated from the Sargasso Sea
MFHQDFIFSSESVTEGHPDKVADQISDAVLDSIIKDDPNCRVACETLITRNRVILSAEIKSTISPDFERIIKDTLLSIGYDDESKGFDANNCDIDLYIEEQSADISMGVDKIDSEIIGAGDQGLMFGYATKENDNLMPYPILLAHKLTHQLAKKRKSGQLDFLRPDGKSQVSIKYEENKPSYVDTVVISTQHSEDVSDSDLKEAVIEEIIKKEIPSHLLSKETKFLINPTGRFVIGGPQGDTGLTGRKIIVDTYGGWAKHGGGAFSGKDPSKVDRSACYMARYIAKNIVASGLLPDCEIQLAYAIGKAEPVSINLTSTLNVDQKIIDKLTEEVFKIFDCTPKGIIESLDLLNPIYQKTSTYGHFGRDNLGFNWENIDKRDEIKKL

SEQ ID NO: 122563 - protein, 388 aa, Unknown
  Bacterial polypetide isolated from the Sargasso Sea
MNNEYLFTSESVSPGHPDKLSDQLSDAVLDYVFDTDKNARVACEVLTKGKKDSAGSIVVAGEITSTNPLDFDKKLREVICDIGYKSNELGFNGNECEIVRLINQQSSDIKMGVDRQDKKSQGAGDQGLMFGYASNETEVLMPAPIYYSHRLMEKQAEILKQGNESWLRPDAKSQVTFVYKDGKPVSIDTIVLSTQHDESITLEKIKEFVVEEIIKPTIPSHYRNNTKIFVNPTGNFIDGGPMGDCGLTGRKIIVDTYGGMARHGGGAFSGKDPSKVDRSAAYISRYVAKNIVAAGIAEKCEIQLSYAIGIAQPTSISVNTFGTGKKNDIEISEIISDVFDLTPYGITNTLDLLNRKYQPTAAFGHFGRSGDNFTWEHTNKIDILKERV

SEQ ID NO: 122564 - protein, 333 aa, Unknown
  Bacterial polypetide isolated from the Sargasso Sea
MSYIFTSESVSEGHPDKVCDQISDAILDSYLAQDPNSRVACETLIKNNTVIVAGEITSNGTPNIEEVIRNTVNEIGYNHDDLGFNGNNCEIQNLISKQSPDIAQGVNEGEGEDLDQGAGDQGLMFGYACSETPVLMPAPINLSHELVLKQSEVRKNGELSWLRPDAKSQVSVVYKDDRKTVDYVSAIVLSTQHDEDISQDEIKAKVREKIINPIIPTEWIKEDTKIYINPTGKFVIGGPVGDCGLTGRKIIVDTYGGMARHGGGAFSGKDPSKVDRSAAYACRYVAKNIVAAGLAERCEVQVSYAIGIAEPTSITVDTLGTGSLSENEISPDC

SEQ ID NO: 122565 - protein, 352 aa, Unknown
  Bacterial polypetide isolated from the Sargasso Sea
MAEMLFTSESVTEGHPDKIADQISDSVLDAMLMDDPKSRVACETLVTTGMAFLAGEVTTKAQVDFQRIVRETIREIGYTDSKMGFDCDTCAVMVSLDKQSPNIKQGVDNDPEKSKEQGAGDQGLMFGYACDETPELMPLPINMSHRLTEKLSQVRKNGTMPELRPDGKSQVTVKYVNGKPVEVTAVVISTQHKEGQDQGQLKKNIIENVIHPVIPAEFLTDTTDFHINPTGIFEIGGPQGDCGLTGRKIIVDTYGGMGRHGGGAFSGKDPSKVDRSAAYAARHVAKNVVAAGLASRCEVQVAYAIGVADPVSVSVDTFGTANIEEEKISMLIQETFDLKPASIIQRLNLFAP

SEQ ID NO: 122566 - protein, 387 aa, Unknown
  Bacterial polypetide isolated from the Sargasso Sea
MKSNYLFTSESVSEGHPDKVCDRISDAVVDAYLDADSLSRVAVETLTTTNRIVIAGEVRGPEEIGSDTIEKVARRAVKSIGYEQDGFHWEKAQVSVYVHKQSVDIAQGVDAGASKDEGAGDQGIMFGYACKETDSLMPAPIFYSHRILEELAKARHSGDVKGLGPDSKSQVTLEYADGEPVRAKSIVVSTQHSEELSQEDVRDIVRPFVTSSLPQGWMCEDSEFYVNPTGRFVIGGPDGDAGLTGRKIIVDTYGGAAPHGGGAFSGKDPSKVDRSAAYAARYLAKNVVGAGLASKCTIQLAYAIGVSKPLSVYVDLHDTGSEHESKISEALQKCMDLSPRGIREHLGLSKPIYERTAAYGHFGREPNSDGGFSWEKLDLVEPLKQTI

SEQ ID NO: 122567 - protein, 240 aa, Unknown
  Bacterial polypetide isolated from the Sargasso Sea
MSYIFTSESVSGGHPDKVCDQISDAVLDAYLAEDPNSRVACETMIKNNMVYIAGEITSLGSPDLEPVVRKTINDIGYNSDDYGFNGNTCEFTNLVFEQSPDISQGVTEGEGENLEQGAGDQGLMFGYACKETESLMPLPIDLSHRLVKKQADVMKSEDIKWLRPDAKSQVSVIYSDDGKTIEGLSAVVLSTQHDEEVSQEEIKTEVMDKIIKPIVPEEWLLDSTNIFINPTGKFVIGGPV

SEQ ID NO: 122568 - protein, 397 aa, Unknown
  Bacterial polypetide isolated from the Sargasso Sea
MKGNYLFTSESVSEGHPDKVCDIISDTVLDLCLSKDPQARVACETMTTTNRTVLAGELRVPENCMSNDGKKLSDDFKHEIEDAVRNAVKSIGYEQEGYHWKNMVVENHLHGQSPDIAMGVDAADNKEEGAGDQGIMFGFACRDTDVLMPAAIHYSHKILQSLAIARHNGEASILGPDSKSQITLEHIDGKPVKATSVVVSTQHIEEASQSEIRELVRKHVENVLPDGWMCPEERFFVNPTGNFVVGGPDGDSGLTGRKIIVDTYGGSSPHGGGAFSGKDPTKVDRSAAYISRYMAKNVVAANLAEKCTIQLSYAIGVSEPLSLYVNTDNTGKISDEELSQILRREVDLTPSGIRSCLGLNNSIYKPSAAYGHFGRVPDEEVKGSFSWEKTDLVSKIS

SEQ ID NO: 122569 - protein, 50 aa, Unknown
  Bacterial polypetide isolated from the Sargasso Sea
NFDLRPKSLINMLDLKRPIYLPTAAYGHFGRTDIDLSWEKTDKSSEISQL

SEQ ID NO: 122570 - protein, 262 aa, Unknown
  Bacterial polypetide isolated from the Sargasso Sea
FGYACNETDMLMPAPIHYSHKILKLMAEDRKSGKLKNIEPDSKSQITFEYIDGKPVKVKSVVISSQHSKDVNQAQVKDLLRPYMVKAIPGNFLYGFNEDEFYVNPTGNFVIGGPDGDCGLTGRKIIVDTYGGAAPHGGGAFSGKDPTKVDRSAAYAARYIAKNIVASKISNRCLIQLAYAIGVSKPLSIYVDLFDNDLDKNKFVVETIKENFDLSPRGIREILKLNNPIYEKTSAYGHFGRIPENNGSFSWEKTDKLSIFSK

SEQ ID NO: 122571 - protein, 126 aa, Unknown
  Bacterial polypetide isolated from the Sargasso Sea
MKKNYLFTSESVSEGHPDKVCDRISDMVVDTYLSSEPQSRVACETLTTTNKVVLAGEVRGPDVKKDDLIEKVRNCIKDIGYDQEGFSWKDTTKIESHLHAQSADIAMGVDSSGNKDEGAGDQRYNV

SEQ ID NO: 122572 - protein, 295 aa, Unknown
  Bacterial polypetide isolated from the Sargasso Sea
IETHLHAQSADIAMGVDSSGNKDEGAGDQGIMFGYACNETDVLMPAPIHYSHRILRLMAEDRKSGKLKGIEPDSKSQITIEYKDGLPNAVKSVVISTQHSKDVNLTKVKELCMPYIERSIPKNLLSNLDEKEIYINPTGNFVIGGPDGDSGLTGRKIIVDTYGGAAPHGGGAFSGKDPTKVDRSAAYASRYLAKNVVASKIADKCLIQLAYAIGVSKPLSIYVDLFDNDEDKNRYVEKLINENFDLSPRGIREMLGLNKAIYEKTAAYGHFGREPESNGAFSWEKQTKQMFLRSN

SEQ ID NO: 122573 - protein, 130 aa, Unknown
  Bacterial polypetide isolated from the Sargasso Sea
YGGMARHGGGVFSGKDPSKVDRSAAYASRYVAKNIVAAGLADFCEIQVSYAIGVAKPTSIFVETFNSEKVAKEVIVKLVEEEFDLRPKSIIEMLDLKRPIYQQTAAYGHFGRTDIELSWEKTDRAEKLKK

SEQ ID NO: 122574 - protein, 139 aa, Unknown
  Bacterial polypetide isolated from the Sargasso Sea
RKIIVDTYGGAAPHGGGAFSGKDPTKVDRSAAYASRYLAKNVVASGIADKCLIQLAYAIGVSKPLSIYVDLFDNDEEKNMHVEKLINENFDLSPRGIREMLGLNKAIYQKTAAYGHFGREPESDGSFSWEKTDKSGVFK

SEQ ID NO: 122575 - protein, 290 aa, Unknown
  Bacterial polypetide isolated from the Sargasso Sea
MKKDYLFTSESVSEGHPDKVCDRISDMVVDTYLAAEPQSRVACETLTTTNKVVLAGEVRGPEIKKEDLIEKVRHCIKDIGYDQDGFTWKEATSVESHLHSQSADIAMGVDSSGNKDEGAGDQGIMFGYACNETDVLMPAPIHYSHKILRLMAQDRKSGKLKNIEPDSKSQITIEYKDGKPSSVKSVVISTQHSPSINQAQVRDLVKPYIEKSIPKDLLNSLDENEIYVNPTGNFVIGGPDGDSGLTGRKIIVDTYGGAAPHGGGAFSGKDPTKVDRSAAYASRYLAKNVV

SEQ ID NO: 122576 - protein, 329 aa, Unknown
  Bacterial polypetide isolated from the Sargasso Sea
TMVSSNMVTIAGEVKTDLMYNKETIEELVGQTVKDIGYEQENFHWDTLSFKNLIHNQSIDIARGTDNFGAGDQGMMFGYACNENDSFMPSAIFYSHKITKALSVARRNEENWMGPDGKAQVTVEYSNVNEPVRISNVICSTQHSKDLKDSPGEVQKRIEEIIKPELSDMLDDNTIFQVNPTGNFVTGGPDGDTGVTGRKIIVDTYGGYAPHGGGAFSGKDCTKVDRSGAYMARYLAKNIVASGVSQNATIQLSYAIGVKEPVSLYVYCDGKVRNDISDWIYQNIDLTPLGIIRKFNLFKLDLTETTNYGHFGKNHLAWENTDMANQLNF

SEQ ID NO: 122577 - protein, 413 aa, Unknown
  Bacterial polypetide isolated from the Sargasso Sea
MSDFIFTSESVTEGHPDKICDQISDAVLDALLTEDPESRVACETVVNTGLCLLTGEITSKAKVDYIKLVRNVIKEIGYEGYKAGGFDANSCAVLVALDEQSPDISQGVNDADDVNDDLEDNTGAGDQGIMFGYACDETPELMPLPISLAHRLAIQLAKVRHEEVLSYLLPDGKTQVSIDYEKGLPVSINTILISTQHNPEIDGITNEEEIRQRIKEDLWTHVVIPATEDLEIKPSISQTRFLVNPTGKFVVGGPQGDAGLTGRKIIVDTYGGYARHGGGAFSGKDPTKVDRSAAYAARYVAKSIVKAKLAKKAEVQLSYAIGVAKPISILVDTFDTGVISQANLTELIKEHFDLRPAAIIKEFNLRNLPKKMGGKFYRKTASYGHFGRRDLELPWENVEKKAAQLAEASKIFK

SEQ ID NO: 122578 - protein, 295 aa, Unknown
  Bacterial polypetide isolated from the Sargasso Sea
KIETHLHSQSADIAMGVDSSGNKDEGAGDQGIMFGYACNETDVLMPAPIHYSHRILRLMAEDRKSGKLKGIEPDSKSQITIEYKDGVPNAVKSVVISTQHSKDVDLAKVKELCMPYIERSIPKNLLGSLDEKEIYINPTGNFVIGGPDGDSGLTGRKIIVDTYGGAAPHGGGAFSGKDPTKVDRSAAYASRYLAKNVVASKIADKCLIQLAYAIGVSKPLSIYVDLFDNDEEKNRHVEKLINENFDLSPRGIREMLGLNKAIYEKTAAYGHFGREPESNGAFSWEKTDKANVFSK

SEQ ID NO: 122579 - protein, 201 aa, Unknown
  Bacterial polypetide isolated from the Sargasso Sea
MAQHIFTSESVSEGHPDKIADQISDAVLDAILEQDPKARVACETFVKTGMVLVGGEITTSAWVDIEEITRNTIRDIGYVHSDMGFDANSCAVLSAIGKQSPDINQGVDKKDPSEQGAGDQGLMFGYASNETDVLMPAPITYSHRLVQQQAKVRKDGTLNWLRPDAKSQLSFVYENGKPVGIDAVVLSTQHCDTISTADLRE

SEQ ID NO: 122580 - protein, 394 aa, Unknown
  Bacterial polypetide isolated from the Sargasso Sea
MSRNNFVFTSESVSEGHPDKVCDQISDSVLDAFISEEPEARVACETFATTNRVVVGGEVGLSDKKILQDYMGQIDQIARSCIKNIGYEQEKFHHQTVEVTNLLHEQSAHIAQGVNAGANKDEGAGDQGIMFGYATDETEDLMPAPIQYSHAILRRLAEVRKNGTEPTLGPDAKSQLSVKYQYGIPTSVTSIVLSTQHLDEKMTSADVRSVVEPYIREILPENWISNETKWHVNPTGKFVIGGPDGDAGLTGRKIIVDTYGGAAPHGGGAFSGKDPTKVDRSAAYAARYLAKNIVGADLAKKCSIQLSYAIGVAKPLSIYADTFGTGIVSEEAMENAIASCMDLTPKGIRMHLGLNKPIYQRTAAYGHFGRKPEEDGGFSWEKLDLVDELKAKCK

SEQ ID NO: 122581 - protein, 71 aa, Unknown
  Bacterial polypetide isolated from the Sargasso Sea
INVNTFDSEKISKDAIEKIVEEHFDLRPKSLINMLDLKRPIYLPTAAYGHFGRTDIDLSWEKTDKASEISQ

SEQ ID NO: 122582 - protein, 370 aa, Unknown
  Bacterial polypetide isolated from the Sargasso Sea
MSYIFTSESVSEGHPDKICDQISDAILDECLKQDKQSRVACETLVKNNTVVLAGEISSKASIDHEKIARDVVKNIGYVDQELGFSCESFKFINLLSQQSADIAKGISNLGSGDQGLMFGYACKETKELMPLPISLAHKLTMKHAEVRRSSDNGLLPDAKSQVSVEYNSNYSPKRIDSIVFSSQHSKDLSLNKLRELIREEIINKSLPTDLLDTETKYLINPAGEFNIGGPVGDSGLTGRKIIVDTYGGMARHGGGCFSGKDPTKVDRSAAYALRQVAKSLVHAGLCNYCEVQSSYAIGVVEPTSIFINTFESEQKPIGEIKEIVDASFDLTPAGIIDNLNLLEPIYQKTASYGHFGREDQGFSWEDVKGL

SEQ ID NO: 122583 - protein, 125 aa, Unknown
  Bacterial polypetide isolated from the Sargasso Sea
GGAFSGKDPTKVDRSAAYASRYLAKNVVASKIADKCLIQLAYAIGVSKPLSIYVDLFDNDEEKNSHVEKLINDNFDLSPRGIREMLGLNKPIYEKTSAYGHFGREPGSDGSFSWEKTDKADIFRK

SEQ ID NO: 122584 - protein, 134 aa, Unknown
  Bacterial polypetide isolated from the Sargasso Sea
TYGGAAPHGGGAFSGKDPTKVDRSAAYASRYLAKNVVASGIADKCLIQLAYAIGVSKPLSIYVDLFDNDEQKNMHVEKLINENFDLSPRGIREMLGLNKAIYQKTAAYGHFGREPESDGSFSWEKTDKSEVFKK

SEQ ID NO: 122585 - protein, 197 aa, Unknown
  Bacterial polypetide isolated from the Sargasso Sea
MKKDYLFTSESVSEGHPDKVCDRISDMVVDTYLGLEPQSRVACETLTTTNKVVLAGETRGPEIKKDELISKVRDCIKDIGYDQEGFTYKEATKIECHLHSQSTDIAMGVDSSGNKDEGAGDQGIMFGYACNETDVLMPAPIHFSHRILRLMAEDRKSGKLIGIEPDSKSQITIEYKDGAPKAVKSVVISTQHSKDVN

SEQ ID NO: 122586 - protein, 357 aa, Unknown
  Bacterial polypetide isolated from the Sargasso Sea
MKKDFLFTSESVSEGHPDKVCDRISDMVVDTYLGMEPQARVACETLTTTNKVVLAGETRGPDINKDELISKVRDCIKDIGYDQEGFTWRDATKIESHLHSQSADIAMGVDSSGNKDEGAGDQGIMFGYACNETDVLMPAPIHYSHKILRLMAQDRKSGNLNGIEPDSKSQITIEYKDGKPSAVKSVVISTQHSKDVNLAKVKELCMPYIEKSIPKNLLGSLDEKEIYINPTGNFVIGGPDGDSGLTGRKIIVDTYGGAAPHGGGAFSGKDPTKVDRSAAYASRYLAKNVVASRIADKCLIQLAYAIGVSKPLSIYVDLFDNDEEKNMHVEKLINDNFDLSPRGIREMLGLNKAIYQK

SEQ ID NO: 122587 - protein, 203 aa, Unknown
  Bacterial polypetide isolated from the Sargasso Sea
KPTNQKRIDSVVFSSQHSKDLGLDKLRDLIREEVINKSLPLDLLDNKTKYLINPAGEFNIGGPVGDSGLTGRKIIVDTYGGMARHGGGSFSGKDPTKVDRSAAYALRQVAKSLVNADLCDYCEVQSSYAIGVVEPTSIFINTFESERKPIGEIQAIVDESFDLTPAGIINNLNLLEPIYLKTASYGHFGREDQGFSWEDTKDL

SEQ ID NO: 122588 - protein, 95 aa, Unknown
  Bacterial polypetide isolated from the Sargasso Sea
KISNKCLIQLSYAIGVSKPLSIYVNLFDGDLEKSKYVEKIIQENFDLSPRGIREMLSLNKPIYECTAAYGHFGRKPGSNGSFSWEKTDKSSIFKK

SEQ ID NO: 122589 - protein, 92 aa, Unknown
  Bacterial polypetide isolated from the Sargasso Sea
MKRDYIFTSESVSEGHPDKVCDRISDMVVDSYLSSGDPQTRVACETLTTTNKVVLAGEVRGPSISKDQIISQVRDCIKDIGYEQDGFHWQNC

SEQ ID NO: 122590 - protein, 360 aa, Unknown
  Bacterial polypetide isolated from the Sargasso Sea
DMVVDSYLAKDPYARVACETLTTTNKVVLAGEVRGPKIETENLIQKVRECIKDIGYDQSGFSWRSAKIESHLHEQSADIAMGVDAKGNKDEGAGDQGIMFGFACNETKDLMPAPIYYSHKILRLIAEDRKNGKLIGIEPDSKSQISMMYENYKPKKVTSVVISTQHSQDLDQKRVRELIIPYIKKAIPENLISDLKDDEIYINPTGQFIIGGPDGDSGLTGRKIIVDTYGGAAPHGGGAFSGKDPTKVDRSAAYVARYLAKNIVAAGISDKCLIQLAYAIGVSKPLSIYIKLSEGDEDKVKDLEGLVEKNFDLSPRGIRELLGLNKPIYEVTSAYGHFGRIPQNNGQFSWEKTDKIKIFK

SEQ ID NO: 122591 - protein, 300 aa, Unknown
  Bacterial polypetide isolated from the Sargasso Sea
MYYFTSESVSPGHPDKLCDHLSDAILDHVLSQDKESRVACETFVKGKSDDAGTVVVGGEITTQANLDIDELIRETILEIGYNSNELGFNGNECNIIKLLTKQSPDIQMGVDREEKKNQGAGDQGLMFGYATNETEFLMPSPIYYSHRLVEKQTKLLKTGAVSWLRPDAKSQVTFQYEKDKPTFVDTVVLSTQHSCDINLEDLREYVKKEIIFDVIPENLINDNTRIFINPTGNFVEGGPLGDSGLTGRKIIVDTYGGMARHGGGAFSGKDPSKVDRSAAYAARYMQKILLQLDSLIDVKS

SEQ ID NO: 122592 - protein, 391 aa, Unknown
  Bacterial polypetide isolated from the Sargasso Sea
MGKYLFTSESVTEGHPDKACDAFSDAILDSILTQDNESHVACESLATKGLVVISGEVRTNANIDTEKVVKDTIKEIGYNKSNSGVDPSDIEVLSKLHSQSPQIAQGVDSEDLASQGAGDQGLMFGYACKETPELMPLPIQISHRLTEKLTDLRKSGDLQWLRPDGKSQVSVAYENGNPISIEKTVIATQHNDMIKEYGSEESELKFVEQEVINHVIKPVLDSYGYPYSENFIVNGTGRFVYGGPEADTGLTGRKIIVDTYGGYAPHGGGAFSGKDPSKVDRSATYMARYIAKNIVAADLADHCEVQLSYGIGVPEPTSFYVKTNGSGKKDDEFLTELARDIFPLRPGEIVAHLDLKKPRYRKTAAYGHFGRELEEFTWEKTDMVESLLSKI

SEQ ID NO: 122593 - protein, 387 aa, Unknown
  Bacterial polypetide isolated from the Sargasso Sea
MKKNYLFTSESVSEGHPDKVCDRISDMVVDSYLGAEPQSRVACETLTTTNKVVLAGEVRGPEIKKEDLIQKVRECIKDIGYDQEGFTWKDATKIESHLHSQSADIAMGVDSSGNKDEGAGDQGIMFGYACNETDVLMPAPIHYSHKILRLMAEDRKSGKLKNIEPDSKSQITIEYKDGKPTHVKSVVISTQHSADVNQSQVRELVKPYIEKSIPKNLINGLDESEIYVNPTGNFVIGGPDGDSGLTGRKIIVDTYGGAAPHGGGAFSGKDPTKVDRSAAYASRYLAKNVVASKIADKCLIQLAYAIGVSKPLSIYVDLFDNDEEKNKHVEKLISENFDLSPRGIREMLGLNKAIYEKTAAYGHFGRDPESSGAFSWEKTDKADIFSK

SEQ ID NO: 122594 - protein, 338 aa, Unknown
  Bacterial polypetide isolated from the Sargasso Sea
NKVVLAGEVRGPDIKKDDLIYKVRDCIKDIGYDQDGFSWKDATKVECHLHSQSSDIAMGVDSSGNKDEGAGDQGIMFGYACNETDVLMPAPLHYSHKILRLMAEDRKSGKLKNIEPDSKSQITIEYKDGKPASVKSVVISTQHSADVNQSQVRELVKPYIERSIPKNLINGLDDNEIYINPTGNFVIGGPDGDSGLTGRKIIVDTYGGAAPHGGGAFSGKDPTKVDRSAAYASRYIAKNIVASGLSEKCLIQLAYAIGVSKPLSIYVDLFDNDEEKNKHVERLIKENFDLSPRGIREMLGLNKPIYQKSAAYGHFGRDPESDGAFSWEKTDKIKVFNK

SEQ ID NO: 122595 - protein, 130 aa, Unknown
  Bacterial polypetide isolated from the Sargasso Sea
MNKYTFTSESVSEGHPDKVCDAISDAILDEYLNQDANSRVACETLATTGTVFVSGEVTSTGTVDVQAIVKNTLNDIGYYDEAYGMDAKSVKVISMLDKQSPEIAQGVNEGSGLHDEQGAGDQGLMFGFAC

SEQ ID NO: 122596 - protein, 219 aa, Unknown
  Bacterial polypetide isolated from the Sargasso Sea
MQNNKYLFTSESVSEGHPDKVCDRISDMVVDSYLSQDPFSRVACETLTTTNKVVLAGEIRGPKIPKEEIIEKVRNCIKDIGYDQEGFSWKTANIETFLHEQSADIAMGVDSKDNKDEGAGDQGIMFGYACKETEDLMPAPIHFSHKILRLMAEDRKKKALKGIEPDSKSQVTMLYQDNKPIKVTSVVISTQHSKDLNQEKVKNLVLPYIKKSIPEKYLK

SEQ ID NO: 122597 - protein, 323 aa, Unknown
  Bacterial polypetide isolated from the Sargasso Sea
KDELIEKVRNCIKDIGYDQEGFTWKEATKIESHLHSQSSDIAMGVDSSGNKDEGAGDQGIMFGYACNETDVLMPAPIHYSHKILRLMAEDRKSGKLKNIEPDSKSQVTFEYVDGKPSKVKSVVISSQHSADVNQAQVRDLLRPYMLKSIPENFLEDFNEDEFYVNPTGNFVIGGPDGDCGLTGRKIIVDTYGGAAPHGGGAFSGKDPTKVDRSAAYAARYIAKNVVGSKIAEKCLIQLAYAIGVSKPLSIYVDLFDNDLEKNKFVVEKIKENFDLSPRGIREMLNLNKPIYEKTAAYGHFGRAPEENGSFSWEKTNKTNIFSK

SEQ ID NO: 122598 - protein, 202 aa, Unknown
  Bacterial polypetide isolated from the Sargasso Sea
VVISTQHAKDLNQEKVRDLVIPYINKSIPKDYLEGLDPKEIYINPTGQFVIGGPDGDTGLTGRKIIVDTYGGAAPHGGGAFSGKDPTKVDRSAAYASRYLAKNIVSAGVSEKCLIQLAYAIGVSKPLSIFIKLDDDDEAKVEHIKKIINQNFDLSPRGIREMLNLNNPIYEVTSAYGHFGRKATNKGEFTWEKTDKVELFKQ

SEQ ID NO: 122599 - protein, 305 aa, Unknown
  Bacterial polypetide isolated from the Sargasso Sea
MRSYLFTSESVSEGHPDKVCDRISDMVVDSYLSSGDPQTRVACETLTTTNKVVLAGEVRGPSISKEQIISQVRDCIKDIGYEQEGFHWQNCEIDYHLHPQSSDIAMGVDSGSDKEEGAGDQGIMFGFACRDTESLMPAPIHYSHQILYKMAQARKDGSASGLEPDSKSQVTMLYENGKPTKVTSLVISSQHKEGLSPEDVKEIVKPYVYECIPHELLEGLKDEEFYVNPTGNFVIGGPDGDSGLTGRKIIVDTYGGAAPHGGGAFSGKDPSKVDRSAAYAARYLAKKILLPPILLINAQYNFLMQ

SEQ ID NO: 122600 - protein, 384 aa, Unknown
  Bacterial polypetide isolated from the Sargasso Sea
MSYIFTSESVSAGHPDKVCDQISDAVLDAYLAEDPNSRVACETMIKNNMVYIAGEITSLGSPDLEPIVRKTINDIGYNTDEYGFNGDTCEFTNLVFEQSPDISQGVTEGEGENLEQGAGDQGLMFGYACTETDSLMPLPIDLSHRLVKKQADVMKNNELPWLRPDAKSQVSAIYSDDGKKIEGLSAIVLSTQHDEDVSQDEIKEGVMENIIKPIVPKEWILDSTNIYINPTGKFVIGGPVGDCGLTGRKIIVDTYGGMARHGGGAFSGKDPSKVDRSAAYAARYVAKNIVAAGLADYCEIQVSYAIGVAKPTSINVNTFNSEKISKQAIEKIVEEKFDLRPKSLINMLDLKRPIYLPTAAYGHFGRTDIDLSWEKTDRASEISQ

SEQ ID NO: 122601 - protein, 118 aa, Unknown
  Bacterial polypetide isolated from the Sargasso Sea
IFWQDPSKVDRSAAYAGRYVAKNIVSAGLAEKCEIQVSYAIGIAEPTSISINTFGSNTIPEEEIAQLVANNFELKPKELIQMLDLKKPIYQKTAAYGHFGREDEDFSWESTAKADKIK

SEQ ID NO: 122602 - protein, 196 aa, Unknown
  Bacterial polypetide isolated from the Sargasso Sea
MSYIFTSESVSEGHPDKICDQISDAILDECLKQDRDSRVACETLVKNNTVVVAGEISSKASIDYEKIARDVVKSIGYINEELGFSYDSFKFINLLSQQSADIAKGISNLGSGDQGLMFGYACKETKELMPLPISLAHKLTMKHAEVRRSSDNGLLPDAKSQVSVEYDSNYRPKRIDSVVFSSQHSKDLNLDKLRDL

SEQ ID NO: 122603 - protein, 98 aa, Unknown
  Bacterial polypetide isolated from the Sargasso Sea
MIRRDGVSRWTFTSESVTEGHPDKMADQISDAILDAMLRQDPNSRVACETMVTTGLVVVAGEITTSGFVDIASVVRETINDIGYDRDSLDFNGSTCGV

SEQ ID NO: 122604 - protein, 384 aa, Unknown
  Bacterial polypetide isolated from the Sargasso Sea
MSYIFTSESVSAGHPDKVCDQISDAVLDAYLTEDPNSRVACETMIKNNMVYIAGEITSTGSPDLEPIVRKTISDIGYDTDDYGFNGETCEFTNLVFEQSPDISQGVTEGEGENLEQGAGDQGLMFGYACTETNSLMPLPIDLSHRLVKKQADVMKEGGLSWLRPDAKSQVSAIYSDDGKTIEGLSAIVLSTQHDEDVTQDDIKEGVMEHIIKPIVPSEWILDSTKIYINPTGKFVIGGPVGDCGLTGRKIIVDTYGGMARHGGGAFSGKDPSKVDRSAAYAARYVAKNIVAAGLADYCEIQVSYAIGVAKPTSININTFDSEKISKDAIEKIVEEHFDLRPKSLINMLDLKRPIYLPTAAYGHFGRTDIDLSWEKTDKASEISQ

SEQ ID NO: 122605 - protein, 172 aa, Unknown
  Bacterial polypetide isolated from the Sargasso Sea
MFVPDEWILDSTNIYINPTGKFVIGGPVGDCGLTGRKIIVDTYGGMARHGGGAFSGKDPSKVDRSAAYAARYVAKNIVAAGLADYCEIQVSYAIGVAKPTSINVNTFNSEKISKEAIEKIVEDNFDLRPKSLINMLDLKRPIYLPTAAYGHFGRTDIDLSWEKIDKASEISQ

SEQ ID NO: 122606 - protein, 297 aa, Unknown
  Bacterial polypetide isolated from the Sargasso Sea
ATKIESHLHSQSADIAMGVDSSGNKDEGAGDQGIMFGYACNETDVLMPAPIHYSHKILRLMAEDRKSGKLKDIEPDSKSQVTFEYIDGKPVKVKSVVISSQHSKDVNQAQVIDLLRPYMMKAIPGNFLEGFNEEEFYVNPTGNFVIGGPDGDCGLTGRKIIVDTYGGAAPHGGGAFSGKDPTKVDRSAAYAARYIAKNIVASKISNRCLIQLAYAIGVSKPLSIYVDLFDNDLDKNKFVVEKIKENFDLSPRGIREMLKLNKPIYEKTSAYGHFGRTPENNGSFSWEKTDKLSVFSK

SEQ ID NO: 122607 - protein, 288 aa, Unknown
  Bacterial polypetide isolated from the Sargasso Sea
IGKQSPDINQGVDRADPKEQGAGDQGLMFGYASNETDILMPAPITYAHALVKRQSEVRKDGTLPWLRPDAKSQVTFAYEDNKIVGIDAIVLSTQHSPDIAQADLIEGVMETIIKPVLPAQWLNKDTKYFINPTGRFVIGGPMGDCGLTGRKIIVDTYGGMARHGGGAFSGKDPSKVDRSAAYAARYVAKNIVAAGLADRCEIQVSYAIGVAEPTSISVETFGTGKVSEEVLIKLVRQHFDLRPYGLTEMLNLARPIYQATAAYGHFGRNEFPWEATDKADALRADAGL

SEQ ID NO: 122608 - protein, 227 aa, Unknown
  Bacterial polypetide isolated from the Sargasso Sea
HDPFDEDDKMLLKIKSDIINIVIPRVFESQPQHISSLMNNSIKYHINPTGKFVTGGPHGDTGLTGRKIIIDTYGGKGGHGGGAFSGKDPSKVDRSAAYAARHIAKNIVAAGVSDEMTIQLSYAIGVSSPTSIMVNTFGKSKVNLSDFEISKKISSIFDLTPFGIEERLKLRNPIYSETAAYGHMGRKPLKINKIFDSPYSGRVTKQVELFTWEKLDYVKIIKEKFKL

SEQ ID NO: 122609 - protein, 183 aa, Unknown
  Bacterial polypetide isolated from the Sargasso Sea
MSNLKNYLFTSESVSEGHPDKVSDRISDMVVDSFISGDPYSRVACETLTTTNKVVLAGEVRGPEIKKDQLIEKVRNCIKDIGYDQEGFTWKEATKIESHLHSQSADIAMGVDSSGNKDEGAGDQGIMFGYACNETDVLMPAPIHYSHQILRLMAEDRKSGKLKNIEPDSKSQVTFEYIDGKPS

SEQ ID NO: 122610 - protein, 391 aa, Unknown
  Bacterial polypetide isolated from the Sargasso Sea
MSRFLFTSESVTEGHPDKACDAFSDAILDNILSKDNEAHVACESLATKGLVVISGEIRTTATINVEKVVKDTIKEIGYHKTNSGIDPDEVEVLSKLHEQSPEIAQGVDSEDISAQGAGDQGLMFGFACKETPELMPLPIQISHRLTERLTQLRKDGTLPWLRPDGKSQVSVNYEDGRPVSIDKTVIATQHDDMIGEYGSEKKELEFVNKEVVEHVIRPVLDSYGYDYNENFIVNGTGRFVYGGPEADTGLTGRKIIVDTYGGYAPHGGGAFSGKDPSKVDRSATYMARYIAKNIVASDLADRCEVQLSYGIGVAEPTSFYVKTQGTGKKDDETLTKLARDVFPVKPGEIVAHLDLKKPRYRETAAYGHFGRELEQFTWERTDMVETLLKKL

SEQ ID NO: 122611 - protein, 46 aa, Unknown
  Bacterial polypetide isolated from the Sargasso Sea
LRPKSLINMLDLKRPIYLPTAAYGHFGRSDIELSWEKTDKAADISE

SEQ ID NO: 122612 - protein, 276 aa, Unknown
  Bacterial polypetide isolated from the Sargasso Sea
VDEGAGEDLDQGAGDQGLMFGYATNETEQLMPAPIHYSHLLVKKQSEVRKNGKLKWLRPDAKSQLSFDYDSNGNPSAITAVVLSTQHDGEVSQDDLKEGVMEEILKPVLPSNLVNKETKFFINPTGRFVVGGPVGDCGLTGRKIIVDTYGGMARHGGGAFSGKDPSKVDRSAAYAGRYVAKNIVAAGLADKCEVQISYAIGIAKPTSISVNTFGTGKISEEQILSLIREKFDLRPKGLIAMLHLLKPIYQETAAYGHFGREQFPWEKIDKIEELKS

SEQ ID NO: 122613 - protein, 99 aa, Unknown
  Bacterial polypetide isolated from the Sargasso Sea
MEKFVIGGPHGDTGLTGRKIIIDTYGGKGSHGGGSFSGKDPSKVDRSAAYAARHISKNLVKAGVSDEILLQLGYAIGISSPVSFNINTCGKSNLKISDG

SEQ ID NO: 122614 - protein, 263 aa, Unknown
  Bacterial polypetide isolated from the Sargasso Sea
MFGYACNETEELMPAPIHYSHKILRLMSEDRKSGKLKNIEPDSKSQVTFEYVDGKPTKVKSVVISSQHSADVNQTQVRDLLRPYMINSIPKIFLDGFNEEEFYVNPTGNFVIGGPDGDCGLTGRKIIVDTYGGAAPHGGGAFSGKDPTKVDRSAAYAARYIAKNVVASKIANKCLIQLAYAIGVSKPLSIYVDLFDNDVEKNEFVVEKINDNFNLSPRGIREMLNLNKPIYEKTAAYGHFGRSPEENGFFSWEKTDKIKAFLK

SEQ ID NO: 122615 - protein, 317 aa, Unknown
  Bacterial polypetide isolated from the Sargasso Sea
IVRKTITEIGYDNPDLKFDSHSCEVMIKLDPQSPHISQGVTGTDEKEQGAGDQGLMFGYASNETEELMPLPILLAHKLTKKLTDVRKNNQLPWARPDGKSQVSIRYEDDKPKAIEAIVLSTQHSPEITNEEITSQLIEHVIKPVCGDLWNDNIKIHVNPTGKFEIGGPHGDAGLTGRKIIVDSYGGMGRHGGGAFSGKDPSKVDRSACYMCRYVAKNIVAAGLADRCEVQVAYAIGVAEPVSLMVNTFGTNKISEEKIEELVNNNFDMRPAGIVSQLDLKRPIYKKTAAYGHFGRNEPEFNWEKTDKAQKLKEESGI

SEQ ID NO: 122616 - protein, 250 aa, Unknown
  Bacterial polypetide isolated from the Sargasso Sea
EDDEDQGAGDQGIMVVYAINETESLMPPTFDKSRNIQQALWDIQHSDEMLDLDSKVQVTTGGDKTKVVVSTQHQSEIDIDDLHARVFELVGSYISEEYTLDLNPSGSFVKGGPAGDTGLTGRKIVVDAYGPSVPVGGGAFSGKDPSKVDRSAAYAARHLAKNIVSHGLADECLVRVSYAIGKAEPYELTVETFGTEKSENKVFNDFISKFDMKPGAIIERLNLLEVDYKEDTLFSHFGHNDRNWEKIENL

SEQ ID NO: 122617 - protein, 384 aa, Unknown
  Bacterial polypetide isolated from the Sargasso Sea
MSYIFTSESVSAGHPDKVCDQISDAVLDAYLAVDPNSRVACETMIKNNMVFIAGEITSTGSPDLEPVVRQTIKDIGYDNDEYGFNGDTCEFTNLVFEQSPDISQGVTEGEGENLEQGAGDQGLMFGYACTETEALMPLPIDLSHRLVRQQAEVMKSNELSWLRPDAKSQVSAIYSDDGKTIEGLSAIVLSTQHDEDVTQDEIKEGVMENIIKPIVPQEWILDSTKIYINPTGKFVIGGPVGDCGLTGRKIIVDTYGGMARHGGGAFSGKDPSKVDRSAAYAARYVAKNIVAAGLADYCEIQVSYAIGVAKPTSINVNTFDSEKVSKEAIEKIVEEKFDLRPKSLINMLDLKRPIYLPTAAYGHFGRTDIDLSWEKTDKASEISQ

SEQ ID NO: 122618 - protein, 380 aa, Unknown
  Bacterial polypetide isolated from the Sargasso Sea
MSSLKNFLFTSESVSEGHPDKVSDRISDMVVDTYLSSDPFSRVACETLTTTNKVVLAGEVRGPEIKKDELISKVRNCIKDIGYDQEGFTWREATKIESHLHSQSSDIAMGVDSSGNKDEGAGDQGIMFGYACNETDLLMPAPIHYSHKILRLMAEDRKSGNLDNIEPDSKSQVTFEYIDGKPTKVKSIVISSQHSHDINQSQVRDLLRPYISKSIPENFLEDFNEDNFYVNPTGNFVIGGPDGDCGLTGRKIIVDTYGGAAPHGGGAFSGKDPTKVDRSAAYAARYIAKNIVASKIANKCLMQLSYAIGVSKPLSIYVDLFDDDLDKNKFVVDKIKENFDLSPRGIREMLKLNKPIYEKTSAYGHFGRVPDDSGSFSWEK

SEQ ID NO: 122619 - protein, 383 aa, Unknown
  Bacterial polypetide isolated from the Sargasso Sea
MAKHLFTSESVSEGHPDKIADQISDAVLDAILAQDPKARVACETYVKTGMVLVGGEVTTSAWVDIEELTRKTVREIGYIHSDMGFDADSCAVLNAIGKQSPDINQGVDRADPKEQGAGDQGLMFGYASNETDILMPAPITYAHALVKRQSEVRKNGTLPWLRPDAKSQVTFAYEDNKIVGIDAIVLSTQHSPDIAQADLIEGVMETIIKPVLPAQWLSKDTKYFINPTGRFVIGGPMGDCGLTGRKIIVDTYGGMARHGGGAFSGKDPSKVDRSAAYAARYVAKNIVAAGLADRCEIQVSYAIGVAEPTSISVETFGTGKVSEEVLIKLVRQHFDLRPYGLTEMLNLARPIYQATAAYGHFGRSEFPWEATDKADALRADAGL

SEQ ID NO: 122620 - protein, 256 aa, Unknown
  Bacterial polypetide isolated from the Sargasso Sea
MPAPIHYSHEILKKLAELRHSGDADFLGPDSKSQLTIEYDNHRPIKAHKIVVSSQHREGLNQLELKDFIISVVKTILPEEWMCDEDKFYVNPTGRFVIGGPDGDTGLTGRKIIVDTYGGSSPHGGGAFSGKDPTKVDRSAAYMTRYLAKNVVAAKLAKKCTIQIAYGIGISKPLSFYVNTQGTGQIEDIRIQKCLEKIIDLTPKGIRDRLALNNPIYVPSASYGHFGREPDEKVKGSFSWEKVDLVETILNEIKNY

SEQ ID NO: 122621 - protein, 383 aa, Unknown
  Bacterial polypetide isolated from the Sargasso Sea
MAKHLFTSESVSEGHPDKIADQISDAVLDAILAQDPKARVACETYVKTGMVLVGGEVTTSAWVDIEELTRKTVREIGYVHSDMGFDADSCAVLNAIGKQSPDINQGVDRADPKEQGAGDQGLMFGYASNETDILMPAPITYAHALVKRQSEVRKDGTLPWLRPDAKSQVTFAYEDNKIVGIDAIVLSTQHSPDIAQADLIEGVMETIIKPVLPAQWLNKDTKYFINPTGRFVIGGPMGDCGLTGRKIIVDTYGGMARHGGGAFSGKDPSKVDRSAAYAARYVAKNIVAAGLADRCEIQVSYAIGVAEPTSISVETFGTGKVSEEVLIKLVRQHFDLRPYGLTEMLNLARPIYQATAAYGHFGRNEFPWEATDKADALRADAGL

SEQ ID NO: 122622 - protein, 347 aa, Unknown
  Bacterial polypetide isolated from the Sargasso Sea
MSNLKNFLFTSESVSEGHPDKVSDRISDMVVDSYLSGDPFSRVACETLTTTNKVVLAGEVRGPEIKENDLIEKVRHCIKDIGYDQDGFTWKEATKIESHLHSQSSDIAMGVDSSGNKDEGAGDQGIMFGYACNETEELMPAPIHYSHKILRLMAEDRKSGKLKNIEPDSKSQVTFEYVDGKPTKVKSVVISSQHSADVNQTQVRDLLRPYMINSIPKNFLDGFNEEEFYVNPTGNFVIGGPDGDCGLTGRKIIVDTYGGAAPHGGGAFSGKDPTKVDRSAAYAARYIAKNVVASKIANKCLIQLAYAIGVSKPLSIYVDLFDNDVEKNKFVVEKINDNFNLSPRGIE

SEQ ID NO: 122623 - protein, 214 aa, Unknown
  Bacterial polypetide isolated from the Sargasso Sea
EYKDGMPAAVTSVVISTQHSKDVNLAKVKELCMPYIERSIPKNLLGSLDEKEIYINPTGNFVIGGPDGDSGLTGRKIIVDTYGGAAPHGGGAFSGKDPTKVDRSAAYASRYLAKNVVASKIADKCLIQLAYAIGVSKPLSIYVDLFDNDEDKNIHVEKLIKENFDLSPRGIREMLGLNKPIYEKTAAYGHFGRIPEADGSFSWEKIDKSGVFSK

SEQ ID NO: 122624 - protein, 391 aa, Unknown
  Bacterial polypetide isolated from the Sargasso Sea
MGDQSRNYFFTSESVSEGHPDKICDRISDTILDAYLSLDKNSRVAVETLVTTNLVVISGEIRSTKKISDSEIESLSRNAIKEIGYDFGDFNHENVKIMIQLHEQSPDIARGVDAVGDNSEGAGDQGIMFGYACNETKELMPATLSFSHKILKDLAYKRKNNIITGILPDSKSQLTLFYENDKPKYIDSIVVSSQHTEETTQEYLHQEINRLCKKILPDEWYTDDTKLLVNPTGKFVIGGPVGDTGLTGRKIIVDTYGGASPHGGGAFSGKDPTKVDRSAAYAARYLSKNIVHAGISERCTIQLSYAIGVSEPLSIFVDLHDKNNVDTNRVEKFIRDRFDLSPRGIIDMLGLSNPIFSETSSYGHFGREPNDKGCFTWENLDISSEFKNELL

SEQ ID NO: 122625 - protein, 142 aa, Unknown
  Bacterial polypetide isolated from the Sargasso Sea
MGRKIIVDTYGGAAPHGGGAFSGKDPTKVDRSAAYASRYLAKNIVMSKIADKCLIQLAYAIGVSKPLSIYVDLFDNDEEKNMHVEKLIKENFDLSPRGIREMLGLNKPIYEKTAAYGHFGRTPDDDGSFSWEKTDKSGVFSK

SEQ ID NO: 122626 - protein, 252 aa, Unknown
  Bacterial polypetide isolated from the Sargasso Sea
MKKNFLFTSESVSEGHPDKVCDRISDMVVDSFLASEPQARVACETLTTTNKVVLAGEVRGPELKEEELISKVRDCIKDIGYDQDGFSWRDQTKIETHLHSQSADIAMGVDSAGNKDEGAGDQGIMFGYACNETDVLMPAPIHYSHKILRLMAEDRKSGKLNGIEPDSKSQITIEYKDGMPSAVTSVVISTQHSKDVNLAQVKELCMPYIERSIPKNLLGSLDEKEIYINPTGNFVIGGPDGDSGLTGKENYC

SEQ ID NO: 122627 - protein, 116 aa, Unknown
  Bacterial polypetide isolated from the Sargasso Sea
MSEYKVFTSESVSEGHPDKIADQISDAVLDAMLKDDPDSRVACETLIKDNLVVLAGEITSRSEPDLEALTRKVILDIGYNSLEVGCDGNTCEVVNAIGKQSQDIAQGVNEGEGEDL

SEQ ID NO: 122628 - protein, 279 aa, Unknown
  Bacterial polypetide isolated from the Sargasso Sea
YASNETESFAELAGSFMPLPAALAQRLTTKMSQCMKNGELSWARPDSKSQVTIEYNEDGTISGVETVVIAIQHDDLATERFDGDIGEEYEFIVSEINDKVIDQVIPASLINEKTRRIINGTGRFVLGGPHADAGLTGRKIIVDTYGGMGRHGGGAFSGKDPSKVDRSAAYASRWAAKHVVASGMAEKCEIQLAYAIGVSDPVSVFVNTMGTGTVADQELAKRVNEAFDFRPQAIIEELSLRQPIYSSTASGGHFGRKYGENGEFSWERLNQEKIELLKS

SEQ ID NO: 122629 - protein, 383 aa, Unknown
  Bacterial polypetide isolated from the Sargasso Sea
MSYIFTSESVSAGHPDKVCDQISDAVLDAYLAEDPNSRVACETMIKNNMVYIAGEITSLGSPDLEPVVRKTINDIGYDTDEYGFNGDTCEFTNLVFEQSPDISQGVTEGEGENLEQGAGDQGLMFGYACTETESLMPLPIDLSHRLVKKQADVMKANGLSWLRPDAKSQVSAIYSDDGKTIEGLSAIVLSTQHDEDVTQDDIKEGVMEEIIKPIVPAEWILDSTKIYINPTGKFVIGGPVGDCGLTGRKIIVDTYGGMARHGGGAFSGKDPSKVDRSAAYAARYVAKNIVAAGLADYCEIQVSYAIGVAKPTSINVNTFNSEKISKEAIEKIVEEKFDLRPKSLINMLDLKRPIYLPTAAYGHFGRTDIDLSWEKTDKASEIS

SEQ ID NO: 122630 - protein, 387 aa, Unknown
  Bacterial polypetide isolated from the Sargasso Sea
MKKNFLFTSESVSEGHPDKVCDRISDMVVDSFLASEPQARVACETLTTTNKVVLAGEVRGPELKEDELISKVRDCIKDIGYDQDGFSWRDQTKIETHLHSQSADIAMGVDSAGNKDEGAGDQGIMFGYACNETDVLMPAPIHYSHKILRLMAEDRKSGKLNGIEPDSKSQITIEYKDGMPSAVTSVVISTQHSKDVNLAQVKELCMPYIERSIPKNLLGSLDEKEIYINPTGNFVIGGPDGDSGLTGRKIIVDTYGGAAPHGGGAFSGKDPTKVDRSAAYASRYLAKNVVASKIADKCLIQLAYAIGVSKPLSIYVDLFDNDEEKNMHVEKLIKENFDLSPRGIREMLGLNKPIYEKTAAYGHFGRIPEDDGSFSWEKTDKSGVFSK

SEQ ID NO: 122631 - protein, 63 aa, Unknown
  Bacterial polypetide isolated from the Sargasso Sea
EKISKEAIEKIVEDNFDLRPKSLINMLDLKRPIYLPTAAYGHFGRTDIDLSWEKTDKASEISQ

SEQ ID NO: 122632 - protein, 315 aa, Unknown
  Bacterial polypetide isolated from the Sargasso Sea
MYKTAETVSPGHPDKIADLISDYVLTEALSNNSKSRVAVETFLTGTTYGGLVVVGGEISDIAKIDDKGIEKIVKDALAKTIKTSFEDFQLDSLKIQNELTPQSEEIRSAVEDDEDLGAGDQGIMVGYATNETESFMPPTFDISRNIQMALWEIQNNDEKLDLDSKVQVTTGGGETKVVISTQHKKDIDIDELRINLEDMITKYVDGKFQFDLNPSGSFVKGGPAGDTGLTGRKIVVDAYGPTVPVGGGAFSGKDPSKVDRSAAYAARHLAKNIVAHNLADKCQIRVAYAIGKAEPYELSVDTYGSQKEKDSVLND

SEQ ID NO: 122633 - protein, 334 aa, Unknown
  Bacterial polypetide isolated from the Sargasso Sea
LAGEVRGPEIKKEDLIQKVRDCIKDIGYDQDGFSWKDTTKIETHLHSQSADIAMGVDSSGNKDEGAGDQGIMFGYACNETDVLMPAPIHYSHRILRLMAEDRKSGKLKGIEPDSKSQITIEYKDGVPNEVKSVVISTQHSKDVNLAKVKELCMPYIERSIPKNLLGNLDEKEIYINPTGNFVIGGPDGDSGLTGRKIIVDTYGGAAPHGGGAFSGKDPTKVDRSAAYASRYLAKNVVASKIADKCLIQLAYAIGVSKPLSIYVDLFDNDDEKNKHVEKLINDNFDLSPRGIREMLGLNKPIYEKTAAYGHFGRDPGADGSFSWEKTDKADVFNK

SEQ ID NO: 122634 - protein, 237 aa, Unknown
  Bacterial polypetide isolated from the Sargasso Sea
MADDRKSGKLKNIEPDSKSQITIEYKDGKPASVKSVVISTQHSPDVNQAQVRDLVKPYIERSIPKNLVNGLDENEIYVNPTGNFVIGGPDGDSGLTGRKIIVDTYGGAAPHGGGAFSGKDPTKVDRSAAYASRYLAKNVVASKIADKCLIQLAYAIGVSKPLSIYVDLFDNDEEKNRHVEKLIQENFDLSPRGIREMLGLNKPIYEKTSAYGHFGRDPESNGSFSWEKTDKSDVFNK

SEQ ID NO: 122635 - protein, 169 aa, Unknown
  Bacterial polypetide isolated from the Sargasso Sea
GFLDEKEIYINPTGNFVIGGPDGDSGLTGRKIIVDTYGGAAPHGGGAFSGKDPTKVDRSAAYASRYLAKNVVASKISDKCLIQLAYAIGVSKPLSIYVDLFDNDEEKNKHVEKLINENFDLSPRGIREMLGLNKPIYQKTAAYGHFGRVPESDGSFSWEKTDKSAVFAK

SEQ ID NO: 122636 - protein, 144 aa, Unknown
  Bacterial polypetide isolated from the Sargasso Sea
MSYIFTSESVSAGHPDKVCDQISDAVLDAYLAEDPNSRVACETMIKNNMVYIAGEITSTGSPDLEPIVRKTISDIGYDTDDYGFNGETCEFTNLVFEQSPDISQGVTEGEGENLEQGAGDQGLMFGYACTETDSLMPLPIDLSH

SEQ ID NO: 122637 - protein, 233 aa, Unknown
  Bacterial polypetide isolated from the Sargasso Sea
MKKDYLFTSESVSEGHPDKVCDRISDMVVDTYLAAEPQSRVACETLTTTNKVVLAGEVRGPEIKKEDLIEKVRHCIKDIGYDQEGFTWKEATSIESHLHAQSADIAMGVDSSGNKDEGAGDQGIMFGYACNETDVLMPAPIHYSHKILRLMAEDRKSGKLKNIEPDSKSQITIQYKDGKPSSVKSVVISTQHSADVNQADVRDLVKPYIERSIPKELLNSLDEKEIYVNPTGN

SEQ ID NO: 122638 - protein, 266 aa, Unknown
  Bacterial polypetide isolated from the Sargasso Sea
AGDQGLMFGYACSETPVLMPAPINLSHELVLKQSEVRKNGELSWLRPDAKSQVSVVYKDDRKTVDYVSAIVLSTQHDEDISQDEIKAKVREKIINPIIPTEWIKEDTKIYINPTGKFVIGGPVGDCGLTGRKIIVDTYGGMARHGGGAFSGKDPSKVDRSAAYACRYVAKNIVAAGLAERCEVQVSYAIGIAEPTSITVDTLGTGNLSENEISQIVRDNFDLRPKNLINLLDLKRPIYKNTASYGHFGRENKDFSWENTDISSQIK

SEQ ID NO: 122639 - protein, 385 aa, Unknown
  Bacterial polypetide isolated from the Sargasso Sea
MSEYKIFTSESVSEGHPDKMADQISDAVLDAMLKDDAESRVACETLVKDNLVVLAGEITSRSEPDLEALTRKVILDIGYDNIDVGCDGNTCEVVNAIGKQSQDIAQGVNEGEGEDLEQGAGDQGLMFGYATNETEVLMPAPITYSHRLVEQQAFIRKSNKLSWLRPDAKSQVSFVYGEDGKPQSISAVVLSTQHDPNVSQEDLKEGVMEEIIKPILPSNWLNEDTKYFINPTGRFEIGGPVGDCGLTGRKIIVDTYGGMARHGGGAFSGKDPSKVDRSAAYAGRYVAKNIVAAGLADRCEIQVSYAIGVAEPTSISVNTFGTSKIDEEKISDLIREHFDLRPMQLINMLNLKRPIYQSTAAYGHFGREEAAFTWEKTDKVEALKG

SEQ ID NO: 122640 - protein, 80 aa, Unknown
  Bacterial polypetide isolated from the Sargasso Sea
MSDFIFTSESVTEGHPDKICDQISDAVLDALLTEDPESRVACETVVNTGLCLLTGEITSKAKVDYIKLVRNVIKEIGYEG

SEQ ID NO: 122641 - protein, 300 aa, Unknown
  Bacterial polypetide isolated from the Sargasso Sea
MEDNKYLFTSESVSEGHPDKVCDRISDMVVDSYLTLDPFSRVACETLTTTNKVVLAGEIRGPKIEKEEIIKKVRECIKDIGYDQKGFSWKTANIETFLHEQSADIAMGVDSKDNKDEGAGDQGIMFGYACKETDDLMPAPIYFSHKILRLMADDRKKGILKGIEPDSKSQVTMLYQDNKPTKVTSVVISTQHSRDLSQEQVKDLIVPYIKKSIPEKYVRDLDSQEIYINPTGQFIIGGPDGDTGLTGRKIIVDTYGGAAPHGGGAFSGKDPTKVDRSAAYAARYLSKNIVSAGISEKCLI

SEQ ID NO: 122642 - protein, 62 aa, Unknown
  Bacterial polypetide isolated from the Sargasso Sea
MSYIFTSESVSEGHPDKVCDQVSDAILDSYLAQDPNSRVACETLIKNNTVIVAGEITSNGMP

SEQ ID NO: 122643 - protein, 172 aa, Unknown
  Bacterial polypetide isolated from the Sargasso Sea
IPSNLLDNDTKIIVNPSGRFVIGGPVGDAGLTGRKIIVDTYGGAAKHGGGAFSGKDPTKVDRSAAYAARHIAKNILETKIASKAEVQLSYAIGKAEPVSIMVNTFGTGKVKDSVIESAVKKVFDLRPSSIISRLELRNPIYQQTATYGHFGRNDLNLPWERTELAKDLEKAF

SEQ ID NO: 122644 - protein, 190 aa, Unknown
  Bacterial polypetide isolated from the Sargasso Sea
QSQVKDIVRPYLEKAIPKELLSDLKDEEFYVNPTGQFIIGGPDGDSGLTGRKIIVDTYGGAAPHGGGAFSGKDPSKVDRSAAYAARYVAKNIVASKIAKKCLIQLAYAIGVSKPLSIYVNLFDGDLEKSKHVEKLVKDNFDLSPRGIREMLSLNKPIYECTSAYGHFGRDPKSDGSFSWEKTDKIDIFKK

SEQ ID NO: 122645 - protein, 142 aa, Unknown
  Bacterial polypetide isolated from the Sargasso Sea
MGRKIIVDTYGGAAPHGGGAFSGKDPSKVDRSAAYAARYVAKNIVASKISDKCLIQLAYAIGVSKPLSIYVNLYDGNEEKSKKVEKLIKENFDLSPRGIREMLSLNRPIYERTAAYGHFGRKPGSDGSFSWEKTDKVDIFKK

SEQ ID NO: 122646 - protein, 416 aa, Unknown
  Bacterial polypetide isolated from the Sargasso Sea
MSYLFTSESVSEGHPDKIADQISDALVDNFLAFDKNSKVACETLVTTGQVILAGEVKSTVYLNIQAIAREVIKKIGYKKSEYLFDGNSCGILSYLHEQSTDINRGVDKKNIEDQGAGDQGIMFGYATNETENYMPLTLDLSNKILEELAELRRENTQIKYLRPDSKSQVTIQYSDDNKPEKIKTIVISTQHDDFDEDDTMLKKIKSDMISILIPRILKKYPNYKKFFNKEIEYFINPTGKFVIGGPHGDSGLTGRKIIVDTYGGKGAHGGGAFSGKDPSKVDRSAAYAARHIAKNLVAAGVSDECLVQISYAIGIAKPTALYVNTNGTSKTKLSDSQISKIVLELFDLRPYYIEQRLKLRNPIYFETASYGHMGREPKFVKKSFTSSSGDSKEIEVELFTWEKLDYVDKIKEKIKT

SEQ ID NO: 122647 - protein, 161 aa, Unknown
  Bacterial polypetide isolated from the Sargasso Sea
GTGRFVFGGPEADTGLTGRKIIVDTYGGYAPHGGGAFSGKDPSKVDRSAAYMARYIAKNFVAAGLATKCEVQLSYSIGVAEPTSFYVKSFGTSEFSDKELTEIAKSVFKLKPGEIINHLNLKYPRYRNTAANGHFGREDELFTWEKTDKVNEIQSTVSERG

SEQ ID NO: 122648 - protein, 134 aa, Unknown
  Bacterial polypetide isolated from the Sargasso Sea
MNKYTFTSESVSEGHPDKVCDAISDAILDEYLNQDANSRVACETLATTGTVFVSGEVTSAGTVDVQAIVKNTLNDIGYYDEAYGMDAKSVKVISMLDKQSPEIAQGVNEGSGLHGEQGAGDQGLMFGFACNETK

SEQ ID NO: 122649 - protein, 353 aa, Unknown
  Bacterial polypetide isolated from the Sargasso Sea
SRVACETLVTTGLAVIAGEITSRGTIDYQQVVRDVIREVGYTDDEMGIAADTCSVLVAVGKQSGDIAMGVNEDTDTGKDIGAGDQGLMFGYACNDTPELMPLPIALSHRILNRLADARLGGDVDWLRPDSKSQVTVEYDGDKPIRIDTIVVSTQHAPHVSNEEIQTYIIEKIIKPELPDDLDTSDITYHINPTGRFVVGGPHGDAGLTGRKIIVDTYGGWGRHGGGAFSGKDPTKVDRSAAYMARYVAKNIVAAGLADRCELQLAYAIGVTEPVSVHIDTAGSGKVDDERLCALIREHFPLTPRGIIEHLDLRRPIFRRTAAGGHFGRDEFPWEKTDKASALAEAASTATAAN

SEQ ID NO: 122650 - protein, 182 aa, Unknown
  Bacterial polypetide isolated from the Sargasso Sea
MSYIFTSESVSEGHPDKICDQISDAILDECLKQDRESRVACETLVKNNTVVVAGEISSKASIDYEKIARNVVKSIGYINEELGFSYDSFEFINLLSQQSADIAKGISNLGSGDQGLMFGYACKETKELMPLPISLAHKLTMKHAEVRRSSDNGLLPDAKSQVSVEYDSNYRPKRIDSVVFSS

SEQ ID NO: 122651 - protein, 239 aa, Unknown
  Bacterial polypetide isolated from the Sargasso Sea
MKKNYLFTSESVSEGHPDKVCDRISDMVVDSYLGAEPQSRVACETLTTTNKVVLAGEVRGPEIKKDDLIQKVRECIKDIGYDQDGFSWKDTTKIETHLHAQSADIAMGVDSSGNKDEGAGDQGIMFGYACNETDVLMPAPIHYSHRILRLMAEDRKSGKLKGIEPDSKSQITIEYKDGVPNAVKSVVISTQHSKDVDLAKVKELCMPYIEKSIPKNLLGNLDEKEIYINPTGNFVIGGP

SEQ ID NO: 122652 - protein, 275 aa, Unknown
  Bacterial polypetide isolated from the Sargasso Sea
KDEGAGDQGIMFGFACKDTETLMPAPIHYSHQILYKMALARKDGSASGLEPDSKSQVTMFYENGKPTKVTSLVISSQHKKGLSPADVKEIVKPYVYECIPNELLEGLKDEEFYVNPTGNFVIGGPDGDSGLTGRKIIVDTYGGAAPHGGGAFSGKDPSKVDRSAAYAARYLAKNVVAADLADQCTIQLSYAIGVSKPLSVYVNTNGTNKVDEQKIEKSVQDLFDLSPRGIREHLKLTNAIYVPTSAYGHFGREPSDKGHFTWEKTDLVDALKGIA

SEQ ID NO: 122653 - protein, 387 aa, Unknown
  Bacterial polypetide isolated from the Sargasso Sea
MSDLKNYLFTSESVSEGHPDKVSDRISDMVVDCYLSGDPFSRVACETLTTTNKVVLAGEVRGPEIKKDELVHKVRNCIKDIGYDQKGFTWKEETKIESHLHSQSADIAMGVDSSGNKDEGAGDQGIMFGYACNETEMLMPAPIHYSHKILRLMAEDRKSGKLKNIEPDSKSQVTFEYLDGKPNKVKSVVISSQHSPDVNQNEVRELLRPYLLKSIPENFLKGFNEEEFYVNPTGNFVIGGPDGDCGLTGRKIIVDTYGGAAPHGGGAFSGKDPTKVDRSAAYAARYIAKNIVASKVADKCLIQLAYAIGVSKPLSIYVDLFDNDLEKNKFVKNKISENFDLSPRGIREMLNLNKPIYEKTAAYGHFGRAPESNGAFSWEKTDKMSFF

SEQ ID NO: 122654 - protein, 346 aa, Unknown
  Bacterial polypetide isolated from the Sargasso Sea
LMTNNKYFFTSESVSEGHPDKVCDRISDMVVDAYLSKEPYARVACETLATTNKVVLAGEIRGPKINNEDLIQKVRECIKDIGYDQEGFSWKTAKIETHLHEQSSDIAMGVDSKGNKDEGAGDQGIMFGYACKETKDLMPAPIHFSHKILRLMAEDRKKGVLKGIEPDSKSQVTMLYENGIPKIVTSIVISTQHSKDLDQKKVKDLVYPYITKSIPKDLIKNLDDKNIYVNPTGQFIIGGPDGDTGLTGRKIIVDTYGGAAPHGGGAFSGKDPTKVDRSAAYVARYVAKNIVASGASDKCLIQLAYAIGVSKPLSVYVKLSDKDKDKTEDIKKKIDQNFDLSPRELE

SEQ ID NO: 122655 - protein, 266 aa, Unknown
  Bacterial polypetide isolated from the Sargasso Sea
GDQGLMFGYASDETEFLMPAPIYYSHRLVEKQTELLRSKKVPWLRPDAKSQVTFQYENDKPKFIDTIVLSTQHSSDIPLEELREFVKNEIIFKVIPSSLINNTTRIFINPTGNFVEGGPLGDSGLTGRKIIVDTYGGMARHGGGAFSGKDPSKVDRSAAYAARYIAKNIVAAKLATRCEIQLSYAIGVAEPTSTLVNTFGTGTISDEKISSIISNVFDLTPYGIISSLDLLNVKYKPTAGFGHFGRNDKNFTWEQTDKIDILQSAI

SEQ ID NO: 122656 - protein, 373 aa, Unknown
  Bacterial polypetide isolated from the Sargasso Sea
MSYIFTSESVSEGHPDKICDQISDAILDECIKQDKYSRVACETMIKNNHVIVGGEITSKADINYKEVAKSVIKDIGYNNKEMGFSHESINFKSLIGKQSEDIHQGISKGDILGSGDQGLMFGYACKETKELMPLPISLAHKLMQKHKTIRNINNKLWPDAKSQVSVQYSDNYEPERISAIVFSAQHCPSFDLNNLREFILEEIIRKVIPDELIDDDTKFFINPAGKFSIGGPVGDCGMTGRKIIVDSYGGMARHGGGAFSGKDPSKVDRSAAYAMRQVAKTLVNENLCDYCEVQVSYAIGVENPVSIYTNTFESEKIPLEEINRTINKNFDLTPQGIISDLSLLNPIYLSTAKYGHFGREDQNFSWEKTKNLK

SEQ ID NO: 122657 - protein, 157 aa, Unknown
  Bacterial polypetide isolated from the Sargasso Sea
NTIFQVNPTGNFVTGGPDGDTGITGRKIIVDTYGGYAPHGGGAFSGKDCTKVDRSGAYMARYLAKNIVASGSANNSTVQLSYAIGIKEPVSLYVYCDGKVRNDISEWISQNVDLTPLGIIRKFNLFQLDLSETTNYGHFGKEHLAWENTDISDQLKF

SEQ ID NO: 122658 - protein, 352 aa, Unknown
  Bacterial polypetide isolated from the Sargasso Sea
MSYIFTSESVSAGHPDKVCDQISDAVLDAYLAEDPNSRVACETMIKNNMVFIAGEITSTGSPDLEPVVRQTIKNIGYDNDEYGFNGDTCEFTNLVFEQSPDISQGVTEGEGENLEQGAGDQGLMFGYACTETEALMPLPIDLSHRLVRQQAEVMKSNGLSWLRPDAKSQVSAIYSDDGKTIEGLSAIVLSTQHDEDVTQDEIKEGVMENIIKPIVPQEWILDSTKIYINPTGKFVIGGPVGDCGLTGRKIIVDTYGGMARHGGGAFSGKDPSKVDRSAAYAARYVAKNIVAAGLADYCEIQVSYAIGVAKPTSINVNTFDSEKVSKEAIEKIVEEKFDLRPKSLINMLDLKR

SEQ ID NO: 122659 - protein, 62 aa, Unknown
  Bacterial polypetide isolated from the Sargasso Sea
NRHVEKLINDNFDLSPRGIREMLGLNKAIYEKTAAYGHFGRDPGSDGSFSWEKTDKADIFNK

SEQ ID NO: 122660 - protein, 306 aa, Unknown
  Bacterial polypetide isolated from the Sargasso Sea
DGFHWQTADIQYLLHGQSADIAMGVDSSSDKDEGAGDQGIMFGYACTETPELMPAPIFYSHKILEIMAKGRKDGSLKGLEPDSKSQVTLKYVDGKPSAVTSVVISTQHADGLSPADVKEIVNPALKESIPEELLKNLDDKEYYVNPTGNFVIGGPDGDTGLTGRKIIVDTYGGAAPHGGGAFSGKDPTKVDRSAAYASRYLAKNIVAAGLCDQCTIQLSYAIGVAKPLSIYVNTQGTNKIDEAKIESAIPDIMNLSPRGIREKLQLNKPIYEQTAAYGHFGRTHDSSSGAFSWEALDLVSDFKSLA

SEQ ID NO: 122661 - protein, 122 aa, Unknown
  Bacterial polypetide isolated from the Sargasso Sea
FSGKDPTKVDRSAAYASRYLAKNVVASRISDKCLIQLAYAIGVSKPLSIYVDLFDNDEEKNKYVEKLINENFDLSPRGIREMLELNKPIYEKTAAYGHFGREPGSDGSFSWEKTDKKGIFAK

SEQ ID NO: 122662 - protein, 394 aa, Unknown
  Bacterial polypetide isolated from the Sargasso Sea
MFTFTSESVTEGHPDKVCDAISDAIVDSLLSNDKDSHIACETLATKNLIVVSGEVRSKATVDVEKIVRKTLEEIGYTNTHKGMDNKSVDIMIKLQEQSTEIAQGVDQSEDHEQGAGDQGLMFGYACKETPELMPMPIHLSHRLTERLAKLRKDGTLPWLGPDGKSQVSVDYLNGVPNSISKVVIATQHDDMIDKFGSEELEHNFVEQEVIEKVINPVLEKSGLKSSGSFIVNGTGRFVFGGPDADTGLTGRKIIVDTYGGYAPHGGGAFSGKDPSKVDRSAAYMARYIAKNIVASDLADNCEVQFSYSIGVAEPTSFYVKSFNTGKISDEELTDLAKKVFPLKPGDIISHLKLKHPRYRQTASYGHFGRENDLFTWERIDMVEKLKLELSERNI

SEQ ID NO: 122663 - protein, 99 aa, Unknown
  Bacterial polypetide isolated from the Sargasso Sea
MSYIFTSESVSEGHPDKVCDQISDAILDSYLAQDPNSRVACETLIKNNTVIVAGEITSSGTPNIEEVIRNTVNEIGYNHDDLGFNGNNCEIQKPYSKQS

SEQ ID NO: 122664 - protein, 387 aa, Unknown
  Bacterial polypetide isolated from the Sargasso Sea
MKKNFLFTSESVSEGHPDKVCDRISDMVVDTYLGSEPQSRVACETLTTTNKVVLAGEVRGPEIKKDDLVQKVRDCIKDIGYDQDGFTWKEATKIESHLHSQSADIAMGVDSSGNKDEGAGDQGIMFGYACNETDVLMPAPIHYSHKILRLMAEDRKSGKLNGIEPDSKSQITIEYKDGVPTAVKSVVISTQHSKDVNLAQVKNLCMPYIERSIPKNLLGNLDENEIYINPTGNFVIGGPDGDSGLTGRKIIVDTYGGAAPHGGGAFSGKDPTKVDRSAAYASRYLAKNVVASKIADKCLIQLAYAIGVSKPLSIYVDLFDNDEEKNMHVEKLIKENFDLSPRGIREMLGLNKPIYEKTAAYGHFGRTPENDGSFSWEKTDKSEVFSK

SEQ ID NO: 122665 - protein, 389 aa, Unknown
  Bacterial polypetide isolated from the Sargasso Sea
MKRSYLFTSESVSEGHPDKVCDRISDMVVDTYLSSGDPQTRVACETLTTTNKVVLAGEVRGPSVSKDQIISQVRDCIKDIGYEQDGFHWQNCDIESFLHEQSADIAMGVDSGSNKDEGAGDQGIMFGFACKDTESLMPAPIHYSHQILYKMAQARKDGSASGLEPDSKSQVTMLYENGKPSKVTSLVISSQHKEGLSPEDVKEIVKPYVYECIPNNLLEGLKDEEFYVNPTGNFVIGGPDGDSGLTGRKIIVDTYGGAAPHGGGAFSGKDPSKVDRSAAYAARYLAKNVVAADLADECTIQLSYAIGVSKPLSVYVNTNGTNKVDEQKIEKSVQDLFDLSPRGIREHLKLTNAIYVPTSAYGHFGREPSDKGHFTWEKTDLVEALKGIA

SEQ ID NO: 122666 - protein, 326 aa, Unknown
  Bacterial polypetide isolated from the Sargasso Sea
MRKNYIFTSESVSEGHPDKVSDRISDAVVDHFISKDPFARVACETLTTTNKVVLSGEVRGPVQEDKDEIISKVRECIKDIGYEQDGFHWQTADIQYLLHGQSADIAMGVDSSSDKDEGAGDQGIMFGYACTETPELMPAPIFYSHKILEIMAKGRKDGSLKGLEPDSKSQVTLKYVDGKPSAVTSVVISTQHADGLSPADVKEIVNPALKESIPEELLKNLDDKEYYVNPTGNFVIGGPDGDTGLTGRKIIVDTYGGAAPHGGGAFSGKDPTKVDRSAAYASRYLAKNIVAAGLCDQCTIQLSYAIGVAKPLSIYVNTQGTNKIDE

SEQ ID NO: 122667 - protein, 103 aa, Unknown
  Bacterial polypetide isolated from the Sargasso Sea
MSKTNLFTSESVSEGHPDKVADQISDSIVDAIFKEDSTARVACEAMINTGMVVLSGEITTSANIDYETIARRTIRDIGYTSDAVGFDSDKCEVLISIDKQSPD

SEQ ID NO: 122668 - protein, 377 aa, Unknown
  Bacterial polypetide isolated from the Sargasso Sea
MSFLFTSESVSEGHPDKLCDMISDSILDACLQVDPNARVAVETMVKGTPDSSYIYIGGEVTISSSERVDYEGIARTTAVSIGYDDHSVGMDASDPNLCEIVARITQQSPDISQGVDEGKGLDLAQGAGDQGLMFGYASNETESFEELAGSFMPLPAALAQRLTTKMSQCMKNGELSWARPDSKSQVTIEYNEDGTISGVETVVIAIQHDDLATERFDGDIGREYQFIVSEINEKVIDQVIPSSLMNEKTRRIINGTGRFVLGGPHADAGLTGRKIIVDTYGGMGRHGGGAFSGKDPSKVDRSAAYASRWAAKHVVASGMAEKCEIQLAYAIGVSDPVSVFVNTMGSGTVADQELAKRVNEAFDFRPQAIIEELSLRQ

SEQ ID NO: 122669 - protein, 104 aa, Unknown
  Bacterial polypetide isolated from the Sargasso Sea
MKKNFLFTSESVSEGHPDKVCDRISDMVVDSFLASEPQARVACETLTTTNKVVLAGEVRGPELKEDELISKVRDCIKDIGYDQDGFSWKEQTKIETHLHSQSAD

SEQ ID NO: 122670 - protein, 222 aa, Unknown
  Bacterial polypetide isolated from the Sargasso Sea
DGKSQVTVKYFNGKPVEVTAVVISTQHKEGHDQGQLKKNIIENVILPVIPAEFLTDTTDFHINPTGIFEIGGPQGDCGLTGRKIIVDTYGGMGRHGGGAFSGKDPSKVDRSAAYAARHVAKNVVAAGLASRCEVQVAYAIGVADPVSVSVDTFGTAIIEEEKISMLIQETFDLKPASIIQRLNLLRPIYRQTAAYGHFGRELEDFTWEKTDYAGELRKKAGI

SEQ ID NO: 122671 - protein, 283 aa, Unknown
  Bacterial polypetide isolated from the Sargasso Sea
SGISDNEDELDRQGAGDQGMMFGYACDETEALMPLPIQVANRMAERHAEIRKAGNIPYLRPDGKTQVTFDYEDNKPVRLNTVLVSTQHNDGIDRDAIIRPDLIEHVIRPTIPEEYREDDYTVLVNPTGRFVVGGPVGDAGLTGRKIIVDTYGGIARHGGGAFSGKDPSKVDRSAAYATRWVAKNIVAAGAASRCEVQVAYAIGMARPVSILVETFGTEKVDPVKIEDAIQEIFDLRPAAIINDLDLRRPIYKSTAAYGHFGREEFPWEQVNRADDVRSHLGLN

SEQ ID NO: 122672 - protein, 118 aa, Unknown
  Bacterial polypetide isolated from the Sargasso Sea
MKKDYLFTSESVSEGHPDKVCDRISDMVVDTYLGLEPQSRVACETLTTTNKVVLAGETRGPEIKKDELISKVRDCIKDIGYDQEGFTYKEATKIECHLHSQSTDIAMGVDSSGNKDEG

SEQ ID NO: 122673 - protein, 148 aa, Unknown
  Bacterial polypetide isolated from the Sargasso Sea
MNNLKNFLFTSESVSEGHPDKVSDRISDMVVDNYLANEPQSRVACETLTTTNKVVLAGEVRGPEIKKDELISKVRDCIKDIGYDQDGFSYKEATKIESHLHSQSADIAMGVDASGNKDEGAGDQGIMFGYACNETDVLMPAPIHYSHK

SEQ ID NO: 122674 - protein, 154 aa, Unknown
  Bacterial polypetide isolated from the Sargasso Sea
MKDYIFTSESVSEGHPDKVCDQISDAVLDAYLNEDPNSRVACETMIKNNLVIIAGEITSNGNPDLEPIVRNVINDIGYNDDNLGFNGNTCDFINHITKQSPDIAQGVNEGEGEDLNQGAGDQGLMFGYACNETDSLMPAPIDLSHKLVKKQSEV

SEQ ID NO: 122675 - protein, 116 aa, Unknown
  Bacterial polypetide isolated from the Sargasso Sea
KDPSKVDRSAAYAARYVAKNIVAAGLADYCEIQVSYAIGVAKPTSINVNTFNSEKISKEAIEKIVEDNFDLRPKSLINMLDLKRPIYLPTAAYGHFGRTDIDLTWEKTDKASEISQ

SEQ ID NO: 122676 - protein, 269 aa, Unknown
  Bacterial polypetide isolated from the Sargasso Sea
VQEIRDLMFGYATNETEELMPLPILLAHKLTKKLTDVRKSNELTWVRPDGKSQVSVRYEDDKPQGIEAIVVSTQHSPDITNDEITSQLIEHVIKPVCGNLWNDNIKIHVNPTGKFEIGGPHGDAGLTGRKIIVDTYGGMGRHGGGAFSGKDPSKVDRSACYMCRYVAKNIVAAGLAERCEVQVAYAIGVAEPVSLMVNTFGTNKIDEKKIEELVRNNFDMRPAGIVSELDLKRPIYKKTAAYGHFGRNEPEFSWERTDKAAKLKTESGI

SEQ ID NO: 122677 - protein, 362 aa, Unknown
  Bacterial polypetide isolated from the Sargasso Sea
MSKYVTAETVSPGHPDKIADLISDYVLTKALQNNSSSRVAVETFLTGTKNGGLVLVGGEISEIAAISTDDVIEIVKEALKITIKTSFEDFDLENLSIYNELTPQSEEIRAAVEDDEDQGAGDQGIMVGFATNKTKSFMPPTFDMSRNIQKSLWDLQNSDEMLDLDSKVQVTSGGEKTKVVVSTQHNKDIDMEKLFEKVSDIVASNVESEFELDLNPSGSFVKGGPAGDTGLTGRKIVVDAYGPSVPVGGGAFSGKDPSKVDRSAAYAARHLAKNIVAHKLADDCLVRVSYAIGKADPYELTIETFDTLKVEQSKLDDFVNKFDMKPGAIIERLDLTNVDYRKDTLFSHFGHADRNWENIENI

SEQ ID NO: 122678 - protein, 236 aa, Unknown
  Bacterial polypetide isolated from the Sargasso Sea
MAEDRKSGNLNGIEPDSKSQITIEYKDGKPSAVKSVVISTQHSKDVNLAKVKELCIPYIEKSIPKNLLGNLDENEIYINPTGNFVIGGPDGDSGLTGRKIIVDTYGGAAPHGGGAFSGKDPTKVDRSAAYASRYLAKNVVASGIADKCLIQLAYAIGVSKPLSIYVDLFDNDEEKNIHVEKLINENFDLSPRGIREMLGLNKAIYQKTAAYGHFGREPESNGSFSWEKTDKSGVFK

SEQ ID NO: 122679 - protein, 258 aa, Unknown
  Bacterial polypetide isolated from the Sargasso Sea
MVDQSKNYFFTSESVSEGHPDKICDKISDTILDAYLSEDKDSRVAVETLVTTNLVVISGEVRSKAKISENDIESITRNVIKDIGYNFGDFNYQNVTIMTRLHEQSADIARGVDASGNSSEGAGDQGIMFGYACNETIELMPATLTYSHQILKNLADNRKNNIIKGLLPDSKSQLTLFYENDKPKFIDSIVVSSQHTEDTTQEYLNEQIEILCKDILPSDWYTQDTKLLVNPTGNFVINGPVGDTGLTGRKIIVDTYGG

SEQ ID NO: 122680 - protein, 195 aa, Unknown
  Bacterial polypetide isolated from the Sargasso Sea
STQHDEDVTQDEIKEGVMENIIKPIVPQEWILDSTKIYINPTGKFVIGGPVGDCGLTGRKIIVDTYGGMARHGGGAFSGKDPSKVDRSAAYAARYVAKNIVAAGLADYCEIQVSYAIGVAKPTSINVNTFDSEKVSKETIEKIVEEKFDLRPKSLINMLDLKRPIYLPTAAYGHFGRTDIDLSWEKTDKASEISQ

SEQ ID NO: 122681 - protein, 374 aa, Unknown
  Bacterial polypetide isolated from the Sargasso Sea
VADQISDAILDAIFKQDPRSRVAAETLTNTGLVVLAGEITTNAHVDYIQVARDTIKRIGYDNTDYGIDYKGCAVLVAYDKQSNDIAQGVDHASDDHLNTGAGDQGLMFGYACDETPELMPAPIYYAHRLVERQAQLRKDGRLPFLRPDAKSQVTMRYVDGKPHSIDTVVLSTQHHPDQSETQTKMKASFTEAIIEEIIKPVLPKEWIQDTRYLINPTGRFVIGGPQGDCGLTGRKIIVDTYGGACPHGGGAFSGKDPTKVDRSAAYAARYVAKNIVAAGLARQCQIQVAYAIGVAEPMNITVYTEGTGVIPDDQIAKLVRAHFDLRPKGIIQMLDLLRPIYEKTAAYGHFGREEPEFSWEKTDKAAALRAAAGL

SEQ ID NO: 122682 - protein, 313 aa, Unknown
  Bacterial polypetide isolated from the Sargasso Sea
GVDEADDHEGDPLDRVGAGDQGIMFGYACNETPELMPLPISLAHRLAKRLAEVRHNGSLDYLLPDGKTQVSVVYENDKPVAIDTILISTQHTAEVAGISDEQGIRERITEDLWTHVVEPATADLALKPSREATKYLVNPTGKFVVGGPQGDAGLTGRKIIVDTYGGYARHGGGAFSGKDPTKVDRSAAYAARYVAKCLVASGLAERAEVQLSYAIGVAKPVSILVESFGTGKVSNAELTELVQEHFDLRPGAIIETFGLRNLPQQRGGRFYQDTAAYGHFGRNDLKAPWEDVAAKSEELVKAEAKRIKQGATV

SEQ ID NO: 122683 - protein, 321 aa, Unknown
  Bacterial polypetide isolated from the Sargasso Sea
IEELTRNTIRDIGYVHSDMGFDANSCAVLSAIGKQSPDINQGVDKKDQDPSEQGAGDQGLMFGYASNETDVLMPAPITYSHRLVQQQAKVRKDGTLSWLRPDAKSQLSFVYENGKPVGIDAVVLSTQHCDTISTADLREAVMEHIIKPVLPTEWLSNKTKFFINPTGRFVIGGPMGDCGLTGRKIIVDSYGGMARHGGGAFSGKDPSKVDRSAAYAARYVAKNIVAAGLAERCEIQVSYAIGVAEPTSISVETFGTSKLSEDQLIALIRRHFDLRPYGLIQMLQLERPIYRATAAYGHFGRNEFPWENTDKADILRSEAKI

SEQ ID NO: 122684 - protein, 332 aa, Unknown
  Bacterial polypetide isolated from the Sargasso Sea
LAGEITSASEPDLEALTRKVILDIGYNSLDVGCDGNTCEVVNAIGKQSQDIAQGVNEGEGEDLEQGAGDQGLMFGYATNETEVLMPAPITYSHRLVEQQAFIRKSGKLSWLRPDAKSQVSFVYGDDGKPESISAVVLSTQHDPDVSQEDLKEGVMEEIVKPILPSNWLNANTKYFINPTGRFEIGGPVGDCGLTGRKIIVDTYGGMARHGGGAFSGKDPSKVDRSAAYAGRYVAKNIVAAGLADRCEIQVSYAIGVAEPTSISVNTFGTSTIDENKISDLIREHFDLRPRQLINMLDLKRPIYQATAAYGHFGREESAFTWEKTDKAEALKG

SEQ ID NO: 122685 - protein, 352 aa, Unknown
  Bacterial polypetide isolated from the Sargasso Sea
TSKAEVDFNKLVREVIKSIGYRSASDGGFDANSCAVLVALDQQSSDIAQGVNEAEDHSTDPLDQVGAGDQGIMFGFACDETPELMPLPISLAHRLARRLALVRHQQLIDYLLPDGKTQVSVSYENGVPCFIDTILISTQHKSEVDGITLEEEIQKRIANDLWKFVVEPATEDLPLKPTKESTRFLVNPTGKFVIGGPQGDAGLTGRKIIVDTYGGYARHGGGAFSGKDPTKVDRSAAYAARFVAKALVAANLAKKVEVQLSYAIGVAKPISILVDSFGTGKVSDSELTQLVQDQFDLRPGAIIKAFDLQNLPSIRGGRFYRDTAAYGHFGRTDILLPWEDVSQKAKELSLFK

SEQ ID NO: 122686 - protein, 150 aa, Unknown
  Bacterial polypetide isolated from the Sargasso Sea
GPDGDSGLTGRKIIVDTYGGAAPHGGGAFSGKDPTKVDRSAAYASRYLAKNIVASKIADKCLIQLAYAIGVSKPLSIYVDLFSNDEEKNKHVEKLINENFDLSPRGIREMLGLNKPIYEKSAAYGHFGRVPESNGAFSWENTDKASVFNK

SEQ ID NO: 122687 - protein, 309 aa, Unknown
  Bacterial polypetide isolated from the Sargasso Sea
IDYEKIARNVVKSIGYINEELGFSYDSFEFINLLSQQSADIAKGISNLGSGDQGLMFGYACKETKELMPLPISLAHKLTMKHAEVRRSSDNGLLPDAKSQVSVEYDSNYRPKRIDSVVFSSQHSKDLGLDKLRDLIREEIINKSLPLDLLDNKTKYLINPAGEFNIGGPVGDSGLTGRKIIVDTYGGMARHGGGSFSGKDPTKVDRSAAYALRQIAKSLVSAGLCDYCEVQSSYAIGVIEPTSIFINTFESEKKPIEEIQTIVDESFDLTPAGIINNLNLLEPIYLKTASYGHFGREDQGFSWEDAKDL

SEQ ID NO: 122688 - protein, 200 aa, Unknown
  Bacterial polypetide isolated from the Sargasso Sea
SAIVLSTQHDEDVTQNDIKEGVMEHIIKPIVPSEWILDSTKIYINPTGKFVIGGPVGDCGLTGRKIIVDTYGGMARHGGGAFSGKDPSKVDRSAAYAARYVAKNIVAAGLADYCEIQVSYAIGVAKPTSINVNTFDSEKISKDAIEKIVDEHFDLRPKSLINMLDLKRPIYLPTAAYGHFGRTDIDLSWEKTDKASEISQ

SEQ ID NO: 122689 - protein, 213 aa, Unknown
  Bacterial polypetide isolated from the Sargasso Sea
CQSQVSVEYDSSYKPKRIDSIVFSSQHSKDLRLDKLRELIREEIINKSLPADLLDAETKYLINPAGEFNIGGPVGDSGLTGRKIIVDTYGGMARHGGGCFSGKDPTKVDRSAAYALRQVAKSLVHAGFCSYCEVQSSYAIGVVEPTSIFINTFESEQKPIEEIQKIVSESFDLTPAGIIENLNLLEPIYQKTASYGHFGREDQGFSWEDVKDL

SEQ ID NO: 122690 - protein, 190 aa, Unknown
  Bacterial polypetide isolated from the Sargasso Sea
TLSDVKDFVMEEIIKTTIPKNLLLSTTKIHINPTGNFVIGGPNGDCGLTGRKIIVDTYGGMARHGGGAFSGKDPSKVDRSAAYMARYIAKNIVATKLADKCEIQLSYAIGVAEPTSISVDTFGTSKIENSKISSAVSKVFNLTPKGIIDTLDLLNVKYQPTAAFGHFGRDDKNFTWEQKDKVDILMNELG

SEQ ID NO: 122691 - protein, 239 aa, Unknown
  Bacterial polypetide isolated from the Sargasso Sea
MTNQTYLMTSESVGEGHPDKMADQISDAILDAILDQDKDCRVAVETLVKTGLVVLAGEITTSANVDYEAIARRTIKRIGYDKAELGFDDQSCEVLSAISKQSPDIAMGVDRADKKEQGAGDQGLMFGYATNETKELMPATIQLSHQLVKRHADVRRSGELSWLRPDAKSQVTILFEDGKPKSIDTVVLSTQHDENISMNDIQEGVMEHIIKPILPEGLLTDSTQYLINPTGNFIIGGPV

SEQ ID NO: 122692 - protein, 387 aa, Unknown
  Bacterial polypetide isolated from the Sargasso Sea
MTNKTYLMTSESVGEGHPDKMADQISDAILDAILEQDKGCRVAVETLVKTGLVVLAGEITTSADVDYEAIARRTIKRIGYDREELGFDDQSCEVLSAISKQSSDIAMGVDRADKKEQGAGDQGLMFGYATNETKELMPATIQLSHQLVKRHADVRRSNELSWLRPDAKSQVTILFEDGKPKSIDTVVLSTQHDENISMNDIQEGVMELIIKPILPEDLLTDSTQYLINPTGNFIIGGPVGDCGLTGRKIIVDTYGGMARHGGGAFSGKDPSKVDRSAAYAARYVAKNIVAAGLADRCEIQVSYAIGVAKPTSVRIKTFGTEKVSEEEIVHLVNENFDLTPYGIMNMLDLLQPIYEKSAAYGHFGREDEEFPWEKTDRSDALKGQSGL

SEQ ID NO: 122693 - protein, 387 aa, Unknown
  Bacterial polypetide isolated from the Sargasso Sea
MTNQTYLMTSESVGEGHPDKMADQISDAILDAILEQDKGCRVAVETLVKTGLVVLAGEITTSANVDYEAIARRTIKRIGYDREELGFDDQSCEVLSAISKQSPDIAMGVDRADKKEQGAGDQGLMFGYATNETKELMPATIQLSHQLVKRHADVRRSGDLKWLRPDAKSQVTILFEDGKPKSIDTVVLSTQHDEGVSMNDIHEGVMEHIIKPILPEGLLTDSTQYLINPTGNFIIGGPVGDCGLTGRKIIVDTYGGMARHGGGAFSGKDPSKVDRSAAYAARYVAKNVVAAGLADRCEIQVSYAIGVAKPTSVRIKTFGTEKISEEEIVHLVNENFDLTPYGIMNMLDLLQPIYEKSAAYGHFGREDEAFPWEKTDRSDALKEQSGL

SEQ ID NO: 122694 - protein, 193 aa, Unknown
  Bacterial polypetide isolated from the Sargasso Sea
MTIKIATRSSKLALLQVDEFLDYQSIKDFEIIKVTTKGDKLSNEGKTQFDKLNFISDIEKLILRGEVDVAIHSAKDLPAIQSPTIAQSYFSQEKQIGNDVLIFRKDLDPIFKEHLRIGTSSLRRQMQAKHHLNASNIVSLNGNVTTRLKKLEDGICDCIILAEAGLRRLDLINKELNFIRLHITQTLLRVLWQ

SEQ ID NO: 122695 - protein, 133 aa, Unknown
  Bacterial polypetide isolated from the Sargasso Sea
MSELKKIVVGIRSSKLSKSQTNLLIQELLKQDPNLNRDIFNVKTIKTTGDVNNTHRLDQIGGKGLFIKEIEEQIISGKIDIGVHSLKDVPAQVSYPDLDIICWMQRHKSNDALISNSGKSFMDLPEGSVMAPA

SEQ ID NO: 122696 - protein, 236 aa, Unknown
  Bacterial polypetide isolated from the Sargasso Sea
FVEDIDDLLVDRKIDIAIHSAKDMPAVSNLSDLDEIYISNDLAQRDEKYNSRNDILIFRKNEDPVFEKNMKIGTSSLRRKLQSKFFLEATEIVNLNGNVDTRVKKLNDGEYDCIILAKAGCERLELDLNYSALDHLTNISQGSICLRFNKKRKEILNLLEPFSDDEMKRKIDECNNFLNLINADCNSAVAVDYKDEVLQAEVYGKNEYIKFSALNAEEAFIRFKELDGLRLLNEHS

SEQ ID NO: 122697 - protein, 226 aa, Unknown
  Bacterial polypetide isolated from the Sargasso Sea
LKDLPTIMTEGLCVNAVVKRNDPRDAFLSHSNKSFNDLKPQSKIGTSSFRRYAQLKLLRNDLDIVTMRGNIDTRITKLKNQEYDAIVLSLAGIQMLNLENQVKEIFTTEQMLPALGQGTIALQCKKDDQKTLSILKAINDKETYYCIQAERALLEAIGGDCDTAIGGLAKLSNNKISLKSELFSNDGKKKFESQSAGSLSEAKEIGYKVGKELLKKAGSDFTTQGS

SEQ ID NO: 122698 - protein, 99 aa, Unknown
  Bacterial polypetide isolated from the Sargasso Sea
MTKITIGARGSKLSLAYVAKVKELLLKNNNDLKEENINFKAIKTSGDLNLNKNISEIGGKNLFCKEIEESLLKKEIDIAVHSLKDKGANENESLLIGAY

SEQ ID NO: 122699 - protein, 274 aa, Unknown
  Bacterial polypetide isolated from the Sargasso Sea
KVIDGECDLAVHSWKDLPIEPSNETEIVGTLKRDDMRDVIIVKSTVASLEHKEEIKVLTSSPRRKFNLGQVLPFLIPIKFKRISCYDIRGNIQTRLKKFESGNADAIILAKVALDRLIEFGRDSTKQYIREILNANNWSILPLSIFPTAPGQGAIAIEAKKDNKILKEIIDKINSSNSFANVQKEKLMLSNYGGGCHQKIGASVWDENEIKLISLVGMTHETKLLNTFGPERSNKRSKTKTKNKHLYPKPNDEKFFERKKIDNSKQIQDLKSSL

SEQ ID NO: 122700 - protein, 123 aa, Unknown
  Bacterial polypetide isolated from the Sargasso Sea
MNKKIIIGARGSKLSLSYVEKVKKLFFLASGEEKETEIKIIKTSGDIFHDKKISDIGGKNIFCKEIENQLLDKKVDIAVHSLKDMDSFEESELTIGAYIKRNDPRDGIVLKNGKSFDSVNLTI

SEQ ID NO: 122701 - protein, 296 aa, Unknown
  Bacterial polypetide isolated from the Sargasso Sea
MAFIKIGTRGSDLALWQANFVKSKLQKLGCEVEIHIIKTQGDKIQHLSFDKLEGKGFFTKEIEDALINQSIDLAVHSHKDLETNQPDGLEIVAVSDRENPSDMLLIKKHAYDPTKQLALKENAIVGTSSARRKAILSAFRSDLKIKDLRGNVPTRINKLREEDYDAIVLANAGVSRLKIDLSEFQVEILKPQDFVPAPAQGVLGLQTRTEDEETKKYVSKINNPSVKSIINIERGVLNKLDGGCQLPLGVYAEKINGKYEVWAALGQKDGSLKRVQSSFRSEHDAADSIVSALKKT

SEQ ID NO: 122702 - protein, 123 aa, Unknown
  Bacterial polypetide isolated from the Sargasso Sea
MIKITIGARGSKLSLAYVTKVKELLIKNNSDLREENINFKAIKTSGDLNLNRNISEIGGKNLFCKEVEESLLKKEIDIAVHSLKDMEAIENENLLIGAYVKRNDYRDVIISEKIKNISDLKMV

SEQ ID NO: 122703 - protein, 198 aa, Unknown
  Bacterial polypetide isolated from the Sargasso Sea
MKRKKLIIGSRASKLALIYANRVKDEISKYFNQEIIIKKITTKGDTKIDIRLSEIGGKGLFSKNIEEELLKKNIDIAVHALKDLPSFETKGLKTNCFLKRNSSNEVLISNSKKKLKDLVPGSIIGTSSFRREFQLRNIRKDLNFKLIRGNIDTRIKKLKKGEYDAIILSKAGLISLEMDHEITEEFTNSEIIPSAGQG

SEQ ID NO: 122704 - protein, 189 aa, Unknown
  Bacterial polypetide isolated from the Sargasso Sea
MDNKITIGARGSKLSLAYANKVRSNILSQVPGIDKEIIIKTIKTSGDLFQNKKISEIGGKDLFCKEIEEKLIKKEIDMAVHSLKDMDSKETKGLTIHAYLERNDARETFVSKSFNKISDIKEGKIGSSSKRRELQIKLLNKDIKVESIRGNVDTRIEKIERGEYDGAILALSGLETLNLENHIKQIFSL

SEQ ID NO: 122705 - protein, 170 aa, Unknown
  Bacterial polypetide isolated from the Sargasso Sea
MNKKKIVIGARGSKLAVKYAELAIREIKKIYNGKIELKKIVTKGDKILNLRTSDIGGKGEFVKNIEKELITKKIDIAVHSLKDIPYKETSGLIIKTFLKRNSPKEVLISKNNLSFDKLKKNSVIGTSSFRREFQLKMMRSDLKFKLIRGNIDSRIKKIYEKKYDAIIWPK

SEQ ID NO: 122706 - protein, 175 aa, Unknown
  Bacterial polypetide isolated from the Sargasso Sea
MNKILRIGTRDSELAIYQAKKVQKAIKKLGKNSELKLIKSSGDKNLIQPIYKMGIQGVFTKALDTALINNKIDIAVHSLKDIPTKIPKELLISAILKRDSPYDSLVYSKKFKKFSNKSIIGTGSLRRKAQWLRRYPNHKTQELRGNILTRIKKLNHSFWDGAIFSEAGINRLKIK

SEQ ID NO: 122707 - protein, 173 aa, Unknown
  Bacterial polypetide isolated from the Sargasso Sea
MNKDKIILGSRGSKLAILYAKRAKKSILNKNAGLNDDSIDIKIIKTSGDIHHSKSLSEIGGKGLFSKQIEEDLLNKKIDVAVHALKDLPSNETKGLETNIFLERNDPRDVFISHKYESLLDLKPNSVIGTSSFRRTAQLSTLRKDLIINLMRGNIDTRISKLEQNKFDAIVLS

SEQ ID NO: 122708 - protein, 288 aa, Unknown
  Bacterial polypetide isolated from the Sargasso Sea
MTIKIGSRTSQLALKQVEIAIKRIGVPSFEIVGVDTAGDKRSRENKVQFDKKNFVEDIDDLLVDRKIDIAIHSAKDMPAVSNLSDLDEIYISNDLVQRDEKYNSRNDILIFRRNEDPVFEKNMKIGTSSLRRKLQSKFFLEAKEIANLNGNVDTRIKKLNDGEYDCIILAKAGCERLELDLNYSELDHLTNISQGSICLRFNKKREEILKLLEPFSDDEMKRKINECNNFLNLINADCNSAVAVDYKDEVLQAEVYGKNEYIKFSALNAEEAFIHFKELDGLRLLNEH

SEQ ID NO: 122709 - protein, 170 aa, Unknown
  Bacterial polypetide isolated from the Sargasso Sea
MYKKIIIGTRGSKLSLAYAGRVKNLLISLNPSPKIHINIKIIKTTGDLNVDKKISELGGKNYFCKEIEDQLLNKKIDIAVHSFKDMETFENKNLVVAAYLKRNDPRDILVMKDKDFISPSKNYSIGSSSKRRELQMKLLFKNFATKEIRGNIDTRIEKVKHGKYDGVMLA

SEQ ID NO: 122710 - protein, 245 aa, Unknown
  Bacterial polypetide isolated from the Sargasso Sea
LFCKEIEENLIDKKIDVVVHSLKDMESIEHNELIIGAYIKRNDPRDSLVSNKIKNLSELKDGMLIGTSSRRRELQIKRLNRNITVVHIRGNIDTRIKKVDEKKLDAIILATAGIKSLNLENKIGLIFNTNEMLPAVGQGIIAVQCRKEDKFILSIIKKINDEETSLCAKAEKKMLQTIGGDCQTAVGGLAEINNKNLSLKAQLFSDKGDDNFNFELLGKDVDALNIGKKVGQKLLSLAGDKFKKK

SEQ ID NO: 122711 - protein, 231 aa, Unknown
  Bacterial polypetide isolated from the Sargasso Sea
IDNAVHSLKDMETIEHHKLIIGAYIKRNDPRDSLVSNKIKNLNELRNGMLIGTSSRRRELQMKRLNRNITVVNIRGNIDTRIKKVDEKKLDAVILATAGIKSLNLENKIGLIFKTNEMLPAVGQGIIAVQCRKEDKFILSIIKKINDEKTSLCAKAERKMLQTIGGDCQTAVGGLAEINNKSLSLKAQLFSDKGDDNFNFELLGKDTDALDIGETVGQKLLNLAGDKFKKK

SEQ ID NO: 122712 - protein, 113 aa, Unknown
  Bacterial polypetide isolated from the Sargasso Sea
MSNKIILGSRGSKLSLAYANKVLNLLSGIRTDLNKEVILKTIKTSGDLYDKKKISEIGGKNLFCKEIEDKLISKEIDIAVHSLKDLDSIETEGLVIKAYLKRNDPRDTLVLQN

SEQ ID NO: 122713 - protein, 240 aa, Unknown
  Bacterial polypetide isolated from the Sargasso Sea
KLALIYANKAKLEISKYYKNDIIIKSIVTKGDQEKNKRIAEIGGKGLFSKNIENQLLDKKIDIAVHALKDMPSEETDGLITCCFLKRNFINEVLISKNHKKFAELKKNSVVGTSSFRREFQLKKKRGDLKFKLIRGNIDTRIQKVKDGKYDAILLAKAGVELLNLKKEVSQEFTLDEIIPSAGQGIIAIQCRKEDSKIQKLLKKINHNKTQTAAIAERQVLKSLEGDCDTAVGVISKINN

SEQ ID NO: 122714 - protein, 117 aa, Unknown
  Bacterial polypetide isolated from the Sargasso Sea
MKVVIGSRGSQLALWQSEWAKSQLASTHDGLDVTIEVIKTEGDANLAASFSEIGSKGVFTKEVDEALLSGRTDFSVHSLKDLPTTLLDGLELAAVSPREDVRDAICARDGLSLSDLP

SEQ ID NO: 122715 - protein, 181 aa, Unknown
  Bacterial polypetide isolated from the Sargasso Sea
MQDNIKLATRESPLALRQANIVKEYLLENNVFNKIDIVAMSTSGDKADNETFKRNGGKGLFLKELENALIEGKAHIAVHSMKDVPARVNDGFLITSIMEREDPCDVFISNSYKSIEEISIGTIGSSSPRRQAMIKSLGKNINVVEMRGNINTRLKKLKNSNIDGIILAKAGLRRMEMDSLI

SEQ ID NO: 122716 - protein, 181 aa, Unknown
  Bacterial polypetide isolated from the Sargasso Sea
MIKIGTRGSPLAVRQADGAAHKLVQPYELEIIKSQGDIDQKTPIYEMGGKHVFCSALEESLLAGEVDCCIHSAKDMATEIHQDTEVMGVVWEVGDRRDTLVGPFENFDSIPKGQRIGTSSPRRAKMLQDQRNDLRFVPIRGNIDTRLKLVGKEVDAIIMAKCALDRLKLDPTNSPIPEEEN

SEQ ID NO: 122717 - protein, 182 aa, Unknown
  Bacterial polypetide isolated from the Sargasso Sea
MKKIIIGSRGSKLSLAYAAKVKSLILEKNPELQEKDLSIKSIKTSGDVFFDKKLSEIGGKNLFCKEIEENLIEKKIDVAVHSLKDMDSKENKNLTIGAYVKRNDPRDVFISIKYNNLEELRKDSVIGSSSRRRELQLKLLKKNITVLNIRGNIDTRIKKIEEGKLDGVILAAAGVESLKLQK

SEQ ID NO: 122718 - protein, 211 aa, Unknown
  Bacterial polypetide isolated from the Sargasso Sea
AVSNTSDLDEIYISNDLVQNDEKYNSRNDILIFRKNVHPIFKKNMKIGTSSLRRKLQSKFFLEATEIHNLNGNVDTRIKKLNDGEYDCIILAKAGCERLELDLNYLELEHLTSISQGSICLRFNKKSREVLKLLEPFNDNEMKRKIKECNNFLNLINADCNSAVAVDYMDEVLQAEVYGKKEFISFSALNAEEAFMRFQELDGLRLLNEHS

SEQ ID NO: 122719 - protein, 178 aa, Unknown
  Bacterial polypetide isolated from the Sargasso Sea
MNKKIIIGARGSKLSLSYAERVKKLFFSASNQKIEIDIQTIRTSGDIFHDKKISDIGGKNIFCKEIERQLLEKKIDIAVHSLKDMDSFEENNLIVGAYLKRNDPRDVIILKKDRSLNSDKLTIGSNSKRRELQLKLYFKNITCKNIRGNIDSRISKVKKGEYDGVILALAGIQTLNLQ

SEQ ID NO: 122720 - protein, 131 aa, Unknown
  Bacterial polypetide isolated from the Sargasso Sea
MQKNKKIRIGLRKSKLSKLQTSDFIDKFLQSNKDIYPEDIEQITISTKGDIHKSHRLDKIGGKGLFVKEIEDHIIEGDIHLGVHSVKDLPSQENNKLKIVCWLERLMPNDVLISNSNKSLKELKKGSVVGT

SEQ ID NO: 122721 - protein, 264 aa, Unknown
  Bacterial polypetide isolated from the Sargasso Sea
LPLDLGRETFLGGSLERADQRDILFVKKNNIEKINKSKSISVLSSSPRRIYNLNEFIKEYLPFNCKKIFFKDIRGNIPTRFEKFILGHEDCMVVAKAAIDRLIHSNMDQFNNLSKNIKEKINECLWTITPLSQNPTSPGQGALGIEVRKDNNEIIEILKKISDTMTIECVNHEREILKKYGGGCHQKIGVSFFPMFFGLMKSEKGETDNGQKFSNWGKYKNNILKKEKISIKNLYPESLKDNKLFFRKEMKESISKINALRKHC

SEQ ID NO: 122722 - protein, 194 aa, Unknown
  Bacterial polypetide isolated from the Sargasso Sea
MGKEIIIGSRGSKLALLYAQMAKDKIIENTELEDDDILIKPITTKGDLIKNKRLSEFGGKGLFSSNIEKELLNKNIDIAIHALKDMPVIESKGLMTETFLERNDPREILLSINKKKFSDLNLKSIIGTSSYRREFQIKKMRPDIVCKLIRGNIDTRIKKLKEGIYDAIVLSYAGVKCLNLDNQISEIFSINKII

SEQ ID NO: 122723 - protein, 152 aa, Unknown
  Bacterial polypetide isolated from the Sargasso Sea
MNKKKIVIGARGSKLATKYAERAIREIKKFYSGKIEIRKIITKGDKILNRRTSDIGGKGEFVKNIEKELISKKIDIAVHSLKDIPYKETPGLILETFLKRNSPKEVLISKNKVTFEKLKKKSIIGTSSFRREFQLKMIRPDLKFKLIRGNID

SEQ ID NO: 122724 - protein, 274 aa, Unknown
  Bacterial polypetide isolated from the Sargasso Sea
MKIKIASRNSKLALRQVELFAKTFSIENYSLKEVSTQGDKMSADGNVLFDKASFVSDIETCLLDETADLAIHSAKDMPAIKTAGLEHLYFLEGTSRKISDLLIFKKGIDAVYKKNMKLGTSSLRRKMQAKHHLHSNDIYPLNGNIDTRLKKLNDGIFDCIILAEAGLSRLDYLLKGHNFIKLNHITCSGQGALSVQWKVGSKIEEFLKPFFASNSSDDLNLGINMERELLRKLEANCNSAISLYVSNGILNGEIYGKKKFINFSGKNVDEIFNN

SEQ ID NO: 122725 - protein, 219 aa, Unknown
  Bacterial polypetide isolated from the Sargasso Sea
MHQKIRIGSRGSDLALWQANFVKKQLKDLGFDSVIEIISTRGDQIQHLSFDKIEGKGFFTKEIEQALIDKKIDLAVHSHKDLETNPPKDLEIVAVSNRENPSELLLINKSCVDKNQFWKMKKNAVVGTSSARRKSQLLFFRKDLKIKDLRGNVPTRIQKLREGHYDAILIANAGVSRLQLDVSDLYSEILSKKWLIPAPAQGVLGIQIRKDNDRLRKIL

SEQ ID NO: 122726 - protein, 305 aa, Unknown
  Bacterial polypetide isolated from the Sargasso Sea
MSKKIVIGSRGSKLALLYAQMAKDKIIKNTNLKDEDIIIKPITTKGDLVKDKRLSEFGGKGLFSNNIEKELLNKNIDIAIHALKDMPALESKGLMTETFLERNDPREILLSIGKKKFSDLNLKSIIGTSSYRREFQIKKMRPDIVCKLIRGNIDTRIKKLKEGTYDAIVLSYAGVKCLNLDNEISEIFSINKIIPSAGQGIIALQCREKDNKIISILKKINHSETYKRAHAERNILKVLEGDCETAVGAHATIDKDKIILEAELFSLDGTVRFYEKKTSTLDKFKQLGIEVGKSLKTKSNNSYKK

SEQ ID NO: 122727 - protein, 304 aa, Unknown
  Bacterial polypetide isolated from the Sargasso Sea
MNKKIIIGARGSKLSLSYAETVKKLFFSASNQKKELEIQTIKTSGDIFHDKRISDIGGKNIFCKEIENQLIEKKIDIAVHSLKDMDSFEENDLVIGAYLKRNDPRDVIVMNKDRSLSSDKLIIGSSSKRRELQFKTYFKNIICKNIRGNIDSRISKVKKGEYDGVILALAGIKILNLENEIKEIFSEEKIIPSAGQGVIAVQCRKDDLENLKILEKINDENTKICALTERSLLKTIGGDCHTAVGVYAKIDKNNITISSQLFSDDGLKSFSIKKSGDKKFPEKLGVSAGKDLLNQSKGNYKKKR

SEQ ID NO: 122728 - protein, 302 aa, Unknown
  Bacterial polypetide isolated from the Sargasso Sea
MKKIIIGARGSKLSLVYVSKVKNLILQNYRDIDIQVKIIKTSGDIYQNVKISEIGGKNLFCKEIEENLLDKNIDIAIHALKDLESVEHENLTIGAYIKRNDPRDILVSNKIKKLSDLNSNVTIGSSSRRRELQLKNINKKINVEEVRGNIDTRIKKLEEKKFDAIILAAAGVKSLNLENKISLVFESKEILPAAGQGIIAVQCRKDDDFILNLIKKTNDKTTSLCAKAERKMLQTIGGDCETAVGGLAEISNNNLKLKAQLFSDSGEESFKYEMTGPENDALIIGETVGKKLLDLAGDKFKN

SEQ ID NO: 122729 - protein, 181 aa, Unknown
  Bacterial polypetide isolated from the Sargasso Sea
MKLGTSSLRRQLQAKHHLNAINIVNLSGNVDTRLEKLSQGEYDCIILAKAGLERLKLLDELHYEVMDWSTASGQGFLCIEVLNDPSGDIYNFLLKSFREINLTLGNNISIERSILEAINAGCNSAISIQTQSNLESENSQSIHLGKIYGVEKYISFSGTTAEKTINDIKNQDGLKLLNEHN

SEQ ID NO: 122730 - protein, 293 aa, Unknown
  Bacterial polypetide isolated from the Sargasso Sea
RASKLALIYANRVKDEISKYFDQEIIIKKITTKGDTEIDIRLSEIGGKGLFSKNIEEELLEKNIDIAVHALKDLPSFETKGLKTNCFLKRNSSNEVLISNSKKKLKDLVPGSIIGTSSFRREFQLRNIRKDLNFKLIRGNIDTRIKKLKNGEYDAIILSKAGLISLEMDHEITEEFTNSDIIPSAGQGTIAVQCREDDHEINEFLKKINHHETSLKVKAEREVLKVLDGDCETAVGTFSEIINNEIFISGELFSIDGRRRYYYKVRSETKKSIEAGKTLGKKLKEQSGGDYKK

SEQ ID NO: 122731 - protein, 119 aa, Unknown
  Bacterial polypetide isolated from the Sargasso Sea
MTKITIGARGSKLSIAYVKKVKELLIQKNNDLREENIDFKAIKTSGDINQNVRLSEIGGKNLFCKEIEEKLLKKEIDIAVHSLKDMESVEDSNLIIGAYVKRNDYRDVIISDKIKRLED

SEQ ID NO: 122732 - protein, 139 aa, Unknown
  Bacterial polypetide isolated from the Sargasso Sea
MNNHNKNTPLIKLGTRGSRLALAQAEEFKTRLAESINVFREPGAVEIVVINTAGDKILDRPLSDVGGKGLFIKEIEKALLEGHIDVAVHSMKDVETCLNPETRIGCILPREEINDAFISNSSEKLMNLSLCERSRYILY

SEQ ID NO: 122733 - protein, 293 aa, Unknown
  Bacterial polypetide isolated from the Sargasso Sea
MNKVLRIGTRDSELAIYQAKKVQKAIKKLGKSSELKLIKSSGDKNLIQPIYKMGIQGVFTKALDTALINNKIDIAVHSLKDIPTKIPKELLISAILKRESPYDGLVFSKKFKKFSDKSIIGTGSLRRKAQWLRRYPNHKTQELRGNILTRIKKLNHSFWDGAIFSEAGINRLKIKDVKYQVLDWMIPSPGQGVIAICSKKKQLKLTKFLTNLNCEKTEMCVKIERNFLNILEGGCKAPIAAFAKIENKKIIFKSGLFSLDGSVAYIENQEIDLYNSKDCGINAAKIILKKGGK

SEQ ID NO: 122734 - protein, 288 aa, Unknown
  Bacterial polypetide isolated from the Sargasso Sea
MTIKIVSRSSKLALAQVQEFIDVFSIKEYELINIKTRGDILSSQGEVLFDKANFVSDIEKSLIEEKADVAIHSAKDMPAEDTEYLNQLFFAKGEERVVSDLLIFRKDTEPVFDINMKLGTSSLRRKMQAKFHLKAKNIMDLNGNIDTRIRKLNEGIYDCIILAEAGLSRLQYLLEDQNYIKLNHLTCSGQGALAAQWKNENKFSDMIISSDISSAAINLNDEINMEKSLLQKLNTSCNSAISLRAQNGLLKGEIFGSKSYISFSGDQIDEVYKDIKENRGLELLNEHH

SEQ ID NO: 122735 - protein, 288 aa, Unknown
  Bacterial polypetide isolated from the Sargasso Sea
MTIRIASRSSKLALKQVEIFSKAFLLEDYKLVEVLTSGDKMSAKGEVMFDKANFVNEIEQMIQKNSVDIAIHSAKDMPAQETEGLKHFYFIETQKRKINDLIIFRNDTDTVFEKNMKLGTSSLRRIMQAKFHMNAKNIQLLNGNIDTRIKKLNDGMYDCIILAEAGLSRLSSLLKKQNYKQLEHITCSGQGVLAVQWKEGSKVGDFIKSSLLFDQMKELNEQIKMERNLLKKLNANCNSAISIFASNGFLQGEIFGRDKFITFSGNNVDQLYKDITANNGLNLLNEHH

SEQ ID NO: 122736 - protein, 294 aa, Unknown
  Bacterial polypetide isolated from the Sargasso Sea
MTVKKLIINQDNTDRRIDNYLLSLYKNVPKSKIYNIIRKGEVRVNSKRIKPSYKLKIDDLVRIPPFLDGPSALNKKISLDLIEKHTTKIIYEDINYIVTNKNNDIAVHSGSKNRIGLIDIFRLKFGNHIELCHRLDKHTSGCLVLAKNKKSVKYFSDLLTKNEIKKIYIAIIKGSFKEKRVIENEIYKNNSLKFKKSKSIFKLVRQLKNTSIVSVDLHTGRTHQIRIHASQINHPILFDKKYGDEIFDSSINFNFKKTLALHSKSIIFKDQNSKIIKATANYPDEFKNLIKALE

SEQ ID NO: 122737 - protein, 289 aa, Unknown
  Bacterial polypetide isolated from the Sargasso Sea
MTIKIGSRTSKLAVKQVEIAMNIIGVPSFEIVGVDTAGDKRSRENKVQFDKKNFVEDIDDLLVDRKIDIAIHSAKDMPAVSNLSDLDEIYISNDLAQRDEKYNSRNDILIFRKNEDPVFEKNMKIGTSSLRRKLQSKFFLEATEIVNLNGNVDTRVKKLNDGEYDCIILAKAGCERLELDLNYSELDHLTNISQGSICLRFNKKREEILNLLEPFSDDEMKRKIDECNNFLNLINADCNSAVAVDYKDEVLQAEVYGKNEYIKFSALNAEEAFIRFKELDGLRLLNEHS

SEQ ID NO: 122738 - protein, 215 aa, Unknown
  Bacterial polypetide isolated from the Sargasso Sea
FYLKESTKDIYTWSSDRIIFRDQNKKKFSSEMILGTSSLRRKMQAKFLLGAEKIFSLNGNIDTRIRKLNSGEYDCIILANAGCTRLGFNLNSYNLDFLTPSAQGLICLQCLKGTDISKMLNNFFDKDKYKIHKIGMDIYKSFLRNINADCNSAISVRSVDNGRIANGEHKLTFQVFGKHEFFSAEKTHSDPQKLIELATEEFYRNNAKKLLDEHN

SEQ ID NO: 122739 - protein, 289 aa, Unknown
  Bacterial polypetide isolated from the Sargasso Sea
MTIKIGSRTSKLALKQVEIAMNRIGVPSFEIVGVDTAGDKRSRENKVQFDKKNFVEDIDDLLVDRKIDIAIHSAKDMPAVSNLSDLDEIYISNDLAQRDEKYNSRNDILIFRKNEDPVFEKNMKIGTSSLRRKLQSKFFLEATEIVNLNGNVDTRVKKLNDGEYDCIILAKAGCERLELDLNYSELDHLTNISQGSICLRFNKKREEILKLLEPFSDDEMKRKINECNNFLNLINADCNSAVAVDYKDEVLQAEVYGKNEYIKFSALNAEEAFIHFKELDGLRLLNEHS

SEQ ID NO: 122740 - protein, 288 aa, Unknown
  Bacterial polypetide isolated from the Sargasso Sea
MTIKIASRSSKLALAQVEEFVQTFSIKEYELINIRTQGDIMSSKGEILFDKAHFVSDIEESLLNGSVDVAIHSAKDMPAKKTAELDHLYFTKENKRFVSDLLIFNKSQGSLFKSHMKLGTSSLRRRLQAKFHLNAKNISNLNGNIDTRIKKLDDGKYDCIILAEAGLKRLEHLLEGKNFVRLNHISCSGQGALAVQWKDNNKFGDLIMSSDVASLYTELNANIELEKSLLKKLKTNCNSAISIKSSQGQINGEIYGIDKFIAFKGTKIETIHKEIVDMGGLKLLNDHN

SEQ ID NO: 122741 - protein, 288 aa, Unknown
  Bacterial polypetide isolated from the Sargasso Sea
MTIKIVSRSSKLALAQVQEFIDVFSIKEYELINIKTRGDILSSQGEVLFDKANFVSDIEKSLIEEKADVAIHSAKDMPAENTKNLNQLFFAKGQTRVVSDLLVFRKDTEPVFNINMRLGTSSLRRKMQAKFHLKAKNIVNLNGNIDTRIRKLNEGSYDCIILAEAGLSRLRYLLEDQNYIRLNHLTCSGQGALAVQWKNENKFSDIIMSADISSSAINLSDEINIEKSLLKKLNTNCNSAISLIARDGLLKGEIFGLKNYISFIGDQVDEVYKDIKENRGLELLNEHH

SEQ ID NO: 122742 - protein, 217 aa, Unknown
  Bacterial polypetide isolated from the Sargasso Sea
AVHSAKDTPAKKTNGIERNFIISRTSKDVLVFKDNNNFDSSMKLGTSSLRRKLQAFHFLKSSNVSGINGNVDTRLEKLYRGDYDCIILAKAGLERLRLLEELNYEEMDWITASGQGTLAVEMVESFHENEELLEINSNIKNKLATNVIEYERNILDRVDAGCNSAIAIESISENSKQIIRGEIYGVKKFITFSGATDIEAIEDIERQNGRRFLNEHN

SEQ ID NO: 122743 - protein, 297 aa, Unknown
  Bacterial polypetide isolated from the Sargasso Sea
MKIATRSSKLALEQTYFFQSWIPKQTTQIVEIKTEGDKKSALGEVLFDKANFVSDIEKCLIKDGADVAIHSAKDMPAFKHKELDHYFFGPRSRSDLLIFRKDIDPVFKKDMKLGTSSLRRKMQAKFYLGAKNVIPISGNVDTRINKLNSGDYDCIILAEAGCQRLKIDFEKLNYIKLDHLTCAGQGVLAVQYKPDNKFAKEFLLEWKQNFLQRVIHDETEMEKRLLEKIGASCNSAIAVRANHEGPKGVDKIIKGEIYGLNEYISFESKSSDVDTAINDAIDMLKNKNGLELLNEHN

SEQ ID NO: 122744 - protein, 92 aa, Unknown
  Bacterial polypetide isolated from the Sargasso Sea
MQDNIKLATRESPLALRQANIVRKYLLDNNVFNKIDIVAMSTSGDKADSETFKRNGGKGLFLKELENALIEGKAHIAVHSMKDVPAIVNDDF

SEQ ID NO: 122745 - protein, 230 aa, Unknown
  Bacterial polypetide isolated from the Sargasso Sea
MTIKIASRSSNLAIAQVEEFIKTFSIKEFELINIRTQGDIMSAKGEILFDKAHFVSDIEDSLLNGSVDVAIHSAKDMPAKKTIGLKHLYFTKENKRFVSDLLIFNNDQGPFFKSNMKLGTSSLRRRLQAKFHLNAKNISSLNGNIDTRIKKLDDGEYDCIILAEAGLKRLEYLLEGKNFARLNHISCSGQGALAVQWKENNKLGDLIMSSDIASLSAELNTNIEMEKSLL

SEQ ID NO: 122746 - protein, 303 aa, Unknown
  Bacterial polypetide isolated from the Sargasso Sea
MQDNIKLATRESPLALRQANIVKEYLLDNNVFNKIDIVAMSTSGDRADNETFKRNGGKGLFLKELENALIEGKAHIAVHSMKDVPARVNDGFLISSIMEREDPCDVFISNSYKSIEEISNGTIGSSSPRRQAMIKSLGKNINVIEMRGNINTRLKKLKNSNIDGIILAKAGLRRMEMDSLITQNLSVESFVPSPGQGVLCIECLSQHSEIMSKIKKIVHLNTEICVSAERIFAAQMDGDCMSPIGAHATIQKDLITITGFVATADGTRYIRNKIEGNKNNYKDLSTKLSNLFIKMGSKGMLKC

SEQ ID NO: 122747 - protein, 297 aa, Unknown
  Bacterial polypetide isolated from the Sargasso Sea
MKIATRSSKLALEQTYFFQSWIPKQPTKIIEIKTEGDKKSAMGEVLFDKANFVSDIEECLIKDGADVAIHSAKDMPAFKHKELDHYFFGPRSRSDLLIFRKDIDPVFKKDMKLGTSSLRRKMQAKFYLGAKNVVPISGNVDTRINKLNSGDYDCIILAEAGCQRLKIDFEDLNYIELGHLTCAGQGVLAVQYKRDNKFAKEFLLEWKQNFLQRVIHDETEMEKRLLEKIGASCNSAIAVRANHEGPKGVDKIIKGEIYGLNEYISFEGKSSDVDAAINDAIDMLQNKNGLELLNEHN

SEQ ID NO: 122748 - protein, 259 aa, Unknown
  Bacterial polypetide isolated from the Sargasso Sea
DLNLNKNISEIGGKNLFCKEIEESLLKKEIDIAVHSLKDMEANENECLLIGAYLKRNDYRDVIISKKIKNISDLSNGVKIGSSSKRRELQLKKINNKISVVNIRGNIDTRINKINDNKLDGVILAAAGVKSLKLDKKISLTFNCEQILPAVGQGIIAVQCRKEDKIKNLIGRINDSATSLCAIAERKMLQTIGGDCDTAIGGLAEIENHNLKLKAQLFSDNGQESFEYELIGREADASFIGKSVGEKLLNLAGEKFKKK

SEQ ID NO: 122749 - protein, 194 aa, Unknown
  Bacterial polypetide isolated from the Sargasso Sea
LPPGSRIGTSSLRRAAQLKNMRPDVEVTSLRGNVPTRLKKLDSEEVDAAVLAAAGLIRLELEDRINLELSTEQMLPAIGQGVLALETRKGDDATLEKLRFMNDEPTEACMIAERKVLETLEGNCQVPLAGFCKFDGNNLHLRALIAQPDGSTIFRAEERARRDDAEELGTRVAIQLLQQGGGALLQNLSAMEER

SEQ ID NO: 122750 - protein, 278 aa, Unknown
  Bacterial polypetide isolated from the Sargasso Sea
IKPALDKEVILKTIKTSGDLFDKKKISEIGGKNLFCKEIEDKLISKDIDIAVHSLKDLDSVETDGLVIQAYLKRNDPRDTLVSSKFKKLSELNGQKIGSSSRRRELQLKQLNRNIKVESIRGNIDTRIKKIKNGEYDGAILALAGLKVLNLEKYAKEIFSLKDFLPTAGQGIVAVQCRAKDDHIKKILKEINHKETETCALAERSFLKTLGGDCDTAVGCTAILNKKDIELKAQLFSDDGTKVFNITKTGKENEPQMLGKLAGEEILKQSGKNFTKKR

SEQ ID NO: 122751 - protein, 223 aa, Unknown
  Bacterial polypetide isolated from the Sargasso Sea
MNKKIIIGSRGSKLAMLYAEKAKDKIIKITDLDDDDIVIKKITTKGDEIKDVRLAEVGGKGLFSNNIEKELQDENIDIAVHALKDMPALETTGLKTESFLERNDPREILITTNKKKLSELKKNSIIGTSSLRREYQIKKIRSDLECKLIRGNVDTRIKKLKDGAYDAVILSYAGIKFLNFENEISEIFSIEQLIPSAGQGIIALQCREDDEEIISVLKKINHN

SEQ ID NO: 122752 - protein, 122 aa, Unknown
  Bacterial polypetide isolated from the Sargasso Sea
MVGHLIKLGTRGSPLALIQAKEVREKLLAAHDGLQVEIVEVSTIGDRIQDRTLAAIGGKGLFTKEIEQALYDGDVDVAVHSAKDMLTEFPPGLVLGPILAREDVRDVLISKSGKVWKTSKLA

SEQ ID NO: 122753 - protein, 249 aa, Unknown
  Bacterial polypetide isolated from the Sargasso Sea
MNKKKIIIGARGSKLAVKYAELAIRKIKKFYNGKIELKKIVTKGDKILNRRTSDIGGKGEFVKNIEKELIAKKIDIAVHSLKDIPYKETPGLIIKTFLKRNSPREVLISRDNLSLEKLKKNSIIGTSSFRREFQFKAMRPDLKFKIIRGNIDSRIKKIYEKKYDAIILAKAGLKSLKMTSLITQEFDCDNIIPSAGQGIISLQSRKNDNKINKLLEKVNDKNTRIRAKTERQVLKILKGDCSTAVGIYS

SEQ ID NO: 122754 - protein, 87 aa, Unknown
  Bacterial polypetide isolated from the Sargasso Sea
MKLDNIDKLRIGTRSSPLAIAQTNLVIDKLESAYPSIRSIIEINKIKVSGDKYKNRPLRNVGGKGLFTKEIDQAVIDGEVDIAVHSM

SEQ ID NO: 122755 - protein, 190 aa, Unknown
  Bacterial polypetide isolated from the Sargasso Sea
MKKIIIGARGSKLSSAYVLKVKNLLLQSHRDIDFEIRIIKTSGDLHQNIKISEIGGKNLFCKEIEENLLNKNIDIAIHSLKDMESIENEYLTIGAYIKRNDPRDILVSNKIKKLSDLNSKVTIGSSSRRRELQLKKINKNINIENIRGNIDTRIKKIEEKKFDAIILAAAGVKSLNLENKISLIFESEEI

SEQ ID NO: 122756 - protein, 268 aa, Unknown
  Bacterial polypetide isolated from the Sargasso Sea
MTDKKRFIIGSRGSKLSLAYSYHVKNLLIKSSSQFDETSVEIKIIKTSGDIFQNKKISDIGGKGVFCKQIEEELLDSKINLAVHSLKDLPTQMTEGLCVNAVVKRNDPRDAFLSYSSKSFKELKPQSKIGTSSFRRHAQLNLLRNDLEIISMRGNIDTRITKLKNKEYDAIVLSLAGIQMLNLNDQVKEVFTIQQMLPAIGQGVIALQCKKDDQKTLNILKEINDKETYYCIEAERALLEAIGGDCDTAIGGLAQLSNDIISLKSELF

SEQ ID NO: 122757 - protein, 117 aa, Unknown
  Bacterial polypetide isolated from the Sargasso Sea
MAYKKKLIIGSRGSRLSLAYSAHVKNLLLKSNLQLDENSIEIKIIKTSGDIFPNKRISDIGGKGVFCKQIEEELLDSKIDLAVHSLKDLPTQMTEGLCVNAVVKRNDPRDAFFSNSS

SEQ ID NO: 122758 - protein, 190 aa, Unknown
  Bacterial polypetide isolated from the Sargasso Sea
MKKKIIIGTRGSKLALIYAKIAEKNINKFKSRFSIKSVSIKKVITKGDRIQNKRLSDVGGKGLFTKKIENELLNKKIDIAVHALKDIPSKVSKKFYTNCFLKRNDPREVLITRKKQKFKNLPKNSIVGTSSFRREYQLKRIRKDLVYKLIRGNVDTRIKKLNNKIYDAIILSYAGLKSKKMQKKISQVFS

SEQ ID NO: 122759 - protein, 116 aa, Unknown
  Bacterial polypetide isolated from the Sargasso Sea
MTDKKKFIIGSRGSKLSLAYSNHVKALLVKSHSQFDDSSIEIKIIKTSGDIFKNKRISEIGGKGVFCKQIEEELLDSKIDLAVHSLKDLPTQMTEGLCVNAVVKRNDPRDAFLSYS

SEQ ID NO: 122760 - protein, 220 aa, Unknown
  Bacterial polypetide isolated from the Sargasso Sea
MTIKIASRSSKLALAQVEEFVNHFQISDYKIIKVKTEGDKKSARGETLFDKSHFVTDIQKCLLNDEADIAVHSAKDTPAKETEGINRTFLISKTPKDILILKENIDFNQAMRLGTSSLRRRLQAKHYLGSSSVFDLSGNIDTRLEKLYRGEYDCIILAKAGLQRLDLLKELNYMDMEWITASGQGTLAIEYPNNKNLLNLEENLDKSIDDSIRAQRSVLE

SEQ ID NO: 122761 - protein, 213 aa, Unknown
  Bacterial polypetide isolated from the Sargasso Sea
MTTTIRLATRKSRLALEQANLVIDALKRINQQLSIELVPIETEGDIDRETPLTVLGGRGVFVKAVEQALLDDVADIAVHSLKDVPTEEVSGLIFPAITERADPSDVLVANNKYKLAELSAGCKIGTSSRRRAVLLSAIRPDLEVVDIRGNIDTRIQKVHDGVVDAVILAASGIERLGMDDEISQRFDPQEFIPAPGQGALAVQCRDNDKDIKS

SEQ ID NO: 122762 - protein, 241 aa, Unknown
  Bacterial polypetide isolated from the Sargasso Sea
DIMGGKGLFTKEIEEHIIMDEIDIGIHSMKDVPAVSNRNALEIICWMKRFTNNDVLLTNSGKSFFDLPGGSIIGTSSIRRRAQILNLRKDLGIKLLRGNVDTRIKKLKNNEYDAIILSHAGIQRLGLESEITEILDLENFLPAACQGVIGIQANIKSDYKNLFKDINDGTTEIECLSERRVLKNINANCNSPVSVFAQVQDDQLNIKSEIHDHSGNKIFTDCTIGSKNSYHNLADSIAAQI

SEQ ID NO: 122763 - protein, 215 aa, Unknown
  Bacterial polypetide isolated from the Sargasso Sea
MTKITIGARGSKLSLAYVAKVKELLIKNNNDLKEENINFKAIKTSGDLNLNKNISEIGGKSLFCKEIEESLLKKEIDIAVHSLKDMEANENEKLLIGAYVKRNDYRDAIVSEKIKSLSDLKDGVKIGSSSKRRELQLKKINNKISVINIRGNIDTRINKINENKLDGIILAVAGVKSLKLDKKISLTFNCEQILPAVGQGIIAVQCRKEDEIKNL

SEQ ID NO: 122764 - protein, 223 aa, Unknown
  Bacterial polypetide isolated from the Sargasso Sea
MKPKLKIVSRSSNLALKQVEIVKEKLSKFFDIEIIKIKTKADNNTQKPLFEIGGKGLFVKELEKYLIEKKADVAIHSLKDVETTLAKNTFLCAVTARESKHDVLVGEYKNLSLLPRDAIIGTSSPRRTAFLKAYRKDFQIKTCRGNIETRIEKLKKGEYDALILAEAGLKRLNIDCKNVIPLEIMPPSAGQGVIAIQSLESSEKENTNKLISSINDKSVYFEI

SEQ ID NO: 122765 - protein, 252 aa, Unknown
  Bacterial polypetide isolated from the Sargasso Sea
INTTGDNKIDIRLSELGGKGLFSKNIENELLNKNIDLAVHALKDLPSFDTEGLVTNCFLKRNNSNEVMISNSNKKLNDLVPGSIVGTSSFRREFQLKRIRKDLNFKLIRGNVDTRIRKLKSGEYDAIILAKAGLSSLNLDKEITQEFSNNDLIPSAGQGTIAVQCRKDDVEIIELLNKINHEKTSICVKAEREVLKVLDGDCETAVGATSKIVDDKIYLSGELFSIDGSRRYFYKTSKKLSDFHMAGEEVGK

SEQ ID NO: 122766 - protein, 310 aa, Unknown
  Bacterial polypetide isolated from the Sargasso Sea
DSKLSKAQTKIFIDQAKQIESISSNYSLDIKTIKTTGDIHNNHRLDQMGGKGLFVREIEEQLIKKDIDLAVHSMKDLPSQESKNNLKIVCWLQRHGNEDVLISNLGKSFYDLPSGSIIGTSSIRRRSQILNLRKDLSIKLLRGNVDTRINKLQNKEYDAIILSKAGLDRLNLSHLITEVLDKSIFLPAANQGAVGIQSNQDSSFNDHLRHINHSNTETECLAERMILKLVNANCNSPISVSASVASDQIKISCDLFDHDGEKLFHKTIKSKQNEYAELSKAIADEILSTVGQTKINTLDKLENDFNYKAP

SEQ ID NO: 122767 - protein, 291 aa, Unknown
  Bacterial polypetide isolated from the Sargasso Sea
LAYAKKVKNLILDLDLPSRKEIIIEPIKTSGDLFQNKKISEIGGKNLFCKEIEEKLISKKIDIAVHSLKDMDSIETKGLVIQAFIKRNDPRESFVSKKFKKLSELNNAKIGSSSRRRELQLKLLNKNIKVENIRGNVDTRIRKIENGEYDGAILAVAGLKSLNLENYIKEEFSLKEFLPTAGQGIIAAQCREDNIEIKRILKKINHNKTEICALAERNFLKAIGGDCDTAVGCSAILIGDKIELNAQLFSDDGKKVFNIKKYGQANEPELTGKLAGEEILKKSANNFTKKR

SEQ ID NO: 122768 - protein, 166 aa, Unknown
  Bacterial polypetide isolated from the Sargasso Sea
MFGSQNPVTTLKIGTRRSDLAMWQAVFVRDALLGAHPDLEVELVGITTEGDRTLDVPLAAKGGKGLFLKELEQALLERRIDVAVHSMKDVTVIEPEGLHIPVICERENPCDALVSAHFSKLEDLPAGAVVGTCSLRRQAILRHRFPDLQVENLRGNVNRRLARLDA

SEQ ID NO: 122769 - protein, 125 aa, Unknown
  Bacterial polypetide isolated from the Sargasso Sea
MTLDQLRIASRRSQLAMVQTNWVRDELQKAHPDLAITIEAMATQGDKILDVALAKIGDKGLFTKELEAQMLLGHAEIAVHSLKDLPTNLPEGLILGCITEREDPSDALVVNEKNQIHKLETLPEG

SEQ ID NO: 122770 - protein, 204 aa, Unknown
  Bacterial polypetide isolated from the Sargasso Sea
PREDVRDSFVSRKYKSIKELPVGATVGTSSLRRRAQLLAIRPDLKVIEFRGNVQTRLKKLDQGIADATFLACAGLSRLNLKKLINPIPISQMLPAVSQGAIGIEQNLNNDLIREIVSVITDKGSETQLEVERAFLLELDGSCRTPIGGYAEILGEEITFHGEILKPDGSETYKGIWKGELSDATELGKSAAKVLKEKGGTAFFE

SEQ ID NO: 122771 - protein, 113 aa, Unknown
  Bacterial polypetide isolated from the Sargasso Sea
MINKIIIGSRKSKLSLAYTKKVKELIAKSCKFSKSKIYFKGIKTSGDLLSKKKISQIGGKNLFCREIEQKLLNKEIDIAVHSLKDLDSLETKGLVIQAFIKRNDPRDAFVSKN

SEQ ID NO: 122772 - protein, 110 aa, Unknown
  Bacterial polypetide isolated from the Sargasso Sea
MPNALSISGKINPSLTIATRGSKLALWQANWVKEKINEMYSEIKVEILTVTTEGDLNQQQPLAEIGGKGLFVKDLENVLLAGKADLAVHSMKDVTSILPEGLEISVIAER

SEQ ID NO: 122773 - protein, 198 aa, Unknown
  Bacterial polypetide isolated from the Sargasso Sea
MTNLRKCIVGIRDSKLSKAQTNLLIKEAEKFDVIKKNIQFEVQTIKTSGDIHRDERLDTLGGKGLFTKEIEGKILDKAIDVGIHSMKDVPASDENPELKIICWMRRHDPSDAFISKSGKKLEQLPSGSIIGTSSVRRRAQILNFRQDLQIKLLRGNVDTRLMKLSHGQYDGIILSTAGLERIGQGHVITEVMDQKTFL

SEQ ID NO: 122774 - protein, 196 aa, Unknown
  Bacterial polypetide isolated from the Sargasso Sea
MKSNKIIIGSRGSKLALIYAERAKAEILKICDDKKDAEIKCITTKGDTLLDKRLSEYGGKGLFCKKIEEELLEKKIDVAVHALKDMPFQETEGLITNCFLKRNDPREVFISKENKKIENLNTNATVGTSSLRREFQLKKIRNDLNYKMIRGNIDTRIKKLNDNLYDAIILSYAGIKSLNLNKKISQSFSTSQIIPS

SEQ ID NO: 122775 - protein, 242 aa, Unknown
  Bacterial polypetide isolated from the Sargasso Sea
VKKLKDNYSEKKIDIAVHSLKDMDSFEENDLMIGAYLKRNDPRDVIVLKKGRSLDSDQLTIGSSSKRRELQFKSCFNNITFKNIRGNVDSRISKVKKGEYDGVILALAGIQTLNLEEEIKEIFSEKKIIPSAGQGVIAVQCRKDDFENLKILEKINDENAKICALTERSLLKTIGGDCHTAVGAYAKLDKNNITIISKLFSDDGLKSFSIQRSGDKKFPEQLGISAGKDLLKQSEGSYKKKR

SEQ ID NO: 122776 - protein, 125 aa, Unknown
  Bacterial polypetide isolated from the Sargasso Sea
MKIATRSSKLALKQVEIFTNQLKVLGLNFEIKKQLTEGDKKSKQGENLFDKAHFVEDLETSLLNYEADVAIHSLKDMSCHDTKGLEIYAAIEHPSRSDVLVYKDEINPDDLTNIKIGTSSLRRKR

SEQ ID NO: 122777 - protein, 217 aa, Unknown
  Bacterial polypetide isolated from the Sargasso Sea
MNNTITIGSRGSKLSLAYTNKVKDLMLNLRLVNKKEIKIETIKTSGDLFQNKRISEIGGKNLFCKEIEDKLIKKEIDIAVHSLKDMDSVETKGLTIQAYIERNDPRESFVSKKFKRLSGLNLNNAKIGSSSRRRELQLKILNKNIKVENIRGNVDTRIKKVESGEYDGAVLALAGLKVLNLENYVKEIFPLKDFLPTAGQGIIAVQCRDDDNEIKKI

SEQ ID NO: 122778 - protein, 133 aa, Unknown
  Bacterial polypetide isolated from the Sargasso Sea
LSDMGGKGLFSKKIEEQLIENNIDLAVHALKDIPSLETKGLSTECFLKRNDPREVLITKNNKILEKQKKGAIIGTSSLRREFQVKRKINNFNFKLIRGNVDTRIKKLKDGLYDGIILSFIGLKFLGLEKNVSQ

SEQ ID NO: 122779 - protein, 233 aa, Unknown
  Bacterial polypetide isolated from the Sargasso Sea
MNKKKIIVGARGSKLAIKYAEIAIKNIKTIFNGSIELKKITTKGDLVLDRRTSDIGGKGEFIKNIEHELINNKIDIAVHSLKDIPSENTKGLVLKSFLKRNYPNEVLISNGNLSFKNLKKNSIVGTSSPRREFQIRLKRPDLIIKLIRGNIDTRISMLRNKNYDAIILAKAGISSLNLENLISEEFHCREIVPSAGQGIIALQAREKDYNILEILEKINHPKTEIMGKCEREV

SEQ ID NO: 122780 - protein, 269 aa, Unknown
  Bacterial polypetide isolated from the Sargasso Sea
MARNIIIGSRGSDLALWQANYVKDHLKTIGLSSTIKIIKTKGDQIQHLSFDKIEGKGFFTKEIENELLSKEIDLAVHSLKDLETNQPQGLCIAAVPPRQDPADCLLIRSKGFDLKQDLKLKDSAVVGTSSARRKNQLLFFREDLQLKDLRGNVPTRVDKLRKGEYDAIVLAKAGLNRLNIDLKEFHVVNLLPHVFIPAPAQGALGLQVRDEDQVLKEQLKKLNDTNTSDSVHFERAILNQLGGGCHSPFGAYSALDNVGNRHIWVTSSR

SEQ ID NO: 122781 - protein, 103 aa, Unknown
  Bacterial polypetide isolated from the Sargasso Sea
MGQTSKPIIIGTRGSQLALWQARYVQNLLKEKGLDTVLKITHTKGDRIQNQPLCEIGGKGVFIREIEHSLLDCSIDIGVHSLKDLPTDIPQQLELAAFLPRGP

SEQ ID NO: 122782 - protein, 276 aa, Unknown
  Bacterial polypetide isolated from the Sargasso Sea
MTKITIGARGSKLSLAYVAKVKELLLKNNNDLKEENINFKAIKTSGDLNLNKNISEIGGKNLFCKEIEESLLKKEIDIAVHSLKDMEANENEGLLIGAYLKRNDYRDVIISEKIKNISDLRNGVKIGSSSKRRELQLKKINNNISVINIRGNIDTRINKINENKLDGVILAAAGVKSLKLDKKISLTFNCEHILPAVGQGIIAVQCRKEDKIKNLIKRINDNTTNLCAIAERKMLQTIGGDCDTAIGGLAKIENHNLKLKAQLFSDSGQESFEYEL

SEQ ID NO: 122783 - protein, 235 aa, Unknown
  Bacterial polypetide isolated from the Sargasso Sea
LLKKEIDIAVHSLKDMEANENENLLIGAYLKRNDYRDVIISEKIKSISDLKDGIKIGSSSKRRELQLKKINKKISIINIRGNIDTRINKINENKLDGIILAAAGVKSLKLDKKISLTFDCDHILPAVGQGIIAVQCRKEDKIKNLIKRINDNTTSLCAIAERKMLQTIGGDCDTAIGGLAEIENQNLKLKAQLFSDSGQESFEYELTGREVDASFIGKSVGEKLLNLAGEKFKKK

SEQ ID NO: 122784 - protein, 216 aa, Unknown
  Bacterial polypetide isolated from the Sargasso Sea
VEQPDGLTLGCFLPREDVRDAFVSSDFKNVNDLPSGSKVGTSSLRRKAQLKFSRPDLEVVEFRGNVQTRLKKLKDGVASCTFLAMAGLNRLGLEEVAQSAINPNEMLPAIAQGAIGIEWREEDKQITDILKKIHHKETGQRLNAERAFLAELDGSCQTPIAGLATIEGSSLKFTGQVLRTDGSESISETASCNIEDGAELGREMAQKILAKAGPKF

SEQ ID NO: 122785 - protein, 255 aa, Unknown
  Bacterial polypetide isolated from the Sargasso Sea
RKISEIGGKNLFCKEIEDRLIKKDIDIAVHSLKDMDSVETEGLVIQAYIQRNDPRETLVSKKFKKISELNNAKIGSSSRRRELQLKLINKNIKVVNIRGNVDTRIKKIESGEYDGAVLAMAGLKVLNLENYVKEIFSLKDFLPTAGQGIIAVQCRDNDEEIKNILKKINHNETKICALAERNFLKTLGGDCDTAVGCHVILNRDTLELNAQLFSDDGKKVFNVKKSGKVNEPKLLGKLAGEEILEKSFNNFSKKR

SEQ ID NO: 122786 - protein, 291 aa, Unknown
  Bacterial polypetide isolated from the Sargasso Sea
TTGDMVLDKALKELGGKGLFTKELDVSLLNGDVDVCVHSMKDVPTWLVPGTVLPCNLPREDTRDAFISPKAGSPEELPDGSVIGTASLRRQAQLLAMNPTFTCVNFRGNVQTRLKKLGEGIVDATLLARAGLKRMQLEEHITKVLEFETMIPAVAQGAIGIQCREGDEKVLAYLDALNDPDTKLAVDCERAFLAALDGNCRTPIAGQAKLVDGELQFQGLIAKPDGSIIYKTSRTGAPEDAVKMGTEAGEELKAKCGDDALAFFGDAEVLPEPKSSISGVKSDGLGGYESG

SEQ ID NO: 122787 - protein, 253 aa, Unknown
  Bacterial polypetide isolated from the Sargasso Sea
KGLFVKELESALLEERADLAVHSMKDVTSILPEGLEISVIAKRSDPRDAWICPKYGSIENFPKGATVGTSSLRRTAFIKYHRPDINVRSLRGNVHTRLEKLDNGEVDAIILAVSGLKRINLENRITEIFPIKWMLPAIGQGTIGIETRKGDHHTMSLLEHINDRVTNECLLAERSLLLELEGNCQTPIAGYCVNKIEELYLMSALCDHEGKSLIVYEARAQPHDAVSLGKESAEWLLKNGGDQILLKSHAALQ

SEQ ID NO: 122788 - protein, 239 aa, Unknown
  Bacterial polypetide isolated from the Sargasso Sea
MKSKKIIIGSRGSKLALIYAKKVKEEILKISSEFGIADIIIKEIKTEGDKIQNIRLSEVGGKGLFAKKIEEQLLKKNIDIAVHALKDMPTQETKGLLTNCFLKRNDPREILISKENKNIIELKPNSIVGTSSLRREFQLKKIRKDLNYKLIRGNVDTRIKKLNLKLYDAIILSYAGVKSLGLNKNITQVFSTSKIIPSVGQGVIAAQCRKKDMKIISVLEKINHKPTRICTHAERNFLK

SEQ ID NO: 122789 - protein, 156 aa, Unknown
  Bacterial polypetide isolated from the Sargasso Sea
MKEITIATRESALALWQANFIRDRLIEAHPNLTVHLLGMTTQGDRWLNAPLKEIGGKGLFIKELEVAMLEGRADLAVHSVKDLPAHLPEGFSLPLIGYRDDVRDVLLGEPEGVAALPPNARVGSSSPRRQAQLLAMRPDLRVDSIRGNVKTRLSKL

SEQ ID NO: 122790 - protein, 304 aa, Unknown
  Bacterial polypetide isolated from the Sargasso Sea
MKLKIRIASRKSKLALCQVEILKSYFDLGIETEILEVITSGDQILNKSLSEIGGKGLFIKELEKFILDGSADIAVHSMKDMETEIAQNTVISAVLPRGDRSDVLLGKYSSLDDLPYNAVIGTSSVRRAAFTKSYRPDVVIKLLRGNVETRIEKLEDGLFDAIILAKAGLDRLKINVGKQIPTDIMPPAATQGAIAIQSTTNRNNKYEKDLNNYLLNINDNETYFETLAERSLLKTLDGSCRSPISASAYIIENDRLKLYGAIARLDGTKLVKSEIVGLKKDAVLLGKNLGTEMLSKANGEIIYK

SEQ ID NO: 122791 - protein, 306 aa, Unknown
  Bacterial polypetide isolated from the Sargasso Sea
MDNKITIGARGSKLSLAYANKVKSNILSQVPGIDKEIIIKTIKTSGDLFQNKKISEIGGKDLFCKEIEEKLIKKEIDIAVHSLKDMDSEETKGLTIHAYLERNDARETFVSKSFNKISDIKEGKIGSSSKRRELQIKLLNKDIKVESIRGNVDTRIEKIEKGEYDGVILALAGLKTLNLKNHIKQIFSLKEFIPTAGQGIIAVQCRENDEDTKKILKKINHINTEICALAERSFLKTLGGDCDTAVGCSAVLKGNNIDLEAQLFSDDGKEVYNVIKSGKSTDPQSLGKVAGEEILKKAGKNFIKKR

SEQ ID NO: 122792 - protein, 306 aa, Unknown
  Bacterial polypetide isolated from the Sargasso Sea
MLNKIIIGSRGSKLSLAYANKVKGLILGVNKSLDQNIEIQAIKTSGDIFQNKKISEIGGKNLFCKEIENKLINKQIDIAVHSLKDMDSIETNGLIIQAYIERNDPRESFVSKKFKKLSDINDGKIGSSSRRRELQLRMLNKNIKIENIRGNVDTRIKKVEIGEFDGVILALAGLKTLKLEHHVKETFPVKDFIPTAGQGIIAVQCRKGDEKIKEILKKINHRETELCAIAERSFLRTLGGDCDTAVGCSAILNKGNIELSAQLFSDDGEGVFNVKKLGESKQPQLLGQLAGEEILKQSGDNFTKKR

SEQ ID NO: 122793 - protein, 292 aa, Unknown
  Bacterial polypetide isolated from the Sargasso Sea
SLAYAGKVKDLILQFHTTNEDKIVIETIKTSGDLFQNKNISEIGGKNLFCKEIEDKLIKKEIDIAVHSLKDMDSIETNGLIIQAYIKRNDPRESFVSKKFEKLSDLNNGKIGSSSRRRELQLKLMNNNLKIKTIRGNVDTRISKIEKGEYDGAILALAGLKTLNLENYAKQVFSVEDFIPTAGQGIIAAQCRDNDERIKNILKKINHYETEICALAERNFLKTIGGDCDTAVGCTANLNKNKIDLKAQLFSDDGKKVFNVIKSGKSNEPELLGKLAGEEILKKSAKSFTKKR

SEQ ID NO: 122794 - protein, 274 aa, Unknown
  Bacterial polypetide isolated from the Sargasso Sea
FIIKEIIIKDINTTGDNKIDIRLSELGGKGLFSKNIENELLNKNIDLAVHALKDLPSFDTEGLVTNCFLKRNNSNEVMISNSNKKLNNLVPGSIVGTSSFRREFQLKRIRKDLNFKLIRGNVDTRIRKLKNGEYDAIILAKAGLSSLNLDNEITQEFSNNDLIPSAGQGTIAVQCRKDDVDIIELLNKINHEKTSICVKAEREVLKVLDGDCETAVGVTSKIVDDKIYLSGELFSIDGSRRYFYETSKKLSDFYMVGEEVGKKLKEESQGNYKK

SEQ ID NO: 122795 - protein, 312 aa, Unknown
  Bacterial polypetide isolated from the Sargasso Sea
MIVTDRSDRVIKIATRNSRLATFQATVVKEELESLFPNYKFELNYVRSEVGDLNKDKPLADLGLGVFVRSIEQSLLASESDIAVHSLKDVPTILTEGLEIVAFLEREDARDVNVSRDNICLKELPIGARIGTSSPRRAVQILNMRSDLQIVPIRGNVPTRVSKIETLECDAVVLAAAGLKRLQLDNHISEYLNIDDFVPAPGQGIIGVQIRSDDQELFPIVRALNNVESEVCSKSERKFLELLGSGCQMPVGAHARIIKGELHMISSIGDLNLNKCYVSRVVGQLEKPENLAEETKYDFESREAKYLIERYT

SEQ ID NO: 122796 - protein, 243 aa, Unknown
  Bacterial polypetide isolated from the Sargasso Sea
MDNKITIGARGSKLSLAYANKVKSNILSQVQGIDKEIIIKKIKTSGDLFQNKKISEIGGKDLFCKEIEEKLIKKEIDIAVHSLKDMDSEETKGLTIHAYLERNDARETFVSKSFNKISDIKEGKIGSSSKRRELQIKLLNKDIKVESIRGNVDTRIEKIERGEYDGAILALAGLETLNLENHIKQIFSLKEFIPTAGQGIIAVQCRENDEYIKKILKKINHVNTEICALAERSFLKTLGGDCD

SEQ ID NO: 122797 - protein, 263 aa, Unknown
  Bacterial polypetide isolated from the Sargasso Sea
MVRVGTRGSQLARTQTGHVIDQLRSFGFEVQEVIISTRGDQQQTVPIAQIGNDGVFVRELEKALLEERIDLAVHSLKDLPTAMTPGLEFACTPPRATPFDVLVSRDGVGLRDLPADARVGTASIRRRIQIRAVRPDLQIVAIRGNVDSRLKRVDERELDAVVLAAAGLERLGRADCITEVLQPPDFWPAVAQGALVIQIKEANQRVQEILEPIHHPATYLSTVSERALLASLAGGCLAPIGSWGKIEADGELSLGGCVMSDAG

SEQ ID NO: 122798 - protein, 346 aa, Unknown
  Bacterial polypetide isolated from the Sargasso Sea
MTRGSKVKTSTTVARAGARSRAVVRAAVDAPIVKIGTRGSPLALAQAYMTRDLLKENFPELAEEGALEICIIKTTGDKVLDQPLADIGGKGLFTRELDDALLDGRIDIAVHSMKDVPTYLPEGMVLPCMLPREDVRDAFLCLKYDSLSDLPEGAVVGTASLRRQSQLLYKFPTLKCVNFRGNVQSRIRKLKEEVVDCTLLAIAGLKRMDMAEHAKVVIPTDEMLPAVAQGAIGITCRTGDDKQLEFLAKLNHEETRMAVEGERAFLAALDGSCRTPIAAHCHNVDGKMQFRGLIASLDGKQVLETTREGAWDAQSLLDAGKDAGAELKGQAPADFFANLIENGGGW

SEQ ID NO: 122799 - protein, 235 aa, Unknown
  Bacterial polypetide isolated from the Sargasso Sea
LIEKKIDIAVHALKDMPSFETKGLYTGCFLKRNYSNEILISKNNIKFDKLKPKSIVGTSSLRREYQLKRKRNDLIFKLIRGNVDTRIKKLKEGTYDAIILSKAGIDCLKLNDQISEEFLDNDIIPSAGQGIIAIQCRQEDSEMIDLLKKINDEKTKMSALAEKEVLKTLDGDCDTAIGVSSVIKDKTITIEAELFSIDGKKRYYIKSEKELKLASELGKEMGKILKERSKGSYKN

SEQ ID NO: 122800 - protein, 291 aa, Unknown
  Bacterial polypetide isolated from the Sargasso Sea
MTIKIASRSSKLALAQVEEFVKKFGISDYKIIKVKTEGDIKSANGETLFDKAHFVSDVQKCLLNGEADIAVHSAKDTPAGETTGLLRYFLPSQSNEDVLIFREEYKFNSEMKLGTSSLRRQLQAKHHLNAKNIVNLSGNVDTRLEKLSQGEYDCIILAKAGLARLKLLDKLQYEVMDWSTASGQGFLCIEILNDPSVDIYNFLLKSIREIDLNLGKNISTERSILEAINAGCNSAISIQTQSNLESENSQLIHLGKIYGVEKYISFSGTTAEKTINDIKNQDGLKLLNEHN

SEQ ID NO: 122801 - protein, 158 aa, Unknown
  Bacterial polypetide isolated from the Sargasso Sea
MADKKKFIIGSRGSKLSLAYSSHVKNLLIKSNSQFNDDSIDIKVIKTSGDIFQNKRISDIGGKGVFCKQIEEELLDSKIDLAVHSLKDLPTQMTQGLCVNAVVKRNDPRDAFISYSSKTFKELKPQSKIGTSSFRRHAQLNLLRNDLEIVAMRGNIDT

SEQ ID NO: 122802 - protein, 234 aa, Unknown
  Bacterial polypetide isolated from the Sargasso Sea
MNNKITIGSRGSKLSLAYANKVKNLISRLSEASGSELEIKTIKTSGDLFQNKKISEIGGKNLFCKEIEEKLINKEIDIAVHSLKDMDSAETNGLVIQAFIERNDPRESFVSKKFNKLSELNNAKIGSSSRRRELQLKLLNKNISVKNIRGNVDTRIQKVENGEYDGVILAVAGLKTLKLENYVKEIFSIKEFIPTAGQGIIAVQCRKDDEDIKKILKQLNHYETQLCALAERNF

SEQ ID NO: 122803 - protein, 509 aa, Unknown
  Bacterial polypetide isolated from the Sargasso Sea
MIKIISRKSDLAVIQAELVAEALKKADRNISISFVKKETEGDIDQLTSLSKLSNIGVFTNDIRESLLNSEADIAVHSLKDLPIDDQNDTSIVSILERADSRDILFLKKNNLDNYNNKELKILTSSPRRVYNFSNFLKSLLPFNPSEITFEDIRGNIPTRLKKLLNGNCQGLIVAKAAIDRLISCENKSISNEISTLIENFFWMVIPLSLNPCAPGQGAIAIEVNSKREDIIELIKKINHNETYSQVAEERGILQNYGGGCHQKIGVSIEDKFFGKILTIKGQTEEGLKIERREIIDNKNNWKNIPENNFFPSNIEKYKLFERKIINKNLIKINKLKNTNIYVSRENALPEDISIESTNVIWTSGIKTWKKLAKKGYWVNGSSDSLGEENPKINYLSKNKKWVKLTHNLTPKNYFKSHSSPKNARIISTYELKPVEILEDLNNKSHFYWMSGSAFKLVLKNYPEIINANHACGPGNTFNYISKYVDKNNINIFLSYEDALNTLMRSGDKK

SEQ ID NO: 122804 - protein, 303 aa, Unknown
  Bacterial polypetide isolated from the Sargasso Sea
MKIRIATRLSPLAMLQTKEVIKKIQHHHPTCACEVIKVESDGDLTDTPLHMIGGKGLFISKLEQALHNDIADIAVHSLKDVPASLDKKFTIAATLPREEVEDVLLLRDKLNISDLSKKLKIATSGPRRKAQLLGINSGFNIVPIRGNIQTRIDKMTTENLDGLIVAKAALNRLKISHPNIYIFSQEEMLPAAAQGAIGIEVIEENLEAETNNLLQSINDNLTFQATEIERTVVAALQGNCLSPISALCKISDQDVELKVRVSNQKGSEVYDQKEIFKLDNKIEALEGFIEKLISNGAKTLIQK

SEQ ID NO: 122805 - protein, 206 aa, Unknown
  Bacterial polypetide isolated from the Sargasso Sea
MTIRIASRSSKLALAQVDEFVKKFDISDYKIIKVQTEGDIKSAKGETLFDKAHFVSDVQKCLLNGEADIAVHSAKDTPAGETTGLLRYFLPSQSNEDVLIFREEDKFNREMKLGTSSLRRQLQAKHHLNAMNIVNLSGNVDTRLEKLSQGEYDCIILAKAGLARLKLLDELQYEVMDWSTASGQGFLCIEVLNDPSADIYNFLLQS

SEQ ID NO: 122806 - protein, 509 aa, Unknown
  Bacterial polypetide isolated from the Sargasso Sea
MIKIISRKSDLAVIQAEIVANALKQADKDISVSFIKKETEGDIDQLTSLSKLSNIGVFTNDIRDSLLNNEADLAVHSLKDLPIEDQKDTLIVSMLERADSRDILFLKKDIFENYNNKELRILTSSPRRVYNFSNFLESLIPFNPSNITFEDVRGNIPTRLEKLLNGDCQGLIVAKAAIDRLISYGNKNISAKIQSYLDDLLWMIIPLSLNPCAPGQGAIAIEVNSKRKDIIKLVNKINHNETFSQVAKEREILQNYGGGCHQKIGVSIESKFFGQILTIKGQTEEGLEIEKREVVNQTTDWKNIPESNFFPSNLNKYKLFERKLINKNLKKINKLKNTNIYVSRENALPKNQNIELTNVVWTSGIKTWKKLAEKGYWVNGSSDSLGEDDPEIKCLSKNKKWVKLTHNMTQKNYFKSHKDPQNARIIPTYELKPVNMNEDLNEKTHFYWMSGSAFKLALKNYPKIINANHSCGPGNTLKTIKKYINKNNINVFLSYEDALKNITRPGDKK

SEQ ID NO: 122807 - protein, 115 aa, Unknown
  Bacterial polypetide isolated from the Sargasso Sea
EIGGKNLFCKEIEDKLISKEIDIAVHSLKDLDSVETDGLVIQAYLKRNDPRDTLVSSKFKKLSEFNGQKIGSSSRRRELQLKQLNRNIKVESIRGNIDTRIKKIENGEYDGAILA

SEQ ID NO: 122808 - protein, 301 aa, Unknown
  Bacterial polypetide isolated from the Sargasso Sea
MTIKIASRSSKLALAQVDAFVTQFSISDYEIIKIKTEGDKKSAQGETLFDKAHFVSDVQKCILNGEADIAVHSAKDTPAKELDSLIRYFLPSKSCEDVLIFREEVKFNDEMKLGTSSLRRQMQAKHHLNAKNIVNLSGNVDTRLEKLYRGEYDCIILAKAGLERLGMLDELQYEEMTWPTASGQGFLCIEHLNDLSTDIDHFLLRSLYIHHVVDGRLISIEREILETLNAGCNSAISIQTDIHPETYNKPPSKIKPGEPDFIHSGVIYGKEKYISFSGTTIEETINDIKKQDGIKLLNEHN

SEQ ID NO: 122809 - protein, 301 aa, Unknown
  Bacterial polypetide isolated from the Sargasso Sea
MKKITIGSRGSKLALIYAERVKKEIQKFYKDHIEIKTIVTSGDKNQKDRLSDLGGKGLFSKNIEIELLENKIDLAVHALKDMPSLETKGLLTDCFLKRNDPNEILISKNNIKFNKLKSSSVVGTSSFRREFQLKNKRADLNFKLIRGNVDTRIKKLNEGKYDAIILSKAGIKSLDLMDYITEEFSTEDIIPSVGQGAIAIQCRSSDNDMIKFLKKINHMETHICVTAEREVLKILEGDCETAVGAISKIEGNNIYISAELFSIDGKERYYFKSSKNINLSKDLGKEVGKILKEQSKGSYKK

SEQ ID NO: 122810 - protein, 107 aa, Unknown
  Bacterial polypetide isolated from the Sargasso Sea
MPNALFKSGNKNPTLTIATRGSTLALWQANWVKEKILQRHNKIKVELLTVKTLGDLNQGQPLSEIGGKGLFVKDLEQTLLYGKADLAVHSMKDVTSILPKDWKFLLS

SEQ ID NO: 122811 - protein, 303 aa, Unknown
  Bacterial polypetide isolated from the Sargasso Sea
MKIRIATRLSPLAILQTKEVIKKIQRHDPTCICEIIKIESDGDQTDIPLHMIGGKGLFVSKLEQALSNQIADIAVHSLKDVPASLDKKFKIAATLPREEVADVLLLRDKLNRSDLSKNLKIATSGPRRKAQLLGINSGFNIVPIRGNIQTRIDKMTSEKLDGLIVAKAALNRLKISHPNIYIFSEEEMLPAAAQGAIGIEVIEENLETKTNNLLKSINDNFTFQATEIERTVVAALQGNCLSPISALCKIRDQDVELKVRVSNQEGSEVYDQKEIFSLDNKFQALEDFVEKLISNGAKTLIQN

SEQ ID NO: 122812 - protein, 92 aa, Unknown
  Bacterial polypetide isolated from the Sargasso Sea
MTNFKLKIASRRSKLAMVQTLWVKDQLEKNIPNLEVSIEAMATQGDKILDVALAKIGDKGLFTKELEAQMLVGHADIAVHSLKDLQTNLPNG

SEQ ID NO: 122813 - protein, 140 aa, Unknown
  Bacterial polypetide isolated from the Sargasso Sea
MIKIISRKSDLAVIQAELVAEALKKADRNISISFVKKETEGDIDQLTSLSKLSNIGVFTNDIRESLLNSEADIAVHSLKDLPIDDQNDTSIVSILERADSRDILFLKKDNLDNNKELKILTSSPRKVYNFSNFLKSLLPF

SEQ ID NO: 122814 - protein, 261 aa, Unknown
  Bacterial polypetide isolated from the Sargasso Sea
GGDGVFVRELEQALLDHRIDIAVHSMKDLPTAETPGLVIPCVPQRATPYDVFVGRTKPTLQELPSGSVVGTSSIRRVVQLKGLRKDLVIQPIRGNVDTRLKKLDSGKYDGLILAGAGLERLDLADRITQFLKPPLFAPAIAQGALAVQTREDDRFVRERILPISHEATHESVLAERACLQTLAGGCLAPIAGWGRKDSNNNVSLDAWVFEDCGEEIVSIHASGIADPSTESPRQLGERVATSLIDKGATSMLERIREPPNE

SEQ ID NO: 122815 - protein, 262 aa, Unknown
  Bacterial polypetide isolated from the Sargasso Sea
MYSFNSEIRIATRSSPLAIKQCEILIEKLPSLKTKIIQIVSRGDEIQDKSLQEIGGKGLFIKKLEQALIDNVADIAVHSLKDMEWKETNGLEIAAFLQRGSRKDILISKYKSIYELPTNAKLGTSSVRRKAFILSERPDLNISILRGNINTRINKYNSGKFDGIILAQAGVERLDIKTKYTEFDESIMLPSAGQGAIAVQCRSNNKQILKLIRSLNHEQTKYETLAERSFVFNLNGTCSSPIGASAKISNEILELSGALASP

SEQ ID NO: 122816 - protein, 225 aa, Unknown
  Bacterial polypetide isolated from the Sargasso Sea
MSSREIRIATRKSALALWQAEYVKARLEQAHPGLKVSLVPMVSRGDKLLDSPLSKIGGKGLFVKELETALLDNEADIAVHSMKDVPMDFPEGLGLFCICEREDPRDAFVSNTFASLDELPPGSIVGTSSLRRQAQLLTRRPDLQIRFLRGNVNTRLAKLDAGEYDAIILAAAGLIRLGFEDRITSAISVEDSLPAGGQGAVGIECRTADSEIHALLKPLDHADTE

SEQ ID NO: 122817 - protein, 272 aa, Unknown
  Bacterial polypetide isolated from the Sargasso Sea
LNAEIIKIKTTGDKITDQPLSAIGGKGLFTKEIDKELINKRIDLAVHSLKDIPTTIPEEFNLSFILPRGAPEDILISQNNSKNIYSLPINSTIGTSSPRRYAQIKRIRPDIKILPIRGNINTRLDKVKNKEVTAIILALAGINRLKIEIPYSILDYEECMPAASQGIIGITYLKSNIKVQTILSKLININTQYQAIGERAVLNVINGDCHSPIAVTSSIISNKISISAKIFSIDGKNMIEQCKTDITENAEMLGKDIGNNLIKMGALELLKL

SEQ ID NO: 122818 - protein, 299 aa, Unknown
  Bacterial polypetide isolated from the Sargasso Sea
MTDKKKFIIGSRGSKLSLAYSSHVKNLLIKSNSQFDDNSIEIKIIKTSGDIFQNKRISDIGGKGVFCKQIEEELLDAKIDLAVHSLKDLPTKITDGLCVNAVVKRNDPRDAFLSYSSKSFNELGPKSKIGTSSFRRQAQLNLLRNDLKIIEMRGNIDTRIRKLKNQEFDAIVLSLAGVQMLNLEKEVKEVFSTDQMLPALGQGTIALQCNKDDKKTLNILKVINDRETFYCIQAERALLEAIGGDCDTAIGGLAKLSDDTIYLKSQLFSNDGKKKFEFQSSGNFKKAKEIGYNVVKSYK

SEQ ID NO: 122819 - protein, 263 aa, Unknown
  Bacterial polypetide isolated from the Sargasso Sea
MKKIIIGARGSKLSLAYASKVKDLILKSSKGIDIHIKIIKTSGDIHKDTKVSEIGGKNLFCKEIEENLIENNIDIAVHSLKDMESFEHKELIIGAFIKRNDPRDTLVSNKIKNLRELSEETKIGSGSRRRELQLKKLNKNISVTSIRGNIDPRIKKVEENKFDAIILAAAGLKSLNLESKISFTFKTYEMLPAVGQGIIAVQCRKHDELIFDIIKKINDKETSLCAMAERKMLQTIGGDCETAVGGLAEIHNNNLKLKAQLFS

SEQ ID NO: 122820 - protein, 209 aa, Unknown
  Bacterial polypetide isolated from the Sargasso Sea
MSNALSKSGKKNPTLTIATRGSTLALWQANWVKEKINEQHSEITVELLTVKTAGDLNQHQPLAEIGGKGLFVKDLEKALLDERADIAVHSMKDVTGILPEGLEISVIAERDDPRDAWICPRYGSIENLPKGATVGTSSLRRTAFLKHHRPDIEVCSLRGNVPTRLGKLDRGEVDAIILAVSGLKRINLENRINKIFPIKWMLPAIGQGA

SEQ ID NO: 122821 - protein, 249 aa, Unknown
  Bacterial polypetide isolated from the Sargasso Sea
MAVTADGLKVPERPLLRIATRGSKLALWQAEHVRSLILKQHPDIAVELVVLKTKGDLILDRPLSEVGGKGLFVKELESAMLENRADLAVHSLKDVPAILPEGLELSVILKRENPHDVLVFRETNMTLDDLPQGSMIGTSSLRRAAQLKNMRPDLEVTSLRGNVPTRLKKLDSGEVDAAVLAAAGLIRLELEERINQELSTEQMLPAIGQGVLALETRKDDDATLEKLRFMNDEPTEDCMIAETEGALNP

SEQ ID NO: 122822 - protein, 164 aa, Unknown
  Bacterial polypetide isolated from the Sargasso Sea
MTNFKLKIASRRSKLAMVQTLWVKDQLERNIPNLEVSIEAMATQGDKILDVALAKIGDKGLFTKELEAQMLVGHADIAVHSLKDLPTNLPNGLKLGCITKREDPADALVVNKKNNCYKLETLPEGSIVGTSSLRRLAQLRNKYPHLVFKDIRGNVITRVKNRCR

SEQ ID NO: 122823 - protein, 246 aa, Unknown
  Bacterial polypetide isolated from the Sargasso Sea
MALTELRIASRRSQLAMVQTNWVKAELEKAHPGLTIMVEAMATQGDKILDVALAKIGDKGLFTKELEAQMLVGRADIAVHSLKDLPTNLPEGLMLGCISEREDPADALVVNAKNQAFKLDTLPEGAVVGTSSLRRLAQLRHHYPHLIFKDVRGNVITRLEKLDSGDYDCLILAAAGLSRLGFGDRIHQIIPGDISLHAVGQGALGIECVEGKPEVLEIIKVLEHTTTSRRCLAERAFLRELEGGCP

SEQ ID NO: 122824 - protein, 151 aa, Unknown
  Bacterial polypetide isolated from the Sargasso Sea
MRIATRGSKLALWQAEHVRSLILKQHPDIAVELVVLKTKGDLILDRPLAEVGGKGLFVKELESAMLENRADLAVHSLKDVPALLPEGLELSVNLKRENPHDVLVFREMNMTLENLPLGSRIGTSSLRRAAQLKNIRPDLELTSLRGNVPTR

SEQ ID NO: 122825 - protein, 217 aa, Unknown
  Bacterial polypetide isolated from the Sargasso Sea
MINSIKIGTRSSNLAMYQANLVKEKLTEIFPNIKYSIVKIKTKGDKIQDQNLDRNLDKGFFVKEIQDALIEGKIDIAVHSLKDLPVEENEKIKTSAILKRGNHYDVFLSRNKKKLHEFSENEVIGTSSLRRKAQLLHLNPNLNVIDIRGNVDTRITKMQNGEYDGLIMAAAGIERLGLEKYITEYLNNNIMLSAPGQGAIAIETNSKSYELEAIISK

SEQ ID NO: 122826 - protein, 244 aa, Unknown
  Bacterial polypetide isolated from the Sargasso Sea
MHIRIATRKSELAIWQSNYVRHLLTRIKPELKIDLIEMTTRGDQILDRPLSKVGGKSLFTSELEFAIEKGDADMAVHSLKDMPAELPEEFCIAAVLPRDEPRDVLVSPTGWSLRKLPEGQKVGTSSLRRQSQLLAQRSDLKMVDIRGNVPTRLAKLTDGTCDAVVLAGAGLKRLGLLDRRCFILDFETVLPAIGQGAIAIECRTRDLELRKLLTSLNCDLTEKSVMAERVMNRVLGGSCQHAIA

SEQ ID NO: 122827 - protein, 213 aa, Unknown
  Bacterial polypetide isolated from the Sargasso Sea
DALVVSKKNDCYKLETLPEGSIVGTSSLRRLAQLRNKYPHLVFKDIRGNVITRIEKLDAGEFDCIILAAAGLKRLGFESRIHQIIPSEISLHAVGQGALGIECKSDDKKVLEIINVLEDKPTSQRCLAERAFLRELEGGCQVPIGVNSNIDNGQLYLTGMVASLDGERLIKDQVIGNINDPELVGIELAKRLKIQGADKILSEIFEEFRENKN

SEQ ID NO: 122828 - protein, 124 aa, Unknown
  Bacterial polypetide isolated from the Sargasso Sea
MSENRIRIATRKSPLAMWQAEFVKAELERVHPGIVVELLPMSTKGDVILDTPLAKVGGKGLFVKELEVAMLEDQADIAVHSMKDVPVDFPEGLGLEVICEREDPRDAFVSNLYKSISELPLIDL

SEQ ID NO: 122829 - protein, 286 aa, Unknown
  Bacterial polypetide isolated from the Sargasso Sea
NLLLKSNPQFDDNSIEIKIIKTSGDIFQNKRISDIGGKGVFCKQIEEELLEYKIDLAVHSLKDLPTKMTEGLTVDAVIKRNDPRDAFLSHSNKSFKELKSQSKIGTSSFRRHAQLNLLRNDLEIVNMRGNIDTRIKKLKNKDYDAIVLSLAGIQMLNLTEQVKEIFTIEQMLPAIGQGVIALQCNKDDEKTKNILKAINNKETYYCIQAERALLEAIGGDCDTAVGGLAKLLNDEISLKSELFSNDGKKKFEFQSSGHFSEAKEIGYKVGKELLKKAGPNFTVQEN

SEQ ID NO: 122830 - protein, 203 aa, Unknown
  Bacterial polypetide isolated from the Sargasso Sea
LASLPAGAVVGTSSLRREASLRARFPHLVIQPLRGNLDTRLGKLDRGDYAAIILAAAGLRRLGLADRIRSTIAPEESLPAAGQGALGIEIRADREEVRACLAPLHDAPTALAVTAERAVSRILGGSCQVPLAAFAQWSGAGTLRLRAFVASQDGTRKLAADGEATPSTLADADALGVRVAQQMLAGGARDILSMLGADAPPAT

SEQ ID NO: 122831 - protein, 268 aa, Unknown
  Bacterial polypetide isolated from the Sargasso Sea
NCHSQEPLGPVAGHFVKDRLEALYPELQVELVPMSTQGDKILDTPLAKVGGKGLFVKELETAMLEGRADIAVHSMKDVPVEFPEGLGLHTICEREDPRDAFVSNRFGQIDELPQGAVVGTSSLRRQCQLRAARPDLVIRDLRGNVNTRLAKLDAGEYDAIILAAAGLKRLEMAHRITAFIEPEQSLPANGQGAVGIECRLDDHELHALLAPLEHPETRIRVLTERAMNRALQGGCQVPIGAYALVQGEEVWLRGLVGSPDGSRVIRDE

SEQ ID NO: 122832 - protein, 136 aa, Unknown
  Bacterial polypetide isolated from the Sargasso Sea
MEMDERIAAFMPAEESLPAGGQGALGIEWRSADKDIHALLAPLHHEVTAQCVLAERAMNRRLQGGCQVPIACYAIIDGDELWLRGLVGSEDGQQMLRTEYRGSPEDAEALGIKAAEDLLAQGAGDILRAVYGHDVH

SEQ ID NO: 122833 - protein, 198 aa, Unknown
  Bacterial polypetide isolated from the Sargasso Sea
MADKNFFIIGCRGSKLSLAYSNHVKDLLIKFNPHFNDNSIQLKIIKTSGDIFQNKKISDIGGKGVFCKQIEEELLESKIDLAVHSLKDLPTRMTDGLCVNAVVKRNDPRDAFLSYASESFKKLKPKSKVGTSSFRRQAQLYLLRNDLEVVSMRGNIDTRIKKLENKEYDAIVLSLAGIQMLNLENQVKEIFTTEQMLP

SEQ ID NO: 122834 - protein, 239 aa, Unknown
  Bacterial polypetide isolated from the Sargasso Sea
MSRKLRIATRKSPLALWQANFVRQSLEKIHKDLQVELVPMSTQGDKILDSPLAKIGGKGLFVKELEMALLQDTADVAVHSMKDVPMEFPEGLQLAGICKREDPTDALVSNKYRNLEEMPKGATIGTSSLRRQCQLKYIRPDLDIIDLRGNVGTRLLKLDEGNYDAIVLASAGLIRLDQNSRIGSRLEPQECLPAAGQGAVGIESRVDDKETQKIISTIHDAATASCVLAERAVNNRLQE

SEQ ID NO: 122835 - protein, 208 aa, Unknown
  Bacterial polypetide isolated from the Sargasso Sea
MIASDKLRIGTRGSALALRQTGQVLELMKTKHITLNQPAAMETVVIKTTGDREQSRLLSEIGGKGLFTKELDEAMLRGEIDIGIHSMKDMPTAMPDGINLHAITERLDPRDAFISKKATTIRELPKGAIVGTASLRRKAQLLYLRPDLHIMPLRGNIDTRLRKINDGEIDAMLLAFAGLSRLGRECDIKGLIDFNEVLPAVGQGILAA

SEQ ID NO: 122836 - protein, 304 aa, Unknown
  Bacterial polypetide isolated from the Sargasso Sea
MTDKKKFIIGSRGSKLSLAYSNYVKNLLIRSNTQFDNNLIEIKTIKTSGDIFHNKKISDIGGKGVFCKQIEEELLESKIDLAVHSLKDLPTKMTDGLCVNAVVKRNDPRDAFLSYTTKSFKDLKPKSKIGTSSFRRHAQLNLLRKDLDVVGMRGNIDTRIKKLKNKEYDAIVLSLAGIQMLNLINEVKEVFTIEQMLPALGQGAIALQCKKNDQKTLNIIKAINDKETYYCIQAERALLESIGGDCDTAIGGLAKLSNDKISLKSELFSNDGKKKFEFQSSGHFSEAKEIGYKVGKELLKKAGP

SEQ ID NO: 122837 - protein, 208 aa, Unknown
  Bacterial polypetide isolated from the Sargasso Sea
MSREIRIATRKSALALWQAEHVKARLEQAHPGLKVSLVPMVSRGDKLLDAPLAKIGGKGLFVKELETALLENEADIAVHSMKDVPMDFPEGLGLYCICEREDPRDAFVSNTYSSLDALPAGSVVGTSSLRRQAQLLARRPDLKIQFLRGNVNTRLAKLDAGEYDAIILAAAGLIRLGFEDRIRSSISAEDSLPAGGQGAVGIECRSAD

SEQ ID NO: 122838 - protein, 297 aa, Unknown
  Bacterial polypetide isolated from the Sargasso Sea
AAFHPLALTQTRMVQAALQSAYPGLQIDLEIIRTTGDRVQDRPLSEIGGKGLFTKEIEAALLEERIDFAVHSAKDMETRLPDGLALSAVMQREDPRDVFISRKASNLAELPAGAVVGTTSLRRQAQILNRFPRLEVVPIRGNVDTRLCKLHDGEVDAILLALAGLKRLGRECDGMTVLDPDYMLPAAAQGAIGIETRADDERVIGMMAAINHEGSLKVISAERALLETLDGNCRTPVGALAEIEADGGLRLRALLANPDGAWLHSTERRGVIEDAVMMGKEAGEELRRLAGEAFLDD

SEQ ID NO: 122839 - protein, 101 aa, Unknown
  Bacterial polypetide isolated from the Sargasso Sea
MTKLKLKIASRRSKLAMVQTLWVKEQLEKNIPELEVTVEAMATQGDKILDVALAKIGDKGLFTKELEAQMLVGHADIAVHSLKDLPTNLPHGLILGCITKR

SEQ ID NO: 122840 - protein, 182 aa, Unknown
  Bacterial polypetide isolated from the Sargasso Sea
MTNFKLKIASRRSKLAMVQTLWVKDQLEKNIPNLEVSVEAMATQGDKILDVALAKIGDKGLFTKELEAQMLVGQADIAVHSLKDLPTNLPSGLKLGCITKREDPADALVVNKKNDSYKLETLPAGSIVGTSSLRRLAQLKNKYPHLVFKDIRGNVITRIEKLDAGDFDCIILAAAGLKRLGF

SEQ ID NO: 122841 - protein, 101 aa, Unknown
  Bacterial polypetide isolated from the Sargasso Sea
MSENRIRIATRKSPLAMWQAEFVKAELERVHPGIVVELLPMSTKGDVILDTPLAKVGGKGLFVKELEVAMLEDQADIAVHSMKDVPVDFPEGLGLEVICER

SEQ ID NO: 122842 - protein, 311 aa, Unknown
  Bacterial polypetide isolated from the Sargasso Sea
AYASRRSQLAMVQTEWVRDELAKAHPGLEISIEAMATQGDKILDVALAKIGDKGLFTKELEAQMLVNRADIAVHSLKDLPTNLPEGLMLGCITEREDPADALVMHAKNKDLTLATLPEGAVVGTSSLRRLAQLRYHYPHLTFKDVRGNVITRLEKLDSGQFDCLILAAAGLGRLGLGDRIHELIDPSISLHAVGQGALGIECRDGDAAVLEQIKVLEHRPTALRCLAERAFLRTLEGGCQVPIGVNTRFDGDELVLTGMVASLDGKQLIRDELRAPQDQAEDLGNRLAELLRSQGAGEILAKIFAEARPEA

SEQ ID NO: 122843 - protein, 137 aa, Unknown
  Bacterial polypetide isolated from the Sargasso Sea
AGLIRLGMESRIRMPLPADISLPAVGQGAVGIECRNDDEELIKLLQALNHTDTNTRVTAERAMNERLEGGCQVPIGSFATLDGDVLTLTGMVGKPDGSELLFASATASREKAADIGVEVAESLLEQGAGEILKALYN

SEQ ID NO: 122844 - protein, 200 aa, Unknown
  Bacterial polypetide isolated from the Sargasso Sea
MESRKVIIGSRGSPLALWQANWVKDLLHTHHSDLDVDIKIIKTSGDKIQNIPLAKIGGKGLFVKEIEEGLLKREVDFAVHSMKDMPISFPLNLCIACVTKRENPFDALISRNNIDLNELPKGAKIGTGSLRRMSQLKYFRPDFNLIPLRGNLETRLKKLNSEGLDAIILAAAGLIRLGWQDRITELISPEILLPAMGARC

SEQ ID NO: 122845 - protein, 239 aa, Unknown
  Bacterial polypetide isolated from the Sargasso Sea
MLEGRADIAVHSMKDVPVAFPEEFGLHAICERENPFDAFVSNHYDSVDALPNGAVVGTSSLRRQCQIRKHRPDLIIKDLRGNVNTRLAKLDAGDYDAIILASAGLIRLEMQDRIKMALPAEVSLPAVGQGAVGIECRNDDAQLIELLGALNHDETHVRVTAERAMNERLEGGCQVPIGSFATLDDNTLTLTGMVGKPDGTTLLFASATASAEKAKDIGIEVADALLEQGAGEILKALYE

SEQ ID NO: 122846 - protein, 186 aa, Unknown
  Bacterial polypetide isolated from the Sargasso Sea
SLRRLAQLRHHYPHLEFKDVRGNVITRLEKLDNGGYDCLILAAAGLGRLGFADRIHQLIPGDISLHAVGQGALGIECVEGQPEVLEIIKVLEHAPTSQRCLAERAFLRELEGGCQVPIGVNTRFEGDQLVLTGMVASLDGLRLIRDQASGPAADPEPIGVALANTLKQQGAGEILQEIFEAVRPEA

SEQ ID NO: 122847 - protein, 269 aa, Unknown
  Bacterial polypetide isolated from the Sargasso Sea
MLDKVLKIATRQSPLALWQAQYVKARLEQAHPGLNVELVPMVTRGDVILDTPLAKVGGKGLFVKELELAMLEGRADIAVHSMKDVPVEFPEGLGLVTICERDDPRDAFVSNHYASIDELPAGSVVGTSSLRRQCQLAATRPDLVIRSLRGNVGTRLSKLDNGEYDAIILAAAGLKRLKLEARIRQPLSPEQSLPAVGQGAVGIECRLDDAWTQALLAPLNHAETAVRVRAERAMNTRLEGGCQVPIGSYAELVNGELWLRALVGAPDGS

SEQ ID NO: 122848 - protein, 278 aa, Unknown
  Bacterial polypetide isolated from the Sargasso Sea
MKNNFPSPSAPLRIGTRGSPLALAQAYETRKRLAEALNASEDSFEIVVISTSGDRILDRPLKEVGGKGLFTKEIEQEMLDRKIDIAVHSMKDMPVEQPDGLTLGCYLPREDVRDAFVSSDFKNVSDLPSGSKVGTSSLRRKAQLKFSRPDLEVVEFRGNVQTRLKKLKDGVASCTFLAMAGLNRLGLGEVAQSVINPNEMLPAIAQGAIGIEWREADKKITDILRKIHHEETGQRLNAERAFLAELDGSCQTPIAGLATIEGSSLKFTGQVLRTDGSE

SEQ ID NO: 122849 - protein, 170 aa, Unknown
  Bacterial polypetide isolated from the Sargasso Sea
MTNLKLRIASRRSKLAMVQTLWVKDQLERNIPNLEVSIEAMATQGDKILDVALAKIGDKGLFTKELEAQMLVGHADIAVHSLKDLPTNLPNGLKLGCITKREDPADALVVNKKNNCYKLETLPEGSIVGTSSLRRLAQLRNKYPHLVFKDIRGNVITRIEKLDAGEFDCI

SEQ ID NO: 122850 - protein, 175 aa, Unknown
  Bacterial polypetide isolated from the Sargasso Sea
IKAMRPDLQIKDLRGNVNTRLAKLDAGEFDAIILASAGLIRLGLKARIASFLDVGTSLPANGQGAVGIECRSDDLVVQQLLAPLEHKETRICVLAERAMNRKLQGGCQVPIGAFAVLQQNELWLRGLVGQLDGSEILRSEIKGEATQAEQLGTQLAEQLLALGADRILDAVYRQA

SEQ ID NO: 122851 - protein, 217 aa, Unknown
  Bacterial polypetide isolated from the Sargasso Sea
MQLAGICKREDPTDALVSNRFRNLEDMPKGATIGTSSLRRQCQLKYIRPDLHITDLRGNVGTRLLKLDQGNYDAIVLASAGLIRLDQNSRISSRLEPKECLPAAGQGAVGIESRVDDKETQKIISTIHDAATASCVLAERAVNHRLQGSCQVPIASYAELYKNEMRLRALVGRVDGTHIVRSEHVDDCGSACELGLRVADDLLNKGAGNILDELREE

SEQ ID NO: 122852 - protein, 262 aa, Unknown
  Bacterial polypetide isolated from the Sargasso Sea
MVIGTRGSLLAMTQARLVEKDLKKIVPSVKIELKVIKTKGDMLSSSSNEETDKSLFVKELEESLLKEEVDLAVHSLKDMPSELPDGLDLIAIPEREDPHDVLISRDGESIRNLSPGSKVGTSSLRRSSQLKKYRDDLQVFPIRGNVDTRLEKLAKGDVDALILASAGLKRLGKEGEIIEVLSPEIMLPSPGQGALCIEGRAGDESIIECLQQLDHFVTRCLVSAERKVMKIVEGGCRVPLGAFAEMRNDQIFLRALLLSLDG

SEQ ID NO: 122853 - protein, 234 aa, Unknown
  Bacterial polypetide isolated from the Sargasso Sea
KLKIASRRSKLAMVQTLWVKDQLENIIPDLEVSIEAMATQGDKILDVALAKIGDKGLFTKELEAQMLVGRADIAVHSLKDLPTNLPDGLTLGCITKREDPSDALVVNKKNKIYQLESLPPGSIVGTSSLRRLAQLRYKFPHLDFKDIRGNVITRIEKLDSGEFDCIILAAAGLKRLGFESRIHQIIPNEISLHAVGQGALGIECKSDDKEVLKIISVLEDKVSSQRCLAERSFL

SEQ ID NO: 122854 - protein, 174 aa, Unknown
  Bacterial polypetide isolated from the Sargasso Sea
MSPSPTPTIVIATRESRLALWQAEHVKALLEARGHSVQLLGMTTKGDQILDKSLSKVGGKGLFVKELEVALEEGRAHIAVHSLKDVPMELPEGFALACVMEREDPRDAFVSPRYENLDALPQGAVVGTSSLRRQVLLQALRPDLTIEPLRGNLDTRLRKLDEGSTTRSCWPPRA

SEQ ID NO: 122855 - protein, 228 aa, Unknown
  Bacterial polypetide isolated from the Sargasso Sea
MKNNFPSPSAPLRIGTRGSPLALAQAYETRKRLTEALNASEDSFEILVISTSGDRILDRPLKEVGGKGLFTKEIEQEMLDRNIDIAVHSMKDMPVEQPDGLTLGCYLPREDVRDAFVSSKFKNVSDLPNGSKVGTSSLRRKAQLKFSRPDLEVVEFRGNVQTRLKKLEDGVASCTFLAMAGLNRLGLEEVAQSAINPNEMLPAIAQGAIGIEWREEDKQITDMLKKIH

SEQ ID NO: 122856 - protein, 117 aa, Unknown
  Bacterial polypetide isolated from the Sargasso Sea
GQGALGIECKSNVKKVLEIINVLEDQPTSQRCLAERAFLRDLEGGCQVPIGVNSKIQNEQLCLTGMVASLDGERLIKDQYIGNINNPEGVGKELAKKLKLQGADEILSEIFEQFREK

SEQ ID NO: 122857 - protein, 135 aa, Unknown
  Bacterial polypetide isolated from the Sargasso Sea
MDIKSNKRDFRANKLKIGTRGSPLALAQALEVKKEITNHHNLDDKSIEIITISTKGDRILDRPLTEIGGKGLFTEEIEEKLYNHEIDIAVHSMKDMPTEFPNGLGINTFLKREDFRDSFVSLKYNSINELPSGAV

SEQ ID NO: 122858 - protein, 238 aa, Unknown
  Bacterial polypetide isolated from the Sargasso Sea
VHSLKDLPTNLPDGLKLGCITKREDPADALVVSKKNEIYKLETLPQGSIVGTSSLRRLAQLRNKYPHLLFKDIRGNVITRIEKLDAGEFDCIILAAAGLKRLGFQSRIHQIIPNEISLHAVGQGALGIECKSDDKKVLEIINVLEDKPTSQRCIAERAFLRELEGGCQVPIGVNSRIKNEQLLLTGMVASLDGERLIKDQYIGNINDPEEVGKELAKKLKQQGAEKILSEIFEKFREK

SEQ ID NO: 122859 - protein, 292 aa, Unknown
  Bacterial polypetide isolated from the Sargasso Sea
MWQAEYVQAQLLKHHPECKVELVPMSTQGDRILDTPLAKIGGKGLFIKELEIAMLEGRADIAVHSMKDVPVEFPAEFGLHAICPRENPFDAFVSNTYNNIDELPAGAVVGTSSLRRQCQLKHLRPDLVIKDLRGNVNTRLAKLDAGDYDAIILACAGLIRLGMENRITQPIPQEQSLPAVGQGAVGIECRNDDAELIELLAALNDADTASRVIAERAMNERLEGGCQVPIGSFATLADDTLSLTGMVGSADGQTLLYASTQGHRDNAVALGKEVAESLLEQGAGEILKALHQ

SEQ ID NO: 122860 - protein, 269 aa, Unknown
  Bacterial polypetide isolated from the Sargasso Sea
EINVELLTVTTAGDRNQQQPLAEIGGKGLFVKDLENALLDGRADLAVHSMKDVTSILPEGLEISVIAERDDPRDAWICPKYGSIENLPKGATVGTSSLRRTAFLKHYRPDIKVRSLRGNVTTRLGKLDRGEVAAIILAVSGLKRINLENRITEIFPMKWMLPAIGQGAIGIETRTGDHSTLSLVKHINDPVTHGCLLAERSLLSELEGNCQIPLAGYCVNTVEELHLKSALCDPEGKSLIEYEARAQPHKAVSLGKESAEWLLNNGGDQ

SEQ ID NO: 122861 - protein, 280 aa, Unknown
  Bacterial polypetide isolated from the Sargasso Sea
MRPWPPRGDKILDVALAKIGDKGLFTKELEVQMLVDRADIAVHSLKDLPTNLPEGLMLGCITEREDPADALVVNAKNQAYKLETLPEGAVVGTSSLRRLAQLRHHYPHLIFKDVRGNVITRLEKLDRGDYDCLILAAAGLGRLGFADRIHQLIPGDISLHAVGQGALGIECVEGKPELLEAIKVLEHSTTSRRCLAERAFLRELEGGCQVPIGVNSQINNDELVLTGMVASLDGKRLIRDQASGAANEPESIGIELAGKLKQQGAGTILKEIFDEVRPEA

SEQ ID NO: 122862 - protein, 316 aa, Unknown
  Bacterial polypetide isolated from the Sargasso Sea
MTKFKLKIASRRSKLAMVQTLWVKEQLEKNIADLEVSIEAMATQGDKILDVALAKIGDKGLFTKELEAQMLVGHADIAVHSLKDLPTNLPDGLTLGCITKREDPSDALVVNKKNKIFQLESLPQGSIVGTSSLRRLAQLRYKFPHLDFKDIRGNVITRIEKLDSGEFDCIILAAAGLKRLGFESRIHQIIPNEISLHAVGQGALGIECKSDDKEVLKIISVLEDKASSQRCLAERSFLRELEGGCQVPIGVNSCIQNDEIALIGMVASIDGKRLIKDESIGNIKYPEEVGKKLAEKLKLQGADKILSEIFEQFREK

SEQ ID NO: 122863 - protein, 241 aa, Unknown
  Bacterial polypetide isolated from the Sargasso Sea
MTDKKKFIIGSRGSKLSLAYSNYVKDLLIKSNSQFDDSSIEIKIIKTSGDIFQNKRISDIGGKGVFCKQIEEELLESKIDLAVHSLKDLPTKMTDGLCVNAVVKRNDPRDAFLSHSDKSFEELKPKSKIGTSSFRREAQLNLLRNDLEIVAMRGNIDTRITKLKNKEYDAIVLSLAGIQMLNLKNEVKEIFTIQQMLPAIGQGAIALQCKKDDQKTLNTLKTINDKETYYCIQAERACSKL

SEQ ID NO: 122864 - protein, 316 aa, Unknown
  Bacterial polypetide isolated from the Sargasso Sea
MPESPIIIATRGSALALAQANFIFDQCRAAFPRLAFEIQIFKTTGDKLQTASLAQAGQSLPKGLFTKELEVALVRQKADIAVHSLKDLPTELPAGLTLGAATKREDVRDVLIYKTDDGHGGPIPQLAEGARVATSSTRRQAQLAAARPDLQLEEIRGNVPTRLEKLAENDELAGTILAAAGLNRLHFSINADGALEGDAVPDGIRAVALDTDLMLPCVGQAAIGLEIREDDGRIAKITERLNHFNTFAAVTAERAFLRGMGGGCQSPVGAHAVIEGTTIRMQAVSFLNDTVQRTEQSGALREPEALGQAVAEALRA

SEQ ID NO: 122865 - protein, 149 aa, Unknown
  Bacterial polypetide isolated from the Sargasso Sea
MRIATRGSKLALWQAEHVRSIILKKNPDIAVELVVLKTKGDLILDRPLAEVGGKGLFVKELESAMLENRADLAVHSLKDVPAILPEGLELSVILKRENPHDALVFRETNMSLEDLPTGSRIGTSSLRRAAQLKNMRPDLKVTSLRGNVP

SEQ ID NO: 122866 - protein, 238 aa, Unknown
  Bacterial polypetide isolated from the Sargasso Sea
MTNNIKLATRKSPLALAQAKIVKNFLIDNGVFDKVDLISMSTSGDTVDNKIFKKEGGKGLFLKELENALLEGEADIAVHSMKDVPAKLDERFNISSIMKREDPRDVFISDKHKTLSDIETGIIGSSSPRRQAIIKHMNSNIKSKEIRGNIQTRLKKLKKEQLDGIILAKSGLKRMGLDHVVTESLNVNDFVPSPGQGILCIECLSKNDFVIKRIKKVVHANTEICCTAERIFAKNMDG

SEQ ID NO: 122867 - protein, 317 aa, Unknown
  Bacterial polypetide isolated from the Sargasso Sea
MEYNNTNSRIRIGTRGSKLAIAQALELQNYLKSAHEALMEPGSIEVVVIKTTGDNVQDRPLAEIGGKGLFMKEIEEALLNKEIDLALHSMKDVETDLTEGTGLACILPREEINDAFISNKAQDINELSYGSIVGTSSVRRAALLKNKRPDLKITLFRGNVDTRLSKLDRGDVDATFLAVAGLKRLGLESRITKIMPLNEMPPAVAQGAIGAQCRTPRNKLDSQLWEWLEAINHKDSEICVEAERSMLKTLDGSCQTPIAGYAQLGDERELKLIGYVVSPGGESLYKVEGGGSRLDAVAIGRNVGERLKAKAGSDLVR

SEQ ID NO: 122868 - protein, 133 aa, Unknown
  Bacterial polypetide isolated from the Sargasso Sea
MNLVRIATRKSALALWQANFVKAELEAAHPGLQVELVPMSTQGDKILDTPLAKIGGKGLFVKELETAMLEGRADIAVHSMKDVPVDFPEGLMLHTICKREDPRDAFVSNTYQQLADLPQGAVVGTSSLRRQCQ

SEQ ID NO: 122869 - protein, 251 aa, Unknown
  Bacterial polypetide isolated from the Sargasso Sea
MNKQYKDRDFTDRPLIIGTRGSPLAVSQAEETKNRLMRAHKLDEKAFRIKIIKTTGDLVQDKPLSQIGGKGLFTKEIEEALLSKEIDIAVHSMKDVPTVLPKGLEITTLLPREDVRDSFLSNKASSIDALPIGCTVGTSSLRRKAQLLSRRPDLKIVEFRGNVQTRLRKLEKGVAQATFLACAGLKRLGLKDLIKPISVEQMLPAVAQGAIGLEQREEDEDVFEFLSPIHDLKTAIQLEAERAFLSELDGS

SEQ ID NO: 122870 - protein, 310 aa, Unknown
  Bacterial polypetide isolated from the Sargasso Sea
MSENRIRIATRKSPLAMWQAEFVKAELERVHPGIVVELLPMSTKGDVILDTPLAKVGGKGLFVKELEVAMLEDQADIAVHSMKDVPVDFPEGLGLEVICEREDPRDAFVSNLYKSISELPLGATVGTSSLRRQCQLRASRPDLIIKDLRGNVGTRLAKLDNGEYDAIILAAAGLIRLKLSERIASFISAEESLPANGQGAVGIECRTNDERVKALLAPLEHLETRYRVIAERAMNTRLEGGCQVPIGAFAEIHGDEMTLRGLVGNPDGSEIIEGVITGPKTEATQLGVALAEELLSKGAKSILDAVYAKA

SEQ ID NO: 122871 - protein, 308 aa, Unknown
  Bacterial polypetide isolated from the Sargasso Sea
MIKSVKIGTRSSKLALYQSNLVKEKLSSLLPSIKISIVEIKTKGDKIQDRNIDRSIDKGFFVKEIQEHLLDDQIDIAVHSLKDLPVENYSGDLASIILERGNHCDVFLSRNKKKLSDFDHTLKIGTSSLRRKAQLLNINSDLNIDDIRGNVDTRISKMLNGEFDGLVMAAAGIERLGLQEHVTEYFDTDQMLPAPGQGAISVEVKKKNNELFEMLKNICDEETDLCTYYERSFMNELGGGCNSPIGAYSFISNNKKKITGSILSLDGKQVYKRSLEKDLSDDINIGKLLAEDLIKSGAKEIIKKLTIE

SEQ ID NO: 122872 - protein, 163 aa, Unknown
  Bacterial polypetide isolated from the Sargasso Sea
MSHLNTTRTVRIATRKSALALWQAEYVKAKLLEHYPSMTVELVPMSTQGDKILDTPLAKIGGKGLFIKELEIAMLEGRADIAVHSMKDVPVEFPEGFGLHAICERENPFDAFVSNNHDSLDALPQGAVVGTSSLRRQCQIRKYRPDLIIKDLRGNVNTRLAKL

SEQ ID NO: 122873 - protein, 305 aa, Unknown
  Bacterial polypetide isolated from the Sargasso Sea
MSNLIRIATRKSPLALVQANRVKELIEKRLKDTTVKLITRSTSGDTVSKAKFKKSGGKGLFLKELEELLLDGDADIAVHSLKDVPVVVDKKFIITTVDLREEAGDVLISKQFNKITELPDKSVIGTSSPRRIAQIRNKYKNIQIKEIRGNVQTRIAELSNDKVDAVILAAAGVKRLSLSDKISQYLPKDDYVPAAGQGVLCIQTTKNNEYILKTLKGLVLDEVDRCASEERDFVRQFDGDCFSPIAAHCYIKNNKSTLIGYVSSTDGNRFIKTKIVENVNEMRGIGKKLAKIMIEQGAKKILGTK

SEQ ID NO: 122874 - protein, 123 aa, Unknown
  Bacterial polypetide isolated from the Sargasso Sea
MSRKLRIATRKSPLALWQANFVRQSLEKIHKDLKVELVPMSTQGDKILDSPLAKIGGKGLFVKELEMALLQDTADVAVHSMKDVPMEFPEGLQLAGICKREDPTDALVSNKFSNLEGMPKGAT

SEQ ID NO: 122875 - protein, 388 aa, Unknown
  Bacterial polypetide isolated from the Sargasso Sea
MRNCGQATSYVRHIRASAPRPARRQAGRRLRARAGRGVRATIVRSSIPSFDVPAMNSETPAAGPQQAQSPATLTIASRESRLAMWQAEHVRDALRKLYPACDVKILGMTTRGDQILDRTLSKVGGKGLFVKELEAALADGRADLAVHSLKDVPMALPDGFSLAAIMEREDPRDAFVSNDYASLDALPAGAVVGTSSLRREAMLRSRYPHLDVLPLRGNLDTRLAKLDRGDYAAIILAAAGLKRLGLETRIRALLDVEASPPAAGQGALGIEIASHRNDVAAWLAPLHDPQTALAVEAERMVSRALGGSCEVPLAAHAVWRAGELYLTGRVSTTDGKRVLTAEECGAVVTVADALALGRAVSDALEAQGALDIVQALLAGSPAAGKGDA

SEQ ID NO: 122876 - protein, 305 aa, Unknown
  Bacterial polypetide isolated from the Sargasso Sea
MSNLIRIATRKSPLALVQANRVKELIEKRLKDTTVKLITRSTSGDTVSKAKFKKSGGKGLFLKELEELLLDGDADIAVHSLKDVPAIIDKKFIITTIDTREEAADVLISKQFNKITELPDKSIIGTSSPRRIAQIRNKYKNIEIEEIRGNVQTRLAALSNDKVDAIILAAAGLKRLSLSDKISQYLPKDDYVPAAGQGVLCIQTIKNKENILKTLKGLVVDEVDRCASEERGFVSQFDGDCFSPIAAHCYIKNNKSTLIGYVSSTDGNRFIKTKIVENVNEMRGIGKKLAKIMIRQGAKKILETK

SEQ ID NO: 122877 - protein, 316 aa, Unknown
  Bacterial polypetide isolated from the Sargasso Sea
MTNFKLKIASRRSKLAMVQTLWVKDQLERNIPNLEVSIEAMATQGDKILDVALAKIGDKGLFTKELEAQMLVGHADIAVHSLKDLPTNLPNGLKLGCITKREDPADALVVNKKNDCYKLENLPEGSIVGTSSLRRLAQLRNKYPHLVFKDIRGNVITRIEKLDAGEFDCIILAAAGLKRLGFESRIHQIIPSEVSLHAVGQGALGIECKSDDKKVLEIINILEDKPTSQRCLAERAFLRELEGGCQVPIGVNSKIQNEQLCLTGMVASLDGERLIKDQYIGNINDPEEVGKELAKKLKQQGAEEILSEIFEKFREK

SEQ ID NO: 122878 - protein, 310 aa, Unknown
  Bacterial polypetide isolated from the Sargasso Sea
MSENRIRIATRKSPLAMWQAEFVKAELERVHPGIVVELLPMSTKGDVILDTPLAKVGGKGLFVKELEVAMLEDQADIAVHSMKDVPVDFPEGLGLEVICEREDPRDAFVSNLYKSISELPLGATVGTSSLRRQCQLRASRPDLIIKDLRGNVGTRLAKLDNGEYDAIILAAAGLIRLKLSERIASFISAEESLPANGQGAVGIECRTNDERVKALLAPLEHLETRYRVIAERAMNTRLEGGCQVPIGAFAEIDGDEMTLRGLVGNPDGSEIIEGVITGPKTEATQLGVALAEELLSKGAKSILDAVYAKA

SEQ ID NO: 122879 - protein, 314 aa, Unknown
  Bacterial polypetide isolated from the Sargasso Sea
WQAEHVRCALHKLYPSCDVKILGMTTRGDQILDRTLSKVGGKGLFVKELEAALADGRADLAVHSLKDVPMELPEGFALSTIMEREDPRDALVSNQYDSLAALPAGAVVGTSSLRREAMLRMRYPHLVVRPLRGNLDTRLAKLDRGDYAAIILAAAGLKRLGLGERIRANLDPEDSLPAAGQGALGIEIRADRADLAAWLAPLHHEHTAAAVEAERMVSRALGGSCEVPLAAYAQWHDGALHLRGIVATPDGQRVLSAQASAPAPTVERAIALGEEVASALEQQGAMDIVRALSTASGPAAASSDGAPDSAATGE

SEQ ID NO: 122880 - protein, 289 aa, Unknown
  Bacterial polypetide isolated from the Sargasso Sea
MAQAYETKERLMKLHDLGDDAFEICVINTMGDKIQDRALSEIGGKGLFTKEIEEGLLSGQIDIAVHSMKDMPTELPKNLEISVFLEREDPRDSFISDDYSTIEDLPSGSVVGTSSLRRKAQLLAFRSDLKVIEFRGNVQTRLRKLKEKVADATFLACAGLNRLLMQDLIKPIPIKQMLPAVAQGVIGIENKIGNKTIVDFIEPLNHKKTAIQMTVERSFLAVLDGSCRTPIGGHAIIKEEEILFHGEILKSDGSIVHKDVWSGPISDSKIIGETAGQILKEKGGKNFFG

SEQ ID NO: 122881 - protein, 316 aa, Unknown
  Bacterial polypetide isolated from the Sargasso Sea
MTNFKLKIASRRSKLAMVQTLWVKDQLEKNIPNLEVSIEAMATQGDKILDVALAKIGDKGLFTKELEAQMLVGQADIAVHSLKDLPTNLPSGLKLGCITKREDPADALVVSKKNDCYKLETLPAGSIVGTSSLRRLAQLRNKYPHLNFKDIRGNVITRIEKLDAGEFDCIILAAAGLKRLGFESRIHQIIPNEISLHAVGQGALGIECKSDDKEVLEIINVLEDKPTSQRCIAERAFLRELEGGCQVPIGVNSIIQDEQLYLTGMVASLDGERLIKDQCIGNINDPKKVGEELAKKLKIQGADKILSEIFEQFREK

SEQ ID NO: 122882 - protein, 153 aa, Unknown
  Bacterial polypetide isolated from the Sargasso Sea
MTLKIRIATRKSELALRQVDIVKSYFGADVETETIKVTTSGDKILNKSLSDIGGKGLFIKELEYFILNGFADIAVHSMKDMETDIAKNTEISAVLPRGDRSDVLLGNYDSFDNLPDKAIVGTSSVRRAAFAKYYRPDLNIKVLRGNVGTRMKS

SEQ ID NO: 122883 - protein, 303 aa, Unknown
  Bacterial polypetide isolated from the Sargasso Sea
MKNIIRIATRNSPLALKQANMVKDLLTPSSDCKIISMSSSGDTVSQKAFKEHGGKGLFLKELEESLLKGNCDIAVHSLKDVPAVIDKKFKIITISKREVSSDVLVSDDYESIEEMPKDSIIGTSSPRRAAILRNISQDFKIIDIRGNIHTRLTKMNNKNLDGIILAAAGLRRMGLENKIRKYLSLDKFVPSAGQGILCIELLRNEKKIEKILEKLCVKNVQDCADIERQFVRAIDGDCMSPIGVHARINKNKIIIDAYVSTLDGKRHIKVKHEDDVSNKQNVGEELADIFLKQGAKKLLGKSV

SEQ ID NO: 122884 - protein, 312 aa, Unknown
  Bacterial polypetide isolated from the Sargasso Sea
MELKLPDPKSPLRIGTRGSPLALAQAYETRERLSIAFGLSLDSFEIVVIKTTGDKVLNRPLKEIGGKGLFTKEIEEALLQESIDIAVHSMKDMPVQQPDSLILDTFLPREDVRDAFVSRIHKSLADIPQGATVGTSSLRRKAQLMSKRPDLKIVEFRGNVQTRLKKLDDGVAECTFLAVAGLNRLNMEDIITAPISTDEMLPAVAQGAIGIERREKDIKIATMLEAIHNSTTGLLLSAERAFLEALDGSCETPIAGLAEFKNENLRFRGEILKTDGSEVYSDEQVVAKEDATLVGIEMAHKLLSQAGNDFFS

SEQ ID NO: 122885 - protein, 174 aa, Unknown
  Bacterial polypetide isolated from the Sargasso Sea
MLKKITIATRKSPLALWQAEYVASLLKSKNHGIEISFKKIVTDGDKIIDKPLYEVGGKGLFLKQLEEALLSKEADIAVHSMKDIPAQLHSELTISAILRREDARDVFVSNKMSSINEIQPGNKIGSSSIRRICLLNDFCQNIKISELRGNIHTRLEKLEQKNMDGIILAAAGLK

SEQ ID NO: 122886 - protein, 323 aa, Unknown
  Bacterial polypetide isolated from the Sargasso Sea
MAVTAEGSKVPERPMLRIATRGSKLALWQAEHVRSLILKQHPDIAVELVVLKTKGDLILDRPLAEVGGKGLFVKELESAMLENRADLAVHSLKDVPALLPEGLELSVILKRENPHDVLVFRETNMTLEDLQIDSRIGTSSLRRAAQLKNIRPDLEVTSLRGNVPTRLKKLDFGEVDAAVLAAAGLIRLELEDRINQELSTEQMLPAIGQGVLALETRKGDDATLEKLRFMNDEPTEDCMTAERKVLETLEGNCQVPLAGFCKLEGNNLHLRALIAQQDGSTIFHAEERARRDEAEEIGTRVANLLLQQGGGVLLQQLSAMEER

SEQ ID NO: 122887 - protein, 142 aa, Unknown
  Bacterial polypetide isolated from the Sargasso Sea
IILASAGLIRLVMESRIRMPLPADISLPAVGQGAVGIECRNDDEELIKLLQALNHTDTNTRVTAERAMNERLEGGCQVPIGSFATLDGDVLTLTGMVGKPDGSELLFASATASREKAADIGVEVAESLLEQGAGEILKALYN

SEQ ID NO: 122888 - protein, 317 aa, Unknown
  Bacterial polypetide isolated from the Sargasso Sea
MALTELRIASRRSQLAMVQTNWVKAELEKAHPGLKITVEAMATQGDKILDVALAKIGDKGLFTKELEAQMLVDRADIAVHSLKDLPTNLPEGLMLGCITEREDPADALVVNAKNQAYKLDTLPEGSVVGTSSLRRLAQLRHHYPHLIFKDVRGNVITRLEKLDSGDYDCLILAAAGLGRLGFGDRIHQLIPGDISLHAVGQGALGIECVEGKPEVLEAIKVLEHTPTSQRCLAERAFLRELEGGCQVPIGVNTRFEGDQLILTGMVASLDGKRLIRDQASGAASDAEAIGIALANTLKGQGAGEILKEIFDTVRPEA

SEQ ID NO: 122889 - protein, 54 aa, Unknown
  Bacterial polypetide isolated from the Sargasso Sea
MEKLLIRGGKTLTGEINCSGAKNAALPVIAASLLTDDDVVLQNLPHLRDITTMF

SEQ ID NO: 122890 - protein, 160 aa, Unknown
  Bacterial polypetide isolated from the Sargasso Sea
MLTITDLSLQRGGVWLLENVNLTVQPGQRVAIVGANGAGKSSLFKLLLGQLAAEQGGVSLPGGCRIAHMAQEVEASARSARDFILDGDFELRRLERELAEAEARGDDHAIAHAHGELDLHEAWSAPRRAEALLRGLGFADSDAERPVSAFSGGWRIRLNL

SEQ ID NO: 122891 - protein, 236 aa, Unknown
  Bacterial polypetide isolated from the Sargasso Sea
MDKFLINGPCKIKGNVSISGSKNASLPILAATLLFDKPVVINNLPRVKDINTMLNLLKSLGSKIILSRDKKTAKIINKKNMKTFASYSLVKTMRGSILVLGPLISKYYKSKISLPGGCLIGARPINYHLKALKKLGMKYELKDGYILAKSKGKLSGTTINFPKLSVGATENSIIAACLAKGKTVLNNCAIEPEIKDLTNFLNKAGAKIKWSGRVCKIIGVNSLNQTEYSVMADRIE

SEQ ID NO: 122892 - protein, 104 aa, Unknown
  Bacterial polypetide isolated from the Sargasso Sea
MCKAVGKSSITESIFENRFMHVAELQRLGAKISVKNNTATIEGNTKFIGAELMSSDLRASVALVLAAIVSTGKSYINRIYHLDRGYEKIENKLKKIGVKIKRLK

SEQ ID NO: 122893 - protein, 224 aa, Unknown
  Bacterial polypetide isolated from the Sargasso Sea
MKKFIIKGPNKAAKGEVNISGAKNSCLPLMAASILFNNKVILKNVPFVKDVYTMKDLLISLGAKVDFSESEKIMIINNKKNHKLMVPYKLVSTMRAGVLTMGPLLARYPKKQIKVALGGGCALGVRDTNWHLAGFKSLGANFELDKGYVNISSKKGLIGGRYKFPKVTVTGTSNVIMASILAKGTHYIKNISIEPEVIDLINFLNNSGANIKFLGKRSIKIKGV

SEQ ID NO: 122894 - protein, 145 aa, Unknown
  Bacterial polypetide isolated from the Sargasso Sea
MDKFLIKGPCKIKGEVLISGSKNAALPILASTLLFDKPVNIKNLPRVKDVDTMLNLLKSLGSVIKYSKNKKTVTISKSKKHNVFVPYSLVKTMRAGILVLGPLIAKYQKSITSLPGGCLIGARPVNYHLNALKKLGMKYKIKKRL

SEQ ID NO: 122895 - protein, 125 aa, Unknown
  Bacterial polypetide isolated from the Sargasso Sea
MKRFLINGPNKGVKGEINISGAKNSCLPLMAASILFKKKVILRNVPFVRDVLTMKDLLVSLGSKVELIKEKKIIKIINNKKHKLIVPYNLVSTMRAGVLTMGPLLARYPKSKIRVALGGGVRFRN

SEQ ID NO: 122896 - protein, 112 aa, Unknown
  Bacterial polypetide isolated from the Sargasso Sea
MQAQFMVLLCLAGGRSSITESIFENRFMHVAELRRLGAKIVVKGNKAIIQGQTEFKGAELMSSDLRASVALVLAAMVAKGQSIINRIYHLDRGYEKIENKLKKIGVNIKRLS

SEQ ID NO: 122897 - protein, 158 aa, Unknown
  Bacterial polypetide isolated from the Sargasso Sea
MDMWCQKLGEMGMRISSDSTGLWAMASKGLQSVDLATLPYPGLATDYKPFLVAMLSVADGVGIVTENLFSGRFRYVDELIRMGAEIRTEGHHAVIRGVPKLSGAPVRAHDIRAGAALVTAALKADGETEIRDPHHIDRGYEDLVGKLKSLGADIDRAN

SEQ ID NO: 122898 - protein, 96 aa, Unknown
  Bacterial polypetide isolated from the Sargasso Sea
MDKLEVFGAKKLKGKIYVSGSKNAALPILAATILSNKKIVLRNVPKVKDIETMLKLLQSIGSDVKYLKKKGLVIIKNKKKLKTFASYNLVKTMRAG

SEQ ID NO: 122899 - protein, 87 aa, Unknown
  Bacterial polypetide isolated from the Sargasso Sea
MEKLLIKGGNSLSGRISCSGAKNAALPMIASTILSNQKVVLKNLPYLQDITTMFELLGSMGSEILLDENMDFTISSYNLNNIQARYE

SEQ ID NO: 122900 - protein, 212 aa, Unknown
  Bacterial polypetide isolated from the Sargasso Sea
MDKFLIKGPCKIKGQVSISGSKNAALPILASTILFENPVTIKNLPRVRDIDTMLNLLISLGSSVSISKDRKRVTIKKKNKKKTFASYSLMKTMRAGILVLGPLVSKYHKSITSLPGGCLIGARPVNFHLNALKKLGMNFEIKKGYIFAKSKGKLIGNKIRFSKITVGATENSIIAAVLAKGKTILKNCAIEPEIKDLTNFLNSAGANIKWIG

SEQ ID NO: 122901 - protein, 122 aa, Unknown
  Bacterial polypetide isolated from the Sargasso Sea
MDKFIVKGPCKIKGEISISGSKNAALPILASTILFEKEVIIKNLPRVKDIDTMINLLKSLGSKIKFSRNKKIVKITKKKKQSYFASYSLVRTMRAGILVLGALVARFQKSITSLPGGCLIGA

SEQ ID NO: 122902 - protein, 58 aa, Unknown
  Bacterial polypetide isolated from the Sargasso Sea
MGAPVMATDLRASVSLVLAGLAASGETTINRIYHLDRGYESLVSKLKSCGAMIDRVRT

SEQ ID NO: 122903 - protein, 91 aa, Unknown
  Bacterial polypetide isolated from the Sargasso Sea
MDKLLIDGQQSLSGSVRISGAKNSVLPMLCASVMVSNGQVELENVPHLQDVTTTTRLLTQMGISVTMDEFMDISLDPSTIHNLYAPYELVK

SEQ ID NO: 122904 - protein, 216 aa, Unknown
  Bacterial polypetide isolated from the Sargasso Sea
MKFQNNNLKSAKLGYFFKNYIEVKGGNQLEGNLKISGAKNSALVLMAASILSKGKINLFNVPKISDVAIMSKLLIAMGMNIKSNANELEINTKKIIVPPQDLFFDLYHAIRVSFFCIGPILARFGKAKIPLPGGCSIGARPIDEHIDSLKKLGVVFKLKNNYVTAEVITPNKRLVGSSINFKCKSVGATETLLMAASLAKGQTILNNAAQEPEIID

SEQ ID NO: 122905 - protein, 267 aa, Unknown
  Bacterial polypetide isolated from the Sargasso Sea
RNGYILAKSNGRLKGKKIKFPNISVGATENSIIAACLARGKTILKNCAVEPEIKDLTQFLNKAGANIKWSGRTCTIIGVNSLNQTIHTVMADRIEAGTFCVAATLGKGILQIKNFDPKIISTEIELLKKVGAKIKISNNKIFIKGPDKIKPIKNIKTKEFPGIPTDLQAQLMVLMCKSVGKSSITESIFENRFMHVAELQRLGAKINIQNNKALIEGNTKFVGAELMSSDLRASVALVLAAMVANGKSIVGRVYHLERGYENIENKL

SEQ ID NO: 122906 - protein, 235 aa, Unknown
  Bacterial polypetide isolated from the Sargasso Sea
YDSGKETIIIDGVNKLGGCTHKVIPDRIEAGTFLIAAAATSSSITISPVIPHHLEAVTNKLQESGSKVTIKGNSISIKSKEIKGVDIETAPFPGFPTDLQAPFTTLMTIANGESKITETIFENRMNHIYLLNEMGAHIKLNKNVAHIKGVKTIKGMNLVGSDLRSSAALIIAGIIAKGSSKIYGLEHLDRGYENFELKLKKLGIKITREVSKSTFEKNEYKIETKSKKLSKLEAA

SEQ ID NO: 122907 - protein, 239 aa, Unknown
  Bacterial polypetide isolated from the Sargasso Sea
MTAAAIASQEILKPHLTVAGGHSLGGTIRVSGAKNSALVLMTASLLTADTLELCNVPDLTDIGGMSEILVSLGVKVERQADRVRLNAAVLSSAEPPYELVNSLRASFFSIGPLLGRLGHAKVPLPGGCRIGARPVVEHIRGLKALGAVIQVEHGIIHANVPGPNKRLKGASIILDCPSVGATETILMAAVLAEGTSTIENVAQEPEVQDLANLLNRMGARVSGTGSPVITVEGVESLHG

SEQ ID NO: 122908 - protein, 242 aa, Unknown
  Bacterial polypetide isolated from the Sargasso Sea
MKTFASYSLFKTMRGSILVLGPLVSKYYKSKTSLPGGCLIGARPVNYHLTALKKLGMKYELKDGYILAKSNGKLRGTTINFQKISVGATENSIIAACLAKGETVLKNCAIEPEIKDLTNFLNKAGAKIKWSGRVCKIIGVNSLNETEYSVMADRIEAGTFCVAAALTKGNLQINNLNPKIIGTEIKLLKKIGAKIKTSENKILIIGPEKIKSIKSIKTKEFPGIPTDLQAQLMVLMCKAVGK

SEQ ID NO: 122909 - protein, 107 aa, Unknown
  Bacterial polypetide isolated from the Sargasso Sea
MVLLCKANNRSLITEDIFENRFMHVAELNRMGAQITINGNKVSIEGKIKFASAELMATDLRASVSLILAALTARGKSTINRIYHLDRGYENIEKKLKKIGARIRRVN

SEQ ID NO: 122910 - protein, 263 aa, Unknown
  Bacterial polypetide isolated from the Sargasso Sea
MLTIDPLVEPPNARLGLPGSKSITNRALVVAGLADGESDLSGVLFSEDTHVMMDSLQKMGVEIRQKPDDLSVLIRGTGGSLQSPEETIWVHQSGTTARFCLPLAALCGQEVMIDGDDQIKNRPHEELCKALQSLGAQIEYLEAPNSFPLVVNGKDLQGGHISLNGGVSSQFISALLLAAPCFPDQLELNIDGDLVSRPYIDMTISVMQAFGAQVQRVDDRRYVISPTGYRNSRYEIEPDASAASYFFAAAAISGGSITVEGLG

SEQ ID NO: 122911 - protein, 101 aa, Unknown
  Bacterial polypetide isolated from the Sargasso Sea
MALFSLSSGKSVFEENIFENRFMHVPELNRMGAQIDVEGGVATVKGVKRLKGAPVMATDLRASVSLILAGLAAHGKTIINRVYHLDRGYESVEKNYLLAEQ

SEQ ID NO: 122912 - protein, 99 aa, Unknown
  Bacterial polypetide isolated from the Sargasso Sea
NSEIIENIFENRFMHVPELLRMGANISVNGGIAKVSGVQNLKGAQIMATDLRASISLIIAALRAEGESYISRIYHLDRGYEQIEQKFQDCGANIERITN

SEQ ID NO: 122913 - protein, 180 aa, Unknown
  Bacterial polypetide isolated from the Sargasso Sea
FCVAACLNGGKLKIKNFEPKIINTEINLLKKIGAKIKTTKNTIQIKGPKKIRSLDFLKTGEYPNFPTDLQAQIMVLLTRANGKSTIEENIFENRFMHVPELKRLGAKINIKGNKAIIEGTNNLEGAELMSSDLRASVALVLAAFISRGTSIINRVYHLDRGYEKIENKLKKIGVKIKRIS

SEQ ID NO: 122914 - protein, 91 aa, Unknown
  Bacterial polypetide isolated from the Sargasso Sea
IFENRFMHVAELQRLGAKINIKNNTATIEGNTKFIGAELMSSDLRASVALVLAAVVSTGKSYINRIYHLDRGYEKIENKLKKIGVKIKRFK

SEQ ID NO: 122915 - protein, 217 aa, Unknown
  Bacterial polypetide isolated from the Sargasso Sea
SIIAATLAQGKTTLKNCAIEPEIKDLTNFLKSAGANIKWIGKRTCQIIGVNSLSPTTYSVMGDRIETGTFCVATTLTKGDLIIKNFNPKLIHTELNLLKRSGAKIKTNKNEIKIKGPQKIKSINSIVTKEYPNFPTDLQAQLMVLMCKADGRSSITESIFENRFMHVAELRRLGAKIVIKDNKATIEGNTEFIGAELMSSDLRASVALVLAAIISKG

SEQ ID NO: 122916 - protein, 289 aa, Unknown
  Bacterial polypetide isolated from the Sargasso Sea
MFIFPGSKNASLPILAATILSNKKVILKNLPNVKDIETMIKLLMSIGSSIKYSKKKNLISIRNKKKLNTFASYNLVKTMRAGILVLGPMLARYGKAKVSTPGGCSIGVRPIDIHLKALSKLGAKYKIIDGYVHAYVNGKLKGAKIKFSKISVGATENLIIAASMAEGTSILKNCAIEPEIKDLVKFINLMGGNIKWIGKRTLQIQGVNKFNEIKYNIMPDRIEAGTYLVAAAVTEGNLKIHGIKPNIIKTEIDILRKIGIKIKIDKQIIKIYGTKGIKSLNLKTSPYPG

SEQ ID NO: 122917 - protein, 334 aa, Unknown
  Bacterial polypetide isolated from the Sargasso Sea
KRASSLRGSIMIVGPLLARYGKGFIPKPGGDKIGRRRLDTHFEGFALLGAKFNYDAGEYFYSIEAKKLKGAYIHLDEASVTGTANIIMGAVLAEGKTDFYNAACEPYIQQLCKMLNSMGAKISGIGSNFLHIEGVKELKGCYHRVLPDMIEIGSFIGLAAMTKSEITIKDVSYDNLGIIPNVFKRMGIKLERRGDDIYVPAQDHYEIDTFIDGSILTIYDAPWPGFTPDLLSIILVVATQAKGSVLIHQKMFESRLFFTDKLIDMGAQIILCDPHRATVIGLNREFPLRGISMTSPDIRAGVSLLIAALSAEGKSTIHNIEQIDRGYQDIEYRL

SEQ ID NO: 122918 - protein, 329 aa, Unknown
  Bacterial polypetide isolated from the Sargasso Sea
CITVELGSDIGANDDNIVNGGAGYANTDLTITATDPDSFDATTNITGGTGTDTITITAVGGGTADLTNVTGIDVLNIVDFTTNAAVVITAGTNAATPMTVNATTQDAGEGLNFDGNSMTGGLTINAGEGADSLDGGTVNDVIYGNGGIDTIDGQENSATLGADAIYGGAGNDIINVSTAETEFSNSSTTALVTDTVDGGAGTDTLAFGAVATLTKAELANISNIEKLTLQSTSSITLSDDFLTNNPGVSITLAAGTISAGAGTTADPTITLALNYIAGNGAIKVTGGTADDSFGNCSGALIDVSDTIDGGAGTDTINVYNDAGFGSAAT

SEQ ID NO: 122919 - protein, 263 aa, Unknown
  Bacterial polypetide isolated from the Sargasso Sea
AKIRFPKISVGATENLIIAACFAKGTTTLKNCAIEPEILDLVNFLNKTGCNVKWTSKRTVKIIGVASIKNINYQIMFDRIEAGTYMVAAALTEGSLKITNIKPDIIQTEIKILRKIGAKIKISKNNIKVTGRKKIKGLNIKTAPYPGLATDMQAQIMVLLCKANNKSTIKENIFENRFLHVAELNRMGAQISTKGNMAYIPGNIKFAPAELMATDLRASVSLVLAALTAKGKSVINRIYHLDRGYENIEKKLKKVGAKIRRVN

SEQ ID NO: 122920 - protein, 165 aa, Unknown
  Bacterial polypetide isolated from the Sargasso Sea
MKKFIIKGPNKGIKGEVNISGAKNSCLPLMAASILFKNKVILKNVPFVKDVYTMKNLLVSLGAKVNISESKKIITINNKNNHKLIVPYNLVSTMRAGVLTMGPLLARYFRKKIKVALGGGCALGVRDINWHLAGFRSLGAKNNLRYGYVNISAARGLVGNKYKFS

SEQ ID NO: 122921 - protein, 265 aa, Unknown
  Bacterial polypetide isolated from the Sargasso Sea
MDKFLIKGPCKIKGQVNISGSKNAALPILAATLLFDKPVIIENLPRVKDIDTMLNLLRSLGSKIQLSKNKKTVKILKTNKKKFFASYSLVKTMRAGILVLGPLLAKFKKAQCSMPGGCNLGLRPIDIHLKALTELGVKYKIKKGYVYAQTKKEILGKEIKFPKISVGATENTIIAACLAKGKTILKNCAIEPEIKDLTNFLKSAGSKIKWIGKRTLQIEGVKSLKSIKYSVMGDRIETGTFCVAACLSSGDLKIKNFNPKLINTE

SEQ ID NO: 122922 - protein, 114 aa, Unknown
  Bacterial polypetide isolated from the Sargasso Sea
TDLQAQLMVLMCKAVGKSSITESIFENRFMHVAELQRLGAKINIKNNTATIEGNTKFIGAELMSSDLRASVALVLAAIVSTGKSYINRIYHLDRGYEKIENKLKKIGIKIKRLK

SEQ ID NO: 122923 - protein, 177 aa, Unknown
  Bacterial polypetide isolated from the Sargasso Sea
MDKFIVKGPCKIKGEISISGSKNAALPILASTILFEKEVIIKNLPRVKDIDTMINLLKSLGSEIKFSKNKKIVKITKKKKQKFFASYSLVRTMRAGILVLGALVAKHQKSVTSLPGGCLIGARPVNYHLNALKKLGMIYDIRKGYIHANTKGKLKGAKVRFPRISVGATGKYNYAAC

SEQ ID NO: 122924 - protein, 87 aa, Unknown
  Bacterial polypetide isolated from the Sargasso Sea
MEKLIIDGGTPLKGKVKISGSKNAALPILAATVVYPNKYSFNNIPDIQDVRTMLELLKILGAKYKFKNNKVVIKHIDIKNTRHLIIW

SEQ ID NO: 122925 - protein, 91 aa, Unknown
  Bacterial polypetide isolated from the Sargasso Sea
FENRFMHVPELNRMGAKIKVSGNLSTINFSEELNGAEVMATDLRASVSLVLAGLIAKNRTIINRVYHLDRGYENLEKKLRNCGAKITRVNN

SEQ ID NO: 122926 - protein, 162 aa, Unknown
  Bacterial polypetide isolated from the Sargasso Sea
MDKFLINGPCKIKGNVSISGSKNASLPILAATLLFDKPVVIKNLPRVRDINTMLNLLKSLGSKIILSRDKKTAKIINKKNMKTFASYSLVKTMRGSILVLGPLISKYHKSKISLPGGCLIGARPVNYHLTALKKLGMKYELKDGYILAKSKGKLSGTTVNFP

SEQ ID NO: 122927 - protein, 148 aa, Unknown
  Bacterial polypetide isolated from the Sargasso Sea
MDKFLIKGPCKIKGEVSISGSKNSALPILAATILFDKPVLIKNLPRVKDIDTMLNLLRSLGSKIYISKNKKIVKIVKSKRQKFFASYSLVKTMRAGILVLGPLIAKHHKSITSLPGGCLIGARPVNYHLNALKKLGMKYEIKKRLYTC

SEQ ID NO: 122928 - protein, 168 aa, Unknown
  Bacterial polypetide isolated from the Sargasso Sea
KIRNFEPKIINTEINLLKKIGAKIKTTKNTIQIKGPKKIKSLNFLKTGEYPNFPTDLQAQIMVLLTRANGKSTIEENIFENRFMHVPELKRLGAKINIKGNKAIIEGTNNLEGAELMSSDLRASVALVLAAFISRGISIINRVYHLDRGYEKIENKLKKIGVKIKRIS

SEQ ID NO: 122929 - protein, 141 aa, Unknown
  Bacterial polypetide isolated from the Sargasso Sea
ENKILIKGPKKIKSIKSIKTKAFPGIPTDLQAQLMVLMCKAVGKSSITESIFENRFMHVAELQRLGAKINVKNNTVTIEGNTKFIGAELMSSDLRASVALVLAAIVSNGKSYINRIYHLDRGYEKIENKLKKIGVKIKRLK

SEQ ID NO: 122930 - protein, 140 aa, Unknown
  Bacterial polypetide isolated from the Sargasso Sea
MDKFVIKGPCKIKGKVDISGSKNASLPILAATLLFDEAVEIKNLPRVRDIDTMLNLISSLGFSVKRNYKNNSVKITKLKKIKTIASYSLVKTMRAGILLLGPLVSKYRKAITSLPGGCLIGARPVNYHLKVLKKLGMKYS

SEQ ID NO: 122931 - protein, 195 aa, Unknown
  Bacterial polypetide isolated from the Sargasso Sea
MKQFIIRGPNKAIKGEVNISGAKNSCLPLMASSILFKNKIILRNVPFVKDVYTMKDLLVSLGAKVDFSVSQKMMIITNKKKHKLVVPYNLVSTMRAGVLTMGPLLARYPRKKIKVALGGGCALGVRDTNWHLSGFKSLGANNNLEKGYVKISSKNGLKGGNYKFPKVTVTGTSNLIMASIFAKGEHLIKNISIEP

SEQ ID NO: 122932 - protein, 142 aa, Unknown
  Bacterial polypetide isolated from the Sargasso Sea
MDKFLITGPCKVKGQVSISGSKNAALPILASTLLFDKPVVIENLPRVRDIDTMLNLLKSLGSKIKFSKNKKTVKIYKTKKQNYFASYSLVKTMRAGILVLGPLISKYHKSITSLPGGCLIGARPVNFHLSALKKLGMKYEIK

SEQ ID NO: 122933 - protein, 276 aa, Unknown
  Bacterial polypetide isolated from the Sargasso Sea
MQLCQFLASTILFDKSVTIENLPRVRDIDTMLKLLKSLGSKIEFFNNKKTVKISKTKKQKYLAPYSLVKVMRGSFLSLGALLAKHHKAIISLPGGCLIGARPVNYHLSALKKLGMKYEIKKGYIHAISKGRLKGTNFKFSNISVGATENSIIAACLAKGKTILKNCAIEPEIKDLTNFLNSAGAKIKWIGKRTVQVEGVKILNSIKYSVMGDRIEAGTFCVAASLTAGDLLIKNFDSSLIQTELNLLKKIGSKIKTFKKEIYIKGPNKIKSINNIV

SEQ ID NO: 122934 - protein, 153 aa, Unknown
  Bacterial polypetide isolated from the Sargasso Sea
VGKLTSAGAIVTSIHNGIRVQMNQRPKAIDVATLPYPGFATDLLPFIIGMNAIAEGHSIVTENVFESRFMFVNELMRLGAQITIDGHHASIDGIPQLSGAPVEATDIRAGAGLVLAALVSDGETTVDGAFHIDRGYPNFAEQLVSLGAKVSRE

SEQ ID NO: 122935 - protein, 113 aa, Unknown
  Bacterial polypetide isolated from the Sargasso Sea
RPSAQLMVLMCKAVGKSSITESIFENRFMHVAELQRLGAKINIKNNTATIEGNTKFIGAELMSSDLRASVALVLAAIVSNGKSYINRIYHLDRGYEKIENKLKKIGVKIKRLK

SEQ ID NO: 122936 - protein, 286 aa, Unknown
  Bacterial polypetide isolated from the Sargasso Sea
KKLGMNYKIKDGYILAKTKGRLKGNTIKFPKISVGATENSIIAACLAKGKTILKNCAIEPEIKDLTNFLNSAGAKIRWSGRMCKILGTDSLNQTEYTVMADRIEAGTFCVAATLTKGNLEIKNFNPDIIKAELELLRKVGARIKIDSNKLTVIGPEKIKPIKNIKTREWPGVATDMQSQLMVLMCRADGKSSITENIFENRFLHVGELQRLGANIEIKKNKAFINGNTKFIGAELMSSDLRASVALVLAAMISNGKSSINRIYHLDRGYENLEIKLKKIGVKIKRL

SEQ ID NO: 122937 - protein, 176 aa, Unknown
  Bacterial polypetide isolated from the Sargasso Sea
GCISPNRITITNAKVEDLKEVLSTIRLMGAKVETRKASIKITPPKAIRPIQVQTNPFPKFPTDLQAQLMAVLIFAKGVSKIQENVFPNRFIHVAELRKLGANITIKENAAKIIGVNGLAGAKIQASDLRASAGLILSALSSKGKTEIFRIYHLDRGYERIDDKLKLIGAKIWRKKE

SEQ ID NO: 122938 - protein, 35 aa, Unknown
  Bacterial polypetide isolated from the Sargasso Sea
LRETTIDRIYHLDRGYESLETKFNKLGAKIERISS

SEQ ID NO: 122939 - protein, 102 aa, Unknown
  Bacterial polypetide isolated from the Sargasso Sea
SEVRSVIKENIFENRFMHVSELRRMGANLKQKGSKIIINGVSEIYGAEVMATDLRASSSLIIAGLMASGNTTVNRVYHLDRGYENLEEKLKSCGVKIRRYSE

SEQ ID NO: 122940 - protein, 234 aa, Unknown
  Bacterial polypetide isolated from the Sargasso Sea
KINGPSKIRGEVSISGSKNAALPILAATLLFDKQVTIKNLPRVKDIDTMLNLLKSLGRKINFKNNKKIATISKGKKNNFFAPYSLVKTMRAGILVLGPLLAKNKKAKVSSPGGCSIGVRPIDIHLKAISKLGVKIQIEKGYVNAKAQKGLVGSEIRFSKISVGATENLILAACLAKGTTTIKNCAIEPEIKDLTNFLKTAGAKIKWIGKRTLKIEGVKTLKRITYSIMNDRIEA

SEQ ID NO: 122941 - protein, 175 aa, Unknown
  Bacterial polypetide isolated from the Sargasso Sea
LAKGNLKISNFDAKIIKTELELLKRFGAKIKVQKEKIFIKGPEKIRSIKDIKTKEYPGVATDLQSQLMVLMCKANGKSSMTENIFENRFMHVAELRRLGAKIDVKNNKAYIYGNTKFIGAELMSSDLRASVSLVLAAMVSKGKSIINRIYHLDRGYENIEHKLKKIGVKIKRLKQ

SEQ ID NO: 122942 - protein, 130 aa, Unknown
  Bacterial polypetide isolated from the Sargasso Sea
IKSIKSIKTKEFPGIPTDLQAQLMVLMCKAVGRSSITESIFENRFMHVAELQRLGAKINIKNNTATIEGNTKFIGAELMSSDLRASVALVLAAIVSNGKSYINRIYHLDRGYEKIENKLKKIGVKIRRLK

SEQ ID NO: 122943 - protein, 32 aa, Unknown
  Bacterial polypetide isolated from the Sargasso Sea
MTQQQCNNPEAPYDLVKNMRASFYVLGPLLAR

SEQ ID NO: 122944 - protein, 130 aa, Unknown
  Bacterial polypetide isolated from the Sargasso Sea
MEKFLIKGPSKIRGQVNISGSKNAALPILAATLLFDKPVTISNLPRVKDIDTMLNLLRSLGSKVELSRNKKIVKISKTNKKKIFASYSLVKTMRAGILVLGPLLAKFKKAQCSMPGGCNLGLRPIDIHLK

SEQ ID NO: 122945 - protein, 202 aa, Unknown
  Bacterial polypetide isolated from the Sargasso Sea
MDKFLINGPCKIKGSVSISGSKNASLPILAATLLFDKPVLIKNLPRVRDINTMLNLLKSLGSKIILSKDKKTAKIINKKNMKTFASYSLVKTMRGSILVLGPLISKYHKSKTSLPGGCLIGARPINHHLTALKKLGMKHELKDGYILAKSKGKLSGSTINFPRISVGATENSIIAACLAKGKTVIKNCAIEPEIKDLTNFLN

SEQ ID NO: 122946 - protein, 215 aa, Unknown
  Bacterial polypetide isolated from the Sargasso Sea
MSSFNLVQIIPSLDSGGVERGTVDVANFLSTKKLSNHIISSGGSLVQEIDKKYTSHYLLPVNSKNFLRYPIIANQIAKYIKLNNINIVHVRSRAPAWMTSLIFKRNIKTVSTFHNVYGGDFFLKKIYNSQMANVNHIIAISNYVKNKIIEKYNLDPEKITVINRGVDTDFFNDDIQEDKKQMFLKEYNITKEKKNYFVPWSHNRMERTNKFFKLY

SEQ ID NO: 122947 - protein, 123 aa, Unknown
  Bacterial polypetide isolated from the Sargasso Sea
MDKFIVKGPCKIKGEISISGSKNAALPILASTILFEKEVIIKNLPRVKDIDTMINLLKSLGSEIKFSKNRKIVKITKKKKQNFFASYSLVRTMRAGILVLGALVAKHQKSITSLPGGCLIGAR

SEQ ID NO: 122948 - protein, 162 aa, Unknown
  Bacterial polypetide isolated from the Sargasso Sea
MSSFNLVQIVPSLDSGGVERGTVDVANFLAQKQIKNFIITSGGKMIKELDDNFVHVHQLPVSSKNFFSYPSIARNINKFIQANNINLLHVRSRGPAWMINFMSKNNIKTISTFHNVYGGNSFIKKMYNKGLSKMDHLIAISDYVKETVIQKYNITNKNISVI

SEQ ID NO: 122949 - protein, 201 aa, Unknown
  Bacterial polypetide isolated from the Sargasso Sea
GVNSLNQTIHTVMADRIEAGTFCVAATLAKGILQIKNLDPKIISTEIELLKKVGAKIKISNNKIFIKGPDKIKPIKNIKTKEFPGIPTDLQAQLMVLMCKSVGKSSITESIFENRFMHVAELQRLGAKINIQNNKALIEGNTKFVGAELMSSDLRASVALVLAAMVANGKSIVGRVYHLERGYENIENKLQKIGVKIKRLK

SEQ ID NO: 122950 - protein, 205 aa, Unknown
  Bacterial polypetide isolated from the Sargasso Sea
MDKFIVKGPSKLKGEVAISGSKNAALPILASTILFEKEVIIKNLPRVKDINTMINLLKSLGSIIKFSKDKKIVKITKKKKYNIFASYSLVRTMRAGILVLGALVAKYQKSITSLPGGCLIGARPVNYHLNALKKLGMNYEIKKGYIHANTKGKLKGAKIRFSKISVGATENTIIAACLANGTTILKNCAIEPEIIDLINFLQSGG

SEQ ID NO: 122951 - protein, 146 aa, Unknown
  Bacterial polypetide isolated from the Sargasso Sea
MERLIIKGGNHLQGEIDCSGAKNAGLPILASTILLDGSALIGNLPHLQDITTKLELLNSMGSQINFHEDGYIEINSSNILLPEARYELVKTMRASILVMGPLVAKYGKAKISQPGGCDIGTRPIDFHLSGLEKMGAELSQIQNIFI

SEQ ID NO: 122952 - protein, 317 aa, Unknown
  Bacterial polypetide isolated from the Sargasso Sea
MDKFIVKGPCKIKGEISISGSKNAALPILASTILFEKEVIIKNLPRVKDIDTMINLLKSLGSEIKFNKNRKVVKITKKKKQNFFASYSLVRTMRAGILVLGALVAKHQKSITSLPGGCLIGARPVNYHLNALKKLGMKFDIKKGYIHAHTKKKLKGTKIRFSKISVGATENTIIAACLANGVTLLRNCAIEPEIIDLINFLKSGGAKIKFIGKRTLKIEGIKSLDSTSYSVMSDRIETGTFCVAACLTGGNLKINNFDPKIIKTELSLLKKVGAKIKLAKNQIHISGPKKIKNLTNLVTKEYPNFPQIYSTVYGSTL

SEQ ID NO: 122953 - protein, 317 aa, Unknown
  Bacterial polypetide isolated from the Sargasso Sea
SDDRTEWLLPSANVSLSPITLFQAPSSEASFYNNMTWSGAGGFRRNAVDRLQSPGDTITSLAGLDREVMTGTLRSNLSLGRLTLSQAVDLTEDRTAGALDNAFLVIPDSTQEAQLMTGDLTEAELRWSTSVNYQQQLIGSTTITPRLSLSGNMLRSNTDPLAQNFVSAPSRIAFGAQLKTDIYGFFGGVGPFEAIRHKITPAIDYAWSPESAPTDMQRAVFGARALQPKNAISVSLTQTWEAKPREPEVEEQVVSLGLESEAPLGDALGAGLGPSQPDSLEAAPDNAEGGLQRGQQVPAMTLLAWRTSVIQYDFVQA

SEQ ID NO: 122954 - protein, 271 aa, Unknown
  Bacterial polypetide isolated from the Sargasso Sea
MKKFIITGPSKAINGIVNISGAKNSCLPLMAASILFKKQVILRNVPLVQDVLTMKDLLISLGSKVKILEKKKIMIITNKKDHKLTVPYNLVSTMRAGVLTMGSLLGRYPKKNIRVAQGGGCALGIRDTSWHLEGFKSLGAEHILEKGYVKISSKNGLVGKSYKFPKVTVTGTSNLIMSSVFVRGSHVLKNISLEPEVTDLIKFLNNSGANIKFIGKRSLRIKGVKELLSGNHKIIGDRIEAFSYLCIGAITKGSVKVMNIDPKFLPSELKI

SEQ ID NO: 122955 - protein, 379 aa, Unknown
  Bacterial polypetide isolated from the Sargasso Sea
MQSKICVLQVIPNLDVSGASQGCVDVANFLSEKNYNSYILTHSGPKSIEVKDSNEKVFYAPVNSKNPLKIFLNTIKIIQLIKKLNITIVHARSRAPAWSSYFACAVTGAKFITTFHGTYNFSNPLKKYYNSIMLKTNGTIAISEFINDHINNCYPTKNNNIRTIARGVDLDFFDPNNCKTQQVELIIKEFNIDNDAIKILLAGRITGWKGHKLLLQAISSILKKTNHKFEIIFVGPDENHKLKTSLKNFANEHNLAKSLHFVGPRNDLNNFYSLADLVISASTDPEAFGRISVEAQAMGKFVIASNHGGSVETVKDGETGYLFENNNSEDLCEKIIEAISNEKHKSDKTSEACISHVREKYSKIKMCEETINFYEEIIN

SEQ ID NO: 122956 - protein, 181 aa, Unknown
  Bacterial polypetide isolated from the Sargasso Sea
MERLIIKGGNQLHGEVNCSGAKNSGLPILASTILLDTPAKIGNLPHLQDITTMLELLNSMGALINFDEDGYIEIDSSNISVPEARYELVKTMRASILVMGPLVAKYGKAKISQPGGCNIGTRPIDFHLDGLEKMGAKIKSDAKYIYLEADKLNPIDFSFPKISVTGTENLMMAAAIIEGKT

SEQ ID NO: 122957 - protein, 197 aa, Unknown
  Bacterial polypetide isolated from the Sargasso Sea
MERLIIRGGNQLHGEVNCSGAKNSGLPILASTILLDTPAKIGNLPHLQDITTMLELLNSMGALINFDENGYIEIDSSNISVPEARYELVKTMRASILVMGPLVAKYGRAKISQPGGCNIGTRPIDFHLSGLEKMGAKIKSDAKYIYLEADRLNPIDFSFPKISVTGTENLMMAAAIIEGKTVLKNCAKEPEVVELAN

SEQ ID NO: 122958 - protein, 208 aa, Unknown
  Bacterial polypetide isolated from the Sargasso Sea
MDKFLINGPCKIKGSVKLSGSKNASLPILAATILFDEPVEIKNLPNVKDIETMLNLIKSLGFIVKKKKFNNSVIIKKKKIKTFACYSLVKTMRAGILVLGPLISKYRKAITSLPGGCLIGVRPVNFHLNVLRRLGMKHEIKKGYIYANAKKGLKGSTIKFPQISVGATENAMLAATLADGKTILKNCAIEPEIKLDLTNFLNKAGAKI

SEQ ID NO: 122959 - protein, 155 aa, Unknown
  Bacterial polypetide isolated from the Sargasso Sea
MSSFKLVQIVPSLDSGGVERGTVDVANFLAEKKIHNFIITSGGKMIKELNKNFTHIHQLPVDSKNFFYYPFIAKKINQFIKANNINIAHVRSRGPAWMINLMAKNNIKTIATFHNVYAGNSYVKKFYNKGLSKMDHLVAISDYVKETIIKKYNLS

SEQ ID NO: 122960 - protein, 154 aa, Unknown
  Bacterial polypetide isolated from the Sargasso Sea
MDKFSITGPCRVMKGKVSISGSKNAALPILAATLLFDKPVIIENLPRVRDIDTMLNLLKSLGSNIQFLNNKKTVKITKTKKQKQFASYSIVKTMRAGILVLGPLVAKYHKSISSFPGGCVLNGNSGRPINLHLEALKKLGMNYEIKKGYIHAKS

SEQ ID NO: 122961 - protein, 45 aa, Unknown
  Bacterial polypetide isolated from the Sargasso Sea
ASLIIAALASKGETQISRVYHIDRGYENIEQKFEGLGGDIQRISE

SEQ ID NO: 122962 - protein, 139 aa, Unknown
  Bacterial polypetide isolated from the Sargasso Sea
MEKLIIKGGNQLHGEINCSGAKNAGLPILASSILFSDSIQVGNLPHLKDISTMLELLNSMGSNICLEENGMLTIDSSNLTNPEARYELVKTMRASILVMGPLLAKYGRAKISQPGGCNIGTRPIDFHLSGLEQMGAEIK

SEQ ID NO: 122963 - protein, 300 aa, Unknown
  Bacterial polypetide isolated from the Sargasso Sea
IGARPVNYHLIALKKLGMKYKIRDGYIIAKSNGRLKGKTIKFPKISVGATENSIIAACLAKGKTILKNCAMEPEIKDLTQFLNKAGANIKWSGRTCIITGIDSLNQTTHTVMADRIEAGTFCVAATLAKGNLQVKNLDPNIINTELELLKKVGAKIKTTNNKIFIKGPNKIKSIKNIKTKEFPGIPTDLQAQLMVLMCKSVGKSSITESIFENRFMHVAELQRLGAKINIKNNKAFIEGNTNFIGAELMSSDLRASVALVLAAIVANGKSIVGRVYHLERGYENIENKLKKIGVRIKRLK

SEQ ID NO: 122964 - protein, 294 aa, Unknown
  Bacterial polypetide isolated from the Sargasso Sea
MEKFIVQGPCRLKGSVEISGSKNASLPILAATLLFDDVVELKNLPNVKDIYTMLSLLESLGSKVKINKQKKIIKIYKSKKIKTFASYNLVKTMRAGILVLGPLIAKYKQAITSLPGGCSIGARPVNHHLNSLKKMGMKYFIKKGYIHAKVDKTLTGNLIRLPKISVGATENLIIASCLAKGKTIIKNCAIEPEIKDLSNFLIKAGAKIRWIGKRTVEIIGVKSLRSISYNVMGDRIECGTFCVAAALTEGNLKIKGFNPKLINTELNILKQTGAKIQLKKDEINIKGNNIIKNI

SEQ ID NO: 122965 - protein, 110 aa, Unknown
  Bacterial polypetide isolated from the Sargasso Sea
MDKFSITGPCRVMRGEVSISGSKNAALPILAATLLFDKPVIIENLPSRTRDIQVMLNLLKSLGSNIQFLNNKKTVKITKTKKQKQFGSYSILKTMRAGILILGPLVSKYG

SEQ ID NO: 122966 - protein, 223 aa, Unknown
  Bacterial polypetide isolated from the Sargasso Sea
MDKFIVKGPSKLKGEIAISGSKNAALPILASTILFEKEVVIKNLPRVKDIDTMINLLKSLGSIVKFSKDKKTVKITKKKKHKFFASYSLVRTMRAGILVLGALVAKYQKSITSLPGGCLIGARPINYHLNALKKLGMKYEIKKGYIYANSKGKLKGAKIRFSKISVGATENTIIAACLANGITILRNCAIEPEIIDLINFLKSGGAKIKFIGKRTVRIEGVKF

SEQ ID NO: 122967 - protein, 41 aa, Unknown
  Bacterial polypetide isolated from the Sargasso Sea
MDYFEIKESKKLYGSVKVSGAKNAVLPLMAASILNRKKLKF

SEQ ID NO: 122968 - protein, 55 aa, Unknown
  Bacterial polypetide isolated from the Sargasso Sea
MEKLLIKGGKSLSGQIDCSGAKNAALPVIAASILSSDDITLKNLPYLQDITTMLN

SEQ ID NO: 122969 - protein, 201 aa, Unknown
  Bacterial polypetide isolated from the Sargasso Sea
FFKIQVGAKIKFIGKRTLKIEGIKSLESTSYSVMSDRIETGTFCVAACLTEGNLKINNFDPKIIKTELSLLKKIGAKIKVAKKQIHISGPKKIKNLTNLVTKEYPYFPTDLQAQFMVLLCKAKGKSSITESIFENRFMHVAELRRLGAEIIVKKNKAFISGNTNFQAAELMSSDLRASVALVLAAIVAKGSSIINRIYHLR

SEQ ID NO: 122970 - protein, 225 aa, Unknown
  Bacterial polypetide isolated from the Sargasso Sea
VVDLIKMLKNMGADITGEGSSEIVINGVSTLKSTNHKVIGDRIVAGTYIGAFLSTNGNGKIVGINPDHLPMEIKKFTEMGAKFEISSDSIEVESPKQLSPIDISTLPFPGIATDLQPIFGASLLKANGTSIITENVYDQRFQWIPEVQRMGADIQIGWQHAMIKGVDKLSGAPVHSTDIRTGASLIIAALQADGESTISGIDHIERGYENIVSLLSSIGSEIEYN

SEQ ID NO: 122971 - protein, 98 aa, Unknown
  Bacterial polypetide isolated from the Sargasso Sea
ITDTVYHDRFSHIPELNRFGANIKSDNNTAFVRGVNELIGAPVMSTDIRASASLIIAGLIAKGQTTVSRIYHIDRGYEKIEEKFRALGANIIRDNSPG

SEQ ID NO: 122972 - protein, 297 aa, Unknown
  Bacterial polypetide isolated from the Sargasso Sea
MSSFNLVQIVPSLDSGGVERGTVDVANFLAQKQIKNFIITSGGKMIKELDDNFVHVHQLPVSSKNFFLYPSIARKIYKFIQANNINLVHVRSRGPAWMINFMSKKNIKTISTFHNVYGGNSFIKKMYNKGLSKMDHLIAISDYVKETVIQKYNITNKNISVINRGIDTEYFNQPINKTYKEDFINRHQIDKSKKIILFPARLTRWKGQLEFVDVIRKITTESILVLFAGDTKNDSYTKQLREKINKSNLNDTFKILGSINQEEMRLLFDIADLSVSLPLRAEGFGRTISESLYSGTP

SEQ ID NO: 122973 - protein, 413 aa, Unknown
  Bacterial polypetide isolated from the Sargasso Sea
NKAIKGEVDISGAKNSCLPLMAASILFKNKIILKNVPFVKDVHTMKDLLISLGSKVEFSEKKKIMTIINKKKHKLIVPYKLVSTMRAGVLTMGPLLARYPKQKIKVAMGGGCALGVRDTNWHLAGFKTLGANNSLEKGYVNISAKKGLTGSHYKFPKVTVTGTSNLIMASVFVKGTHFIKNISIEPEVIDLINFLNNSGASIKFLGKRSIKIIGVKALDNGNHTIIGDRIEAFSYLCVGAATNGKIRIKNINPKYLRSEINVLKKVGYKIETKDNSIRISPGLKLKPIKLRTGPFPNFATDNMPLILAVLTTIKGKSQIEETIFSNRFMAAPELNRMGAKITIKKNKAIIIGQKKLNSADCISSDLRSTFSIIIGAISAYGSSSISRIYHGLRGYYNLELKLKKIGIKIISKI

SEQ ID NO: 122974 - protein, 60 aa, Unknown
  Bacterial polypetide isolated from the Sargasso Sea
PSKLTGAEVMATDLRASVCLVLAGLVADNRTIINRIYHLDRGYETLEKKLRYCKARIKRI

SEQ ID NO: 122975 - protein, 119 aa, Unknown
  Bacterial polypetide isolated from the Sargasso Sea
MGFPTDLQAQIMSLMSIVNGNSEIKETVFENRFMHVPELNRLGAEINLNKDIAFIKGNKKFKGAQVMASDLRASVSLVLAALCAEGKTTINRVYHLDRGYAEIEKYLGKLGAKIMRQKI

SEQ ID NO: 122976 - protein, 99 aa, Unknown
  Bacterial polypetide isolated from the Sargasso Sea
SKSQITENIFENRFMHVPELNRMGANIETKGKTAIINPCKGFISAQVMATDLRASVSLILAGLVAKGETTLNRIYHLDRGYEKIEKKLQACGADIRRIN

SEQ ID NO: 122977 - protein, 191 aa, Unknown
  Bacterial polypetide isolated from the Sargasso Sea
MQKLIVKGNKSLVGTVKISGSKNATLPILAAAILSNEKIELNNVPLVNDVFTMTKLLSHIGSNIKFNHRKKKILIHNKKKNFKTTAPYKLLKTMRAGVIVLGPLLSKFKRAKVSLPGGCAIGTRPVDIHLFGLKKLGAKIKIKNGYIIAEARNGLKGTNINLPSISVGATENVIIAASYANGVSYIKNCAC

SEQ ID NO: 122978 - protein, 166 aa, Unknown
  Bacterial polypetide isolated from the Sargasso Sea
VKNIKTKYLESLIQTLIKMKANLIVNDNDITILPSKKIIGINIETAPYPGFPTDLQAQIMALMCIANGPSTIKEKIFENRFMHVSELNRLGANIKIKKDIAYVAGNTKFKGAQVMASDLRASVSLVLAGLCAKGETTVNRVYHLDRGYEKIEETLGICGPIIRREK

SEQ ID NO: 122979 - protein, 210 aa, Unknown
  Bacterial polypetide isolated from the Sargasso Sea
MDKFIVKGPCKIKGEISISGSKNAALPILASTILFEKEVIIKNLPRVKDIDTMINLLKSLGSEIKFNKNRKIVKITKKKKQNFFASYSLVRTMRAGILVLGALVTKHQKSITSLPGGCLIGARPVNYHLNALKKLGMKYDIKKGYIHAHTKEKLKGAKIRFSKVSVGATENTIIAACLANGITVLRNCAVEPEIIDLINFLKSAGAKIKL

SEQ ID NO: 122980 - protein, 299 aa, Unknown
  Bacterial polypetide isolated from the Sargasso Sea
KSITSLPGGCLIGARPVNYHLNALKKLGMKYDIKKGYIHAHTKEKLKGAKIRFSKISVGATENTIIAACLANGITILRNCAIEPEIIDLINFLKSGGAKIKFIGKRTVKIEGIKSFESTSYSVMSDRIETGTFCVAACLTGGNLKINNFDPKIIKTELSLLKKVGAKIKVAKKQIHISGPKKIKNLTNLVTKEYPNFPTDLQAQFMVLLCKAKGKSSITESIFENRFMHVAELRRLGAEILIKKNKAFISGDTNFQAAELMSSDLRASVALVLAAIVAKGSSIINRIYHLDRGYENIES

SEQ ID NO: 122981 - protein, 258 aa, Unknown
  Bacterial polypetide isolated from the Sargasso Sea
MDKFIVKGPCIIKGEISISGSKNAALPILASTILFEKEVIIKNLPRVKDIDTMINLLKSLGSEIKFNKNRKIVKITKKKKQNFFASYSLVRTMRAGILVLGALVAKHQKSITSLPGGCLIGARPVNYHLNALKKLGMKYDIKKGYIHAHTKGKLKGAKIRFSKISVGATENTIIAACLANGITILRNCAIEPEIVDLINFLKSGGAKIKFIGKRTLKIEGIKSLESTSYSVMSDRIETGTFCVAACLTGGNLKINNLT

SEQ ID NO: 122982 - protein, 228 aa, Unknown
  Bacterial polypetide isolated from the Sargasso Sea
EIKDLTNFLKSAGANIKWIGKRTCQIIGVNSLNPTTYSVMGDRIETGTFCVAATLTKGDLTIKNFNSKLIQTELNLLKRSGAKIKTYKNEIKIKGPQKIKNISSIVTKEYPNFPTDLQAQFMVLMCKANGRSSITESIFENRFMHVAELRRLGAKIVIKDNKAIMEGNTDFTGAELMSSDLRASVALVLAAIISKGQSVINRIYHLDRGYEKIENKLKKIGVRIKRLS

SEQ ID NO: 122983 - protein, 287 aa, Unknown
  Bacterial polypetide isolated from the Sargasso Sea
IKGGNHLKGEIDCSGAKNAGLPILASTILLDGSALIGNLPHLQDITTKLELLNSMGSQINFHEDGYIEINSSNIFLPEARYELVKTMRASILVMGPLVAKYGKAKISQPGGCDIGTRPIDFHLSGLEKMGAEIKSDSKYIYLKAKKLNPIDFSFPKVSVTGTENLMMAATLIEGTTTLRNCAKEPEVLELANYLNNCGAKISGAGKSEIIVQGVKKLEASRWNVLFDRIEAGTYLVAGAITNGHVKVNKIDPETINIVSEKLIDMGVEVNIGSDFVEVDATSSDLKA

SEQ ID NO: 122984 - protein, 93 aa, Unknown
  Bacterial polypetide isolated from the Sargasso Sea
NIFENRFMHVQELVRMGANIKLDKDKALIRGDRSLNGANVMATDLRASASLIIAGLVAIGKTTISRIYHLDRGFYNLECKLNNCGASIKRISE

SEQ ID NO: 122985 - protein, 227 aa, Unknown
  Bacterial polypetide isolated from the Sargasso Sea
GATENTIIAACLANGITILRNCAIEPEIIDLINFLKLGGARIKFIGKRTLKIEGVKSLESVSYSVMPDRIETGTFCVAACLTGGKLKIKNFDPRLIKTELSLLKKVGAKIITSKKQILISGPKKIKNITNLVTKEYPSFPTDLQAQFMVLLCKANGKSLITESIFENRFMHVAELRRLGADITIKKNKAFISGNTDFQAAELMSSDLRASVALVLACNCCKRIVHNQ

SEQ ID NO: 122986 - protein, 189 aa, Unknown
  Bacterial polypetide isolated from the Sargasso Sea
MSDRIEAGTFCVAATLTKGSLEIKNFNSKIINSEINLLKNVGAKIKVYNNKIFIKGPSKIKNIKNIKTKEFPGIPTDLQAQLMVLMCRAVGKSSITESIFENRFMHVAELQRLGAKIYVKKNKAFIQGNTKFIGAELMSSDLRASVALVLAAMVANGKSYINRIYHLDRGYEKIENKLKKIGVKIKRLK

SEQ ID NO: 122987 - protein, 321 aa, Unknown
  Bacterial polypetide isolated from the Sargasso Sea
FDKPVEISNLPGVKDIETMLKLLESLGLKVNRHKKNKSVKIFKSKKIKTQASYSLVKTMRAGILVLGPLITKYKKAITSLPGGCLIGERPVNHHLSALKKLGMKYNIIKGYIHATAHKNLNGKKIIFSKISVGATENLIMAACLAKGTTILKNCAIEPEIRDLINFLNKAGAKIKWIGRRSIKITGVKSLNQVKYKVMGDRIECGTFCVAAVLTSGNLQIKGFDPKLIRTELNLLKKIGAKIKTSLNEINIQGNKNLNSLKNLATKEYPDFPTDLQAQFMVLLCRANGISKITENIFENRFLHVGELKRLGAKINVKNNQA

SEQ ID NO: 122988 - protein, 228 aa, Unknown
  Bacterial polypetide isolated from the Sargasso Sea
MDKFVIKGPSKIKGDIRISGSKNAALPILAATLLFSKPVELKNVPNVRDIQTMLNLLRFFKKKIKISKNKNTIKIYNSKKIRTYLPYSISKTMRGSIICLGGLVSKYGKAISAYPGGCAIGTRPINYHLDALKKLGMKYEIKKGYIYATAKNGLKGNNIKFKKISVGATENSIIAASLAKGKTILKNCAIEPEIKDLTKFLSSAGANIKWIGKRTVQIIGVQKLRSIN

SEQ ID NO: 122989 - protein, 124 aa, Unknown
  Bacterial polypetide isolated from the Sargasso Sea
MQRLIIKGKNNLKGTIKISGSKNATLPILAACILSDQSEIKNIPLVNDIFTMIKLLDFIGLNVSLSKKNKTVKIKNHLIKSKKNIVAPYKLVKTMRAGVLVLGPILNRCGKAKVSLPGGCAIGT

SEQ ID NO: 122990 - protein, 117 aa, Unknown
  Bacterial polypetide isolated from the Sargasso Sea
PTDMQAQFMALNSISHGSSIIEETVFENRFQHVIELRKMGANIDLEKNKAKIIGVPNLVGSVVKASDLRASASLVLAGLVGKNRTQIDDIFHIDRGYECIEEKLNKLGAEIIREPVL

SEQ ID NO: 122991 - protein, 200 aa, Unknown
  Bacterial polypetide isolated from the Sargasso Sea
VKSLKKVEYSIMGDRIECGTFCVAATLTQGNLKIKGFNPKLINTELKLLKKVGANIKIFKKEINIRGPKKIKNIRFLKTKEYPFFATDLQAQFMVLFCKGLGRSTILETIFENRFMHVGELRRLGAKISIKNNKAIIEGGANFEGAELMSSDLRASVALVLAALSAEGKSIINRIYHLDRGYEKLEYKLKKIGANIKRIN

SEQ ID NO: 122992 - protein, 108 aa, Unknown
  Bacterial polypetide isolated from the Sargasso Sea
MEKLLIKGGNQLSGKITCSGAKNAALPMIASTILSDEKVTLKNLPYLQDITTMFELLGSMGADILLDEDMNFTIQSNNLKDIEARYELVKTMRASILVLGPLLAKYGK

SEQ ID NO: 122993 - protein, 298 aa, Unknown
  Bacterial polypetide isolated from the Sargasso Sea
NKKNMKTFASYSLVKTMRGSILVLGPLISKYHKSKISLPGGCLIGARPVNYHLTALKKLGMKYELNDGYILAKSKGKLSGTTINFPKISVGATENSIIAACLAKGKTVLKNCAIEPEIKDLTNFLNKAGAKIKWTGRICEIIGVNSLNETEYSVMADRIEAGTFCVAATLAMGNLQINNLNPKIIGTEIKLLKKAGAKIKTSENKILIKGPEKIKSIKSIKTREFPGIPTDLQAQLMVLMCKAVGKSSITENIFENRFMHVGELQRLGAKINIKNNTATIEGNTKFIGAELMSSDLRA

SEQ ID NO: 122994 - protein, 201 aa, Unknown
  Bacterial polypetide isolated from the Sargasso Sea
GVKTLKSITYSIMNDRIEAGTFCVAACLNGGKLTIKNFEPKIINTEINLLKKIGAKIKTTKNTIQIKGPKKIRSLDFLKTGEYPNFPTDLQAQIMVLLTRANGKSTIEENIFENRFMHVPELKRLGAKINIKGNKAIIEGTNNLEGAELMSSDLRASVALVLAAFISRGTSIINRVYHLDRGYEKIENKLKKIGVKIKRIS

SEQ ID NO: 122995 - protein, 251 aa, Unknown
  Bacterial polypetide isolated from the Sargasso Sea
MDKFIVKGPCKIKGEISISGSKNAALPILASTILFEKEVIVKNLPRVKDIDTMINLLKSLGSEIKFNKNRKIVKITKKKKQNYFASYSLVRTMRAGILVLGALVAKHQKSITSLPGGCLIGARPVNYHLNALKKLGMKYDIKKGYIHAHTKKKLKGAKIRFSKVSVGATENTIIAACLANGISVLRNCAIEPEIIDLINFLKSGGAKIKFIGKRTLKIVGVKSLESTSYSVMSDRIETGTFCVAACLTGGN

SEQ ID NO: 122996 - protein, 258 aa, Unknown
  Bacterial polypetide isolated from the Sargasso Sea
MKTFASYSLVKTMRGSILVLGPLISKYHKSKISLPGGCLIGARPVNYHLTALKKLGMEYEIKDGYILAKSKGKLSGTTINFPKISVGATENSIIAACLAKGKTVLKNCAIEPEIKDLTNFLNKAGAKIKWTGRVCKIIGVNSLNETEYSVMADRIEAGTFCVAATLAKGNLQINNLNPKIIGTEIKLLQKVGAKIKTSENKILIKGPEKIKSIKSIKTKEFPGIPTDLQAQLMVLMCKADGKSSITESIFENRFMHVA

SEQ ID NO: 122997 - protein, 216 aa, Unknown
  Bacterial polypetide isolated from the Sargasso Sea
AGAKIRWSGRVCKIIGVNSLDETKYSVMADRIEAGTFCVAATLSKGNLQINNLNPKIIDTEIKLLKKVGAKIKTSENKILIKGPEKIKSIKSIKTSEFPGIPTDLQAQLMVLMCKAVGKSLITESIFENRFMHVAELQRLGAKINIKNNTATIEGNTKFIGAELMSSDLRASVALVLAAIVSNGKSYINRIYHLDRGYEKIENKLKKIGVKIKRLK

SEQ ID NO: 122998 - protein, 120 aa, Unknown
  Bacterial polypetide isolated from the Sargasso Sea
PYPGFPTDLQAQIMVLMTKANGISKIKENIFEKRFMHVPELNRMGAKIEISGDTSYIYGPQQLNGAEVMATDLRASVSLVLAGLSADDKTIINRVYHLDRGYEKLETKLRKCRANIYRVN

SEQ ID NO: 122999 - protein, 165 aa, Unknown
  Bacterial polypetide isolated from the Sargasso Sea
TGIETKILKKEISILKKMGVKLKINSNYIIVKNSNKIKPISISTEPYPGFPTDLQAQIMVLMTKANGISKIKENIFEKRFMHVPELNRMGAKIKIFGGSSFIYGPQQLNGAEVMATDLRASVSLVLAALAANDKTIINRVYHLDRGYEKLEKKLTKCNADIFRTH

SEQ ID NO: 123000 - protein, 227 aa, Unknown
  Bacterial polypetide isolated from the Sargasso Sea
EIKDLTHFLNKAGANIKWSGRSCTIIGVNSLTQTTHTVMADRIEAGTFCVAAAISKGNLEIKNFDPNLIKTELNILKKIGAKIKTFRDKIHIQGPQKIKSIGNITTREYNGFPTDLQPQFMALLCKANGISSITENIFQGRFIHVMELQRLGAKITIKDSTAIIEGNTNLSGSEVMSSDLRASAALVLAGIVSKGKTTISRIYHLDRGYEKIENKLKKIGVKIKRLK

SEQ ID NO: 123001 - protein, 163 aa, Unknown
  Bacterial polypetide isolated from the Sargasso Sea
IPEHLESVINCLLNANIDINVRDNSIFIKSDGKNISSTNIETNEYPGFPTDLQAQWMMLMCKADGTSTIKENIYYDRFTHIMELNRLGCNIKLEDSVAIIEGNKNLIGADVMSTDIRASAALIIAALCAEGTTKISRIYHIDRGYDKIEEKLTDIGAKIIRKK

SEQ ID NO: 123002 - protein, 105 aa, Unknown
  Bacterial polypetide isolated from the Sargasso Sea
MDRILVKGGSPLSGEISLSGAKNACLALMPAALLTSEPLTLTNTPFLSDITTMKELLASLGCEVAGLQNNRIIAIAAGSISNHIAQYDIVRKMRASILVLGPIVG

SEQ ID NO: 123003 - protein, 164 aa, Unknown
  Bacterial polypetide isolated from the Sargasso Sea
KKELLGEFWNSLERSGLEISETAHGIRAKRVNDTIKAVDVKTEVYPGFATDLQAQFMALMCLDDGISLLEETLFENRFMHAQELVRMGAKIDVQGGTAKVQGVSKLKGAPVMATDLRASVSLILAGLVDEGETKVARVYHLDRGYENLVSKLSNAGAKIERISD

SEQ ID NO: 123004 - protein, 34 aa, Unknown
  Bacterial polypetide isolated from the Sargasso Sea
GDTLIDRIYHIDRGYECIEEKLQLLGAKIRRVPG

SEQ ID NO: 123005 - protein, 174 aa, Unknown
  Bacterial polypetide isolated from the Sargasso Sea
ITKSSLELCNCEPKHLKSLSKKLINAGVNWESDKDIIKITSDGILKPVNVQTSEYPNFPTDLQAQFMTLMTVANGNSEIIENIFENRFMHVPELLRMGANISVSGGVAKVSGVQNLKGAQIMATDLRASISLIIAALRAEGESYISRIYHLDRGYEQIEQKFLDCGANIERITN

SEQ ID NO: 123006 - protein, 289 aa, Unknown
  Bacterial polypetide isolated from the Sargasso Sea
MKTFASYSLVKTMRGSILVLGPLISKYNKSKISLPGGCLIGARPVNYHLAALKKLGMKYELKDGYILAKSKGKLNGITLNFPKISVGATENSIIAACLAKGKTVLKNCAIEPEIKDLTNFLNKAGAKIKWKGRVCKIIGVNSLHETEYSVMADRIEAGTFCVAATLARGNLQINNLNPKIINTEIKLLKKVGAKIKTSENKILIKGPEKIKSIKSIKTKEFPGIPTDLQAQLMVLMCKAVGRSSITESIFENRFMHVAELQRLGAKINIKNNTATIEGNTKFHWCRINV

SEQ ID NO: 123007 - protein, 286 aa, Unknown
  Bacterial polypetide isolated from the Sargasso Sea
MQKFLINGPCKVKGEISISGSKNAALPILAATLLFDKSVTINNLPKVRDIDTMLNLIKSLGRKIKFLNNKKTVVIKNTKKKNFFASYSLVKTMRAGILVLGPMIAKNYKSITSLPGGCLIGARPVNYHLNALKKLGMNYNIKKGYIYANSKGKLIGTNIKFPKISVGATENSIIASCLAKGKTTLKNCAIEPEIKDLTNFLKMAGANIKWVGKRTVEIIGVKSFKSINYSIMSDRIEAGTFCVAACISQGNLKIKNFNPKIIQTELNLLKKMGAKISKIKNEIHIK

SEQ ID NO: 123008 - protein, 43 aa, Unknown
  Bacterial polypetide isolated from the Sargasso Sea
MKKLAINGGYPLNGSIKISGAKNAALPMMTASILSDHNIVLDG

SEQ ID NO: 123009 - protein, 229 aa, Unknown
  Bacterial polypetide isolated from the Sargasso Sea
MQKLLVKGKKVLSGVVQISGSKNATLPILAASILGDKKIEIKNIPLVKDVITMTNLLKYMGSNININFKKRKILIHNQKKKLKTIAPYNFVKTMRAGVLVLGSLLARFGKAKVSLPGGCAIGTRPVNLHLFGLKKLGANIKIKNGYISAEAKNGLVGSKINFPSISVGATENVIIAASLAKGVSLLKNCACEPEIKNLTNFLIKMGVKITWVGKREIKIIGSEKLRTVS

SEQ ID NO: 123010 - protein, 229 aa, Unknown
  Bacterial polypetide isolated from the Sargasso Sea
EIQQLCEMLNEMGANISGIGSNTLKIEGVSALNSISNVSVIPDRIEAGTFLIAAAAVGGEVEVTNIIPGHLDSVIKCLQKANIQLEVKDNSIVVRSNINDILSTNIETNEYPGFPTDLQAQWMMLMCLAKGNSTIKENIYYDRFTHIMELNRLGCNIKLEDSVAIIEGHRKLIGADVMSTDIRASAALIIAALCAKGTSRISRVYHIDRGYDKIEEKLTNIGAEIFRKK

SEQ ID NO: 123011 - protein, 53 aa, Unknown
  Bacterial polypetide isolated from the Sargasso Sea
MATDLRASASLILAGLCANGETIVDRIYHIDRGYERIEEKLSYLGADITRLPN

SEQ ID NO: 123012 - protein, 243 aa, Unknown
  Bacterial polypetide isolated from the Sargasso Sea
KIKNGYIFAEVKKELKGKKIKLPSISVGATENALIAASYAKGTTYLSNCACEPEIKDLANFLKKMGVKIKWIGNRKIKISGNQNLKSTKHKVMFDRIESGTFIIAGALAGNRLKISGIETKILKKEITILKKMGVKIKVSKNDVIVLNSKNIKPVSIKTEPYPGFPTDLQAQIMVLMTKANGVSKIKENIFEKRFMHVPELNRMGAKIKIFGDSSFVYGPQKLNGAEVMATDLRASVSLVLAG

SEQ ID NO: 123013 - protein, 121 aa, Unknown
  Bacterial polypetide isolated from the Sargasso Sea
APYPGFPTDLQAQIMVLLCKAKKSSVIQENIFENRFQHAAELNRMGAKILINGNKAIVQGDINFASAELMATDLRASVSLILAALTAKGKSIINRIYHLDRGYEDIEKKLKKVGAKIRRVN

SEQ ID NO: 123014 - protein, 230 aa, Unknown
  Bacterial polypetide isolated from the Sargasso Sea
DVLLIHNVPKLTDTKTLTFILEELGASINQIRVKNSDLSGPISINMANIASTTAGYENVSKMRASFLVIGPLLAREGYARVSMPGGCAIGTRPVDIHLNGLKTLGADIKVEKGFVIAEAKKGLTGNRIQLEKPSVGATQNLIMASTLAKGETKISNASIEPEVLDLIDCLKKMGANIEIDKKNILIDGQETLHGASHSVMFDRIEAATFAIAACITRGNLILQGCDPSIW

SEQ ID NO: 123015 - protein, 267 aa, Unknown
  Bacterial polypetide isolated from the Sargasso Sea
LLGKLIKFPKISVGATENLIIAACLAKGKTILKNCAIEPEIKDLTNFLNSAGANIQWNGRICTIKGVKSLNQTKYSVMSDRIEAGTFCVAAALTKGNLEIKNLNASIIKSELDLLKKVGAKISFYKDRIFVKGPKKIKSIKIINTKEYPGIPTDLQAQLMVLMCKANGKSLITENIFENRFMHVAELQRLGAKINVKNNKAIIEGGNNLKGAELMSSDLRASVALVLAAMVSDGRSIINRIYHLDRGYEKIENKLIKIGVKIKRVNK

SEQ ID NO: 123016 - protein, 169 aa, Unknown
  Bacterial polypetide isolated from the Sargasso Sea
MDKLLIKGGRELSGEIYASGAKNSALPILAASLLADSSMRIGNLPHLKDVTTMIELFGSMGVDVALNDDMEVLIDSSQIKNLNARYELVKTMRASILVLGPLLSKFKQADVALPGGCAIGSRPVNLHIDAMKRMGAKVVIEDGYIKASTKDSLKAADIYLDPVSVTATE

SEQ ID NO: 123017 - protein, 52 aa, Unknown
  Bacterial polypetide isolated from the Sargasso Sea
MATDLRASAALILAGLIAEGETIIDRIYHLDRGYESVEEKLSNVGAKVRRID

SEQ ID NO: 123018 - protein, 109 aa, Unknown
  Bacterial polypetide isolated from the Sargasso Sea
MTALNCIADGDSSVKENIFENRFMHAQELIRMGAKIRVHDNIAEISGRKELLGAPVMATDLRASASLILAGLAARGTTEIGRVYHIDRGYDCIEEKLQLIGARISRKPM

SEQ ID NO: 123019 - protein, 239 aa, Unknown
  Bacterial polypetide isolated from the Sargasso Sea
SDVKRLEENTIFQDTPIFKVNSRSKKGIDELRETIISLSESIKFENKSEFFKMHIDRVFSKKGYGTVVTGTVKSGRLSVGQNVEILPQNLKAKVRGIQTHGGAVQEVHNGYRAAINLTKVALSVLKRGSTLANPGLIVVTDKLLARINMFANTDWSLKNNQRVRIHIGTNEILARVKIYQKKIKKDESCNLIIYLEKSVGATINDLIIMRSYSPLDTIASGIILETDFKCEKQYVENCP

SEQ ID NO: 123020 - protein, 134 aa, Unknown
  Bacterial polypetide isolated from the Sargasso Sea
MDKLLVEGGFQLNGSITSSGAKNSALPILAASILLDDPIIIRNIPHLNDVTTMLELLGSMGVDMTLSEDMEVELDPSGLNDVGARYELVKTMRASVLVLGPLLAKTGYAKVALPGGCAIGSRPVNLHIDIMKKM

SEQ ID NO: 123021 - protein, 290 aa, Unknown
  Bacterial polypetide isolated from the Sargasso Sea
HLKSLKKLGMKYYIKKGYIYANVKNNLIGTEIKFPKISVGATENLIIASCLAVGRTILKNCAIEPEIKDLTNFLTKAGAKIKWTGKRRVQIDGVKSLNEISYNVMGDRIECGTFCVAATLTAGDLNIKGFNPKLIRTELNMLRKIGARIITKKNQIFIKGAKNLKNLKNVITKEYPAFPTDLQAQFMVLLCKANGRSSIKENIFENRFMHVAELRRLGAKITIKKNIAIIEGKTKFEGAELMSSDLRASVALVLAAIVAKGKSKINRIYHLDRGYEQLENKIKKIGVKIK

SEQ ID NO: 123022 - protein, 247 aa, Unknown
  Bacterial polypetide isolated from the Sargasso Sea
IIAACLAKGKTILKNCAIEPEIKDLTNFLNKAGAKIKWKGRVCKIIGVNSLYETEYSVMADRIEAGTFCVAATLAKGNLQINNLNPKIIGTEIKLLKKVGAKIKTSENKILIKGPEKIKSIKSIKTKEFPGIPTDLQAQLMVLMCKAVGKSSITESIFENRFMHVAELQRLGAKINIKNNTATIEGNTKFIGAELMSSDLRASVALVLAAVVSTGKSYINRIYHLDRGYEKIENKLKKIGVKIKRLK

SEQ ID NO: 123023 - protein, 281 aa, Unknown
  Bacterial polypetide isolated from the Sargasso Sea
EIKKGYIHASSKGKLKGTQIKFSKISVGATENTIIASCLAKGKTTLKNCAIEPEIKDLTNFLNSGGAKIKWIGKRTCQIIGVESLNQTRYSVMGDRIETGTFCVAATISNGDLKIKNFNPKIIQTEINILKKTGAKIKTSKNEIHIKGPKNIKNINSIITKEYPNFPTDLQAQFMVLLCKAKGRSSITESIFENRFMHVAELRRLGAKILIKENRAIIEGNTQFIGAELMSSDLRASVALVLAAIVSKGKSTINRIYHLDRGYEKIEKKLQKVGVKIKRLT

SEQ ID NO: 123024 - protein, 200 aa, Unknown
  Bacterial polypetide isolated from the Sargasso Sea
MDSLIINGGKKLIGNIPISGSKNACLPMMIASLLTNEKMTLKNIPMLSDVKTLISILESLGAKIEYKKNNFTLHTKDIINHRASYDLVKKMRASFWVLAPLLAKSGYAEVSLPGGCAIGTRPIDLYLKILKEMNINYTINNGYIVAKREGPIKGLNFKLEKKSVGCTHFFLMLACLANGTSKLSNASCEPEVIHLGLLLN

SEQ ID NO: 123025 - protein, 265 aa, Unknown
  Bacterial polypetide isolated from the Sargasso Sea
QKMRASIIVLGPLLARKGEAKIAFPGGDQLGPRPVKMHLEALEKMGANFELDHGVLIGKTDGLKGVEINLPYASVGATENTLLAAVLADGTTTIENAAREPEVVDLVKMLKNMGAQIEGEGTSELVIHGVDALKSTNHEVIGDRVVAGTYLAAFLATGGSGVVKGVDHNCLPMELKKFQEMGAILNITDDSIEIESSKEISSIEISTLPFPGIATDLQPIFGACLLKANGTSIITENVYDQRFQWIPEVQRMGADIQTGWQHAMI

SEQ ID NO: 123026 - protein, 118 aa, Unknown
  Bacterial polypetide isolated from the Sargasso Sea
MDQIVIQGGNRLSGEIAISGAKNAALPLMAASLLSSEPLKLANLPRLADISTMSKLLAQHGVEVQQSDGEGRGVTMTFDAAGVNNTIAPYDLVRRMRASVLVLGPLVARFGKAKVSLP

SEQ ID NO: 123027 - protein, 176 aa, Unknown
  Bacterial polypetide isolated from the Sargasso Sea
MVQLWGDITLNNCNPKHLEDIINKLKLSGAKISSTENSLSIEKIDSVEAVDMTTEVYPGFPTDLQAQWMAFMSIANGKSTIIDTVYHDRFTHIPELNRLGADIRLTDNKATVNGVRKLTGAQVMSTDIRASAALILGAIIAEGKTEISRVYHIDRGYDSIEKKFQSLGADIARINE

SEQ ID NO: 123028 - protein, 147 aa, Unknown
  Bacterial polypetide isolated from the Sargasso Sea
EVTEQREGISVKRLSETIKAVDVKTEVYPGFATDLQAQFMALMCLADGTSLLEETLFENRFMHAPELMRMGAKIDVQGGIAKVQGVPKLKGAPVMATDLRASVSLILAGLAAEGETRVARVYHLDRGYENLVSKLSNVGANIQRISD

SEQ ID NO: 123029 - protein, 157 aa, Unknown
  Bacterial polypetide isolated from the Sargasso Sea
MQKLLIKGKKELKGNIYISGSKNATLPILASTILASEVRLLNVPFVKDIFTMLELLKFIGIKVKMKRNKNILVLKNEKKEINTLAPYKLVKTMRAGVLVLGPLLTKFKKAKVSLPGGCAIGTRPVDLHLFALKKLGAKIKIKDGYIIAEARKGLMGA

SEQ ID NO: 123030 - protein, 282 aa, Unknown
  Bacterial polypetide isolated from the Sargasso Sea
MGSKIKFSDNKKTVKITKNKKQKIFASYSLVKTMRAGILVLGPMIAKHHKSITSLPGGCLIGARPVNYHLNALKKLGMRYKIKKGYIHAISKGKLKGASFKFSNITVGATENSIIAACFAKGKTILKNCAIEPEIKDLTNFLNSAGAKIKWIGKRTVKIEGVKSLNSIKYTVMGDRIEAGTFCVAAALTAGDLLIKNFNSNLILTELNLLKKIGSEIKTSNKEIYIKGPNKLNSISNIITKEYPNFPTDLQAQFMVLLCKANGISTITESIFENRFMHVAEL

SEQ ID NO: 123031 - protein, 224 aa, Unknown
  Bacterial polypetide isolated from the Sargasso Sea
MEKLEIKGGKKISGTITISGSKNSTLPILASTILTNKKIIIKNIPLVKDVKTMVELLNILGSKVKLDYKRKIIKIINKKSLKTFAPYYLLKTMRAGVLVLGPLLAKYGIAKVSLPGGCAIGARPVNLHLDALKKMGANIKIKNGYIVASAKNGLKGCTIKFPKISVGATENVLIASCLAKGITKLRNCALEPEVKDLVKFLIKIGCKIKWVGSRGLDVEGVKKI

SEQ ID NO: 123032 - protein, 277 aa, Unknown
  Bacterial polypetide isolated from the Sargasso Sea
MGYILAKSKGKLSGTTINFSQISVGATENSIIAACLAKGKTVLKNCAIEPEIKDLTNFLNKAGAKIKWTGRVCKIIGVNSLNETEYAVMADRIEAGTFCVAATLAKGNLQINNLNPKIIGTEIKLLKKVGAKIKTSENKILIKGPEKIKSIKSIKTKEFPGIPTDLQAQLMVLMCKAVGKSSITESIFENRFMHVAELQRLGAKINIKNNTATIEGNTKFISAELMSSDLRASVALVLAAIVSNGKSYINRIYHLDRGYEKIENKLKKIGVKIKRLK

SEQ ID NO: 123033 - protein, 182 aa, Unknown
  Bacterial polypetide isolated from the Sargasso Sea
GTFCIAACLSNGDLEIQNVNPKMINAELNLLKKIGANVKTTDNKIFIKGPKQIKNIQNIKTKEFPGIATDLQSQLMVLMCKAKGKSTITENIFENRFMHVAELRRLGAKITIQNNKAIIEGNTLFKACKLMSSDLRASIALVLAAMTAEGVSQVDRIYHLDRGAENFENKLKKIGVKIKRLK

SEQ ID NO: 123034 - protein, 141 aa, Unknown
  Bacterial polypetide isolated from the Sargasso Sea
NKSDITVLNSKKIKPISVNTEPYPGFPTDLQAQIMVLMTKADGVSRIKENIFEKRFMHVPELNRMGAKIKIFGDTSFVYGPQQLNGAEVMATDLRASVSLVLAGLSAEDKTIINRVYHLDRGYENIELKLRKCRANIFRKK

SEQ ID NO: 123035 - protein, 157 aa, Unknown
  Bacterial polypetide isolated from the Sargasso Sea
MICVSKKKSYLKSQNLKIFGQGKLHGKVQISGAKNSALVLLASSLLTDERVILENVPRLTDIEKMGNILKSLGIKLIQKDNRLEIDPKNISIKDLPYEFVNGLRASFFCIGALLSKYGEAKVPLPGGCNIGSRPIDEHINGLQALGAEILIEEGIVK

SEQ ID NO: 123036 - protein, 251 aa, Unknown
  Bacterial polypetide isolated from the Sargasso Sea
MEKFLIKGPCKIKGQVSISGSKNAALPILASTILFDKTVTIKNLPRVRDIDTMLKLLKSLGSKIQFFNNKKTVKIINNKKQKIFAPYSLVKTMRAGILVLGPMIAKHQKSITSLPGGCLIGARPVNYHLSALKKLGMKYEIKKGYIYANSKGQLKGANYKFSNISVGATENSIIAACFAKGKTILKNCAIEPEIKDLTNFLKTAGAKIKWIGKRTVQIEGVKSLNSIEYTIMGDRIEAGTFCIAASLTAGN

SEQ ID NO: 123037 - protein, 43 aa, Unknown
  Bacterial polypetide isolated from the Sargasso Sea
FNSCGSLCKGETIVDRIYHIDRGYERIEEKLNYLGADIIRLPS

SEQ ID NO: 123038 - protein, 242 aa, Unknown
  Bacterial polypetide isolated from the Sargasso Sea
MDKFLINGPCKIKGSVSISGSKNASLPILAATLLFDKPVVIKNLPRVRDIDTMLNLLKSLGSKIILSRNKKVAKIVNKKKMKTFASYSLVKTMRGSILVLGPLISKYHKSKTSLPGGCLIGARPINYHLTALKKLGMKYELKDGYILAKSKGKLSGTIINFPKISVGATENSIIAACLAKGKTVLKNCAIEPEIKDLTNFLNKAGAKIKWTGRVCKISGVNSLNEIEYSVMADRIEAGTFCV

SEQ ID NO: 123039 - protein, 234 aa, Unknown
  Bacterial polypetide isolated from the Sargasso Sea
MQKLIIKGKKSLTGTVKISGSKNATLPILASTILSNNKITIKNVPFVKDVITMSELLKYLGSDIKLNFKKKKIFINNNKKSFKTLAPYNFVKTMRAGIIVLGPLLSKFGKARVSLPGGCAIGTRPVDIHLFGLKKLGAKIKIKDGYIYAEATNGLFGNKIKLPSISVGATENLIIAATYAYGTTLIKNCACEPEIKDLINFLKKMGANIKWTGKREIEVIGTRNFNAVNYSVMF

SEQ ID NO: 123040 - protein, 185 aa, Unknown
  Bacterial polypetide isolated from the Sargasso Sea
MDKFLIRGPCKIKGQVFISGSKNAALPILAATLLFDKPVIIENLPRVRDIDTMLNLLKSLGSKIQFSKNKKTVKISKNKKQKIYASYSLVKTMRAGILVLGPLLAKFKKAHCSLPGGCNLGLRPIDLHLRALTKLGMNYKIIRGYVHASAKKGIIGKEIKFSKLSVGATENTIIAACLGKGKTIL

SEQ ID NO: 123041 - protein, 150 aa, Unknown
  Bacterial polypetide isolated from the Sargasso Sea
MRKMGVKIIITKNSIIISKSKKLKRMNITTEPFPGFPTDLQAQFMVLMTQARGLSKIKENIFENRFMHVPELRRMGADIEIKNKTAYITGPSKLNGAEVMATDLRASVSLVLAGLIANNRTIVNRIYHLDRGYEFLEKKLKICNAEIRRI

SEQ ID NO: 123042 - protein, 51 aa, Unknown
  Bacterial polypetide isolated from the Sargasso Sea
MDKFIVNGGNQISGSVDISGAKNAVLPLMTAALLVDGNTTINSVPDLRDTR

SEQ ID NO: 123043 - protein, 239 aa, Unknown
  Bacterial polypetide isolated from the Sargasso Sea
MKKLLIDGKNILSGSINISGSKNSTLPILAATILNNYTTIKNIPLVNDILTMLNLLKFIGLKFKLSKKKNSVRVINPNKNINTVAPYKLVKTMRAGVLVLGPLLAKYKKAKISLPGGCAIGTRPVDLHLFALKKLGANIKIKNGYIFASASKGLKGAKFKFPSISVGATENAILAAVLAKGKTIMENCAIEPEIKDLINFLKKLGAKIKIDVRKISIEKSIIQKKISHKVICDRIELGT

SEQ ID NO: 123044 - protein, 261 aa, Unknown
  Bacterial polypetide isolated from the Sargasso Sea
MERLIIKGGNQLHGDVYCSGAKNAGLPIIAATILLEKTIEIENLPHLKDISTMLELLNSMGSEINFLESGGIEINSSNINLPEARYELVKTMRASVLVMGPLLAKYGKAKISQPGGCNIGTRPIDFHLKGLEMMGAKIESDKKFIYLKAQKLNPIDFTFPKVSVTGTENLMMAASLTLGKTVLRNCAKEPEVAELANFLNSCGARISGAGGSIIEIEGTELLNGQKWKILSDRIEAGTYLIAAAMTNGHVKVNNISPSTIK

SEQ ID NO: 123045 - protein, 112 aa, Unknown
  Bacterial polypetide isolated from the Sargasso Sea
TSTNDGFIILLGKSKSQITENIFENRFMHVPELNRMGANIETKGKTAIINPCKGFISAQVMATDLRASVSLILAGLVAKGETTLNRIYHLDRGYEKIEKKLQACGADIRRIN

SEQ ID NO: 123046 - protein, 230 aa, Unknown
  Bacterial polypetide isolated from the Sargasso Sea
IEPEIKDLTNFLNKAGAKIKWSGRICKIIGVNYLNETEYTVMADRIEAGTFCVAATLAKGNLQINNLNPKIIDTEIKLLKKIGAKIKTSENKILIKGPEKIKSLKSIKTKEFPGIPTDLQAQLMVLMCKAVGKSSITESIFENRFMHVAELQRLGAKINIKNNIATIEGNTKFIGAELMSSDLRASVALVLAAIVSNGRSYINRIYHLDRGYEKIENKLKKIGVKIKRLK

SEQ ID NO: 123047 - protein, 298 aa, Unknown
  Bacterial polypetide isolated from the Sargasso Sea
TFASYNLVKTMRGSILVLGPLLAKFKKAKVSSPGGCSIGVRPIDIHLKALSKLGVKYKIDQGYVIATAPKGLIGNSIRFSKISVGATENLIIAACFAKGITTLSNCAIEPEIEDLVNFLIKMGCNIRWISKRSLKIVGIDEVKETNYSVMFDRIEAGTYLIAAAVTEGNLTIKKIIPKIIKTEIDMLKKVGAKIVIKKNEINIIGKKKINSININTAPFPGVATDIQAQMMVLLCKANKRSIITENIFENRFMHVAELNRMGANIIINGKKAIVNGNTIFAPAEVMATDLRASVSLIL

SEQ ID NO: 123048 - protein, 252 aa, Unknown
  Bacterial polypetide isolated from the Sargasso Sea
KVSSPGGCSIGVRPIDIHLKAISKLGVKIKIEKGYVNATAQEGLVGSEIRFSKISVGATENSILAACLAKGITTIKNCAIEPEIKDLTNFLKTAGAKIKWIGKRTLKIEGVKTLKSITYSIMNDRIEAGTFCVAACLDGGNLKIKNFEPKIINTEINLLKKIGAKIKTTKNTIQIMGPKKIRSLDFLKTGEYPNFPTDLQAQIMVLLTRANGKSTIEENIFENRFMHVPELKRLGAKINIKNNKAIMKELII

SEQ ID NO: 123049 - protein, 147 aa, Unknown
  Bacterial polypetide isolated from the Sargasso Sea
MGVKMKIKKNFIEVFKSKKLKKIDIKTEPFPGFPTDLQAQIMILMTQANGLSKIKENIFENRFMHVPELRRMGAKIEIKNNTAYIFGPNSLTGAEVMATDLRASVSLVLAGLIADNRTNINRIYHLDRGYQDLEKKLIKCKASIKRI

SEQ ID NO: 123050 - protein, 233 aa, Unknown
  Bacterial polypetide isolated from the Sargasso Sea
MQKLLINGKKELSGKISISGSKNATLPILAASILSDQVKLTNIPLVRDIFTMVELLKFIGLKINILKKKNTIEIKNINKNIKTLAPYKLVKTMRAGVLVLGPLLAKYKKAKISLPGGCAIGTRPVNLHLFALKKLGAKIKIKNGYIVAEAKNGLKGANISFPSVSVGATENAVLAAFNANGKTTLNNCAIEPEVKDLIKFLNTLGGRIKVVGRKILIIGCKQIKKNIIHEVIF

SEQ ID NO: 123051 - protein, 149 aa, Unknown
  Bacterial polypetide isolated from the Sargasso Sea
MGAKLKVKKTSIQIMPTTNLFGIKIQTSPYPGFPTDLQAQIMALMSLVNGNSQIKENIFENRFMHVPELNRLGAKIKVKKDLALITGNRNLKGAQVMASDLRASVSLVLAALCAEGESIINRVYHLDRGYEKIEYTLGSLGPSIKREKY

SEQ ID NO: 123052 - protein, 84 aa, Unknown
  Bacterial polypetide isolated from the Sargasso Sea
AACLASGETVIENAAREPENVDLASFLIKSGAIIEGAGSSTIHIQGVQSLKGVSEYHVMPDRIEIGTYLKAAGNTQGEIIVTDV

SEQ ID NO: 123053 - protein, 212 aa, Unknown
  Bacterial polypetide isolated from the Sargasso Sea
MQRLIIKGKKSLNGTIKISGSKNASLPILAATIFFDEVEIKNIPLVRDIFTMIDLLNFIGLKVKFLKNRGSLKVKNNKLKLNTVAPYNLVKTMRAGILVLGPLIAKYKKAKISLPGGCAIGTRPVDLHLLVLKKLGAKIRIKNGYIHATAKEGLRGCNFKFPKISVGATENGILAACFAKGKTVLSNCAIEPEIIDLISFLRKAGNKIIVQK

SEQ ID NO: 123054 - protein, 189 aa, Unknown
  Bacterial polypetide isolated from the Sargasso Sea
MQKLIIKGNKNLSGTVKISGSKNATLPILASTILSNNKITINNVPFVKDVITMSELLKHLGSNIKTNSKKKKIFINNSKKSLKTLAPYNFVKTMRAGIIVLGPLLSKFGKARVSLPGGCAIGTRPVDIHLFGLKKLGAKIKIKNGYIHAEATNGLFGCKIKLPSISVGATENLIIAATYAHGTTLIKNC

SEQ ID NO: 123055 - protein, 165 aa, Unknown
  Bacterial polypetide isolated from the Sargasso Sea
MDKLIIKGNAKLSGSVNVHGSKNSALPIIVSSILSENTIKLSNVPNVVDVLNLIKLLKNYGVKIEYKKDKLKINPKKIKNLSADYDVVRKMRASILILGPLLSRFGDARISLPGGCAIGTRPIDIHLQGLSKLGANFEIQNGFVVGSVKSQLVGNKIKLPFPSVG

SEQ ID NO: 123056 - protein, 125 aa, Unknown
  Bacterial polypetide isolated from the Sargasso Sea
MDSLIINGGKKLIGNIPISGSKNACLPMMIASLMTDEKMTLNNIPMLSDVKTLISILKSLGTNIEYKKDNLHLHTKEIINHKASYDLVKKMRASFWVLAPLLAKKGYAEVSLPGGCAIGTRPIDI

SEQ ID NO: 123057 - protein, 259 aa, Unknown
  Bacterial polypetide isolated from the Sargasso Sea
LFVINGPCKIKGNVSISGSKNASLPILAATLLFDKAVVIKNLPRVRDINTMLNLLKSLGSKIILSRDKKTAKIINKKKMKTFASYSLVKTMRGSILVLGPLISKYHKSKISLPGGCLIGARPINYHLTALKKLGMKYELKDGYILAKSKGKLSGTTINFPQISVGATENSIIAACLAKGKTVLKNCAIEPEIKDLTNFLNKAGAQIKWTGRVCKIIGVNSLKETEYSVMADRIEAGTFCVAATLAKGNLQINNLNPKII

SEQ ID NO: 123058 - protein, 189 aa, Unknown
  Bacterial polypetide isolated from the Sargasso Sea
MADRIEAGTFCVAATLAKGNLQINNLNPKIIGTEIKLLKKVGAKIKTSENKILIKGPEKIKSIKSIKTREFPGIPTDLQAQLMVLMCKAVGKSSITESIFENRFMHVAELQRLGAKINIKNNTATIEGNTKFIGAELMSSDLRASVALVLAAVVSTGKSYINRIYHLDRGYEKIENKLKKIGVKIKRLK

SEQ ID NO: 123059 - protein, 133 aa, Unknown
  Bacterial polypetide isolated from the Sargasso Sea
ELISKDISTKPFPGFPTDMQAQFMALNSISNGSSIIEETVFENRFQHVGELKKMGADISLDKNKASVKGVSNLVGAIVSASDLRASASLVLAGLVGKNRTQIEDIYHIDRGYECIEEKLTKLGAEIFREPAEY

SEQ ID NO: 123060 - protein, 247 aa, Unknown
  Bacterial polypetide isolated from the Sargasso Sea
ATLAEGNTTIYNAAREPEIIDLCRCLQKMGANIEGAGTEIITIIGVSKLHGACHSVMADRIELGTFMLVPALTGGEIFLEGASLKDISCFQKKIIEMGLNVSERKEGIRVKKGDKNLKGIDISTDPFPGFPTDLQPLIMAALGLADGKSIINEGIFENRFMHAPELIRMGANIEIRGKKAIILGVSEYRGVPVVASDLRAAASLVLAGLAAKGKTIIEGVHHLDRGYEQMEEKLALCGADIYRSGDN

SEQ ID NO: 123061 - protein, 71 aa, Unknown
  Bacterial polypetide isolated from the Sargasso Sea
TLLARYGKAKVALPGGCSIGARPVDLHIMALKELGANFSMENGYVNASVSGSLVGAKINFPIKSVGATANT

SEQ ID NO: 123062 - protein, 199 aa, Unknown
  Bacterial polypetide isolated from the Sargasso Sea
NFLNSTSYSVMGDRIETGTFCVAATLAKGDLTIKNFNPKLIQTELNLLKRSGAIIKTNKNEIKIKGPQKIKSINSIVTKEYPNFPTDLQAQFMVLMCKANGRSTITESIFENRFMHVAELRRLGAKIVIKDNKATIEGNTDFIGAELMSSDLRASVALVLAAIISKGRSVINRIYHLDRGYEKIENKLKKIGVRIKRLS

SEQ ID NO: 123063 - protein, 40 aa, Unknown
  Bacterial polypetide isolated from the Sargasso Sea
AGLVAKGQTVVDRIYHIDRGYETIEEKLSQLGANIKRIPD

SEQ ID NO: 123064 - protein, 296 aa, Unknown
  Bacterial polypetide isolated from the Sargasso Sea
VNYHLAALKKLGMKYELKDGYILAKSKGKLSGTTINFPKISVGATENSIIAACLAKGKTVIKNCAIEPEIKDLTNFLNKAGAKIKWTGRVCKIIGVNSLNETEYSIMADRIEAGTFCVAATLAKGNLQINNLNPKIISTEINLLKKVGAKIKISENKILIEGPEKIKSIKSIKTREFPGIPTDLQAQLMVLMCKADGKSSVTESIFENRFMHVAELQRLGAKINIKNNTAMIDGNTKFIGAELMSSDLRASVALVLAAIVSTGKSYINRIYHLDRGYEKIENKLKKIGVKIKRLKK

SEQ ID NO: 123065 - protein, 248 aa, Unknown
  Bacterial polypetide isolated from the Sargasso Sea
PRVRDIDTMLNLLRSLGSKIILSKDKKIVKIQNKKKMKKLAKYSLVKTMRASILVLGPLISKFHKSITSYPGGCNIGSRPVNFHLSALKKLGMKYEIKQGYIHAKSNGRLNGAKINFPRISVGTTENTILAASLASGKTILKNCAIEPEIKDLTNFLNAAGAKIKWSGRTCSIIGVKSLKEINYSVMGDRIEAGTFCIAATLAEGDLQIKNFNPKNIATELKLLKKAGAKFKTYENKIFIQGPKKIKS

SEQ ID NO: 123066 - protein, 72 aa, Unknown
  Bacterial polypetide isolated from the Sargasso Sea
MKKLAINGGFPLNGSVKISGAKNAALPMMTASILSDHDIVLNGVPNLADVRTMITLLESMGIETSKSHKDSL

SEQ ID NO: 123067 - protein, 243 aa, Unknown
  Bacterial polypetide isolated from the Sargasso Sea
KGSSSKGVKGLINCSGAKNAVLPLMASSILFDDTVTLTNVPLGANDIQTMIILLKSLGSKIQIIKKKKILKITNKKKHKLLVKYKYISTMRAGVLAMGALLGKYNKCSTALSGGCSLGPRPIGYHLEGFKKLNCKYNLNKGYINIISPSGIKGGHFRFPKVSVTGTSNLILASVLANGQVITLKNISIEPEVLDLIKFLRNGGARIYNTGKRTIKIYGVKKLNGHQHEVIGDRIEAFSYLCAA

SEQ ID NO: 123068 - protein, 152 aa, Unknown
  Bacterial polypetide isolated from the Sargasso Sea
MDKLLIRGGSPLNGEIYASGAKNSALPILAASLLADSPLKVGNLPHLNDVTTMLELLGSMGVDVMLSDEMEVQVDTSNIQNLNARYELVKTMRASILVLGPLLAKFQQASVALPGGCAIGSRPVNLHIEAMQAMGAEVSIVDGNIKAKVDGR

SEQ ID NO: 123069 - protein, 147 aa, Unknown
  Bacterial polypetide isolated from the Sargasso Sea
MKKLEVFGANMLKGQVRISGSKNASLPILAATLLSDKKIHLSNLPKVKDIETMLLLLKSLDTKIKYIKDKKSVLIKNNKKNKTFVSYSLVKTMRAGILVLGPLLAKYSKAKVSLPGGCAIGTRPIDIHLKALSKLGVNYKIFQGYVH

SEQ ID NO: 123070 - protein, 298 aa, Unknown
  Bacterial polypetide isolated from the Sargasso Sea
ILASTILFEKPVIIKNLPRVKDIDTMLNLLKSLGSKIQFLNNKSTVKITKNKKKKIFASYSLVKTMRAGILVLGPMIAKHHKSITSLPGGCLIGARPVNYHLNALKKLGMRYEIKKGYIHAISKGKLKGAIIKFSNISVGATENSIIAACLAKGKTILKNCAIEPEIKDLTDFLRSAGAKIKWIGKRTVQIDGVQSLNSIKYSVMGDRIEAGTFCVIASISNGNLLIKNFDPNLIKTELNLLKKIGSKIKIFKKEIYIQGTNKIKNINSIITKEYPNFPTDLQAQFMVLLCKANGRKV

SEQ ID NO: 123071 - protein, 154 aa, Unknown
  Bacterial polypetide isolated from the Sargasso Sea
FASYSLVKTMRAGILVLGPLLAKFGDAKVSLPGGCAIGTRPVDIHLKALSKLGVKYKIIQGYVHATAPKGLMGSKIRFSKISVGATENLVIAASFAKGTSILSNCAIEPEIKDLVKFLNKAGCNLKWTSKRTLKIVGVKKINEINYSIMFDRIE

SEQ ID NO: 123072 - protein, 153 aa, Unknown
  Bacterial polypetide isolated from the Sargasso Sea
YLTLVGGEISSGSDWIQINSKDVLTSLDVVTSPFPGFPTDLQAQFMSLMCVANGESKITETIFENRFMHVAELNRMGGKIVLSGRNAKISGVSNLNGAPVNATDLRASASLVLAGLAAKGETVINSVFHLDRGYESLEVGLRNLGAKIERIDS

SEQ ID NO: 123073 - protein, 287 aa, Unknown
  Bacterial polypetide isolated from the Sargasso Sea
MEALGANIKFDSGFIVGSVPSEGLRGAKINFPKISVGATESAIMTAVLAKGQTIISNAAQEPEIVDIVTCLNKAGANIVGEGSNTIIINGVEELKKLQHEVVADRIEAGSFAIAASITMGDIEIKNIIPKYLERFLKALENTGSKVEIYKNSINICASKRPLPYNIFTEEHPGFPTDLQAQYMTLMSIADGECEIRENIFENRFMHVPELIRMGARISVKNQTATVTGVNYLKASKVMASDLRASMCLILGGLSALGTSEVDGIYHLDRGYENLEGKLSDLGANIRR

SEQ ID NO: 123074 - protein, 131 aa, Unknown
  Bacterial polypetide isolated from the Sargasso Sea
RPKAVDIVTEPFPGFPTDMQAQFTALNTVAQGTSCVTEAVFENRLMQAHEMKRMGADIVIEGDSARITGRPSLQGAPVMASDLRASASLVIAGLVASGETRIDRIYHIDRGYENIEGRLQCLGADIRRIST

SEQ ID NO: 123075 - protein, 113 aa, Unknown
  Bacterial polypetide isolated from the Sargasso Sea
MEKLKIIGGNKLSGSISCSGAKNAALPMLAATILTDQQITFKNLPYLQDITTMFEILGSMGAEITLNEGMDFIISTSKLHDFEARYELVKTMRASILVLGSLVARHGFARIAL

SEQ ID NO: 123076 - protein, 136 aa, Unknown
  Bacterial polypetide isolated from the Sargasso Sea
MQKLLIKGKRELNGSISISGSKNATLPILAASILANEIKLTNVPLVKDIFTMLELLEFIGIKAKVKKKEKTIELKNKKKNINTLAPYKLVKTMRAGVLVLGPLLTKYKKAKVSLPGGCAIGTRPVDLHLLALKKLG

SEQ ID NO: 123077 - protein, 66 aa, Unknown
  Bacterial polypetide isolated from the Sargasso Sea
MDKLIIHGQKPLSGSVKISGAKNAVLPIMTAAIMAEGKSRIERVPDLRNTRTMIKLLEIVGAKCNF

SEQ ID NO: 123078 - protein, 160 aa, Unknown
  Bacterial polypetide isolated from the Sargasso Sea
LIQNELNLLKKIGSKVKCFNQEIYIKGPSKIKNINNITTKEYPNFPTDLQAQFMVLLCKANGRSSITESIFENRFMHVAELRRLGAKITIKDNKAIIEGNTEFLGAELMSSDLRASVALVLAALVAKGHSVINRIYHLDRGYEKIENKLKKIGVNIKRFS

SEQ ID NO: 123079 - protein, 213 aa, Unknown
  Bacterial polypetide isolated from the Sargasso Sea
QERVQALVEIQGVDTLGGTTHPVVVDRIELGTYMIAPAMAGGQVDLIGGKKNLLGEFWNSLERSGLEISETADGIRAKRVNEIIKAVDVKTEVYPGFATDLQAQFMALMCLADGTSLLEETLFENRFMHAPELIRMGAKIDVQGGIAKVQGVSKLKGAPVMATDLRASVSLILAGLAAEGETKVARVYHLDRGYENLVSKLSNVGAKIERISD

SEQ ID NO: 123080 - protein, 288 aa, Unknown
  Bacterial polypetide isolated from the Sargasso Sea
KKLGMKYDIKKGYIHAHTKEKLKGTKIRFSKISVGATENTIIAACLANGITILRNCAIEPEIIDLINFLKSGGAKIKFIGKRTLKIEGIKSLESTSYSVMSDRIETGTFCVAACLTGGNLKINNFNPKIIKTELSLLKKVGAKIKVAKKQIHISGPKKIKNLTNLITKEYPNFPTDLQAQFMVLLCKAKGKSSITESIFENRFMHVAELRRLGAEILIKKNKAFISGDTNFQAAELMSSDLRASVALVLAAIVAKGSSTINRIYHLDRGYENIENKLRKVGVNIRRVN

SEQ ID NO: 123081 - protein, 78 aa, Unknown
  Bacterial polypetide isolated from the Sargasso Sea
MDKFLINGGRPLNGTVKISGAKNAVLPLMAATIIVPGVYRINRVPNLKDTRTMIKLLEIIGCDIEYKGTNLIIDSTAM

SEQ ID NO: 123082 - protein, 183 aa, Unknown
  Bacterial polypetide isolated from the Sargasso Sea
AGTFLIAAAAVGGEVEVANIIPEHLDSVIKCLEKANIQLEVKDSSIVVRSNANNILSTNIETNEYPGFPTDLQAQWMMLMCLAKGNSTIKENIYYDRFTHIMELNRLGCNIKLEDSVAIIEGDRKLIGADVMSTDIRASAALIIAALCAKGTTKISRVYHIDRGYDKIEKKLTNIGAVIFRKK

SEQ ID NO: 123083 - protein, 96 aa, Unknown
  Bacterial polypetide isolated from the Sargasso Sea
NNLKTIFENRFMHVPELNRMGANIETKGKTAVINPCKGFISAQVMATDLRASVSLILAGLVAKGETTLNRIYHLDRGYEKIEKKLQACGADIRRIN

SEQ ID NO: 123084 - protein, 115 aa, Unknown
  Bacterial polypetide isolated from the Sargasso Sea
TLDAVLSKLQQAGAVITTGKDWIELDRRTTPLTAVKVKTAPHPGFPTDMQAQFVALNAVAKGTGVITETIFENRFMHVPELQRMGAEIALETNSAGSKGESSLKGAPVMATDLTA

SEQ ID NO: 123085 - protein, 91 aa, Unknown
  Bacterial polypetide isolated from the Sargasso Sea
MDRFEIVGGNQLSGEVEISGAKNAVLPMMAASMLSPGKTIIENTPNLRDTRTFINLLNILGVESFFEDSKLTLNTDNISFFEAPYDLVKTM

SEQ ID NO: 123086 - protein, 198 aa, Unknown
  Bacterial polypetide isolated from the Sargasso Sea
MDKFIVKGPCKIKGEISISGSKNAALPILASTILFEKEVIVKNLPRVKDIDTMINLLKSLGSEIKFNKNRKIVKITKKKKQNYFASYSLVRTMRAGILVLGALVAKHQKSITSLPGGCLIGARPVNYHLNALKKLGMKYDIKKGYIHAHTKKKLKGAKIRFSKVSVGATENTIIAACLANGISVLRNCAIEPEIIDLI

SEQ ID NO: 123087 - protein, 280 aa, Unknown
  Bacterial polypetide isolated from the Sargasso Sea
MKTFASYSLVKTMRGSILVLGPLISKYHRSKISLPGGCLIGARPINYHLTALKKLGMKYKLKDGYILATSKGKLKGTIINFPKISVGATENSIIAACLAKGKTILKNCAIEPEIKDLTNFLNNAGAKIKWSGRTCKIIGVNFLNKTEYAVMSDRIEAGTFCVAATLAKGNLKIKNLNPKVIRTEINLLKKVGAKIKTCQNEILVKGPEKIKSIKSIKTKEFPGIPTDLQAQLMVLMCKATGKSSITESIFENRFMHVAELQRLGAKIIVKNNTAIIEGKT

SEQ ID NO: 123088 - protein, 306 aa, Unknown
  Bacterial polypetide isolated from the Sargasso Sea
PSWWLCIGTRPIDIHLKALSKLGVKYKIKQGYVHATAPKGLKGSKIHFPKISVGATENLIIAASMAKGISILSNCAIEPEIIDLINFLKKMGCKLKWISKRSLKITGVNYLDDASYTVMFDRIEAGTYLIAAAVTEGNLKIRKVNPLTVKKEIDILKKIGSRIKYRNNEIHIIGSKNIRSINLKTAPWPGLATDLQAQMMVLLCKANKKSVIQENIFENRFMHVGELNRMGAKILIKGNKAIIGGRIKFIAAELMATDLRASVSLVLAALSASGKSIINRIYHLDRGYENIEKKLRKVGAKIRRIH

SEQ ID NO: 123089 - protein, 263 aa, Unknown
  Bacterial polypetide isolated from the Sargasso Sea
QIVLDCPSVGATETILMAAVLADGVSTIENAAQEPEVQDLANLLNSMGAQVSGAGGPVITVQGVERLRGCTNYSVIPDRIEAGTFLMAAAITRSPLVVEPVIPEHLSAVIQKLRDCGCSIEIKGRAVTITPGEITAVDITTQPFPGFPTDLQAPFMALMCTAKGTSVISEKIYENRLQHVAELQRMGASIRLKGSTAIVEGVAQLSAAPVTGTDLRAAAAMVLAGLSAKGITEVAGLKHLDRGYDDLEAKLNAAGAEVKRNIL

SEQ ID NO: 123090 - protein, 284 aa, Unknown
  Bacterial polypetide isolated from the Sargasso Sea
MKYQIKKGYIHASSKGYLKGCKIKFSKISVGATENSIIAACLAKGKTILRNCAIEPEVKDLTNFLKLAGANIKWIGKRSVKIEGVKSLNSINYSVMSDRIEAGTFSIAACLSEGNLTIKNFNPKIIQTELDLLKKTGAKIKFFKKEINIKGPKNIKKLKNIITKEYPSFPTDLQAQLMVLLCKANGRSIITENIFENRFMHVAELRRLGAKITINNNKAIIDGKTNFQGAELMSSDLRASVALVLAAIVANGHSIINRIYHLDRGYEEIEKKLRKIGVKIKRIS

SEQ ID NO: 123091 - protein, 181 aa, Unknown
  Bacterial polypetide isolated from the Sargasso Sea
MQKLLIKGKKEISGSIKISGSKNATLPILAASILAKNITLNNAPFVKDIFTMIELLKFIGINVKIASKKNNIKLINKKKNINTLAPYKLVKTMRAGVLVLGPLLTKYKKAKVSLPGGCAIGTRPVNLHLFALKKLGADIKIKDGYIIAEAKDGLIGAKINFPSISVGATENALLAALAQKE

SEQ ID NO: 123092 - protein, 126 aa, Unknown
  Bacterial polypetide isolated from the Sargasso Sea
MQKLLVKSTKNLTGVVRISGSKNATLPILAASILSQKKIELRNIPLVKDVITMSELLRHIGSNIKINPKKKKILIENKNNKFKTTAPYSFVKTMRAGVIVLGPLLTRFGKAKVSLPGGCAIGTRPS

SEQ ID NO: 123093 - protein, 86 aa, Unknown
  Bacterial polypetide isolated from the Sargasso Sea
MAKIVVTGGKPLHGEVNISGAKNAVLPILCATLLADAPVEITNVPHLHDVVTTVKLLGELGAKVTIDQGTLSRGSAIVVDPRTSTS

SEQ ID NO: 123094 - protein, 59 aa, Unknown
  Bacterial polypetide isolated from the Sargasso Sea
MDGLRIEGGKPLRGDITISGAKNAALPLLCLGLMTSDRLVLKNVPNLADTVSMEGLLRH

SEQ ID NO: 123095 - protein, 196 aa, Unknown
  Bacterial polypetide isolated from the Sargasso Sea
KSITYSIMNDRIEAGTFCVAACLNGGNLKIKNFEPKIINTEINLLKKIGAKIKTTKNTIQIKGPNKIKSLNFLKTGEYPNFPTDLQAQIMVLLTKANGKSTIEENIFENRFMHVPELKRLGAKINIKGNKAIIEGTKNLEGAELMSSDLRASVALVLAAFISRGTSIINRVYHLDRGYEKIENKLKKIGVKIKRIS

SEQ ID NO: 123096 - protein, 131 aa, Unknown
  Bacterial polypetide isolated from the Sargasso Sea
MDRLIIKGEADLRGSISIKGSKNSALPIMVSALLSFNTLRLKNLPKLDDINNMSKLLRSYGAIIKSRKDNLEINCEKIINKEAYYDIVRKMRASILILGPLLARFGEAKISLPGGCAIGTRPIDIHLEGLK

SEQ ID NO: 123097 - protein, 303 aa, Unknown
  Bacterial polypetide isolated from the Sargasso Sea
GSKIILSKDKRVARIHNKKNLKTFASYSLVKTMRGSILVLGPLIARYYKSKISLPGGCLIGARPINYHLDSLKKLGMSYILKDGYILAKSNGKLKGTTIKFPRLTVGATENSIIAACLASGTTILKNCAIEPEIKDLTKFLNSAGAKISWIGRTCKIVGVKTLNPTEYSVMADRIEAGTFCVAATLAKGNLKISNFDAKIIKTELELLKRFGAKIKAHKEKIFIKGPQKIRSIKNIKTKEYPGVATDLQSQLMVLMCKASGKSSITENIFENRFMHVAELRRLGAKINVKNNKAYIFGNTKFI

SEQ ID NO: 123098 - protein, 194 aa, Unknown
  Bacterial polypetide isolated from the Sargasso Sea
MICGSKKKSYLKSQNLKIFGQGKLNGRVEISGAKNSALVLLAASLLTNERIILENVPRLTDIEKMGNILRNLGVNLVDKNNKLEIDSENISIKELPYELVNGLRASFFCIGALLSKFGEAKVPLPGGCNIGSRPIDEHINGLKALGAEILIEEGIVRAKIKGKKNKLCGTHIKLKCPSVGATETLIMAASLADG

SEQ ID NO: 123099 - protein, 349 aa, Unknown
  Bacterial polypetide isolated from the Sargasso Sea
IATISKGKKNNFFAPYSLVKTMRAGILVLGPLLAKNKKAKVSSPGGCSIGVRPIDIHLKAISKLGVKIKIEKGYVNAKAQEGLVGSEIRFPKISVGATENLVLAACLAKGRTTIKNCAIEPEIKDLTNFLKTAGAKIKWIGKRTLKIEGVKKLKSITYSIMNDRIEAGTFCVAACLNSGNLKIKNFEPKIINTEINLLKKIGAKIKTTKNTIQIKGPKKIRSLNFLKTGEYPNFPTDLQAQMMVLLTRANGKSTIEENIFENRFMHVPELKRLGAKINTKGNKAIIEGTNNLEGAELMSSDLRASVALVLAAFISRGTSIINRVYHLDRGYEKIENKLKKIGVKIKRIS

SEQ ID NO: 123100 - protein, 408 aa, Unknown
  Bacterial polypetide isolated from the Sargasso Sea
SISGSKNAALPILAATLLFDKPVIIENLPSRTRDIHTMLNLLKSLGSNIQFLNNKKTVKITKTKKQKQFASYSIVKTMRAGILVLGPLVAKYHKSISSFPGGCVLNGNSGRPINLHLEALKKLGMKYEIKKGYIHAKSNGKLKGNKIKFPSISVGASQQLLMSAVLAKGKTLLHNLACEPEIKDLTNFLISAGAKIKWIGKRTCQIIGVNSLKETKYTVMGDRIETGTFCVAATLAKGDLLIKNFDPKLIKTELNLLKKVGAKIKLFKNSINVKGPERIKSIKNITTKEYPGFPTDLAPQFMVLLCKASGTSSITENIFQGRFLHAMELQRLRAKITIKNRTAKIEGNTNFIAAEVMSSDLRASAALVLAGIVSKGNTVVTRVYHCDRGYENFENKLKKIGVNIKRLK

SEQ ID NO: 123101 - protein, 306 aa, Unknown
  Bacterial polypetide isolated from the Sargasso Sea
MDKFIVRGPSKLKGEIAISGSKNAALPILASTILFDKEVIIKNLPRVKDIDTMINLLKSLGSEIKFSKDKKIVKITKKNKHKIFASYSLVRTMRAGILVLGALVTKYQKSVTSLPGGCLIGARPVNYHLNALKKLGMKYEIKKGYIYANTKGKLEGAKIRFSKISVGATENTIIAACLANGVTILRNCAIEPEIVDLINFLKSGGAKIKFIGKRTLRIEGIKSLKSTSYAVMSDRIEAGTFCVAACLTGGNLKINNLYPKVIKTELTLLKKVGAKIKTTKKQIHIIGPKKIKNISNLVTKEYPDSN

SEQ ID NO: 123102 - protein, 369 aa, Unknown
  Bacterial polypetide isolated from the Sargasso Sea
MLKLLKSLGSKIEFFQNKKTVKITKSNKRQILASYSLVKTMRAGILVLGPMIAKYNKSITSLPGGCLIGARPVNYHLNALKKLGMKYEIKKGYIHAFSKGKLRGADIKFSKISVGATENSIIAACLAKGKTILKNCAIEPEIKDLTNFLNSAGANIKWIGKRTVKIIGVDSLKEIKYSVMGDRIETGTFCVAATLSKGDLLIQNFDPKLIQSELNLLKKIGAKINIFKNKIHIKGPKKIKNISSIETKEYPSCLSTDLQAQFMVLLCLASGRSSIIENIFENRFMHVAELRRLGAKITIKRNKAIIEGPSEFTGAELMSSDLRASVALVLASIVAKGKSVINRIYHLDRGYEKIENKLKKIGVNIKRLS

SEQ ID NO: 123103 - protein, 281 aa, Unknown
  Bacterial polypetide isolated from the Sargasso Sea
MERLEVFGAKKLKGKIFISGSKNAALPILAATILTNKKIVLKNLPNVKDIETMIKLLESIGSTIKYSKKKNLITIINKKKLKTFASYNLVKTMRAGILVLGPMIARYGKAKVSTPGGCSIGVRPIDIHLKSLAKLGVKFKIVDGYVYASSKKRLEGNKIKFTKISVGATENLIIASSMAKGTTILSNCAIEPEVKDLINFINCIGGKIKWIGKRTLRIDGVNDFKKGEYSIMPDRIEAGTYLIAGAITRGNIKIFGINPNIIRTEINILKKIGSKIKIEKD

SEQ ID NO: 123104 - protein, 422 aa, Unknown
  Bacterial polypetide isolated from the Sargasso Sea
MKRFLINGTNKGVKGEINISGAKNSCLPLMAASILFKKKVILRNAPFVKDVLTMKDLLISLGSKVELKKEKKIIKITNNKKHKLTVPYNLVSTMRAGVLTMGPLLARYPKSKIRVALGGGCALGIRDTSWHLSGFKSLGADNTLNRGYVNIFSKNGLKGNIFKFPKVTVTGSSNLIMASVLIKGEHIIKNISIEPEVKDLIKFLNNSGAQIKFIGKRSIKIHGVNELVNGDHTIIGDRIEAFSYLCVAATTNGRVRVKKIDPKYLNAELRILKKIGYKIEVNVNSIMISPGKKTKPVSIKTGPWPQFATDNMPIILAVLTKVSGKSVIEETIFSNRFMAVPELKRMGAKISIKKNKAFIIGQKKLNAADCISSDLRTTFSIILGAISAEGSSTISRIYHGLRGYENLQIKLKKLGIKIKLKK

SEQ ID NO: 123105 - protein, 145 aa, Unknown
  Bacterial polypetide isolated from the Sargasso Sea
IKTIKNEIHIKGLKKIKSISNIKTKEYPSFPTDLQAQFMVLLCKANGRSSITESVFENRFMHVAELRRLGAKILIKKNKAIIYGGENFQGAELMSSDLRASVALVLAAIIARGKSVINRIYHLDRGYEKIETKLKKIGVNIKRIS

SEQ ID NO: 123106 - protein, 221 aa, Unknown
  Bacterial polypetide isolated from the Sargasso Sea
MDKLEVFGGNKLKGKVNISGSKNAALPILAATILSNKKIVLNNLPNVKDIETIIKLLESIGSIVKYSKNKTSITIQNKKKLKTFASYNFLRTMRGSFLVLGSMLARYGNAKVSTPGGCSIGVRPIDLHLKALAKLGVNYKIIDGYVHAKSKKKLKGTKIKFPKISVGATENLVIASSMAQGTTILSNCAIEPEIKDLINFINCMGGRIKWIGKRTLRIQGV

SEQ ID NO: 123107 - protein, 135 aa, Unknown
  Bacterial polypetide isolated from the Sargasso Sea
NGPKNIKKILNLKTKEYPSFPTDLQAQFMVLLCRANGKSTITENIFENRFMHCAELRRLGAKVLIKKNTAIIEGNTDFQGAELMSSDLRASVALVLAAMVAKGKSVINRIYHLDRGYENIETKLRKIGVNIRRIK

SEQ ID NO: 123108 - protein, 153 aa, Unknown
  Bacterial polypetide isolated from the Sargasso Sea
MEKLEVIGVKKLTGTIKISGSKNSSLPILAASLLSNKKVKILNLPNVKDIITMILLLQSLGSKINYNKKNKSVEIDNSKNIRTFASYNLVKTMRAGILVLGPLLARFNKAKVSLPGGCAIGARPVNIHLKALSKLGVKYKIVQGYIYAKAPKG

SEQ ID NO: 123109 - protein, 261 aa, Unknown
  Bacterial polypetide isolated from the Sargasso Sea
KFPRLSVGATENSIVAACLAKGTTILKNCAIEPEIKDLTKFLNSAGAKISWIGRTCKINGVKTLNPTEYSVMADRIEAGTFCVAATLAKGNLKISNFDAKIIKTELELLKRFGAKIKAHKEKIFIKGPEKIRSIKNIKTKEYPGVATDLQSQLMVLMCKASGKSSITENIFENRFMHVAELRRLGAKIDVKNNKAYIYGNTKFIGAELMSSDLRASVSLVLAAMVSKGKSIINRIYHLDRGYENIEHKLKKIGVKIKRLKQ

SEQ ID NO: 123110 - protein, 160 aa, Unknown
  Bacterial polypetide isolated from the Sargasso Sea
MQKLLINGKKELFGKISISGSKNATLPILAATILSGRVQLTNIPLVRDIFTMVELLKFIGLKINISKKKNLIEIKNINKNIKTLAPYKLVKTMRAGVLVLGPLLARYKKAKISLPGGCAIGTRPVNLHLFALKKLGAKIKIKNGYIIAESKNGLVGANIT

SEQ ID NO: 123111 - protein, 202 aa, Unknown
  Bacterial polypetide isolated from the Sargasso Sea
MQKLEVFGANKLKGQVKISGSKNASLPILAATLLSNSKINLSNVPKVKDIETMIELLRSLGSKIKFDKNKIDIDNSNQFKKFASYNLVKTMRAGILVLGPLLAKFGSAKVSLPGGCAIGTRPVDIHLKALSKLGVKFKILEGYVYANAPKGLKGSKIKFSKISVGATENLIIAACFAKGETVLSNCAIEPEIKDLVNFLKKV

SEQ ID NO: 123112 - protein, 216 aa, Unknown
  Bacterial polypetide isolated from the Sargasso Sea
MDKLIISGNAKLKGSIAVKGSKNSALPLLVSSLLTNKDLILRNLPDLEDINNMQKLLKEYGVSIKNKKNEITLNGKNIFNRVADYDIVRKMRASILILGPLLSKFGEAKISLPGGCAIGTRPIDIHLLGLKQLGAKFQIENGFVIGKVNKHLIGSNVDLPFPSVGGTENILMASVLAQGKTKIINDAKEPEIIDLVNSLNSMGAKIFGAGSKNYTY

SEQ ID NO: 123113 - protein, 164 aa, Unknown
  Bacterial polypetide isolated from the Sargasso Sea
FDPKIIKTEIDFLKKTGAKIKTSKDEIHIKGPKIIKNITSITTKEYPSFPTDLQAQFMVLLCKAKGRSVITESIFENRFMHVGELRRLGAKISIKENKAVIEGSTQFVGAELMSSDLRASVALVLAAMVSNGKSTINRIYHLDRGYENIEKKLQQIGVKIKRLT

SEQ ID NO: 123114 - protein, 390 aa, Unknown
  Bacterial polypetide isolated from the Sargasso Sea
SLLIDEVLELTNVPNLTDIAGMGRILSALGVQVEHSVDSVSLNAGTLSSHEPPYELVNSLRASFFCIGSLLGRLGHARVPLPGGCRIGARPVVEHIRGLKALGAHVSVEHGIVTACLKGSSKRLTGASIVLDCPSVGATETLLMAAVLASGTTTIENAAQEPEVQDLANLLIQMGADISGAGGPVIKVRGVERLHGVRNYPVIPDRIEAGTFLIAAAITRSPLRVEPVIPEHLSAVLQKLRDCGCQLEIDQTGISITPGDIQAVDITTQPFPGFPTDLQAPFMALMATAQGTSVISEKIYENRLQHVAELQRMGASIRVDGSTAIIEGVVQLSAAPVTGSDLRAAAAMVLAGLAANGTTKVSGLKHLDRGYDNVEAKLNAVGAQLERQRG

SEQ ID NO: 123115 - protein, 121 aa, Unknown
  Bacterial polypetide isolated from the Sargasso Sea
MDKLLIRGGTKLRGEIYASGAKNSALPILAASLLADSPLKVGNLPHLNDVTTMLELLGSMGVDVMLSDEMEVQVDTSSINNLNARYELVKTMRASILVLGPLLAKFQKATVALPGGCAIGS

SEQ ID NO: 123116 - protein, 277 aa, Unknown
  Bacterial polypetide isolated from the Sargasso Sea
DGYILAKSKGKLCGTTINFPKISVGATENSIIAACLAKGKTVLKNCAIEPEIKDLTDFLNKAGAKIKWSGRVCKIIGVNSLNETTYSVMADRIEAGTFCVAATLAKGNLQINNLNPKIIGTEIKLLKKVGAKIKTSENKIIIKGPEKIKSIKNIKTKEFPGIPTDLQAQLMVLMCKAVGKSLITESIFENRFMHVAELQRLGAKINIKNNIATIEGNTKFIGAELMSSDLRASVALVLAAIVSTGKSYINRIYHLDRGYEKIENKLKKIGIKIKRLK

SEQ ID NO: 123117 - protein, 304 aa, Unknown
  Bacterial polypetide isolated from the Sargasso Sea
MDKFKINGPSKIRGEVSISGSKNAALPILAATLLFDKNVTIKNLPRVKDIDTMLNLLKSLGRKISFKNNKKIATISKGKKNNFFAPYSLVKTMRAGILVLGPLLAKNKKAKVSSPGGCSIGVRPIDIHLKAISKLGVKIQIEKGYVIAKAQEGLFGSKIRFSKISVGATENSILAACLAKGTTTIKNCAIEPEIKDLTNFLKTAGANIKWIGKRTLKIEGVKTLKSITYSIMNDRIEAGTFCVAACLNGGNLKIKNFEPKIINTEINLLKKIGAKIKTTKNTIQIQGPKKIRSLDFLKTGGNIQ

SEQ ID NO: 123118 - protein, 171 aa, Unknown
  Bacterial polypetide isolated from the Sargasso Sea
GEVEIKNIIPEHLESVTNCLLKANIDINIRDSSITIKSDGKNILSTNIETNEYPGFPTDLQAQWMMLMCLADGTSTIKENIYYDRFTHIMELNRLGCNIKLEDSVAIIEGNKNLIGADVMSTDIRASAALIIAALCAKGVTNISRVYHIDRGYDKIEKKLTNIGANIIRKK

SEQ ID NO: 123119 - protein, 255 aa, Unknown
  Bacterial polypetide isolated from the Sargasso Sea
CICGATENTLLAAVLAEGKTVIENAAREPEIVDLVEMLKKMGAEITGAGTSEIIIEGVKKLKPTNHKVVGDRIAAGTFLSAFLATHGSGVVRGINPENLPMEIKKLKEIGAKIKAEDNSIEISYDGNLNAVEISTLPFPGIATDLQPVFGSLLLKASGTSIITENVYDQRFQWIPEVQRMGASVQTGWQHAMIKGVNNLSGAPVNSTDIRTGASLVIAALQADGSSKITGIEHINRGYEDIVASLNSLGSKIEYN

SEQ ID NO: 123120 - protein, 177 aa, Unknown
  Bacterial polypetide isolated from the Sargasso Sea
MVPWVGKKIKITSIDTNILKKELDILKKMGIKFKTQKNKIIIFFSKNIKPISIKTEAYPGFPTDLQAQIMVLMTKAHGESKIKENIFENRFMHVPELNRMGAKIKVSGNLSTINFSEELNGAEVMATDLRASVSLVLAGLIAKNRTIINRVYHLDRGYENLEKKLRNCGAIITRVNY

SEQ ID NO: 123121 - protein, 386 aa, Unknown
  Bacterial polypetide isolated from the Sargasso Sea
MDKFLIDGPSKIKGKVSISGSKNASLPILAATLLFDLPVTIKNLPRVKDISTMLNLLKSLGSKIELSKDKKTAKISNNKNMKTFASYSLVKTMRGSILVLGPLVAKYHKSKTSLPGGCLIGARPVNYHLSALEKLGMNYEIKDGYILAKSFGKLKGGLIKFPKITVGATENSIIAACLAKGKTVLRNCAVEPEIKDLTNFLNSAGAKINWKGRTCTISGVSSLKSTTYSVMADRIEAGTFCVAATLAKGTLEVNNLDPKIINTELNLLKKTGAKIKVSKNKIHINGPEKIKSIKNIRTKEFPGIPTDLQAQLMVLMCKAKGKSSITENIFENRFMHVAELQRLGANIITKNNKAYIEGNTKFIGAEVMSSDLRASVALVLAASVAQ

SEQ ID NO: 123122 - protein, 420 aa, Unknown
  Bacterial polypetide isolated from the Sargasso Sea
MDRFFISGPSKIKGTIKLSGSKNASLPILAATILFDEPVEIKNLPNVKDISTMLDLIKSLGFIVTKNKVKNSVTIQKKNIKTFASYSLVKTMRAGILVLGPLVSKYRKAITSLPGGCLIGARPVNFHLNALGKLGMKHQIRKGYIYANAKKGLKGSIIKFPQISVGATENAILAATLAKGKTILKNCAIEPEIKIDLTNFLNKAGAKIKWIGKRSIEIEGVKKLNSVSYSVMADRIECGTFCVVAAISKGELKINGLNPKVIRTEISLLKKIGAKIKTFDESIFIKGPKKIKNIKFLETKEYNGFPTDLQAQFMALLCKANGKSVIQEKIFENRFTHIGELKRLGAKISIIKNKAIIMGNSNFEGAELMSSDLRASVALVIAAIVAKGNSIINRIYHLDRGYENIENKLRKVGVDIKRIS

SEQ ID NO: 123123 - protein, 185 aa, Unknown
  Bacterial polypetide isolated from the Sargasso Sea
MDKIIIEGQNPLSGTVSISGAKNAVLPIMTAALMADGISRIDRVPDLRDTRTMIKLMEIVGAKCSFEKGSLKIDGSSVDNPEAPYDLVKTMRASFYVLGPLLARFGSVKVSLPGGCAWGPRPVDFHLKGLEKLGAKITLSSGYIMAEAKRLKGAKISFEFPSVGATGNIVMAAATAEGTTVIENA

SEQ ID NO: 123124 - protein, 80 aa, Unknown
  Bacterial polypetide isolated from the Sargasso Sea
NRMGCDISVKGNHAVIQGVKSIYGAQVMATDLRASASLILAGLCAEGETVVDRIYHIDRGYERIEEKLNYLGANIIRLPS

SEQ ID NO: 123125 - protein, 175 aa, Unknown
  Bacterial polypetide isolated from the Sargasso Sea
MEKIVITGGEPLSGNITIGGSKNAILPIMAACILTDEAVHLTNVPNLQDIQTMIKVLESLGVKADISNLSQNKLTVCYEDINKNIAEYDLVRKMRASVLILGPLLARKKEASVSLPGGCAIGARPIDMHIDALKKLGAEFVLDSGYVNCKAPKGLKGNKIDLKKISVGASENIIM

SEQ ID NO: 123126 - protein, 212 aa, Unknown
  Bacterial polypetide isolated from the Sargasso Sea
KGAGSDTIVVEGVDSLKGTTFAVMPDRVEVGTYLTATAMTGGNVKVKSAKPEYLSSVISKLESTGAQIQTGKDWVEISMERERPISTSLTTGPYPSFPTDMQAQFVALNAIAQGNSTVTETVFENRFMHVQEIARMGGDITLKGNTAVISGIDNLKGAPVMATDLRASASLVLAGLVAQGSTIIDRIYHIDRGYERIEEKLKMLGADIERIS

SEQ ID NO: 123127 - protein, 108 aa, Unknown
  Bacterial polypetide isolated from the Sargasso Sea
FCVLNALAQGTATITETIFENRFMHVPELIRMGATMELEGNTCIIQGIESLSGAQVMATDLRASASLVIAGLVADGKTIVDRIYHLDRGYEHIEQKFQGLGAHVERVQ

SEQ ID NO: 123128 - protein, 95 aa, Unknown
  Bacterial polypetide isolated from the Sargasso Sea
VTETVFENRFMHVQEIARMGGNIALKGNTAVINGINKLKGAPVMATDLRASASLVLAGLVAEGDTTIDRIYHIDRGYERIEEKLKILGADIERIS

SEQ ID NO: 123129 - protein, 306 aa, Unknown
  Bacterial polypetide isolated from the Sargasso Sea
EVRVDSSSIKNLDARYELVKTMRASILVLGPLLARYQEATVALPGGCAIGSRPVNLHIEAMSAMGAVINIEDGYIKASVDGRLKGNKILFDPVSVTATENVIMAASLAEGVTTIQNAAKEPEVVDLANCLISMGANIKGAGSDTIVVEGVDSLKGTTFSVMPDRVEVGTYLTATAMTGGNVKVKSAKPEYLSSVISKLESTGAQIQTGKDWVEISMERERPISTSLTTGPYPSFPTDMQAQFVALNAIAQGNSTVTETVFENRFMHVQEIARMGGDITLKGNTAVISGIDNLKGAPVMATDLRASA

SEQ ID NO: 123130 - protein, 126 aa, Unknown
  Bacterial polypetide isolated from the Sargasso Sea
MEKLLIKGGNSLKGKITCSGAKNAALPMIASTILCDEKVTLRNLPYLQDITTMFELLGSMGAEILLDENMHFTISSANLKDTEARYELVKTMRASILVLGPLIARYGKARIALPGGCAIGTRPVNF

SEQ ID NO: 123131 - protein, 282 aa, Unknown
  Bacterial polypetide isolated from the Sargasso Sea
MIVEKHISIEGNHKLSGEITVKGAKNAVLKEMILPILCEGDYIIKNVPSIADVSYMQEVLNVLGIKSEFSNNNLSISSPSQIGIEAPYEIVQKMRASIIILGPLLAREGEARIAFPGGDQLGPRPVQMHLDALEKMGAKFELDHGVLIGRTEGLKGVEVNLPYASVGATENTLLAAVLAEGKTVIENAAREPEIVDIVNMLKKMGANISGEGTSEIIIEGVKKLNPTDHEVIGDRVAAGTFLATIFSTKGSGKINGVNPEHLPMELKKIQEMGAIVEFEESS

SEQ ID NO: 123132 - protein, 173 aa, Unknown
  Bacterial polypetide isolated from the Sargasso Sea
MIIRGGNRLEGVLTASGAKNAALPILAATLLTSGVCSLRSVPVLRDITTMLTLLASLGAKTARREDGEVLIESESVQEFTAPYDLVKTMRASILVLGPLLARHGQARVSFPGGCAIGSRPVDLHIRALEAMGAAITIEGGYIVASAPEGLQGVDFTFDTVTVGGTENAVMAAS

SEQ ID NO: 123133 - protein, 295 aa, Unknown
  Bacterial polypetide isolated from the Sargasso Sea
MSEKNLNLTNIPKLQDIKSMILLLESFGVKINENDSKLTLNSKDLKNNIADYDLVRKMRASILVLGPLLARFKKAKISLPGGCSIGTRPIDIHLNSLNKLGINFEIEKGFISGLVKNELIGNIIDLPFPSVGATENVMMAAILAKGKTIINNAAKEPEIIDLGECLNSMGAKIIGHGTNTIYIEGVSSLHDSSYDIMFDRIVAGTYILAAVMINKKFNVKNIKPKYLESLIQTLIKMKANLIVNDNDITILPSKKIIGINIETAPYPGFPTDLQAQIMALMCMANGPSTIKEKIF

SEQ ID NO: 123134 - protein, 305 aa, Unknown
  Bacterial polypetide isolated from the Sargasso Sea
PGGCAIGSRPVDIHLFVLKKLGAKIKIKNGYILAETKKGLIGKRIRLPSISVGATENALIAASYAKGTTYLSNCACEPEIKDLTIFLKKMGIKIQWIGERKVKISGSHNLKSVSHTVMFDRIEAGTFVIAGALTGKKLKISGIDTKILKKEISVLKKMNVKLRVNKNDITILNSKNIKPVSISTQPYPGFPTDLQAQIMVLMTRANGISKIKENIFEKRFMHVPELNRMGAKIKISRDTSLVYGPQQLNGAEVMATDLRASVSLVLAGLAAEDETIINRVYHLDRGYEKLENKLRKCKANIFRSN

SEQ ID NO: 123135 - protein, 307 aa, Unknown
  Bacterial polypetide isolated from the Sargasso Sea
LPIMVSALLTKSPLKLKNLPKLDDIDNMSKLLRSYGANIKSKKDNLEIKCNNITNRDADYDIVRKMRASILILGPLLARFGKARISLPGGCAIGTRPIDIHLEGLKKLGANFSVENGYVVGAVEDELIGKHITLPFPSVGATENILMAASIAKGKTIIENAAREPEINDLAFALNKMGAKINVKNNGIIKIDGVNSLTQATHKIMSDRIVAGTFVIAAVMLNKKFEVKEIISSNLEALTSLLIKMGAKLKIKKTSIQIMPSKKLNGIKIQTAPYPGFPTDLQAQIMALMSLANGNSQIKENILKIDL

SEQ ID NO: 123136 - protein, 154 aa, Unknown
  Bacterial polypetide isolated from the Sargasso Sea
MDKLIINGMVPLNGEVSVSGAKNAVLPMLCASVMASNTCVTLKNIPHLHDVTTTVRLLRQMGVSVTLDDKMNIDLDPSTIKNYYAPYDLVKTMRSSILVLGPLLAKYGQAKVSLPGGCAIGTRPVEMHLEALAKMGASIEIDNGYISAIAKELV

SEQ ID NO: 123137 - protein, 178 aa, Unknown
  Bacterial polypetide isolated from the Sargasso Sea
MDRILIRGGNRLSGRLPISGAKNAALTLMPCALLTEEPVTLRNLPRLADVDSFGHLLNQLGCSTRIEGARPEDFGRVMTIRAGKLTATEAPYDIVRKMRASILVLGPLIGRAGEARVSLPGGCAIGNRPIDLHLKALEAIGAQLEMAAGYVKAVAPGGRLSGGKYTFPIVSVGATENV

SEQ ID NO: 123138 - protein, 163 aa, Unknown
  Bacterial polypetide isolated from the Sargasso Sea
MDKLVVNGGRELRGRVKISGAKNAVLPIMASSLLVEGITVIKNVPNLRDTRTFIDLLSILGAKCNFENSTLTIDATNITSIEAPYDLVKTMRASFYVMGPLLGRFGETKVSLPGGCAWGPRRVDYHLKGFESLGAKIDFNQGYILAHYDNLKGGSISFEIASV

SEQ ID NO: 123139 - protein, 213 aa, Unknown
  Bacterial polypetide isolated from the Sargasso Sea
MDKLIITGGQRLDGDIRISGAKNAALPILAATLLADEPVTVGNLPHLQDVTTLIELLGRMGVHVVIDDRMNVEVNATTIKELTAPYELVKTMRASILVLGPMVAHFGKASVSLPGGCAIGSRPVDIHLRGLEAMGADIEVTNGYVNASVDGRLKGARIVMDVVTVTGTENLMMAAALAEGTTYLENAAREPEVVDLADFINAMGGKISGAGTD

SEQ ID NO: 123140 - protein, 265 aa, Unknown
  Bacterial polypetide isolated from the Sargasso Sea
MDKLLIRGGSPLNGEIYASGAKNSALPILASSLLADSPLKVGNLPHLNDVTTMLELLGSMGVDVMLSDEMEVQVDTSNIKNLNARYELVKTMRASILVLGPLLARFQQASVALPGGCAIGSRPVNLHIEAMQAMGAEVSIVDGNIKAKVHGRLKGARIIFEPVSVTGTENVIMAASLAEGVTIIENAAREPEVIDLANCLIQMGANIKGAGTDVITIEGVDRLEGATFSVMPDRVEVGTYLTAVAMTGGLVKIKSAKPQYLSSVI

SEQ ID NO: 123141 - protein, 322 aa, Unknown
  Bacterial polypetide isolated from the Sargasso Sea
QIDGRCTLNGEVTISGAKNAALPILFATLLCDEEIHLSNVPRLKDVGTTIKLLEMLGATTKVNGNVTVLTGAVNNHVAPYELVKTMRASILALGPLAARFGAADVSLPGGCAIGARPVNLHVHGLELMGAKIAIEDGYIKARVDGRLKGAHILMDMVSVTGTENLMMAATLADGRTVIENAAREPEVVDLANFLNALGAKIQGAGTDTLTIDGVERLHGGSYSVQPDRIETGTFLVGAAVTGGKITCRKTDPTLLEAVLVKLEEAGALIEKGEDWITLDMTGRTLKPVTIKTAPYPAFPTDMQAQFTVLNAVAKGTGMVTET

SEQ ID NO: 123142 - protein, 210 aa, Unknown
  Bacterial polypetide isolated from the Sargasso Sea
METLDKLIINGNKPLFGEVNISGAKNAALPLMTISLLIEKGFELNNVPDLIDTQLMNKMINELGIKSCNKLGKIQFHGKAQKIEASENLVKKMRASILILSPLLQSKKIARVPLPGGCAIGSRPIDIHLEVIKKLGATVEFKDNFLEARLPKMNFFGNNIKFPIVSVGATECAILAAVLAKGKTTLSNAAKEPEVVDLGNCLIKAGASIN

SEQ ID NO: 123143 - protein, 250 aa, Unknown
  Bacterial polypetide isolated from the Sargasso Sea
MKKIIIYGGKKLHGSISVSGSKNSSLAILASSLLFEKKVVLKNIPVVEDIKTMIKLLIYLGKNIKVKKKTIEITNSKKFGKSFIAPYELVKTMRAGILVLGPLISKFKKAKVSLPGGCAIGARPIDLHLKFLKSIGVRNHIDKGYVISKLNNIKKKNIYRFQKISVGATINSILASCLIPNKIILNNIAIEPEIIDLIKFLKKAGIKIKFLSNRKIEILGKKHLNQISYEIMPDRIEAGTYMIASAITNS

SEQ ID NO: 123144 - protein, 211 aa, Unknown
  Bacterial polypetide isolated from the Sargasso Sea
HLDARGPGTVLVDASELTSDAPDPDAVRKLRASFFAAGPILGRLGSVRMPLPGGCAIGARPVDLHLAAFEALGADVEVTPDGVVIARATSRGEGGGDKKRGGGERGDANRPRLRGAGAFRARYPSVGATLNAVVAAALADGETIVANAAAEPEVVDLCAMLVAAGAKIAGAGTSEIRVEGVASLRGCRHDAIPDRIEAGTLLVAAACTRST

SEQ ID NO: 123145 - protein, 76 aa, Unknown
  Bacterial polypetide isolated from the Sargasso Sea
ASIRVEGNTVIVEGVDSLKGAPVMATDLRASASLIIAGLVSGSETCVDRIYHIDRGYECIEEKLQLLGAKIRRVPS

SEQ ID NO: 123146 - protein, 305 aa, Unknown
  Bacterial polypetide isolated from the Sargasso Sea
ESLGVTMNRGDGFVELNASGLNQSSPPYDLVNGLRASFFCIGPLLARTGVARVPLPGGCQIGARPVVEHVKGLKALGAQVTIEHGVVSAVVPGRGHRLTGGKIHLDCPSVGATETLMMAAALADGETTIDNAAQEPEVVDLAGLIIAMGGKVRGAGTPTITIVGMERLHGADYMVIPDRIEAGTLLLAGAITRSNLRITPLIPEHLGAVLSKLEEAGCTLESDGIGMTIAAEQIRAVDLRTQPFPGFPTDLQAPFMSLLATAQGTSVITEAIFENRLQHVAELQRMGAAIRTQGNTAFIEGVPCL

SEQ ID NO: 123147 - protein, 106 aa, Unknown
  Bacterial polypetide isolated from the Sargasso Sea
MNAVAEGTGTVIETIFENRFMHVQEMNRMGARILVEGNTAVVTGVEQLKAAPVMATDLRASASLVIAGLVAEGDTMVDRIYHIDRGYECIEEKLQALGGIIRRVPA

SEQ ID NO: 123148 - protein, 318 aa, Unknown
  Bacterial polypetide isolated from the Sargasso Sea
VSSLLSDKNLILKNAPKVDDINNMLMLLSGYGAKVIKNKNSLTLNCMNIKNISADYDIVRKMRASVLILGPLLSRFGYSKISLPGGCAIGTRPINIHLEGLIKLGANFKIENGFIIGNVKNKLKGNKIKLPFPSVGATENILMASVLAKGETIIDQAAREPEIEDLGNCLISMGAKIQGLGTNKILIQGVDSLKEAKHNIISDRIVAGTYIILAIMLNCKFEIKNFNPNHIISLIDVLKNMGCNLELLDRSIKIYPSKKLKSTNVVTAPYPGFPTDLQAQLMALMSIVNGNSQIKETVFENRFMHVPEFSRLGANIKL

SEQ ID NO: 123149 - protein, 250 aa, Unknown
  Bacterial polypetide isolated from the Sargasso Sea
MQKLEITGGKKISGSVTISGSKNATLPILAATILTNKKITITNVPIVRDVETMVRLLDSLGSKIKLDKKKKIIKIRNKKSLKTYASYNLLKTMRAGVLVLGPLLAKFGEAKVSLPGGCAIGSRPINIHLDALKKMGAKVKIRNGYIIASAKKGLKGTLIKFPKVSVGATENILIASCFAKGKSSLRNCALEPEIKDLIVFLKKAGCKINIKGRNIDVVGNSEFKPIKHKGIFDRIEAGTYIIAAALTMEN

SEQ ID NO: 123150 - protein, 303 aa, Unknown
  Bacterial polypetide isolated from the Sargasso Sea
MTLSLIINKDFNLHNVPDLADTRLMSNLLIDLGIEINWKKGNLTFNGKPKKDEASYDLVRQMRASILVLGPLLASKGSAKVPLPGGCAIGSRPIDLHVMVMEALGANVTFDSGFIISSLNNEGLKGGVINFPKVSVGATESAIMTAVLAKGQTKIFNAAIEPEVTDLANCLKKAGADIKGVGTDILIINGVKELNQVSHSVVSDRIEAGSFAIASSITMGNVEINNINPKNLTEFTNVLKLTGSKVEIFENSIKVSCSQRPKTHNVETEPYPGFPTDLQAQYMALMAIANGKTLIRETIFENR

SEQ ID NO: 123151 - protein, 319 aa, Unknown
  Bacterial polypetide isolated from the Sargasso Sea
GKKLTGSIPISGAKNSCLTLMPASLLSENSLTLNNAPFLSDVDTMKELLESLGCSVSHSKSKKKINLHMVNEGTFLADYEIVKKMRASILVLGPLLARFGQAVVALPGGCAIGARPVNLHLMALEALGASFSIENGYIKGKVHSSLKGCKIKFPFESVGATANTIMAAVLAKGTTELVNVAREPEIKDLCECLKSMGCQIEGAGEHTIIIQGVSNLKETIHDVVMDRIELGTYMIAGAISDGDIKLTGGNVALLENFIDKLNEIGIEINQCKDYLRVRRIKNSSINCTNISTEPFPGFPTDLQAQMMALLSIADGVSQY

SEQ ID NO: 123152 - protein, 273 aa, Unknown
  Bacterial polypetide isolated from the Sargasso Sea
MTSKTLRLTNLPHLADITTMVHLLAELGVSVNMVEEVSNGGHVGRVLSLSATEPRDKTAPYDLVRRMRASVLVLGPLLARWGEARVSLPGGCAIGTRPVDLHLDALKALGAEIELAEGYIRAVAHRGLKGNKVHFPSVSVGATENALMAAVLADGETIIANAAREPEVGDLAHCLIAMGAKISGVGTDTLFVSGVSQLNGAEHRVIPDRIETGTYAVASAITGGNILLEGSHMELIGAVSDTLSKAGVEVTEEKVGIRVRRHSEKTLGTDVMT

SEQ ID NO: 123153 - protein, 247 aa, Unknown
  Bacterial polypetide isolated from the Sargasso Sea
MKKIIIYGGKKLHGSISVSGSKNSSLAILASSMLFEKKVVLKNIPIVEDIKTMIKLLIYLGKNIKVKKKTIEITNSKKFGKSFIAPYELVKTMRAGILVLGPLISKFKKAKVSLPGGCAIGARPIDLHLKFLKSIGVKNHIDKGYVISKLNNIKKKNIYRFQKISVGATINSILASCLIPNKIILNNIAIEPEIIDLIKFLKKAGVKIQFLSNRKIEILGKKNLNQISYEIMPDRIEAGTYMIASAI

SEQ ID NO: 123154 - protein, 240 aa, Unknown
  Bacterial polypetide isolated from the Sargasso Sea
LGAKIKIKDGYILAEAKRGLVGAKIKFPSISVGATENALIASFNAKGTTILKNCAIEPEIKDLISFLNKLGANINLKGRTISIKESKSKSLKIHHQVIFDRIELGTYMIAAALLAKKKLLIDKIDTKIVKCEIDILKKIGVRMIIKKNSIIIKKGKRLKKINIITKPYPGFPTDLQAQLMVLLTQANGVSKIKENIFENRFMHVPELKRMGAEIEIKNKTAIIKGPTLLTGAEVMATDLR

SEQ ID NO: 123155 - protein, 173 aa, Unknown
  Bacterial polypetide isolated from the Sargasso Sea
MGKITIKKIDSARMGSIIETLQKAGAEVCLNENSISLDMTKNTIKPVDIVTAPFPGFPTDMQAQFTVLNCIGNGESSVKETIFENRFMHVQELNRMGTDITINGTTALINGVDSISGAQVMATDLRASASLILAGLIAKGETIVDRIYHIDRGYERIEEKLSNLGAEIIRLPN

SEQ ID NO: 123156 - protein, 267 aa, Unknown
  Bacterial polypetide isolated from the Sargasso Sea
KKNLTGVIKVSGSKNATLPILAASILNDNRIELNNVPLVNDVFTMVKLLKHIGSNIKIDLKRKKIFIHNKNKIFKTLAPYSLLKTMRAGVIVLGPLLSKFRVAKVSLPGGCAIGTRPVDIHLFGLKKLGARIKIKNGYILAEAKNGLIGTKIRLPSISVGATENVIIAASYAKGITYIKNCAYEPEILNLIDFLKSMGVKIVWLGKRYIKIVGNKDLKSLKHQIMFDRIEAGTFIIAGALTSKKLVVSKIVPKVIKKELKILKKNGC

SEQ ID NO: 123157 - protein, 243 aa, Unknown
  Bacterial polypetide isolated from the Sargasso Sea
SLLSNQNLTLENIPNVADINNMLKLLEGYGVKIIKNKNSLIINSKNLKNISADYDIVRKMRASVLILGPLLSRFGNCKISLPGGCAIGTRPIDIHLKGLKKLGAKFEIENGFVVGQVSKNLIGNKIKFPSPSVGATENILMAAVMAKGETFIDQAAREPEIVDLGNFLISMGAKIEGLGSNKIYIQGVDNLKETKYKIISDRIVAGTFIILAVMINSKIHVKNFNPNHLKSLINILKKMGANM

SEQ ID NO: 123158 - protein, 310 aa, Unknown
  Bacterial polypetide isolated from the Sargasso Sea
KAKVSLPGGCAIGSRPVDLHLYALKKLGAKIKIKDGYIIADAKKGLVGTNIKFPSNSVGATENALIAAHGAKGKTTLLNCAVEPEILDLISFLKKLGSKIKISGRKITITRREISRKKINHKVIFDRIEAGTYLVASALIGGKITIKKIIPKILKNEINILKKMGAHIILNKNSITIKKTNNLKKIIVSTKPYPGFPTDLQAQLMVLMTQAKGLSKIKENIFENRFMHVPELKRMGAKIEIKNKMAYIYGPTKLTGAEVMATDLRASVSLVLAGLIADKRTTINRIYHLDRGYESLERKLKNCGAEIKRI

SEQ ID NO: 123159 - protein, 243 aa, Unknown
  Bacterial polypetide isolated from the Sargasso Sea
MAKGTTTIKNAASEPEISDLCLFLNKMGAKITGFGSDTVIIQGVDSLKGTKHKPLPDRIEAGTFMVAAAITKGDIEINNIVPEHSRAVIDKLIQSGADIKILKDSVRVKMKKRPKAINIETNAYPFFPTDMQAQMTALNCIADGDSSVKENIFENRFMHAQELIRMGANIRVHDNIAEISGSEELLGAPVMATDLRASASLILAGLAAKGVTEIGRVYHIDRGYDCIEEKLQLIGARISRKPM

SEQ ID NO: 123160 - protein, 245 aa, Unknown
  Bacterial polypetide isolated from the Sargasso Sea
KIKIKNGYIVASAKKGLKGCLIEFPKISVGATENILISACLAKGKTKLRNCASEPEVRDLISFLKKIGCKINMVGKRSIDVVGVNKLKSTVHKVIFDRIEAGTYIIASALTDGNLKIKNIDPKIISCEVSLLKKMGVKIITKKNYLTVKSAKNLKSAYIITKPYPGFPTDLQAQMMVLMTKANGISTIRENIFENRFMHVSELRRMGVRIDTNGSKAKIYGKRKLNGAELMATDLRASVSLVLAG

SEQ ID NO: 123161 - protein, 265 aa, Unknown
  Bacterial polypetide isolated from the Sargasso Sea
GTSMRFPSISVGATENVIIAASFAKGTTYLKNCACEPEIKNLTDFLKKMGIKITWLSKRKIKIIGNQKLKAVSHNVMFDRIEAGTFIIAGALASRNLKIVGVETKILNKELKVLKKMGVKFKIKKNEIKVLDSKNIRSAYIKTEPYPGFPTDLQAQIMVLMTKAKGISKIKENIFENRFMHVPELNRMGAKIRTSGNSSFIHGPQNLNGAEVMATDLRASVSLVLAGLIAKNKTIVNRVYHLDRGYEELEKKLRKCKANISRVYS

SEQ ID NO: 123162 - protein, 297 aa, Unknown
  Bacterial polypetide isolated from the Sargasso Sea
PVDIHLFGLKKLGAKIKIKNGYIQAEAKNGLVGTKIKLPKISVGATENLIIAACYAKGTTILGNCACEPEIKDLTNFLIKMGANVKWTKKREIKIVGSKEFKPVNHAVMFDRIEAGTFIIAGALIAKKLKITGIDTNILRKEIKILKKMGVKLKIKKNEITIFNSKNIKPTFIKTEPYPGFPTDLQAQIMVLMTKSNGVSKIKESIFENRFMHVPELNRMGAKIKVYGNISKIEGLKNLNGAEVMATDLRASVSLVLAGLIAKNRTIINRVYHLDRGYENLENKLKKCGAHISRVNY

SEQ ID NO: 123163 - protein, 295 aa, Unknown
  Bacterial polypetide isolated from the Sargasso Sea
SGAKNAVLPVMAATLLAPGKYSIENVPDLRDTRTMMKLLNIIGAKTIFDKGLLNIDSTPANNPEAPYDLVKTMRASFYVLGPLISRFGRVNVSLPGGCAWGPRPVDYHLKGLEQLGAKLNLDGGNIHAEAKEIIGNDIHFEFPSVGATGNLAMAAVKASGTTRLYNCAKEPEITQLCEFLNSMGANIEGIGTETLIIHGVDELHSADIDIIPDRIEAGTFLMAGALLGEIEVSDIIPKHLDKVVHKLRETGCLLKINQKSIIITPPEKIKPIDMTTAVYPGFPTDLQAQWVAIIL

SEQ ID NO: 123164 - protein, 240 aa, Unknown
  Bacterial polypetide isolated from the Sargasso Sea
MITLLESMGIETNKNYKGSLTLNSSGIDSRFASYELVKTMRASIMVLGPLLAKYGEAKVSLPGGCAIGARPVDLHIQGLEKLGARIEIKDGYLLASADRLIGSSYCFPKKSVTGTANILMAATLAEGETKIVNSACEPEIIQLGELLNAMGARIEGLGEDCITIQGVENLVGAEIEIIPDRIEAITMIIAGIITQGEIEIENINPSHIEEPIKLIRQCGAILEISDQSLFVKGSDEILPH

SEQ ID NO: 123165 - protein, 243 aa, Unknown
  Bacterial polypetide isolated from the Sargasso Sea
IKAKGKTILKNCAVEPEIIDLIFFLKKLGARIKINGRTITILESKIKNSKITHKVIFDRIELGTYMIAGALLAKKKLSINGINPKIIKSEIDVLRKVGTQILTKKSSIIIKRNKKLKKINLTTKPYPGFPTDLQAQLMVLLTQSYGTSKIKEDIFENRFMHVPELKRMGANIEIKNKTATIKGPTKLTGAEVMATDLRASVSLVLAGLVAENRTIINRIYHLDRGYEFLEKKLKNCKAEIKRI

SEQ ID NO: 123166 - protein, 187 aa, Unknown
  Bacterial polypetide isolated from the Sargasso Sea
DRIEAGTYIIAAAITKGRINILGINPKIIKTELDILKKIGVKIKIEKQKIKIIGGQFIKSINLKTAPYPGFPTDLQAQLMTLLCKAKKHSIICEQIFENRFMHVGELNRMGAKIKTIGNKAIISGNTYFKGAEVMATDLRASVSLVLAALTCKERSIINRIYHLDRGYEEIEKKLRNVGARIRRISK

SEQ ID NO: 123167 - protein, 217 aa, Unknown
  Bacterial polypetide isolated from the Sargasso Sea
KMGCKLKWVSRRSIRIDGVDKTKKTIYKIMFDRIEAGTYLVAASVTEGDLRIKNIIPQIIKTEIDTLRKIGAKITYKKNEVHIIGKKKVKNINLKTAPYPGFPTDLQAQIMVLLCKGDKKSVITENIFENRFMHVAELNRMGAKISIRGNKAFVEGKIKFAAAELMATDLRASVSLILAALSSSGKSIINRIYHLDRGYENLERKLKKVGAKIRRIN

SEQ ID NO: 123168 - protein, 148 aa, Unknown
  Bacterial polypetide isolated from the Sargasso Sea
MDKLVVNGGRELKGRVKISGAKNAVLPIMASSLLVEGITVIKNVPNLRDTRTFIELLSILGAKCNFENSTLTIDATNITSIEAPYDLVKTMRASFYVMGPLLGRFGETKVSLPGGCAWGPRPVDYHLKGFESLGAKIDLNQGYILAQF

SEQ ID NO: 123169 - protein, 81 aa, Unknown
  Bacterial polypetide isolated from the Sargasso Sea
MDKFRVQGPTRLQGEVTISGAKNAALPILFAALLAEEPVEIQNVPKLKDIDTTMKLLTQLGTKVERNGSVWIDASKVNNFQ

SEQ ID NO: 123170 - protein, 145 aa, Unknown
  Bacterial polypetide isolated from the Sargasso Sea
SFDDNSISISMNKDRPDPVDITTAPFPEFPTDMQAQFSVINAISRGVSNIYETVFENRFMHILELNRMGCDIEVKGNHAIINGVESIYGAEVMATDLRASASLILAGLCAKGETVVDRIYHIDRGYERIEEKLNYLGANIVRLPS

SEQ ID NO: 123171 - protein, 192 aa, Unknown
  Bacterial polypetide isolated from the Sargasso Sea
SYSVMFDRIEAGTYLIAAAVTKGHLKIKNVIPGILKTEIKVLKKLGSKVNVKKKEVEIFGSKKTKCIKIKTAPYPGFPTDLQAQIMVLLCKANKSSIVQEDIFENRFMHVAELNRMGAKIKINGNKATLKGNINFAPAELMATDLRASVSLILAALTAKGKSVINRIYHLDRGYENIEKKLKKVGAKIKRVN

SEQ ID NO: 123172 - protein, 282 aa, Unknown
  Bacterial polypetide isolated from the Sargasso Sea
MQKILINGGNLLQGSVPVSGSKNASLPIMAASILTNENLELENVPDLVDVNTMSAVLSSLGVNVTKKDAKTNRLTLCYSDSESTIAEYDLVRKMRASILVLGPLLARKRHASVSLPGGCAIGARPVDLHIDALTKLGAAFELDGGYIKCSAPNGLKGNKINFSKVSVGATENIIMAASLARGESEIRNIAIEPEVMDLIDCLNKMGAKIELGENRNVHIQGVDQLQGTVHSIIPDRIEAITYIIGGTIIGNDLKITNLNLEHISNVLELLNELSINYSMGEN

SEQ ID NO: 123173 - protein, 150 aa, Unknown
  Bacterial polypetide isolated from the Sargasso Sea
MEKLRIVGGNKLSGTISCSGAKNAALPMLAATILTDEQITFKNLPYLQDITTMFEILGSMGAEITLNECMDFIISTSKIHDFEARYELVKTMRASILVLGSLVARHGFAKIALPGGCAIGTRPVDFHLDALTKLGAKIELKNGYIEATAK

SEQ ID NO: 123174 - protein, 254 aa, Unknown
  Bacterial polypetide isolated from the Sargasso Sea
MDKLIITGGARLDGEIRISGAKNSALPILAATLLGDAPVTICNLPHLHDITTMIELFGRMGIEPVIDEKLAVEVDARAIKTLVAPYELVKTMRASILVLGPMVARFGEAEVALPGGCAIGSRPVDLHIRGLEAMGAIIDVEGGYIKAKAPEGGLRGAHFFFDVVSVTGTENIMMAATLAKGRSVLENAAREPEVVDLANCLIAMGAKIQGAGTDTIIIDGVERLHGARFNVMPDRIETGTYLVAAAVTGGRVKV

SEQ ID NO: 123175 - protein, 218 aa, Unknown
  Bacterial polypetide isolated from the Sargasso Sea
MGAKINGAGSDKITIQGVEKLRGTSFEIPADRIEAGTYLAAAAVTKGDIKIEGINPNRLMKVIDKLINTGAKVDYDEDSISFIMTDDIPDPVDITTAPFPEFPTDMQAQFSVINAISSGTANIYETIFENRFMHILELNRMGCDISVNGNHAIIKGVKSLYGAEVMATDLRASASLILAGLCAKGETVVDRIYHIDRGYERIEEKLNYLGADIERLPS

SEQ ID NO: 123176 - protein, 167 aa, Unknown
  Bacterial polypetide isolated from the Sargasso Sea
INKIDSSRMGNMIEKFQLMGAFVELKENTIHIMMEKNIEPVDVITEPFPGFPTDMQAQFTLINSIANGSATVTEKIFENRFMHVQELVRMGCDITVNGNSALINGVKKIYGAQVMATDLRASACLILAGLCAEGETIVDRVYHIDRGYERIEEKLSFLGANIERLPR

SEQ ID NO: 123177 - protein, 325 aa, Unknown
  Bacterial polypetide isolated from the Sargasso Sea
PSNGVVELENVPHLQDVTTTTRLLTQMGVSVSMDEFMNISLDPSAINNFYAPYDLVKTMRSSILVLGPLLARFGEAKVSLPGGCAIGLRPVDMHLKALEKMGAEIKVERGYITAQSKRLKGANITFDKKSVTGTENIIMAASLAKGLTKINNAANEPEISDLCLFLNKMGAKISGHGTDVIEINGVDALKGTKHQPLPDRIEAGTFMIAAAITRGDVEINNIVPEHSNAVIEKLIEAGAEITSTNNSIRVKMRQRPKAVNIETNAYPYFLTDMQAQMTALNSLAKGESFVRENIFENRFMHVQELERMGASIKVNDNTATISGTK

SEQ ID NO: 123178 - protein, 170 aa, Unknown
  Bacterial polypetide isolated from the Sargasso Sea
KVKIKSAKPESLSSVITKLESSGAIIQTGEDWVEITMERDRPISTSLTTGPYPSFPTDMQAQFVALNSIARGNSTVTETVFENRFMHVQEIARMGGDITLKGNTAVIEGIETLIGAPVMATDLRASASLVLAGLVAKGSTIIDRIYHIDRGYERIEEKLKMLGADIERIS

SEQ ID NO: 123179 - protein, 271 aa, Unknown
  Bacterial polypetide isolated from the Sargasso Sea
DALKKLGVNINVDNGFVKAEVKDFLKGNNINLSFPSVGATENLLMSSIFAKGETIINNAAREPEVVDLAKCLKSMGADIKGEGTNEIKIKGVLKLNESKHEIISDRIVAGTYIIAAVMLNSEFEVKNIKTEHIESLTVLLKKMGANLIVNKDAIKILPSNNLKGTFIETAPYPGFPTDLQAQIMALMSIVKGNSEIIEKIFENRFMHVSELNRLGANIKIHKQKAIITGGRNFKGAQVMASDLRASVSLVLAGLCASGTTTINRVYHLDRG

SEQ ID NO: 123180 - protein, 292 aa, Unknown
  Bacterial polypetide isolated from the Sargasso Sea
ARYELVKTMRASILVLGSMVAKYGYAKIALPGGCAIGSRPVNYHLKALEKLGAEISLNNGYIEAKAKKLTGANIEFEGVTVTGTENLMMAASLAEGLTTLTNVAKEPEISDLADFLNSMGAKIKGAGTDEIRIEGVEGLTGTTFKIPADRIEAGTYLVAAAITNGKIIINKIDPKRMGSIIETLQKAGAEVNSNGNSISLDMTKNAIKPIDIVTAPFPGFPTDMQAQFTVLNCIGKGKSSVKETIFENRFMHVQELNRMGTDITINGTTALINGVDSISGAQVMATDLRASA

SEQ ID NO: 123181 - protein, 167 aa, Unknown
  Bacterial polypetide isolated from the Sargasso Sea
IIRNIKSNIISTEINILKKIGVKIKVKENEVRVNGTKKIRSIKLKTAPYPGFPTDLQAQLMVLLCKADGISEINEQIFENRFMHASELNRMGARINIVGNKAIIMGNTNFEAAELMATDLRASVSLILAALTSKGRSRIHRIYHLDRGYENLEKKLSKVGARIRRIN

SEQ ID NO: 123182 - protein, 176 aa, Unknown
  Bacterial polypetide isolated from the Sargasso Sea
ISGALTAKNIKIKNIDSILIKTEIKILKKMGVKMKVTKNYIEVLKSKNLKKINVKTEPYPGFPSDLQAQIMILMTQAKGISKIKENIFENRFMHVPELKRMGAKIKIHNNEAYIEGPCSLTGAEVMATDLRASVSLVLAGLIAENRTNINRIYHLDRGYQDLEKKLTQCNANIKRI

SEQ ID NO: 123183 - protein, 263 aa, Unknown
  Bacterial polypetide isolated from the Sargasso Sea
FVFPFVSVGATENLMMAATLAKGETVLSNVAREPEVTDLAECLVAMGSKIDGIGSDTLAIQGVDTLNSAEHSVVGDRIEAGTYAMAAAITDGDVELAGVKAEHLDAVFRALADAGLEIGKTYDGVSVRLGKGGLKGVDVMTEPFPGFPTDLQAQIMALMSVADGAAMITETIFENRFMHVPELARMGANVNVHGASALVRGVDHLTGAEVMATDLRASSSLILAALAAMGETVVRRVYHLDRGYERIEEKLAACGAVIRREKE

SEQ ID NO: 123184 - protein, 136 aa, Unknown
  Bacterial polypetide isolated from the Sargasso Sea
TGRTLKSVNVKTVPHPGFPTDMQAQFTVLNVVAEGVGMVTETIFENRFMHVPELQRMGADIQLEGNTALIKHTDKLMGAQVMATDLRASASLVIAGLVAEGETVVDRIYHIDRGYEQIEHKLKGLGANIQRINAPA

SEQ ID NO: 123185 - protein, 224 aa, Unknown
  Bacterial polypetide isolated from the Sargasso Sea
DLIIFLKKLGCKINKIGERGIDVIGVEKLKSVTHKVISDRIETGTYIIASALTKGRLKIKNINPKVMTAEINLLKKMGVKIVKYNNYVIASCSDKLKCANIETKPYPGFPTDLQAQIMVLMAKAEGISKIKENIFENRFMHVSELRRMGAHIEITENTAKIIGGEKLNGAELMATDLRASVSLVLAGLVAKSNTIVNRIYHLDRGYENIEKKLSRCGAQIKRLK

SEQ ID NO: 123186 - protein, 160 aa, Unknown
  Bacterial polypetide isolated from the Sargasso Sea
MQKILINGGNLLQGSVPVSGSKNASLPIMAASILTNENLELENVPDLVDVNTMSAVLSSLGVNVTKKDVNTNRLTLRYSDSESTIAEYDLVRKMRASILVLGPLLARKRHASVSLPGGCAIGARPVDLHINALTKLGAAFELDGGYIKCSAPNGLKGNKI

SEQ ID NO: 123187 - protein, 268 aa, Unknown
  Bacterial polypetide isolated from the Sargasso Sea
PYVNDILTMLNLLKFIGLKYKLSKKKNSVEVINQNKNINTVAPYKLVKTMRAGVLVLGPLLARYKKAKVSLPGGCAIGTRPVDLHLFALKKLGAKIKIKNGYILASAINGLKGARIKFPKISVGATENAILAAVQAKGVTIIENCAVEPEIKDLINFLKKLGVKIKITGRKISIKKSIQEKKISHKVICDRIELGTYLIGGALAAKKLILKNIDSSLIKKEIHILKKMGVKMYVGQNYIEVYKSRNIKNIDIKTRSLLPVFPQICKLK

SEQ ID NO: 123188 - protein, 298 aa, Unknown
  Bacterial polypetide isolated from the Sargasso Sea
MRAGILVLGPMLAKYGNAKVSTPGGCTIGVRPIDIHLKALGKLGVNHKIVDGYVHANSKNKLKGAKIKFPKISVGATENLIIAASMAEGITTLSNCAIEPEIKDLVNFINCMGGKIKWIGKRTIKIEGVKNFKEVKYTIMPDRIEAGTYLIAAAVTEGNLKISGIKPNIIRTEIEILKKLGLKIKIEKNQINIIGVKDIKSINLKTSPYPGFPTDLQAQLMVLLCMSKKISTISEEIFENRFMHVAELNRMGAKIKTKGNKAFIEGNTKFKSAELMATDLRASVSLILAALIAKGKTT

SEQ ID NO: 123189 - protein, 302 aa, Unknown
  Bacterial polypetide isolated from the Sargasso Sea
FTISSADLVDIEARYELVKTMRASILVLGPLLAKYGKARIALPGGCAIGTRPVNFHLDSLKKMGAEINLKNGYIEASSKKLIGAEIRFDGITVTGTENLMMAATLADGITKLTNVAREPEIIDLANMLNSMGAKITGAGSDEIIITGVNALKGTTYDIPADRIEAGTYLAAAAVTKGEITVDGINPERLMKVIDKLKNTGAKLSYDANSISISMTKNVPEPVDITTAPFPEFPTDMQAQFSVINAISNGTSNIYETVFENRFMHILELNRMGCDIEVKGNHAKINGVKNIYGAEVMATDLRA

SEQ ID NO: 123190 - protein, 101 aa, Unknown
  Bacterial polypetide isolated from the Sargasso Sea
MRTASCIFTNSNACGADINLHGNTALVQGVEQLGGAQVMATDLRASACLVLAGLVAREQTVIDRIYHIDRGYDCIEEKLLQCGADIRRVSDSRFPRVHAVV

SEQ ID NO: 123191 - protein, 123 aa, Unknown
  Bacterial polypetide isolated from the Sargasso Sea
MATKPYPGFPTDLQAQLMVLMTQAKGISKIKENIFENRFMHVPELKRMGAKIDIKNRTAFINGFSNLTGAEVMATDLRASVSLVLAGLVADNRTTVNRIYHLDRGYENLENKLKNCRAEIKRI

SEQ ID NO: 123192 - protein, 247 aa, Unknown
  Bacterial polypetide isolated from the Sargasso Sea
SLTPWVKPILRNCAKEPEVSELANFLNSCGAKISGAGKSIIEIEGTDCLNGKKWKILSDRIEAGTYLIAAAMTNGHVKINNITPSTIKIIHQKLSDTGVKIKLEKNAVEADATITDLQATDICTKPFPGFPTDMQAQFMALNSISHGSSIIEETVFENRFQHVIELRKMGANIDLEKNKAKIIGVPNLVGSVVRASDLRASASLVLAGLVGKNRTQIDDIFHIDRGYECIEEKLNKLGAEIIREPVL

SEQ ID NO: 123193 - protein, 130 aa, Unknown
  Bacterial polypetide isolated from the Sargasso Sea
KIKNINIKTAPYPGFPTDLQAQIMVLLCKANKKSEIKEEIFENRFMHVSELNRMGAKISINGNKASIPGNVNFQAAELMATDLRASVSLILAALNAKGKSIINRIYHLDRGYENIEKKLKNIGAKIKRIY

SEQ ID NO: 123194 - protein, 190 aa, Unknown
  Bacterial polypetide isolated from the Sargasso Sea
EIIPDRIEAITMVIAGIITKGELRIENINSSHIQQPIELIRKCGANLEIFDDYLYLKGSNVISPISFETNPYPGIPTDIQAQLMVLNTVAEGDSKVKETIFENRFMHILELKRMGANIGIDGNTAIITGVQKLNSAQVMATDLRASAALILAGLIADGETIIDRIYHLDRGYESIEEKLSNIGAKVRRID

SEQ ID NO: 123195 - protein, 267 aa, Unknown
  Bacterial polypetide isolated from the Sargasso Sea
PLLSKYRIAKVSLPGGCSIGTRPVDLHISAFEKMGASILLKDGYIEAKAPNKGLYGAEISFPKISVGATENVIMAASLANGRTRILNAAKEPEIIDLANCLNRMGASIKGAGSSEIIIDGVKELVGCNHKVIPDRIEAGSFAIAAAITKSSLELFNCEPKHLESLSKKLINAGVNWESNKDIIKITSDGILKPVNVQTAEYPNFPTDLQAQFMTLMTVANGNSEIIENIFENRFMHVPELLRMGANISVNGGIAKVSGVQNLKGAQI

SEQ ID NO: 123196 - protein, 286 aa, Unknown
  Bacterial polypetide isolated from the Sargasso Sea
KLGAKIKIKNGYIFAEATQGLTGAQIKFPSISVGATENVIIAASLAKGITYLKNCASEPEIKNLTDFLNKMGAKISWLGKRKIKIIGCKKFKQVKHKVMFDRIEAGTFIIAGALIGKKLKISGIQKNFLKTELKILKKMGVKMQINKDHINMLDSSKIKPAKIKTEPYPGFPTDLQAQMMVLMTKARGKSQIKENIFENRFMHVPELNRMGAKINTSGNLSYINGPQNLNGAEVMATDLRASVSLVLAGLIANNETIINRVYHLDRGYEDLEKKLKHCKAKISRIF

SEQ ID NO: 123197 - protein, 299 aa, Unknown
  Bacterial polypetide isolated from the Sargasso Sea
SKKTLKLSNVPNVVDVLNLIKLLKNYGVKIEHKKNKLKINPSKIKNLSADYDVVRKMRASILILGPLLSRFGEARISLPGGCAIGTRPIDIHLAGLSKLGANFEIQNGFVVGSVKSQLIGNKIKLPFPSVGATENILMASVLAKGETKISNAAREPEIEDLSNCLIKMGAKIEGHGTKTILVQGVTNLKKAEHEIIADRIVAGTYIIAALMLNSTLEINNFNTIYLKSLIDILKKMGAKLKVSKNSIKVLKGSKLKSTSLSTSPYPGFPTDLQAQLMSLMCISDGKSKIKETIFENRFM

SEQ ID NO: 123198 - protein, 212 aa, Unknown
  Bacterial polypetide isolated from the Sargasso Sea
MDSILVTGSGPLNGKIPIAGAKNACLALMPVTLLTDQPVTLTNAPILSDIKTAEALLSSLGTEVTFLNGGKVLVMSSHNLKSSHADYDIVRKMRASNLVLGPLLARNGEAVVSLPGGCAIGARPMDLHIGALEALGATIELKEGYLHAKSNGRLKAGTFEMRMASVGATENFIMAATLANGTSILKNAAKEPEIVDLVKCLRSMGAQITGEG

SEQ ID NO: 123199 - protein, 144 aa, Unknown
  Bacterial polypetide isolated from the Sargasso Sea
TEENAISIDMKGKKPKAVDIHTAPFPGFPTDMQAQFTAMNSIAVGSGTITEAVFENRFMHVHELQRMGADLKLEGNTTITDGVEQLTCAPVMATDLRASASLVLAGLVAKGQTTVDRIYHIDRGYETIEEKLSQLGAEIRRIPE

SEQ ID NO: 123200 - protein, 135 aa, Unknown
  Bacterial polypetide isolated from the Sargasso Sea
EIFESKNIKKINIETNPYPGFPTDLQAQLMVLMTRAKGKSTIKESIFENRFMHVPELKRMGANIEIKNKIAIIKGPSKLTGAEVMATDLRASVSLVLAGLAADNRTIINRIYHLDRGYEFLEKKLKNCKARIKRI

SEQ ID NO: 123201 - protein, 313 aa, Unknown
  Bacterial polypetide isolated from the Sargasso Sea
WKATVSLPGGCAIGTRPLDVHLFGLKKLGAKIKIKNGYILAEAKRGLLGTRIKLPSISVGATENVIIAASYAKGTTYIKNCACEPEIKNLTDFLKKMGVKIQWIGKRKIKIIGNQKLKSVSHSVMFDRIEAGTFIIAGALAGQKLRIVGLESKILRKELVILKKMGVKFKIKKNEITVFNSKNIKPVSISTEPYPGFPTDLQAQIMVLMIKAKGVSKIKENIFENRFMHVPELNRMGGKIKVVGNLSVINGPQELNGAEVMATDLRASVSLVLAGLIAKNRTAINRVYHLDRGYENLEKKLRKCRANISRLNY

SEQ ID NO: 123202 - protein, 228 aa, Unknown
  Bacterial polypetide isolated from the Sargasso Sea
MDSLKIKGGRQLNGQIKISGAKNAALPLMACGLLIDKGNLEIDSMPSLADTKFMCILLKNLGVKAKIINNIAYLSGDPSQYVAKYDIVRKMRASILVLGPLLARVGIAKVSLPGGCSIGTRPVDLHIQALERMGATINLINGYIEAKAPRNGLQGAEIKFPKISVGATENIIMAASLANGRTKILNAAREPEIIDLANCLNSMGALINGVGTSEIIIDGVKSLNGCKH

SEQ ID NO: 123203 - protein, 271 aa, Unknown
  Bacterial polypetide isolated from the Sargasso Sea
KNSALPLMTISLLIDKGLELKNVPDLLDTRTMNQLINELGIKGNLSKGSINFYGKPIQIKASDNLVKRMRASILILAPLLQSKKRALVPLPGGCEIGSRPIDIHIEVIRKLGANVELKNGYLEAHLSKEGFIGAEIKFSKVSVGATECAILASVLAQGSTTLYNAAKEPEIVDLGNCLNKAGADITGLGDNKIVINGVKRLNPISYSVMPDRIEAGSFALAAAITKGKVFIRNTEIDPLDTFLQKLKKTGVNVESSKNELKITGSNEISCV

SEQ ID NO: 123204 - protein, 234 aa, Unknown
  Bacterial polypetide isolated from the Sargasso Sea
PLVAKYGKARIALPGGCAIGSRPVNYHLDALKQLGAKIKLKNGYIEASANKLVGSNIRFDGVTVTGTENIMMAASLAQGVTVLTNVAKEPEIIDLADMLNSMGADIKGAGTDEITIKGVNELFGTSFTIPADRIEAGTYLVAAAVTNGSITIDSINPNRLMKVINMIERSGPKISFDDNSISISMNKDRPDPVDITTAPFPEFPTDMQAQFSVINAISSGVSNIYETVFENRFM

SEQ ID NO: 123205 - protein, 111 aa, Unknown
  Bacterial polypetide isolated from the Sargasso Sea
AQFCALNSVANGKAEMVENIFENRFQHVVELHRMGADIQIKGNIASSTGVDSLTAAPVMATDLRASAGLIIAALAAKGDTIIDRIYHIDRGYERVEEKLQQLGARVSRENS

SEQ ID NO: 123206 - protein, 281 aa, Unknown
  Bacterial polypetide isolated from the Sargasso Sea
GKIPIAGAKNACLALMPVTLLTDQPVTLTNAPILSDIKTAEALLSSLGTEVSFLNGGKVLVMSSHNLKSSHADYDIVRKMRASNLVLGPLLARTGEAVVSLPGGCAIGARPMDLHIGALEALGAIIELKEGYLHAKSNGRLKAGTFEMRMASVGATENFIMAATLANGTSVLKNAAKEPEIVDLVKCLRSMGAQIKGEGSSTVEIQGVDTLGGTTHPVVVDRIELGTYMIAPAIAGGQVDLIGGKKKLLGEFWNSLERVGLEISETADGIRAKKVNEVIKA

SEQ ID NO: 123207 - protein, 268 aa, Unknown
  Bacterial polypetide isolated from the Sargasso Sea
IDLHLEGLKKLGANFYVENGYVVGAVEDELIGTHITLPFPSVGATENILMAASIAKGITIIENAAREPEINDLAFALNKMGAKINVKKNGIIKIDGVNSLTQATHKIMSDRIVAGTFVIAAVMLNKKFTVKDIESNHLEALTSSLIKMGAKLKVKKTSIQIMPTTNLNGIKIQTSPYPGFPTDLQAQIMALMSLVNGNSQIKENIFENRFMHVPELNRLGAKIKVKKDIALIAGNRNLKGAQVMASDLRASVSLVLAALCAEGESVIN

SEQ ID NO: 123208 - protein, 267 aa, Unknown
  Bacterial polypetide isolated from the Sargasso Sea
KKNLSGNISISGSKNATLPILAASILANEVTLRNIPLVKDIFTMIDLLKFIGINININKKDKSINLQNKTKINTLAPYKLVKTMRAGVLVLGPLLTKYKHAKVSLPGGCAIGTRPVDLHLFALKKLGAKIKIKDGYIIAEAKNGLTGAKIKFPSISVGATENALLAAFNAKGKTVLSNCAIEPEILDLVKFLKKLGCKIKILNRKITISAEKKIKKKKIIHKIIFDRIEAGTYIVASALAGKKIVLNNIQPKIINFELNIFKKMGVK

SEQ ID NO: 123209 - protein, 177 aa, Unknown
  Bacterial polypetide isolated from the Sargasso Sea
ATITNGKITIKKIDSARMGSIIETLQKAGAEVCLNENSISLDMTKNTIKPVDIVTAPFPGFPTDMQAQFTVLNCIGHGESSVKETIFENRFMHVQELNRMGTDITINGTTALINGVDSISGAQVMATDLRASASLILAGLIAKGETIVDRIYHIDRGYERIEEKLSNLGAEIIRLPN

SEQ ID NO: 123210 - protein, 252 aa, Unknown
  Bacterial polypetide isolated from the Sargasso Sea
ATENVLIAACFSTGETKLRNCAIEPEINDLIFFLKKLGCKIKIVGKRGINILGVKELKSTVHKVIFDRIEAGTYIIAAALTKGKLKIKNINPKIMLTEIRLLHKMGVDILRKKNHIVVSRSKKLKSINIVTKPYPGFPTDLQAQIMVLMTKAEGASIIKEGIFENRFMHVSELRRMGAQIAINGNKAKIFGKSKLNGAELMATDLRASVCLVLAGLVPSNKTILNRIYHLDRGYEKIEYKLSKCGAQIRRLQ

SEQ ID NO: 123211 - protein, 271 aa, Unknown
  Bacterial polypetide isolated from the Sargasso Sea
MAVLIFSGSKNSALPILAATILNNHTTIKNIPFVNDILTMLNLLRFIGLKYKISKKKNLVEVINSNTNINTVAPYKLVKTMRAGILVLGPLLAKYRRAKVSLPGGCAIGTRPVDLHLFALKKLGAKIKIKNGYIFASAINGLRGTRFKFPTISVGATENTILAAVQAKGVTIIDNCAVEPEIKDLINFLKKLGVNIKIKGRQITIKKIIKEKKISHKIICDRIELGTYLICGALTAKKLKLKNVDSDLVKKEIKTLKKMGVKLNVNKNFIE

SEQ ID NO: 123212 - protein, 258 aa, Unknown
  Bacterial polypetide isolated from the Sargasso Sea
SKVSVGATENLLIAACFAKGTTILNNCAIEPEIKDLVNFLIKLGCDVKWIGKRSLEIIGVKKVNEISYSVMFDRIEAGTYLIAAAITEGNLKIKNIDPNIIKTEINILKKIGMKIFIKKNELQIIGNKNIKNINIITKPYPGFPTDLQAQMMVLLCKANKKSIIKENIFENRFMHVSELNRMGAQISINGNKALISGNIKFAPAELMATDLRASVSLVLAALGAKGKSVINRIYHLDRGYENIEKKLKRVGAKIKRIN

SEQ ID NO: 123213 - protein, 299 aa, Unknown
  Bacterial polypetide isolated from the Sargasso Sea
KKIEIKGVPLVKDVITMCHLLKYMGSNIKLNTNSKKIFIENKNKKIKNIAPYSFVKTMRAGVIVLGSLLAKFGKAKVSLPGGCAIGTRPIDVHLFGLKKLGAKIKIKNGYILAEAKKGLKGTKIKFPSISVGATQNVIIASSLAKGTTYLKNCACEPEIKNLTNFLKAMGIKIKWVKKREIKIIGNQKLKPVKHHVMFDRIEAGTFIIAGALSSRKLKILGLETKILKTELGVLKKMGVKMKIGKNEITVLNSKKIKPVSIKTEPYPGFPTDLQAQIMVLMTKANGNSKIKENIFENRF

SEQ ID NO: 123214 - protein, 254 aa, Unknown
  Bacterial polypetide isolated from the Sargasso Sea
LPGGCAIGTRPIDIHLAGLSKLGANFEIQNGFVVGRVKSQLIGNKIKLPFPSVGATENILMASVLAKGETKISNVAREPEIEDLSNCLIKMGAKIAGQGTKTILVQGVTNLKKAEHEIISDRIVAGTYIIAALMLNSALEINNFNTIYLKSLIDILKKMGARLKVSKNSIKVFKGSKLKSTSLSTSPYPGFPTDLQAQLMSLMCLSDGKSKIKETIFENRFMHVPELNRLGANITVEKDTATIIGNQTFKRSAG

SEQ ID NO: 123215 - protein, 230 aa, Unknown
  Bacterial polypetide isolated from the Sargasso Sea
EPEIIDLCNCLVSMGAKIKNIGSSRLLICGVDSLNEAKHEIISDRIVAGTYLILAIMLNSKIEIKKFNPNHLVSLINILKKMGANFEIFENSAKVYPSKKLRSVKVATAPYPGFPTDLQAQLMALMSMVKGNSEIKETVFENRFMHVPELNRLGAQIKVNKDKAIIEGSQNYKGAQVMASDLRASVSLVLAALCANGKTTINRVYHLDRGYEKIEKYLGKLGAKIKRQKS

SEQ ID NO: 123216 - protein, 252 aa, Unknown
  Bacterial polypetide isolated from the Sargasso Sea
MGAKTIFDKGSLNIDSSAADNPEAPYDLVKTMRASFYVLGPLISRFGRVNVSLPGGCAWGPRPVDYHLKGLEQLGAKLNLDGGNILAEAKELIGNDIHFEFPSVGATGNLAMAAVRASGTTRLYNCAKEPEITQLCNFLNSMGAKIEGIGTETLIIHGVDELHSADIEIIPDRIEAGTFLMAGALLGEIEVKNIIPKHLDKVVHKLRETGCLLKINQNSIIITPPEKIKSVDMTTTVYPGFPTDLQAQWVSI

SEQ ID NO: 123217 - protein, 106 aa, Unknown
  Bacterial polypetide isolated from the Sargasso Sea
MDKLIINGGNKLFGDVQISGAKNAVLPIMTATLIVPGNYKINNVPDLRDTRTMVELLKIIGANVQFSNNTLLIDTKECNNPHAPYDLVKTMRASFYVLGPIAFTIS

SEQ ID NO: 123218 - protein, 261 aa, Unknown
  Bacterial polypetide isolated from the Sargasso Sea
DFPSISVGATENVIIAASLAKGTTYLKNCACEPEIKNLTDFLKKMGVKISWVKKREIKIVGNKRLRPVSHNIMFDRIEAGTFVIAGALISNRLKILNVDTKILKKELTVLKRMGVRLKIKKNEVLVLESKNIKPISIKTEPYPGFPTDLQAQIMVLMTKGKGKSKIKENIFENRFMHVPELNRMGAKIKISGNTSTITGLQNLNGAEVMATDLRASVSLVLAGLIAKDKTIINRVYHLDRGYEGLEKKLRKCKANISRIHY

SEQ ID NO: 123219 - protein, 262 aa, Unknown
  Bacterial polypetide isolated from the Sargasso Sea
KVSVTGTENLMMAASLTLGKTILRNCAKEPEVSELANFLNSCGAKISGAGKSIIEIEGTDLLYGKKWKILSDRIEAGTYLIAAAMTNGHVKVNNISPSTIKIIHQKLSDTGVKIKLDKNAIEADATTTDLQATDICTKPFPGFPTDMQAQFMALNSISHGSSIIEETVFENRFQHVIELRKMGANINLERNKAKIIGVPNLVGSVVMASDLRASASLVLAGLVGKNRTQIDDIFHIDRGYECIEEKLNKLGAEIIREPSTLA

SEQ ID NO: 123220 - protein, 263 aa, Unknown
  Bacterial polypetide isolated from the Sargasso Sea
QIKNNLVGSFIDLPFSSVGATENIMMAAVLSDGMTTINNAAKEPEITDLADCLNKMGAKIYNAGTNTIQIQGVKNLLRAEHTIINDRIVAGTFIIAAIMLNKDFLIKKINPKHLTNVIDVLVKMGANLEIGKDFIKVLKSDLISGIEIETQPYPGFPTDLQAQIMSLMTLANGNSKIKENIFENRFMHVPELNRLGAKIKVKNDEALIQGNNTFKGAQVMASDLRASVSLVLAGLCAEGETIINRVYHLDRGYEKIEEILGKC

SEQ ID NO: 123221 - protein, 284 aa, Unknown
  Bacterial polypetide isolated from the Sargasso Sea
TRPIDLHLKALSKLGVQYKIVQGYVYASAPKGLVGSNIRFSKISVGATENLIIAASLAKGSTTLRNCAIEPEIKDLVNFLIKAGCNIKWIGKRTLKINGVSKIKETSYSVMFDRIEAGTYLIAAAVTEGNLKIKNIIPNIIKTEIAILKKIGARINLKRNEIHIIGNSKIKSVNIKTSPYPGVATDIQAQLMVLLCKANNKSTIKENIFENRFMHVAELNRMGARILINGNKALIEGNISFAAAEVMATDLRASVSLILAALTAEGKSVINRIYHLDRGYEDMK

SEQ ID NO: 123222 - protein, 188 aa, Unknown
  Bacterial polypetide isolated from the Sargasso Sea
MFDRIEAGTFIIAGALMGKKLKISGIQKNFLNTELKILKKMGVNMQINKDHINVLYSSKIKPVKIKTEPYPGFPTDLQAQMMVLMTKARGKSQIKENIFENRFMHVPELRRMGAKINTSGNLSYINGPQNLNGAEVMATDLRASVSLVLAGLIANNETVINRVYHLDRGYEDLEKKLKHCRAKISRIF

SEQ ID NO: 123223 - protein, 220 aa, Unknown
  Bacterial polypetide isolated from the Sargasso Sea
LLNAMGARIEGLGEDCITIQGVENLFGAEIEIIPDRIEAITMIIAGIITQGELEIENINPSHIEEPIELIRQCGAILEISDQSLFVKGSDEILPISFETEPYPGIPTDIQAQLMVLNSISKGDSKITETIFENRFMHVLELKRMGANIGIDGNTAEIRGVTSLNSAPVMATDLRASAALILAGLIAEGETIIDRIYHLDRGYESVEEKLSNVGAKVRRID

SEQ ID NO: 123224 - protein, 238 aa, Unknown
  Bacterial polypetide isolated from the Sargasso Sea
TVIENAAREPEVVDLANCLTAMGANIQGAGTDIITIEGVEKLEGASFSVMPDRVEVGTYLTAVAMTGGKVKIKSAKPEYLSSVISKLELTGALISSGENWVEINMNEPKPKAISLTTGPYPSFPTDMQAQFVSLNAIANGNSTVTETVFENRFMHVQEIARMGGNIALKGNTAVIEGIKKLKGAPVMATDLRASASLVLAGLVAEGATTIDRIYHIDRGYERIEEKLKMLGADIERIS

SEQ ID NO: 123225 - protein, 307 aa, Unknown
  Bacterial polypetide isolated from the Sargasso Sea
LIRGGTPLQGRLAASGSKNAALPIMAATLLAEDACELQGVPVLRDVTTMTTLLASLGASVSQQEPVGTLRIESRSVQRFRAPYDLVKTMRASILVLGPLLARFGRAEVSFPGGCAIGSRPVDLHIRALEAMGARISVESGYIIAEATEGLRGADFSFDTVTVGGTENAIMAAVLARGESVLRNVAREPEIGDLVGFLRGMGAQIEGDGTDTLVVQGVSALHGTTYRVMPDRIEVGTYLVAAAATRGHITIDGVNPDLLGVVLDKLRRAGADLSCASDSVALDMRGRRPLAVDIETQPFPGFLTDMQA

SEQ ID NO: 123226 - protein, 295 aa, Unknown
  Bacterial polypetide isolated from the Sargasso Sea
MRVLKKENVIKILNDNRKINTLAPYKLVKTMRAGVLVLGSLLTKYGKAKVSLPGGCAIGTRPVDLHLFALKKFGAKIRIKDGYIIAEAKKGLRGSLIKFPSISVGATENALLAAFNAKGKTVLKNCAVEPEIIDLILFLNKLGANIKISGRTISIYENHNKKKEINYKIMFDRIEAGTYMIAGALVGKRIVLNKIKPKIIKNEIETIKKIGAKIKVKNSSLIITKAKKLKRINVLTKPYPGFPTDLQAQLMVLLTQADGISKIKEDIFENRFMHIPELNRMGANIEAKNKVAIIK

SEQ ID NO: 123227 - protein, 302 aa, Unknown
  Bacterial polypetide isolated from the Sargasso Sea
AWGPRPVDFHLKGLEKLGAKITLNSGYILAEAKRLKGTKISFEFPSVGATGNIAMAATTAQGTTVIENAAREPEIVQLCEYLNAMGASIKGIGTSRIIIEGVDSLHSADIKVIPDRIEAGTFLMAGSVLGKIKLTDVNPSHLDTVLLKLKEIGADINTSSNSITIKPTDNIKPVDMTTAVYPGFATDLQAQWVALMTISAGSSVITDTVYHDRFSHVPELNRFGANIRVDNNTAFIRGVEELVGAPVMSTDIRASAALIIAGLFAKGKTTVSRIYHIDRGYEKIEDKFRLLGANIYREDSNG

SEQ ID NO: 123228 - protein, 274 aa, Unknown
  Bacterial polypetide isolated from the Sargasso Sea
LGANFQVENGYVVGEVEKELVGNHITLPFPSVGATENILMAAAIAKGKTIIENAAREPEINDLTFVLNKMGAKINIKKNGIIKIDGVNSLSKATHKILSDRIVAGTFVIAAVMINKKFEVKDIESIHLEALTSALIEMGAKLKINKTSILIMPSKNLNGIKIQTAPYPGFPTDLQAQIMALMCVVKGNSQIKENIFENRFMHVPELNRLGAKIKVKKDLALITGNRNLKGAQVMASDLRASVSLVLAALCAEGESIINRVYHLDRGYEKIENTL

SEQ ID NO: 123229 - protein, 203 aa, Unknown
  Bacterial polypetide isolated from the Sargasso Sea
MDKITVKGNAELFGSIKVSGSKNAALPILISSLLSGEDLELSNLPELEDINNMKKLLLNYGVKIIENSNQTILNAHNIINKVADYDVVRKMRASILILGPLLGRFNKAVVSLPGGCAIGTRPIDIHLDGLSRLGVDFTIENGLVKANAKNQLIGNNITLSFPSVGATENILMAAVLAKGSTIIENAAMEPEIIDLILCLEKMG

SEQ ID NO: 123230 - protein, 279 aa, Unknown
  Bacterial polypetide isolated from the Sargasso Sea
LENVPDLVDVHTMSQVLSSLGVSVVSQNESKNNLSFTYSDSDSVIAEYDLVRKMRASILVLGPLLARKRHASVSLPGGCAIGARPVDLHINALTKLGASFELESGYIKCNAPNGLIGNKINFDRVSVGATENIVMAASLARGESEITNIALEPEVMDLISCLNKMGAKIELGDNRNILIEGVDRLKGTVHSIIPDRIEAITYIIAGALIGKNLEITNINIEHVSNVLEILNELSINFAMKESSITVEQSRISDGITIDTMEYPGFPTDVQAQMMVLLSL

SEQ ID NO: 123231 - protein, 202 aa, Unknown
  Bacterial polypetide isolated from the Sargasso Sea
GVDDLHGATHSVISDRIEAGTFAIAAAMTDGDLTLHHSRGHNLDALLMVLRETGAAVSESDNLIRIVGNGRPVAADIATDPFPGFPTDLQAQFMAMMCIATGSSRISETIFENRFMHVPELLRMGADIQVDGGVAMVRGRDALSPAPVMATDLRASVSLVLAALTITGTSQIGRIYHLDRGYSRLEEKLGKCGAILQRVKAV

SEQ ID NO: 123232 - protein, 189 aa, Unknown
  Bacterial polypetide isolated from the Sargasso Sea
KIIFDRIEAATYLVAGVLIGKKIVLNNVDRQIFKYEIDTLKKMGAKMKTAKNSIIVYKSSTIKKTNISTKPYPGFPTDLQAQFMVLMTQAKGLSTIKENIFENRFMHVPELKRMGAKIQIKNKTAYISGPTKLNGAEVMATDLRASVSLVLAGLVANNKTIINRIYHLDRGYETLENKLKKCKAQIRRI

SEQ ID NO: 123233 - protein, 304 aa, Unknown
  Bacterial polypetide isolated from the Sargasso Sea
MDRIHILGGERLEGEVLIGGAKNAALPLMASSLLSSSPLTLSNLPHLVDITTMVQLLGDLGVKISMDGDSPNGGYAGRAIKMDASEPLEKSAPYDLVRKMRASVLVLGPLLARWGEARVSMPGGCAIGTRPIDLHLSALEALGATIDLKEGYVNATAPNGLKGCEVNFPFVSVGATENILMASTLAKGKTIIKNAAREPEIIDLANCLADMGASINGAGTDTIEVVGTEELNGTDYQIIPDRIETGTYAIASAITGGDLLLRGARFDTLSAFFSLLGKAGVEVIQENEGVRIKRTTEPLAAVDI

SEQ ID NO: 123234 - protein, 158 aa, Unknown
  Bacterial polypetide isolated from the Sargasso Sea
MIFLKKIGAKITFSGTRGLNIHGVKNLKSTTHKVIFDRIEAGTYIIASALTKGKLKIKNVIPKIISNEISLLNKMGVVIDKGKKYITVTRPGKIKNTNITTSPYPGFPTDLQAQIMVLMTQANGISTVKEKIFENRFMHVPRIKKNGCRHSNQGQCCK

SEQ ID NO: 123235 - protein, 303 aa, Unknown
  Bacterial polypetide isolated from the Sargasso Sea
MSDKPLFLADYEIVKKMRASILVLGPLLARFGQAVVALPGGCAIGARPVNLHLMALEALGASFSIENGYVKGKVVSSLKGCKIKFPFESVGATANTIMAAVLARGTTELVNVAREPEIIDLCRCLKSMGCNIEGDGERTIVIEGVNNLRGTIHNVVMDRIELGTYMIAGAISDGDIKLTGGNVALLEKFIEKLYEIGIEINKSEDYLRVRRIKNEFIYPTNIVTEPFPGFPTDLQAQMMALLSIADGVSKIEEKIFENRFMHVPELIRMGANIETEGRKAIISGVHQLIGAPVKATDLRASVS

SEQ ID NO: 123236 - protein, 201 aa, Unknown
  Bacterial polypetide isolated from the Sargasso Sea
SNQPRNLKISYELVRKMRASFLILGPLLTKYGYAEVSLPGGCAIGTRPVDLHISALEKMGAEFIIEDGYIKGKVKGRLKGCEITLKKISVGATENIIMAATLADGETIIKNAAREPEISDLSNFLVDSGAEIDGYGTNVIKIKGKKRLRGCEFSVMPDRIEAGTYALCVMGCSGNIILENVNDLICNHLKKIFKPLNVLFL

SEQ ID NO: 123237 - protein, 252 aa, Unknown
  Bacterial polypetide isolated from the Sargasso Sea
MNINYTINNGYIVAKREGPIKGLNFKLEKKSVGCTHFFLMLACLANGTSKLSNASCEPEVIHLGLLLNKMGAKIKGLGSKKIIIEGVKKLNGVTEIIPSDRIETGTFAIAVSATGGKVKLENTNYEENKLLFNILEKTGSIINKSKNSISIEKKHNKIYAANIKTSPYPGFPTDLQAQIMALMTISNGKSEIKENIFENRFMHVQELVRMGANIKLDKDRAIIKGVRRLNGANVMATDLRASASLIIAGLVA

SEQ ID NO: 123238 - protein, 328 aa, Unknown
  Bacterial polypetide isolated from the Sargasso Sea
SSANLKDTEARYELVKTMRASILVLGPLIAKYGKAKIALPGGCAIGTRPVNYHLDALKKMGAKIKLKNGYIEATSKKLHGADIRFEGVTVTGTENLMMAAALAEGTSKLTNVAKEPEIIDLADMLNSMGAKIKGAGSDEIIIEGVNDLKGTVFDIPADRIEAGTYLVAAAVTNGEITVDGINPERLMTVINKLENTGAKLSYDKKSISISMKKSIPEPVDITTAPFPEFPTDMQAQFSVINAISNGTSNIYETVFENRFMHILELNRMGCDIEVKGNHAKINGVKNIYGAEVMATDLRASASLILAGLCAKGETVVDRIYHIDRGYER

SEQ ID NO: 123239 - protein, 106 aa, Unknown
  Bacterial polypetide isolated from the Sargasso Sea
GHSISLDMTEDVIQPVDIVTAPFPGFPTDMQAPFTVLNCIGSGESSVTETIFENRFMHVQELNRMGTDITINGTTALINGVDSISGAQVMATDLRASASLILAGLI

SEQ ID NO: 123240 - protein, 73 aa, Unknown
  Bacterial polypetide isolated from the Sargasso Sea
QIKGNIASSTGVDSLTAAPVMATDLRASAGLIIAALAAKGDTIIDRIYHIDRGYERVEEKLQQLGARVSRENS

SEQ ID NO: 123241 - protein, 301 aa, Unknown
  Bacterial polypetide isolated from the Sargasso Sea
MLSDKQVSILGIPKLTDTFFFLELLSSFGVEVKGLDNFKNTKKFILNAKKITNNKAPYNLVKKMRASILVLGPLLARTGKAIVSLPGGCSIGLRPVDIHLKSLEKLGARIFIEKGYIYAEALKGLKGNKIVFPKVSVGATINVLMAAVLAKGTTEIHNAAKEPEIEDLGLFLKSMGAKIEGLGTNKILVEGVTKLEKTNYKVMLDRIEAGTYALAVAIAGGEIELVGAEKKLLTFFLNILETIGVEYFVTENSIIFKRNSNSLNSIDVTTEPYPGFPTDLQAQLMAVMAISNGTSVITENI

SEQ ID NO: 123242 - protein, 65 aa, Unknown
  Bacterial polypetide isolated from the Sargasso Sea
IKGVKSLSGAEVMATDLRASASLILAGLCAKGETIVDRIYHIDRGYERIEEKLNYLGANIVRLPS

SEQ ID NO: 123243 - protein, 140 aa, Unknown
  Bacterial polypetide isolated from the Sargasso Sea
MQYKLFGSKKIRNMKIKTAPYPGFPTDLQAQIMVLLCKANKNSIIQENIFENRFMHVAELNRMGAQISIGGNKALVKGNINFAPAELMATDLRASVSLVLAALTAKGKSVINRIYHLDRGYENIEVKLKKVGAKIKRVNQ

SEQ ID NO: 123244 - protein, 186 aa, Unknown
  Bacterial polypetide isolated from the Sargasso Sea
RVEVGTYLTAVAMTGGLVKIKSAKPQYLSSVILKLEGCGATINQGEDWVEIKMDASRPQATSLTTGPYPSFPTDMQAQFVSLNSIAKGNSTVTETVFENRFMHVQEIARMGGNITLKGNTAVIEGINKLKGAPVMATDLRASASLVLAGLVAEGDTTIDRIYHIDRGYERIEEKLKILGADIERIS

SEQ ID NO: 123245 - protein, 210 aa, Unknown
  Bacterial polypetide isolated from the Sargasso Sea
GVGKEAIDIIGVKKLKTTRHKVIFDRIEAGTYIIASALTNSTLKIKNIDSKIMSTEINVLRKMGITIIIKGNNLIIKPIKILKNINISTKPYPGFPTDLQAQIMVLMTRANGISKITENIFENRFMHVSELRRMGAQIDIKGNRAIIFGNKKLNGAELMATDLRASVSLVLAALVATNKTIINRIYHLDRGYEKIEKKLSKCGAKIRRLQ

SEQ ID NO: 123246 - protein, 311 aa, Unknown
  Bacterial polypetide isolated from the Sargasso Sea
GEAKVSLPGGCAIGARPFDLHIQGLEKLGARIDIRDGYILASADRLIGSSYCFPKKSVTGTANILMAATLSEGQTEIVNAACEPEIVQLGELLNAMGAKIDGVGGDCIKIEGVENLVSAEIEIIPDRIEAITMIIAGIITQGELKIENIDPSHIEGPIDLIRQCGAKLEISERSLLVKGPDQILPISFETEAYPGIPTDIQAQLMVLNSIANGDSKITETIFENRFMHVLELKRMGANISIDGSTAKISGVSRLNSAPVMATDLRASAALILAGLIAKGETVIDRIYHLDRGYESLEKKLSNIGAKVRRID

SEQ ID NO: 123247 - protein, 270 aa, Unknown
  Bacterial polypetide isolated from the Sargasso Sea
MDRLIIKGKANLKGSINIKGSKNSALPIMVSALLSKNTLKLKNLPKLDDISNMSKLLESYGAIIKTSKDNLEIDCNKIINKDADYDIVRKMRASILILGPLLARFGSARISLPGGCAIGTRPIDIHLEGLKKLGAKFTVENGYVIGDVSDKLIGNHILLPFPSVGATENILMAASIAKGKTIIENSAMEPEIADLAVSLNKMGAKIKIEKKGIIKIEGVKKLYKASHKIMSDRIVAGTFIIAAVMLNKNFVVKQIDSSHLKALTDALQRM

SEQ ID NO: 123248 - protein, 259 aa, Unknown
  Bacterial polypetide isolated from the Sargasso Sea
KFEGVTVTGTENLMMAATLAKGQTILTNVAKEPEIADLADMLNSMGAKISGAGTDKIVIDGVDKLKGTIFDIPADRIEAGTYLVAAAVTKGSITIDGINPNRLMKVIDKLRAAGAEIDYNEDSISINMKLEFPNPVDITTAPFPEFPTDMQAQFSVINAISTGTANIYETVFENRFMHILELNRMGCDISVKGNHAVIQGVKSIYGAQVMATDLRASASLILAGLCAEGETVVDRIYHIDRGYERIEEKLNYLGANIIR

SEQ ID NO: 123249 - protein, 311 aa, Unknown
  Bacterial polypetide isolated from the Sargasso Sea
HDVTTTTRLLTQMGISVTMDEFMDISLDPSTIHNLYAPYELVKTMRSSILVLGPLLTKYGEAKVSLPGGCAIGMRPVDMHLDALQKMGASISVENGYITANVKRLKGADILFPQKSVTGTENIIMAATLAKGTTTIRNAASEPEISDLCLFLNKMGAQVSGFGSDEVTIQGVDSLKGTRHKPLPDRIEAGTFMVAAAITQGDIEINNIVPEHSRAVIDKLIQSGAEIKILKDSVRVKMNKRPRAINIETNAYPFFPTDMQAQMTALNCIAEGDSSVKENIFENRFMHAQELIRMGAKIRVHDNIAEISGTK

SEQ ID NO: 123250 - protein, 312 aa, Unknown
  Bacterial polypetide isolated from the Sargasso Sea
MLSDEMEVQVDTSNIQNLNARYELVKTMRASILVLGPLLARFQQASVALPGGCAIGSRPVNLHIEAMRAMGAEVNIVDGNIKAKVNGRLKGAKIIFEPVSVTGTENVIMAACLADGITTIENAAREPEVIDLANCLMQMGANIKGAGTDMIIIEGVDRLEGASFSVMPDRVEVGTYLTAAAMTGGLVKIKSAKPQYLSSVISKLESCGAIINQGEDWVEIKMDVSRPQATSLTTGPYPSFPTDMQAQFVSLNSIAVGNSTVTETVFENRFMHVQEIARMGGNINLKGNTAVIEGIDKLKGAPVMATDLRASA

SEQ ID NO: 123251 - protein, 236 aa, Unknown
  Bacterial polypetide isolated from the Sargasso Sea
TILNNAAKEPEIVDLANMLNLMGAKVKGAGSECITIEGVESLKGCDYKVIPDRIEAGTFLIAAAITRSTISLSDCEPNHLREVISKLELCGCKFEYSQHFLRIIPNKILHSVNMNTSSFPGFPTDLQAPFMALMTTANGTSEIKETVFENRMHHVQELNLMGANITVKNNIATVVGVKKLEGREVMGSDLRATAALALAGLTANGKTLVRGLQYLERGYEEFPKKLHKIGAKILKK

SEQ ID NO: 123252 - protein, 315 aa, Unknown
  Bacterial polypetide isolated from the Sargasso Sea
MGTDICFHENGDIEVDSTKIHILEARYDLVKTMRASVLVMGPLVARHGKAKISQPGGCNIGARPINFHLQGLEKMGAQIKSDNKFIYIEAKKLIPIQFEFPNVSVTGTENLMMASVFVEGKTTLKNCAKEPEVEDLANFLNSCGAKIEGAGSSVITIEGVETLKKTHWEVLFDRIEAGTYLVAGAITKGKVRINKIIPEKLKCLIISLEKMGFKIFCSKNSIEIDARQSTIKCQDFSTDPYPGFPTDMQAQLMALNCIGEGSALITEQVFENRFQHVKELRKMGANITLEKNHAVVKGVPNLVGSEVTASDLRAS

SEQ ID NO: 123253 - protein, 180 aa, Unknown
  Bacterial polypetide isolated from the Sargasso Sea
FLIAGALIAKKLKIVSLETKVIKKELKILKKMGIKLKINKNEIVILNSKNIKPVKIKTEPYPGFPTDLQAQIMVLMTRANGTSKIKENIFENRFMHVPELNRMGAKIKVSGNLSKIDGVKSLYGAEVMATDLRASVSLVLAGLIAKNRTIINRVYHLDRGYENLENKLRKCGANISRTNY

SEQ ID NO: 123254 - protein, 249 aa, Unknown
  Bacterial polypetide isolated from the Sargasso Sea
GADISLDEKMNFKLNTSNLSNLEARYELVKTMRASILVLGSMVAKYGYAKIALPGGCAIGSRPVNYHLKALEKLGAEISLNNGYIEAKAKKLIGASIEFEGVTVTGTENLMMAASLAEGLTVLTNVAKEPEISDLADFLNSMGAKISGAGTDEISIEGVEELTGTTFKIPADRIEAGTYLVAAAVTNGKITIKKIDPARMGSIIETLQKAGAEVSLNENSISLDVTNNAIKPVDIVTAPFPGFPTDMQA

SEQ ID NO: 123255 - protein, 298 aa, Unknown
  Bacterial polypetide isolated from the Sargasso Sea
LHTKEIINHKASYDLVKKMRASFWVLAPLLAMKGYAEVSLPGGCAIGTRPINIYLEMLKEMNIKYSINNGYIVAKAESPIRGINFKLEKKSVGCTHFFLMLACLAAGTSKLSNAACEPEIVQLGMLLNKMGAKIKGLGSNKIIIEGVKKLNGINEIVPSDRIEAGTFAIAASATGGRIKLENTNYDENKTLFKILEKTGSKINKSKNSISIEKTNDEIYPANIKTSPYPGFPTDLQAQIMTLMAISNGKSEIKENIFENRFMHVQELVRMGANIKLDKDKAIIRGTRNLNGANVMATD

SEQ ID NO: 123256 - protein, 234 aa, Unknown
  Bacterial polypetide isolated from the Sargasso Sea
NNCAIEPEIKDLVNFLIKLGCKIKWTAKRSLKILGVEQLNQITYSVMFDRIEAGTYLIAAVVTEGDLKIKNIIPQIIQTEINLLKKIGAKIIMKKNEIRIIGSKKIRNLNIRTAPYPGFPTDLQAQIMVLLCKANKNSLIKEDIFENRFMHVAELNRMGARVSISGNKAFVKGKTTFAPAELMATDLRASVSLILAALSAKGKSVINRIYHLDRGYEHIEKKLRKVGAKIRRIN

SEQ ID NO: 123257 - protein, 296 aa, Unknown
  Bacterial polypetide isolated from the Sargasso Sea
MELETKKITNHIADYDIVRKMRASILVLGPLLAREGNASVSLPGGCAIGARPVDLHLFGLEKLGAKLKLKDGYIKASVNGRLKGAKIKFPFASVGATENIIMAATLAKGTSVIKNAAREPEIINLCNCIISMGGKIDGIGTSTITIEGVDSLKSTTHEVLGDRIEMGTFMLAPAITGGKVKIKGCNTDYLSFFIDKLVETGVDVFKEKNEVLVTRNVDYLKPINVVTEPYPGFPTDLQAQMMALTCFSKGISTFEEKIFENRFMHAPELIRMGANIEVQGGVARVAGVKKLKGAPV

SEQ ID NO: 123258 - protein, 258 aa, Unknown
  Bacterial polypetide isolated from the Sargasso Sea
CAIGSRPVDIHLFVLKKLGAKIKIKNGYILAETKRGLVGKKIRLPSISVGATENALIAASCAKGTTYLSNCAREPEIKDLTFFLKKMGVKIQWVGDRKIKISGNQNLKSTSHDVMFDRIEAGTFLIAGALAGKKIKISGIDTKILKKEISILKKMGVKMKIYKNDIVVLNSKNIKPISINTEPYPGFPTDLQAQIMVLMTKANGVSKIKENIFEKRFMHVPELNRMGAKIKISGDTSFIYGPQKLNGAEVMATDLRAS

SEQ ID NO: 123259 - protein, 281 aa, Unknown
  Bacterial polypetide isolated from the Sargasso Sea
KLKTGISKQKQRMVLFGKKIRLPKISVGATQNLIIAACYASGTTILKNCACEPEIKDLTVFLKKIGADIKWITKREIKIKGNKKFKPANHSVMFDRIEAGTFIIAGALIAKKLKIISIDTKIIEKEIKILKLMGVKLKVKKNEITILKSKKIKPVSIKTEPYPGFPTDLQAQIMVLMTKANGTSNIRENIFENRFMHVPELNRMGAKIKVLGNLSKIEGFKVLNGAEVMATDLRASVSLVLAGLIAKNRTIINRVYHLDRGYENLENKLKKCGAIISRVNF

SEQ ID NO: 123260 - protein, 304 aa, Unknown
  Bacterial polypetide isolated from the Sargasso Sea
ILIEEKIVKANIKGDKSRLIGTHIKLKCPSVGATETLIMAASLAEGRTTIENAAREPEIQDLCQMLNKMGAKIYDSGKEKIIIDGVNELSGCTHKVIPDRIEAGTFLIAAAATSSSITISPVIPNHLEAVTNKLQESGSKITIKGNSITINCNKIKGVEIETAPFPGFPTDLQAPFTTLMAIANGESKITETIFENRMNHVHLLNKMGANIKLNKNIAYIKGVKKFKGMDLVGSDLRSSAALIIAGIIAEGTSTISGLEHLDRGYENFESKLKILGIKITREFNKKTLKNKEFKTNSDPSDIPR

SEQ ID NO: 123261 - protein, 119 aa, Unknown
  Bacterial polypetide isolated from the Sargasso Sea
SQMIMFDRIELGTYLIAAALMGKKISFPNVIPKIINTEIKVLKSMGVKIKLQNKKITIYKSLNIKSTKIKTKPYPGFPTDLQAQIMVLMSKAKGFSSIEENIFENRFMHVPELKRMGAK

SEQ ID NO: 123262 - protein, 209 aa, Unknown
  Bacterial polypetide isolated from the Sargasso Sea
TDTITVHGVERLHGARYSVMPDRIETGTFLVAAAATRGRVKLKDTDASILESVLLKLEEAGAHIDTGKNWIELDMKGNRPRAVNLRTAPYPAFPTDMQAQFVAMNAVAEGTGTVIETIFENRFMHVQEMNRMGARILVEGNTAIVTGVERLKAAPVMATDLRASASLVIAGLVADGDTLVDRIYHIDRGYECIEEKLQALGGIIRRVPA

SEQ ID NO: 123263 - protein, 242 aa, Unknown
  Bacterial polypetide isolated from the Sargasso Sea
MQKLEVSGPNKLKGHIDISGSKNASLPILAATLLSNKKIYLKNLPKVKDIETMIALLKSLGSMIKLNKKYLMINNFKQNKNFASYNLVKTMRAGILVLGPLVAKFGNAKVSLPGGCAIGTRPIDIHLKALSKLGVKFKIKQGYVHASAPNGLVGSNIDFPKISVGATENLIIASTFARGETILTNCAIEPEIKDLVNFLNKMGCNLRWLSKRKIKIIGVNYIKEVSYSVMFDRIEAGTYLVA

SEQ ID NO: 123264 - protein, 202 aa, Unknown
  Bacterial polypetide isolated from the Sargasso Sea
EGVDRLEGATFSVMPDRVEVGTYLTAVAMTGGLVKIKSAKPQYLSSVILKLEGCGAIINQGEDWIEIRMDDSRPQAASLTTGPYPSFPTDMQAQFVSLNSIAKGNSTVTETVFENRFMHVQEIARMGGNITLKGNTAVIAGIDKLKGAPVMATDLRASASLVLAGLVAEGDTTIDRIYHIDRGYERIEEKLKILGADIERIS

SEQ ID NO: 123265 - protein, 305 aa, Unknown
  Bacterial polypetide isolated from the Sargasso Sea
FGSVKVSLPGGCAWGPRPVDFHLKGLEKLGAKITLNSGYILAEAKRLKGTKISFEFPSVGATGNIAMAATTAQGTTVIENAAREPEIVQLCEYLNAMGASIKGIGTSRIIIEGVDSLHSADIKVIPDRIEAGTFLMAGAVLGKIKLMDVNPSHLDTVLLKLKEIGADINTSSNSITINPTDNIKPVDMTTAVYPGFATDLQAQWVALMTIASGSSVITDTVYHDRFSHIPELNRFGANIRVDNNTAFVRGVEELVGAPVMSTDIRASAALIIAGLFAKGKTIVSRIYHIDRGYEKIEDKFRLLGA

SEQ ID NO: 123266 - protein, 296 aa, Unknown
  Bacterial polypetide isolated from the Sargasso Sea
MHLKGLEELGVTFSSSHGYIEGVAEKLVGGKVLLSFPSVGATENLLMAAVLAEGATLIENAAREPEIVDLVDFLNSMGAQITGEGTSTLQIQGVDHLEPVEHTVIPDRIEAATYISALGMTGGHIVIEEARLDHMEMLTEKLKEMGIEIEQVDSGISVTVSQRLQSIDLATLPYPGVATDYKPFLVTLLSISDGVGIVTENIFAGRFRYVDELIRMGADIRAEGHHAVVRGVERLSGAPVRAPDIRAGAALVLAGLAAEGETLVGSASHIERGYQDLVGNLHSLGAEIEFLNYQEK

SEQ ID NO: 123267 - protein, 148 aa, Unknown
  Bacterial polypetide isolated from the Sargasso Sea
MGVKIKCFKNEIHIIGAKKIKNINIKTAPYPGFPTDLQAQIMVLLCKANKNSEIREDIFENRFMHVSELNRMGAKISISGNKAIVTGNTNFTSAELMATDLRASVSLILAALNAKGKSIINRIYHLDRGYENLEIKLKKVGAKIKRLN

SEQ ID NO: 123268 - protein, 320 aa, Unknown
  Bacterial polypetide isolated from the Sargasso Sea
MAGKCYKLDGSALSIRAEEIQSKKAPYDLVRTMRASFLVLGPLLARCGYAEVSLPGGCAIGSRPVDQHLKGFEAMGAKIEVREGYVIAETPEGLQGADIYFDKPTVGGTENIMMAASLASGTTNIFNAATEPEVKNLGNFLRAMGADISGHGSNQIKIRGVSHLKGCTYRVSADRIEAGTFMVAAAATRGQITINGADPRELEVVTELLRESGAEVETSVDRIRVSMEARPRAVDIETAPFPGFPTDLQAQFMVLNSVAKGKAFVREQIFENRFMHVQELIRMGAKIELRGNNMAVVTGRKALKGAPVMATDLRASSSLV

SEQ ID NO: 123269 - protein, 263 aa, Unknown
  Bacterial polypetide isolated from the Sargasso Sea
MRAGILVLGPLLAKFGRAKVSLPGGCAIGTRPVDLHLKALSKLGVKYKIIQGYIHATAPKGLIGTKITFSKISVGATENLIIAATLAKGTTILKNCAIEPEIKDLTNFLIKLGCNLKWLSNRTIRIKGVKNTHEIKYSVMFDRIEAGTYLIAAAATEGNLKIKKVIPEIIKTEINILKKIGAKIVVKKNQIHIYGNKKIRNTNIKTAPYPGFPTDLQAQIMVLLCKANKKSLIKEDIFENRFMHVSELNRMGAKILIKGETKL

SEQ ID NO: 123270 - protein, 244 aa, Unknown
  Bacterial polypetide isolated from the Sargasso Sea
YELVKTMRSSILVLGPLLAKYGEAKVSLPGGCAIGMRPVDMHLVALQKMGASISVENGYITAKVKKLKGTEIFFPRKSVTGTENIIMAATLAKGTTTINNAASEPEISDLCLFLNKMGAKVSGFGTDKVTIQGVDSLKGTRHKPLPDRIEAGTFMVAAAITRGDIEINNIVPEHSRAVIDKLIQSGADIKILKDSVRVKMSKRPRAINIETNAYPFFPTDMQAQMTALNCIANGDSSVKENIFE

SEQ ID NO: 123271 - protein, 311 aa, Unknown
  Bacterial polypetide isolated from the Sargasso Sea
EKILNLKMSDKHLFLADYEIVKKMRASILVLDPLLARFGQAMVALPGGCAIGARPVNLHLMALEALGARFSIENGYVKGKVAGSLKGCKIKFPFESVGATANTIMAAVLAKGTTELLNAAKEPEIIDLCTCLKSMGCNIEGDGEHTIIIDGVNSLRETVHNVVMDRIELGTYMIAGAITDGDIKLTGGNVALLENFIEKLCEIGIKIDQCKDYLRVKRVKSSSVRSTNIITEPFPGFPTDLQAQMMALLSIANGVSKIEEQIFENRFMHVPELIRMGANIEIEGRKAIISGVSELRGAPVKATDLRASVSL

SEQ ID NO: 123272 - protein, 199 aa, Unknown
  Bacterial polypetide isolated from the Sargasso Sea
CKKINKNITHDIIFDRIELGTYMIAAALVGKKITFNKIDSRVIKNEINVLKKMGVKLKTQKSSIEIFKSKNIKRINLSTKPYPGFPTDLQAQLMVLMTRAQGISKIKESIFENRFMHVPELKRMGANIEIVNKTAVIKGPSRLTGAEVMATDLRASVSLVLAGLVADNRTIINRIYHLDRGYEFLEKKLKNCKASIKRI

SEQ ID NO: 123273 - protein, 159 aa, Unknown
  Bacterial polypetide isolated from the Sargasso Sea
IIKTEIDILRKLGMKIKLENQQINIQGTNDIKNINLKTSPYPGFPTDLQAQLMVLLCKSKKHSVIKEEIFENRFMHCAELNRMGAKIKTKGNKAFIQGNTKFKAAELMATDLRASVSLILAALAAKGKTTINRIYHLDRGYEKIEKKLRKVGAKIRRIS

SEQ ID NO: 123274 - protein, 254 aa, Unknown
  Bacterial polypetide isolated from the Sargasso Sea
MITIDAKMSIEINNTQLNNCVAPYELVRTMRASILVLGPLLARFKQARVSLPGGCAIGTRPVDMHLDGLRAMGAEISIDNGFINATVKKFLHGATYRFPQVTVTGTENLLMAAVIARGQTILENAACEPEVEDLVNFLNAIGARISGIGTSRLVIDGVESLSGGHYTVLADRIEAGTYLAAGVITRGCVSVHGIQPKILGATIERLQAAGAVIKQGEDWVQVDMQGRRPIAVDIKTAPYPGFATDMQAQLFSYE

SEQ ID NO: 123275 - protein, 283 aa, Unknown
  Bacterial polypetide isolated from the Sargasso Sea
FGKADVSLPGGCAIGSRPVNLHLQGLAAMGAEISVQGGYIRAKSKRLKGVDFVFEIVTVTGTENLLMAATLADGVTVIRNAAREPEVVDLANCLNSMGARIEGIGTDTVRIEGVECLEGTKYEILPDRIETGTYLVAAAITGGAVKIKQTKPELLESVLSKLSEAGADLEVGKDWIKLNMQGRNLQAVDIHTSPYPGFPTDMQAQFTALNCVADGTGTITETVFENRFMHVLELQRMGADVKLEGNTVITSGVDRLTGAPLMATDLRASASLVLGGLVAPGAT

SEQ ID NO: 123276 - protein, 240 aa, Unknown
  Bacterial polypetide isolated from the Sargasso Sea
MRAKNAALPMIASTILCDEKVTLRNLPYLQDITTMFELLGSMGAEILLDENMDFTISSSNLKDIEARYELVKTMRASILVLGPLIAKYGKAKIALPGGCAIGSRPVNFHLDALKKMGAKIKLKNGYIEAESKKLHGADIRFDGVTVTGTENLMMAATLADGTTKLTNVAKEPEIIDLADMLNSMGAKIKGAGSDEIIIEGVNNLKGTIFDIPADRIEAGTYLVAAAVTNGEITVDGINPE

SEQ ID NO: 123277 - protein, 189 aa, Unknown
  Bacterial polypetide isolated from the Sargasso Sea
IIPDRIEAITMVIAGIITRGELRIENINSSHMQQPIELIRKCGANLEIFDDYLYLKGSNVISPISFETNPYPGIPTDIQAQLMVLNTVAEGDSKVKETIFENRFMHILELKRMGANIGIDGNTAIITGVQKLNSAQVMATDLRASAALILAGLIADGETIIDRIYHLDRGYESIEEKLLNIGAKVRRID

SEQ ID NO: 123278 - protein, 135 aa, Unknown
  Bacterial polypetide isolated from the Sargasso Sea
MEKLLIKGGNTLIGKIQCSGAKNAALPMIAATILCDEKITLKNLPYLQDITTIFELLGSMGAEILLDEDMNFTISASNLKDIEARYELVKTMRASILVLGPLLAKYGKARIALPGGCAIGTRPSEFSFRCLKQLG

SEQ ID NO: 123279 - protein, 272 aa, Unknown
  Bacterial polypetide isolated from the Sargasso Sea
MDKLIIKGGSKISGSVNVHGSKNSALPIIVSSLLSKKTLKLSNIPNVVDVQNLIKLLKIYGVKIEHKKNKLKINPSKIKNLSADYDVVRKMRASILILGPLLSRFGEARISLPGGCAIGTRPIDIHLAGLSKLGANFEIQNGFVVGSVKSQLIGNKIKLPFPSVGATENILMASVLAKGETKISNAAREPEIEDLSNCLIKMGAKIEGHGTKTILVQGVTNLKKAEHEIIADRIVAGTYIIAALMLNSVLEINNFNTIYLKSLIDILKKNGC

SEQ ID NO: 123280 - protein, 228 aa, Unknown
  Bacterial polypetide isolated from the Sargasso Sea
DLAKYLIAMGADIQGAGTDTIRITGKEKLHGARHTVLPDRIETGTFLVAAAVTGGDVTCLNASPAELEVVLEKLREAGADVTTGPDWIRLNMTGRTLKSVNVKTVPHPGFPTDMQAQFTVLNVVAEGVGMVTETIFENRFMHVPELQRMGADIQLEGNTALIKHTDKLMGAQVMATDLRASASLVIAGLVAEGETVVDRIYHIDRGYEQIEYKLKGLGANIQRINAPA

SEQ ID NO: 123281 - protein, 215 aa, Unknown
  Bacterial polypetide isolated from the Sargasso Sea
MEKLLIKGGNPLKGKISCSGAKNAALPMIASTILCNEKVTLKNLPYLQDITTMFELLGSMGSEILLDENMDFTISSANLKDTEARYELVKTMRASILVLGPLIAKYGKAKIALPGGCAIGTRPVNYHLDALKKMGAKIKLKNGYIEATSKKLHGADIRFEGVTVTGTENLMMAAVLAEGTSKLTNVAKEPEIIDLADMLNSMGAKIKGAGSDEII

SEQ ID NO: 123282 - protein, 280 aa, Unknown
  Bacterial polypetide isolated from the Sargasso Sea
NSNGFVVGSVKSQLIGNKIKLPFPSVGATENILMASILAKGETKISNAAREPEIEDLSKCLIKMGAKIEGHGTKTIFVQGVTNLKKAEHEIIADRIVAGTYIIAALMLNSALEINNFNTIYLKSLIDILKKMGAKLKVSKYSIKVSKGSKLKSTSLSTSPYPGFPTDLQAQLMSLMCISDGKSKIKETIFENRFMHVPELNRLGANITVEKDTATIIGNQTFKGAQVMASDLRASISLVLAAMNANGQTTLNRVYHLDRGYENIEKTLGSLGAKIKRQKI

SEQ ID NO: 123283 - protein, 261 aa, Unknown
  Bacterial polypetide isolated from the Sargasso Sea
MAKIIVNGGKELSGTIRVSGSKNAALPIMTASLLTGGDLELSNIPQLADVTIMRELLQSLGTKISLNKNPRSLKLSTKTIGNYTADYEIVRKMRASIIVLGPILARNKIAKVALPGGCSIGSRPIDLHLKGMEAMGAKIYMDGGYVFAEAVNGLQGAEIKFPAVSVGATENIILAATLADGKTTISNAAREPEIVDLCCCLQKMGANIKGAGTDIITIKGVSSLNGACHSVMADRIELGTFMLAPALTGGEIFLEGEHLKA

SEQ ID NO: 123284 - protein, 279 aa, Unknown
  Bacterial polypetide isolated from the Sargasso Sea
DINYTINNGYIVAKREGPIKGLNFKLEKKSVGCTHFFLMLACLANGTSKLSNASCEPEVIHLGLLLNKMGAKIKGLGSKKIIIEGVKKLNGVNEIIPSDRIETGTFAIAVSATGGKVKLENTNYEENKLLFNILEKTGSVINKSKNSISIEKNHNKIYAANIKTSPYPGFPTDLQAQIMALMTISNGKSEIKENIFENRFMHVQELVRMGANIKLDKDRAIIKGVRRLNGANVMATDLRASASLIIAGLVATGTTKISRIYHLDRGFYNLENKLNNCGA

SEQ ID NO: 123285 - protein, 291 aa, Unknown
  Bacterial polypetide isolated from the Sargasso Sea
KNFHAPYDLVKTMRSSILVLGPLLARFGSAVVSLPGGCAIGTRPVEMHLDALSKMGVTFDIQNGYISANCSRLIGCEISFPKTTVTGTENILMASTLAEGKTVITNAAREPEVVDLANFLNEMGAEITGHGTDVIEVKGVKSLRGVSYSALPDRIETGTFLVAAAITGGEITIKNTISNHVAIIIEKLRQSGAIIDSTDSSITLNMQGKRPKAVNIETGAYPLFPTDMQAQLTALNTIASGTSIIKENIFENRFMHIQEMSRMGAEIKLEQNCAIISGKDELVGASVMATD

SEQ ID NO: 123286 - protein, 292 aa, Unknown
  Bacterial polypetide isolated from the Sargasso Sea
KLKQFAPYNLLKTMRAGVLLLGPLLTRYKKAKISLPGGCAIGSRPVNLHLEALRKMGAKIKIKEGYIFASAKNGLKGTKIKFPTISVGATENILIAACFAKGKSIIKNCACEPEIKDLSNFLIKMGCKIKWIGKRKIEVNGVNELKPVKYKIIFDRIEAGTYIIAAALTKSKVAIKNVDLKAIKAEIRILNKMGIKIIKRKEKIIVKTEKKIKSTNITTKPYPGFPTDLQAQMMVLMSKASGISTITESIFENRFMHVPELNRMGAKITINGNRAKIHGVKELKGAELMALT

SEQ ID NO: 123287 - protein, 318 aa, Unknown
  Bacterial polypetide isolated from the Sargasso Sea
VKTMRAGVLVLGPLLTTYKKAKISLPGGCAIGTRPVDLHLFALKKLGARIKIRNGYIVAEAKNGLKGANINFPSISVGATENAVLAAFNANGKTILKNCAIEPEVKDLIKFLNTLGGRIKVVGRKIVITGCKQIKKNITHEVIFDRIESGTYMIAAALMGKKIIFNKVDPKIIQNEINILKKMGVKLKTQKSTIEILKSNNIKKINLSTKPYPGFPTDLQAQLMVLMTRAQGMSKIKESIFENRFMHVPELKRMGANIEIKNQTAIIKGPSKLTGAEVMATDLRASVSLVLAGLVADNRTIINRIYHLDRGYEFLEKN

SEQ ID NO: 123288 - protein, 255 aa, Unknown
  Bacterial polypetide isolated from the Sargasso Sea
SVGATGNILMASVLARGETHIENAAKEPEIVQLCEVLNQMGANIVGIGTDTLTIYGVDKLHSVDINVIPDRIEAGTYLIAGATMGGITLNNCNPKHLEDVINKLKLSGANISSNENSLSIEKIDSIESVDITTEVYPGFPTDLQAQWMAFMSIAKGKSTIIDTVYHDRFTHIPELNRLGANIQLKDNKAIVDGVNKLKGAQVMSTDIRASAALILGAIIAEGKTEISRVYHIDRGYDSIEKKFQSLGADIVRINE

SEQ ID NO: 123289 - protein, 334 aa, Unknown
  Bacterial polypetide isolated from the Sargasso Sea
EAPYDLVKTMRASFYVLGPLISRFGKVQVSLPGGCAWGPRPVDYHLKGLEKLGANLNLDGGNILAEANELIGCDIHFEFPSVGATGNLAMAAVRAKGTTRLFNCAKEPEITQLCEFLNSMGANIKGIGTDSLTILGVNELNQADITIIPDRIEAGTFLMAGALNGEIKINNVIPLHLEKVTNKLIETGCKININDDSISITPPENLKSVDMTTAVFPGFPTDLQAQWVALMSLSDSSSIVTDTVYHDRFSHIPELARLGANIKVEKNTAFIRGVDQLVGAPVMSTDIRASAALFIAALAAKGNTKISRIYHIDRGYEKIEQKFLRARCRYTKGA

SEQ ID NO: 123290 - protein, 285 aa, Unknown
  Bacterial polypetide isolated from the Sargasso Sea
MDKLEIISNGPLQGQVSISGAKNAALPILMSAILADTTSNFNNVPQLRDIATTSKLLECLGAEVIQGENRVSIYPQAIHNFCAPYDLVKTMRASILILGPLLAKFGQADVSLPGGCAIGARPVDLHISGLEAMGAEITLNDGYIRARVRDRLHGAHIVMDIVSVTGTENLMMAATLAEGETVIHNAAREPEVVDLAHCLIKMGAKITGEGTDTIRIQGVQRLQGIDYAVMPDRIETGTYLVAAAVTRGKIRCINAEPKSLEAVLHKLEEAGAKIQVGEDWIDLDM

SEQ ID NO: 123291 - protein, 189 aa, Unknown
  Bacterial polypetide isolated from the Sargasso Sea
MEKLKIIGGNKLSGSISCSGAKNAALPMLAATILCDQPITFKNLPYLQDITTMFEILGSMGAEITLNENMNFIISTSTLHDFEARYELVKTMRASILVLGSLVARYGFARIALPGGCAIGTRPVDFHLDALEKLGAKIELKNGYIEATSKKLVGCEINFPGVSVTGTENIMMAAVLAKGQTVLRNVAKE

SEQ ID NO: 123292 - protein, 155 aa, Unknown
  Bacterial polypetide isolated from the Sargasso Sea
EINLLNKMGVRIIRKKRHMIVSRPDKLKSARVITQPYPGFPTDLQAQIMVLMINAKGISTIKENIFENRFMHVSELRRMGAQIEIKGSMAKIIGKSKLNGAELMATDLRASVCLVLAGLVPSNKTVVNRIYHLDRGYEKIEKKLSKCGAQIKRLK

SEQ ID NO: 123293 - protein, 286 aa, Unknown
  Bacterial polypetide isolated from the Sargasso Sea
AKFGSAKVSLPGGCAIGTRPVDIHLEALSRLGVKYRINQGYIHANAPKGLIGAKIRFPKISVGATENLIIAASLAEGETILNNCATEPEIKDLVKFLAKMGCNINWISKRSLKIKGVSKINEIVYKVMFDRIEAGTYLIAAAVTQGNLRIKNIIPKIIKTETEILKKIGSKIIQKKNEIHIIGKKKINRMNIKTAPYPGFPTDLQAQIMVLLCKANKKSLIKEDIFENRFMHVAELNRMGAQISIDGNKAKIEGNTKFAAAELMATDLRASVCLILAALSAPRQNL

SEQ ID NO: 123294 - protein, 291 aa, Unknown
  Bacterial polypetide isolated from the Sargasso Sea
MHLKNLGMKYDIKKGYIHAHTKEKLKGAKIRFSKVSVGATENTIIAACLANGISILRNCAIEPEIIDLINFLKSGGAKIKFVGKRTLKIEGIKSLESTSYSVMSDRIETGTFCIAACLTGGNLKINNFDPKIIKTELSLLKRVGAKIKVAKNQIHISGPKKIKNLTNLVTKEYPNFPTDLQAQFMVLLCKAKGKSSITESIFENRFMHVAELRRLGAEILIKKNKAFISGDTNFQAAELMSSDLRASVALVLAAIVAKGSSTINRIYHLDRGYENIENKLRKVGVNIRRVN

SEQ ID NO: 123295 - protein, 270 aa, Unknown
  Bacterial polypetide isolated from the Sargasso Sea
RYELVKTMRASILVLGSMVAKYGYAKIALPGGCAIGSRPVNYHLKALEKLGAEISLNNGYIEAKAKKLTGANIEFEGVTVTGTENLMMAASLAEGLTTLTNVAKEPEISDLADFLNSMGAKISGAGTDEIRIEGVEELTGTTFKIPADRIEAGTYLVAAAVTNGKITINKIDPKRMGSIIETLQKAGAEVDSNGNSISLDMTKDAIKPVDIVTAPFPGFPTDMQAQFTVLNCIGAGESSVTETIFENRFMHVQELNRMGTDITINGTTAL

SEQ ID NO: 123296 - protein, 306 aa, Unknown
  Bacterial polypetide isolated from the Sargasso Sea
EIDSQNISIKELPYELVNGLRASFFCIGPLLSKFGEAKVPLPGGCNIGSRPIDEHINGLKALGAEILIEEEIVKANIKGDKSRLIGTHIKLKCPSVGATETLIMAASLAEGRTTIENAAREPEIQDLCQMLNKMGAKIYDSGKEKIIIDGVNELCGCSHKVIPDRIEAGTFLIAAAATSSSITISPVIPNHLEAVTNKLQESGSKITIKGNSITINCNKIKGVDIETAPFPGFPTDLQAPFTTLMAIANGESKITETIFENRMNHVHLLNKMGANIKLNKNIAHIKGVKKLNGMDLVGSDLRVSAA

SEQ ID NO: 123297 - protein, 96 aa, Unknown
  Bacterial polypetide isolated from the Sargasso Sea
VKETIFENRFMHIQELNRMGTDITINGTTALINGVDSISGAQVMATDLRASASLILAGLIAKGETIVDRIYHIDRGYERIEEKLSNLGAEIIRLPN

SEQ ID NO: 123298 - protein, 310 aa, Unknown
  Bacterial polypetide isolated from the Sargasso Sea
SGAKNAVLPIMASALFAEGTTTIKNVPDLRDTRTFIDLLTNLGAKCTFDKSILSIDASEITSLEAPYDLVKTMRASFYVMGPLLARFGETKVSLPGGCAWGPRPVDYHLKGFERLGAKIELNQGYILARSNQLTGGNISFEIASVGATANILMAAVLAKGQTLITNAAIEPHIVQLCEVLIDMGADIDGVGTNKLTINGVQKLHPVEVTVIPDMIEAGTFLMAGATLGDIQLQSVDPEHLTIVLEKLQLAGCDISLETDSILIKRNNRIKPVDITTDVHPGFLTDLQAQWIALMSIADGASVVTESIYLD

SEQ ID NO: 123299 - protein, 296 aa, Unknown
  Bacterial polypetide isolated from the Sargasso Sea
MDFTISSANLKDTEARYELVKTMRASILVLGPLIAKYGKAKIALPGGCAIGTRPVNYHLDALKKMGAKIKLKNGYIEATSKKLHGADIRFEGVTVTGTENLMMAAVLAEGTSKLTNVAKEPEIIDLADMLNSMGAKIKGAGSDEIIVEGVNELKGTVFDIPADRIEAGTYLVAAAVTNGEITVDGINPERLMTVINKLENTGAKLSYDKKSISISMEKSIPEPVDITTAPFPEFPTDMQAQFSVINAISNGTSNIYETVFENRFMHILELNRMGCDIEVKGNHARINGVKNIYGAE

SEQ ID NO: 123300 - protein, 276 aa, Unknown
  Bacterial polypetide isolated from the Sargasso Sea
YSLVKTMRAGVLVLGPLLAKYGSAKVSLPGGCSIGSRPIDLHLNALKKMGAKINVKNGYIIASAKNGLKGTLIRFPKISVGATQNILIASCFSKGTTKLRNCASEPEVEDLINFLKKLGCKIYKVGKRGLDIEGVVNLKPCVHKVIFDRIEAGTYIIAAALTNGRLKIENIDPKIISTEIHLLNQMKVKIVRKKNYIIVTSPKKIGGINIETQPYPGFPTDLQAQIMVLMTQSQEISTIRENIFENRFMHVSELRRMGANIEVVGNRAKIYGGKQL

SEQ ID NO: 123301 - protein, 146 aa, Unknown
  Bacterial polypetide isolated from the Sargasso Sea
MQKLLIDGKKILSGSINISGSKNSTLPILAATILNSNTTIKNIPLVNDIFTMLNLLKFIGLEFKLSKQKKSVNVINNNQKINTVAPYKLVKTMRAGVLVLGPLLAKYRKAKVSLPGGCAIGTRPVDLHLFALKKLGAKIKIKNGYI

SEQ ID NO: 123302 - protein, 266 aa, Unknown
  Bacterial polypetide isolated from the Sargasso Sea
LNGNKISFDFPSVGATGNILMASVLARGETHIENAAKEPEIVQLCEVLNQMGANIVGIGTDTLTVHGVDKLHSVDIDVIPDRIEAGTYLIAGATMGGITLNNCNPNHLEDVINKLKLSGANIYSNENSLSIEKIDSIESVDITTEVYPGFPTDLQAQWMAFMSVAKGKSTIIDTVYHDRFTHIPELNRLGANIQLKDNKAIVDGVNKLKGAQVMSTDIRASAALILGAIIAEGKTEISRVYHIDRGYDSIEKKFQSLGVDIVRINE

SEQ ID NO: 123303 - protein, 230 aa, Unknown
  Bacterial polypetide isolated from the Sargasso Sea
MICVSEKKSYLKSQNLKIFGQGKLNGFVEISGAKNSALVLLAASLLTNEKIVLQNVPRLTDIEKMGNILKNLGVNLKEKNNTLEIDSKNISIKELPNELVNGLRASFFCIGPLLSKFGEAKVPMPGGCNIGSRPIDEHIEGLKALGAEILIEKGIVKANIKGKKSRLIGTHIKLKCPSVGATETLIMAASLAEGRTTIENAAREPEVQDLCQMLNKMGAKIYDSGKEKII

SEQ ID NO: 123304 - protein, 250 aa, Unknown
  Bacterial polypetide isolated from the Sargasso Sea
MEKLLIKGGSTLSGKISCSGAKNAALPMIASTILSNESIVLKNLPYLQDITTMFELLGSMGAEILLDENMDFTISSFNLKDIQARYELVKTMRASILVLGPLVAKYGKARIALPGGCAIGSRPVNYHLDALKQLGAKIKLKNGYIEASANRLIGSNIRFDGITVTGTENIMMAATLAQGVTVLTNVAKEPEIVDLADILNSMGADIKGAGTDEITIKGVSELSGTTFSIPADRIEAGTYLVAAAVTNGNI

SEQ ID NO: 123305 - protein, 289 aa, Unknown
  Bacterial polypetide isolated from the Sargasso Sea
DLVRTMRASILVLGPLLAKQGKANVSLPGGCAIGARPVNLHLTGLEKMGAKIEVDEGYIRAEVDGRLKGARIFMDMVSVGATENLLMAAALADGTTILENAAREPEIVDLANCLIQMGAKISGAGSDKITIEGVETLNGCDYAVLPDRIETGTFLVAAAVTGGKIRCTHAAPDTLDAVLDKLEQAGAKITTGDDWIELDMEGRKPQAVRVKTAPHPAFPTDMQAQFVTLNCVAEGTGVITETIFENRFMHVPELQRMGAEIALEANSAVSKGCSSLKGAPVMATDRARR

SEQ ID NO: 123306 - protein, 262 aa, Unknown
  Bacterial polypetide isolated from the Sargasso Sea
SFHQSLVGGTENVLMAAVLASGETVISNAAREPEVTDLAHCLIAMGAKIEGIGTDTLRVQGVERLQGVKHAVLPDRIETGSYAVAAAITGGDLLLRGARMNLIEATVDLLSRAGVSFTEEANGVRVTRTDGRVRGVDLMTEPFPGFPTDMQAQFMALMSVADGASMVTETIFENRFMHVPELSRMGADINVHGASAIIRGVPALSGAPVMATDLRASVSLVLAGLAAEGETIVNRVYHLDRGYERLEEKLARCGGEIHRLAD

SEQ ID NO: 123307 - protein, 114 aa, Unknown
  Bacterial polypetide isolated from the Sargasso Sea
PTDLQAQLMVLMICAKGKSTIKENIFENRFMHVPELKRMGANIEIKNKKATIIGPSKLTGAEVMATDLRASVSLVLAGLVAENRTIINRIYHLDRGYESLEKKLKNCKANIKRI

SEQ ID NO: 123308 - protein, 145 aa, Unknown
  Bacterial polypetide isolated from the Sargasso Sea
MEKLLIRGGSQLSGKITCSGAKNAALPMIASTILSDEKVTLRNLPYLQDITTMFELLGSMGSDIILDENMNFTIFSKDLKDTEARYELVKTMRASILVLGPLVAKYGKAKIALPGGCAIGSRPVNYHLDSLEKMGAKIKLKKWIY

SEQ ID NO: 123309 - protein, 314 aa, Unknown
  Bacterial polypetide isolated from the Sargasso Sea
VSGAKNAVLKQMILSILSEGVYKIENVPNIADVYYMQEVLDVLGITSKLDDKSLEINSPSDISVEAPYEVVQKMRASIIVLGPLLARKGEAKIAFPGGDQLGPRPVKMHIEALEKMGAKFELDHGVLIGKTDGLKGVEINLPYASVGATENTILAAVLADGTTVIENAAREPEVVDLVKMLKNMGAQIEGEGSSEITIQGVDSLKSTNHKVIGDRVVAGTYLAAFLATKGSGVIKGIGPDCLPMELKKFQEMGADLVINENSIEINIAKEISSIEISTLPFPGVATDLQPIFGACLLKANGTSIITENVTTRGS

SEQ ID NO: 123310 - protein, 300 aa, Unknown
  Bacterial polypetide isolated from the Sargasso Sea
MNNSEKLIVTGNRKLLGDVKISGAKNSALPLMTVSLLIDNGFQLKNVPDLLDTKIMRQLISELGVKINIAQNSINFFGKPIEIQASENLVNKMRASILILAPLLQSQKRALVPLPGGCEIGSRPIDMHIEVIKKLGAKVELKNGYLFAELSNDGFIGSEIKFSKVSVGATECAILASVLAKGKTTLSNVAMEPEIVDLGNCLNKAGANIKGLGEKQIIITGVKTLNPITYSVMPDRIETGSFALAAAITRGKVFIKDTEINFLKKFLEKLNKAGVKLECFKNELKVTGYNTISSVDVQHN

SEQ ID NO: 123311 - protein, 236 aa, Unknown
  Bacterial polypetide isolated from the Sargasso Sea
MNSFTYNNTEKIYITGEQKLTGNVNISGAKNAALPLMALSLIINKDFNLYNVPDLVDTRLMSKLLIDLGIEINWKKGNLNFYGKPKKDEASYDLVRQMRASILVLGPLLASKGSAKVPLPGGCAIGSRPIDLHIMVMEALGANVKFDRGFIICSLSNEGLKGGVINFPKVSVGATESALMTAILAKGQTKIFNAAREPEVTDLAHCLNKAGADIKGIGTDNLIINGVKELNQVSHS

SEQ ID NO: 123312 - protein, 245 aa, Unknown
  Bacterial polypetide isolated from the Sargasso Sea
MDKLIITGGARLDGEIRISGAKNSALPILAATLLCDGPVTVANLPHLHDITTMIELFGRMGIEPVIDEKLAVEIDPRTIKTLVAPYELVKTMRASILVLGPMVARFGEAEVALPGGCAIGSRPVDLHIRGLEAMGAVIDVEGGYIKAKAPEGGLRGANFFFDTVSVTGTENIMMAAALANGRSVLQNAAREPEVVDLANFLNAMGAKVSGAGTDTITIDGVERLHTATYKVMPDRIETGTYLVAA

SEQ ID NO: 123313 - protein, 107 aa, Unknown
  Bacterial polypetide isolated from the Sargasso Sea
VLNCIGPGESSVTETIFENRFMHVQELNRMGTDITINGTTALINGVDSISGAQVMATDLRASASLILAGLIAKGETIVDRIYHIDRGYERIEEKLSNLGAEIIRLPN

SEQ ID NO: 123314 - protein, 242 aa, Unknown
  Bacterial polypetide isolated from the Sargasso Sea
AAQAKGKTTLINCAKEPEISDLISFLRSLGCKIKESGRKIIVSGNFEPKTVSHNIMFDRIEAGTYLIASALIGKKISLHSLKTRTIKKEIETLKKMGVKMNVEKNKITVFQSPKIKKTNIVTSPYPGFPTDLQAQIMVLMTKAVGKSKIRENIFENRFMHVQELKRMGAKINVKNNNATIEGPTNLSGAEVMATDLRASVSLVLAGLIAENRTIINRIYHLDRGYEKLEEKLKKCKAIIRRV

SEQ ID NO: 123315 - protein, 233 aa, Unknown
  Bacterial polypetide isolated from the Sargasso Sea
QKSPKIIDLANMLNTMGAKIYGAGSDEIVIEGVDNLNGTEFEIPADRIEAGTYLVAATVTKGDITIEGIDPKRLMIVIDKLRQSGADLEFSEDSISISMKKNRPNPVDISTAPFPEFPTDMQAQFSVINALSNGNAKIYETVFENRFMHILELNRMGCNIYVKGNCATIEGVSSISGAEVMATDLRASACLILAGLCADGDTIVDRIYHIDRGYERIEEKLNYLGANIIRLPS

SEQ ID NO: 123316 - protein, 275 aa, Unknown
  Bacterial polypetide isolated from the Sargasso Sea
LVLGPLLAKYGKARIALPGGCAIGTRPVNFHLDALEQLGAKIILKNGYIEASATKLYGNKIRFDGVTVTGTENLIMAATLAEGRTTLTNVAKEPEIIDLAEMLSSMGAKITGAGSDEIIIDGVNSLHGSEYSIPADRIEAGTYLAAAAVTNGNITVEGINPKRLMKVINKLDDTGADITYKKDSISISMNRDRPRPVDVTTAPFPEFPTDMQAQFSVINAISSGTSNIYETVFENRFMHILELNRMGCDITVQGNHAVINGVPSLYGAEVMATDL

SEQ ID NO: 123317 - protein, 274 aa, Unknown
  Bacterial polypetide isolated from the Sargasso Sea
FIAYSKKKLKGAKIKFPKISVGATENLIIASSMAEGTTILSRCAIEPEIKDLVNFINCMGGKIKWIGKRTLKIVGVKNFKEVKYEIMPDRIEAGTYLIAAAVTEGNLKIIGINPNIIKTEIDILRKLGAKIKIKNEQINIKGTDNIKNINIKTAPYPGFPTDMQGQLMVLLCKSKKRSVISEEIFENRFMHVAELNRMGAKIRTKGNKAFIEGNTNFKAAELMATDLRASVSLILAALSAKGKTTINRIYHLDRGYEQIEKKLRKLGANIRRIS

SEQ ID NO: 123318 - protein, 68 aa, Unknown
  Bacterial polypetide isolated from the Sargasso Sea
GGAQVMATDLRASACLVLAGLVAREQTVIDRIYHIDRGYDCIEEKLLQCGADIRRVSDSRSPRVHAVV

SEQ ID NO: 123319 - protein, 228 aa, Unknown
  Bacterial polypetide isolated from the Sargasso Sea
MDRLIIKGKADLKGSIKIKGSKNSALPIMVSALLTRSPLKLKNLPKLDDIDNMSKLLRSYGANIKSKQDNLEIKCNNITNRDADYDIVRKMRASILILGPLLARFGKARISLPGGCAIGTRPIDIHLEGLKKLGANFSFENGYVVGAVEDELIGKHITLPFPSVGATENILMAASIAKGKTIIENAAREPEINDLAFALNKMGAKINVKNNEIIKIDGVNSLTQATHK

SEQ ID NO: 123320 - protein, 91 aa, Unknown
  Bacterial polypetide isolated from the Sargasso Sea
LKNRFMHILELNRMGCDISVNGNHAIIKGVQSLYGAEVMATDLRASASLILAGLCAKGETVVDRIYHIDRGYERIEEKLNYLGANILRLPS

SEQ ID NO: 123321 - protein, 318 aa, Unknown
  Bacterial polypetide isolated from the Sargasso Sea
NSALPILAAALLAEKPVKIGNVPHLHDVTTTMELLGRMGLSLTVDEKMTVEVDSTSINNFFAPYELVKTMRSSILVLGPLLSRYGRAEVSLPGGCAIGARPVNLHLQGLEAMGAELSVESGYIKAKTKGLRGAEIVLDMVTVTGTENLLMAATLAKGVTIIRNAAREPEVVDLANFLKKMGAIIEGAGSDTIKIQGVSSLSGTEYRVLPDRIETGTFLAAIAMTGGKGKLKRTRPELLGSVLSKLREAGCKIDTGEDWIELNMVGRELRAVDIHTAPYPGFPTDMQAQFTALNCVAKGSATVTESVFENRFMHVLELQ

SEQ ID NO: 123322 - protein, 125 aa, Unknown
  Bacterial polypetide isolated from the Sargasso Sea
MDKLLIEGQRPLSGAVRISGAKNSVLPMLCASVMVTDGQVELENVPHLQDVTTTTRLLTQMGVSVTMDEFMNISLDPSTIHNLYAPYELVKTMRSSILVLGPLLSRYGEAKVSLPGGCAIGMRPV

SEQ ID NO: 123323 - protein, 68 aa, Unknown
  Bacterial polypetide isolated from the Sargasso Sea
HALLMGVSSIYGAEVMATDLRASASLILAGLCAKGETVVDRIYHIDRGYERIEEKLNYLGANITRLPS

SEQ ID NO: 123324 - protein, 194 aa, Unknown
  Bacterial polypetide isolated from the Sargasso Sea
MDKLLIKGRTPLNGEIYASGAKNSALPILASSLLSDSPLTVGNLPHLNDVTTMLELLGSMGVDVTLSDEMEVQVDTSSIMNLDARYELVKTMRASILVLGPLLARFQEATVALPGGCAIGSRPVNLHIEAMRAMGAQINIENGYIKASVNGRLKGSKISFDPVSVTGTENVIMAASLAEGTTIIQNAAKEPEVV

SEQ ID NO: 123325 - protein, 190 aa, Unknown
  Bacterial polypetide isolated from the Sargasso Sea
MQRLEIKGGKKISGTIKISGSKNATLPILAATILTSKKIILKNIPIVKDVETMVTLLGTIGSSIKLNKKKKVIQIINKKKLKTFGSYNLLKTMRAGILILGPMLARYKMAKVSLPGGCSIGSRPIDLHLNALKKMGANIRVKNGYIIASAKKGLKGCLIKFPKISVGATENTLIAACFSNGETKLRNCAM

SEQ ID NO: 123326 - protein, 278 aa, Unknown
  Bacterial polypetide isolated from the Sargasso Sea
MQKLEVFGANKLKGQINISGSKNASLPILAATLLSSKKVNLKNLPKVKDIQTMINLLQSLGSKIRFKKKKLIINNSTQNKNFASYSLVKTMRAGILVLGPLLAKFGNAKVSLPGGCAIGTRPIDIHLKAFSKLGVKYNITQGYVHASTPKGLVGSKIRFPKISVGATENLIIAASLAKGTTILSNCAIEPEIKDLVNFLNKIGCKIKWVGKRKIKIDGVNQINETTYSVMFDRIEAGTYLVAAAATEGNLKIKNIIPKIIKTEIDTLRKIGTKIVVKK

SEQ ID NO: 123327 - protein, 264 aa, Unknown
  Bacterial polypetide isolated from the Sargasso Sea
MAEGKSRIKRVPDLRDTRTMIKLLEIVGAKCTFDNGSLTIDGSTVNNPEAPYDLVKTMRASFYVLGPLLARFGSVKVSLPGGCAWGPRPVDFHLKGLEKLGAKITLNSGYILAEAKRLKGTKISFEFPSVGATGNIAMAATTAQGTTVIENAAREPEIVQLCEYLNAMGASIKGIGTSRIIIEGVDSLHSADIKVIPDRIEAGTFLMAGAVLGKIKLMDVNPSHLDTVLLKLKEIGADINTSSNSITINPTDNIIPVDMTTAVY

SEQ ID NO: 123328 - protein, 264 aa, Unknown
  Bacterial polypetide isolated from the Sargasso Sea
MQKLLIRGKKELSGRITISGSKNATLPILAASILSQNVKLTNVPLVKDTFTMIELLRFIGIKVEIKNKKKIIELKNNNNRINTLAPYKLVKTMRAGVLVLGPLLTKYKKAKVSLPGGCAIGTRPVDLHLFALKKLGAKIVIKDGYIIAKAPNGLKGTRIKFPSISVGATENAILAAFGAKGKTTLLNCAIEPEIIDLISFLKKLGCAINIKGRKIIILNKKLLKKKISHKIIFDRIEAGTYLIAGALIGNKITINHVKPSVINC

SEQ ID NO: 123329 - protein, 273 aa, Unknown
  Bacterial polypetide isolated from the Sargasso Sea
CSIGIRPIDIHLKSLSKLGVKYKIIDGYVYAHVKGKLKGANIKFSKISVGATENLIIAASMAEGTSVLSNCAIEPEIKDLVNFINLMGGKIKWIGKRTLQIKGVNKFKEIKYSIMPDRIEAGTYLIAAAVTEGNLKIHGINPNIIKTEIDVLRKIGIKIILEKQFIKISGTKDIKSLNLKTSPYPGFPTDLQAQLMVLLCKSKKRSVVKEEIFENRFMHVAELNRMGAKIKTKGNKAFIEGNINFKGAELMATDLRASVSLILAALAAKGKTT

SEQ ID NO: 123330 - protein, 271 aa, Unknown
  Bacterial polypetide isolated from the Sargasso Sea
GILVLGALLAKYGKAKVSLPGGCAIGTRPIDIHLKALSDLGVKYKIVQGYVYATAPKGLKGSKIRFPKISVGATENLIIAASLAKGETILSNCAIEPEIKDLVNFLNKMGCKIKWISKRTVKIIGCKNLSQISYEVMPDRIEAGTYLIASALTEGDIKICGIDPKIIKTEIKILKKIGTNIKIKNNEIYVKGNKLIKNIKIKTSPYPGFPTDLQAQMMVLLCKASKSSIIKEDIFENRFMHVAELNRMGASISIKGNTATIKGNIKFNSAE

SEQ ID NO: 123331 - protein, 157 aa, Unknown
  Bacterial polypetide isolated from the Sargasso Sea
AVLLKLKDAGATITTGEDWIELDMHGKRPKAVNIKTAPYPAFPTDMQAQFCVLNALAEGTGRVTETIFENRFMHVPEMSRMGANIELEGNTCIIHGIERLNGAQVMATDLRASASLVIAGLMADGITTVDRIYHLDRGYEHIEAKFQGLGAEVIRVK

SEQ ID NO: 123332 - protein, 306 aa, Unknown
  Bacterial polypetide isolated from the Sargasso Sea
MQLCLCLAATILTDQQITFKNLPYLQDITTMFEILGSMGAEITLNEGMNFIISTSKLNDFEARYELVKTMRASILVLGSLVARHGFARIALPGGCAIGTRPVDFHLDALAKLGAKIELKNGYIEATAKKLIGCEINFPGVSVTGTENIMMAAVLAKGQTILRNVAKEPEVEDLANFLNSMGAKIKGAGSDEIIIDGVNNLSGTKFSIPADRIEAGTYLVATAITGGDVTISNVQAPRMNNILDKLKLSGASINIGKDYIQLTMNKDFTLPVDISTAPFPGFPTDMQAQFTVLNALSKGVSVVTENC

SEQ ID NO: 123333 - protein, 283 aa, Unknown
  Bacterial polypetide isolated from the Sargasso Sea
GARPINYHLNSLKKMGMKYEIKKGYVYAHSKGKLKGAKIKFSKVSVGATENSILAACLAKGVTILKNCAIEPEIKDLTNFLKSAGAKIKWIGKRTLQIEGVKLLKSINYSVMHDRIEAGTFCVAACITKGDLIIKNCNSKIIQTELDLLKKTGAIIRSYNNEIHIKGSKNIKSIKNIITKEYPNFPTDLQAQFMVLLSIANGRSIISEKIFENRFMHVGELRRLGAKIKIKGNKAIINGGSSLQGAELMSSDLRASVALVLGALVANGSSVINRIYHLDRGYE

SEQ ID NO: 123334 - protein, 249 aa, Unknown
  Bacterial polypetide isolated from the Sargasso Sea
MDKIIIQGQNSLSGSVNISGAKNAVLPIMTAALMAEGESVISRVPDLRDTRTMIKLMEIVGAKCSMEGNRLKIDADSVYNPEAPYDLVKTMRASFYVLGPLLARFGTVKVSLPGGCAWGPRPVDFHLKGLERLGAKVTLRSGYILAEAKKLKGANINFEFPSVGATGNIVMAAATADGITTIENAAREPEIVQLCDYLNKMGASISGIGSSKIVVEGVESLYPANIDVIPDRIEAGTFLMAGALMGKIT

SEQ ID NO: 123335 - protein, 259 aa, Unknown
  Bacterial polypetide isolated from the Sargasso Sea
ASILSDHNIILNGIPDLADVKTMITLLESMGIETNKNYKGSLTLNSSGIDSRFASYELVKTMRASIMVLGPLLAKYGEAKVSLPGGCAIGARPVDLHIQGLEKLGARIEIKDGYLLASADRLIGSSYCFPKKSVTGTANILMAATLAEGETKIVNSACEPEIIQLGELLNAMGARIEGLGEDCITIQGVENLVGAEIEIIPDRIEAITMIIAGIITQGEIEIENINPSHIEEPIKLIRQCGAILEISDQSLFVKGSDEI

SEQ ID NO: 123336 - protein, 161 aa, Unknown
  Bacterial polypetide isolated from the Sargasso Sea
DLRAVLDVLLASGARIEENSSGIVVEGPGSSPGAVDIMTDPYPGFPTDLQAQVMAYMTRVDGASMITETIFENRFMHVPELNRMGANINVHNSTALIRGVKKLMGAPVMATDLRASVSLVLAGLAASGETTINRIYHLDRGYENLVSKLKSCGAIIDRVGT

SEQ ID NO: 123337 - protein, 140 aa, Unknown
  Bacterial polypetide isolated from the Sargasso Sea
KNNIRVIGTNNIKNINIKTSPYPGFPTDLQAQLMVLLCKARNYSIINEEIFENRFMHCAELNRMGAKIVIKGSKAFIEGNIIFKSAELMATDLRASVSLILAALTANGKSTINRIYHLDRGYEHIEKKLRKVGARIKRVY

SEQ ID NO: 123338 - protein, 236 aa, Unknown
  Bacterial polypetide isolated from the Sargasso Sea
IKNAAREPEVIDLCNCIISMGGNIDGVGTSTIIIDGVDHLKHTSHNVLGDRIEMGTFMLAPAIAGGKIKIRGCNTDYLNSFIEKLVETGVDIKKNENEIIVEKNIDVLNPINVITAPYPGFPTDLQAQLMTLTCFSKGISKFEEKIFENRFMHVPELIRMGANIEVQGGTAKVTGVNKLKGAPVMATDLRASVSLILAGLASSGETVISRVYHLDRGYENIEKKLSNCGANIRRFK

SEQ ID NO: 123339 - protein, 245 aa, Unknown
  Bacterial polypetide isolated from the Sargasso Sea
LIDNKNKLLKTIAPYSFVKTMRAGVIVLGSLLTKFGKAKVSLPGGCAIGTRPVDIHLFGLKKLGAKIKIKNGYIVAEAKEGLIGKKIKFPSISVGATENLIIAASLAKGITHLKNCACEPEIKNLTDFLIKMGVKIKWVGKREVKIFGKKKLKKVKHNIMFDRIEAGTFIIAGALAGKKIKITNIETKILKKELGILKRMNVKLKVKKNYVIIKESNKIRPASIKTEPYPGFPTDLQAQIMVLMT

SEQ ID NO: 123340 - protein, 217 aa, Unknown
  Bacterial polypetide isolated from the Sargasso Sea
MGAKIDGAGTDLIKITGVDKLEGAAFSVMPDRVEVGTYLTAVAMTGGQVKIKSAKPEYLSSVISKLEQTGSVINTGEDWVEITMDEDKPEAISLTTGPYPSFPTDMQAQFVSLNAIAKGNSTVTETVFENRFMHVQEIARMGGNITLKGNTAVIEGIDRLNGAPVMATDLRASASLVLAGLVADGATTIDRIYHIDRGYERIEEKLKMLGADIERIS

SEQ ID NO: 123341 - protein, 235 aa, Unknown
  Bacterial polypetide isolated from the Sargasso Sea
MDKIVVNGDKPLSGVVKISGAKNAVLPVMAATLLAPGKYLIENVPDLRDTRTMMKLLNIIGAKTLFDKGSLTIDSSSANNPEAPYDLVKTMRASFYVLGPLISRFGIVNVSLPGGCAWGPRPVDYHLKGLEQLGAKLNLDGGNILAEAKELIGNDIHFEFPSVGATGNLAMAAVKASGTTRLYNCAKEPEITQLCEFLNSMGANIEGIGTETLIIHGVDELHSADIYIIPDRIEA

SEQ ID NO: 123342 - protein, 248 aa, Unknown
  Bacterial polypetide isolated from the Sargasso Sea
MDRILVKGGTPLEGEIVISGAKNACLALMPAALLTTEPLTLTNSPFLSDIVMMKKLLSSLGCEVADVQSRRIITITAGNISNCTAKYDIVRKMRASILVLGPLLAREGRAIVSLPGGCAIGARPVDLHLSALEAMGASLELKDGYIHASAPKGLKGVEYTFPIISVGATENTIMASTLADGVSILRNCALEPEIRDLCDCLVGMGAKIKGVGTQTITIEGVSKLTGNTHSVIVDRIELGTYMLAPAIT

SEQ ID NO: 123343 - protein, 265 aa, Unknown
  Bacterial polypetide isolated from the Sargasso Sea
IGNTIKFSKISVGATENLIIAASLAKGKTILKNCAIEPEIVDLINFLRKMGCDIKWKGKRTIAINGVKSLKKIQYKIMFDRIEAGSYMIASALTEGNLRIINIKPKIIQTEIDILKKIGASIKTTDTELRIIGKKKIKNIKITTSPYPGFPTDLQAQLMVLLCRSYGRSEIIEKIFENRFMHASELNRMGAKIKISGNKAIIQGNVVFKSAELMATDLRASVSLILAALSAKGKSIINRIYHLDRGYESIEKKLKKIGANIRRIS

SEQ ID NO: 123344 - protein, 205 aa, Unknown
  Bacterial polypetide isolated from the Sargasso Sea
SINIFGVEKLKSAVHKIIFDRIEAGTYIIAAALTKGYLKIKNINPKIMSTEINFLQKMGIDIIKKKNFLIASRSKKLKSVNIATEPYPGFPTDLQAQIMVLMTKAEGVSTIKENIFENRFMHVPELRRMGAKIETKGNKARIFGKSKLTGAELMATDLRASVCLALAGLVPSNKTIVNRIYHLDRGYEKIEKKLSKCGAQIKRLR

SEQ ID NO: 123345 - protein, 315 aa, Unknown
  Bacterial polypetide isolated from the Sargasso Sea
PKSKRYGDNDYLLDFLGSNIKKAKDKIIINNSYQKKTFASYSLVKTMRAGILVLGPLLAKFGTAKVSLPGGCAIGTRPIDIHLDALSKLGVKYKIIQGYVHATAPKGLIGNKIRFSKISVGATENLIIAASFAKGSTYLSNIAIESEIKDLINFLKCMGCNIKWTGKRSVKIEGVSKVKDITYQVMFDRIEAGTYLIAAAVTQGNLKIKNIVPKIIQTEINILKKIGAKINVKKDEVHIVGNKKVKSINIKTAPYPGFPTDLQAQMMVLMCKANKQSLIKEDIFENRFMHVAELNRMGAQILIKGNKAIVQGNIN

SEQ ID NO: 123346 - protein, 118 aa, Unknown
  Bacterial polypetide isolated from the Sargasso Sea
SSFPTDMQAQFVSLNAIANGNSTVTETVFENRFMHVQEIARMGGNISLKGNTAVIEGIKKLKGAPVMATDLRASASLVLAGLVAEGATTIDRIYHIDRGYERIEEKLKMLGADIERIS

SEQ ID NO: 123347 - protein, 152 aa, Unknown
  Bacterial polypetide isolated from the Sargasso Sea
MKKMGVNLKIKKNEVLISSTKKIKPISINTEPYPGFPTDLQAQIMVLMTKASGISKIKENIFENRFMHVPELNRMGAKIKILGNTSFINGPQELNGAEVMATDLRASVSLVLAGLVAKNKTIINRVYHLDRGYEKIENKIKKCKGKISRVEY

SEQ ID NO: 123348 - protein, 292 aa, Unknown
  Bacterial polypetide isolated from the Sargasso Sea
HLEALKKMGASIKIKDGYVIASAKKGLKGCSINFSKISVGATENILIASCLAKGKTKLQNCAIEPEVKDLISFLKKIGCPIKQVGKRNIEIVGKKKLNSANHKVVFDRIEAGTYIIASAITNGSLIIKNINHNLIKTEIVLLKKMGIKILKKKNYIIVYPPKKLKCVSLVTEPYPGFPTDLQAQIMVLMTRAEGVSIIKEKIFENRFMHVSELRRMGAHIDVEGNKAKIYGNSKLNGAELMATDLRASVCLVLAGLTAYNKTIVNRIYHLDRGYENIEKKISKCGAHIKRIQ

SEQ ID NO: 123349 - protein, 272 aa, Unknown
  Bacterial polypetide isolated from the Sargasso Sea
AKNAALPLMATALLTNNEILLENIPRLGDVGSMCELLRGVGVEIYGSLQDAGCLRLRCEEITNTEAPYDIVRKMRASILILGPLIARCGEARVSLPGGCAIGNRPVDLHLNALMQMGAQIDLSRGYVEAKIQGEKRLQGARINFPMVSVGATENLMLAATLAKGETELLNVAREPEIVNLAECLIKMGAEIEGHGTDTIYIQGKDALSGTTHSVISDRIEAGTFAIAACITGGKLELIGANSNDLRAMLDVLLASGAKIEEHSWGLLIEGPG

SEQ ID NO: 123350 - protein, 265 aa, Unknown
  Bacterial polypetide isolated from the Sargasso Sea
IGNTIKFSTVSVGATENALLAASKAKGTTILKNCAIEPEIKDLIIFLRKLGLTINIKGRTITVTHSVKKNSKIVHSVIFDRIELGTYMIASALQAKKYITINKIDPKLIKIEIDILKKIGVQIKKKKSSIIVTKNKKLKRINISTKPFPGFPTDLQAQLMVMLTQAKGISKIKENIFENRFMHVPELKRMGANIEIKNKTAIIKGPTKLTGAEVMATDLRASVSLVLAGLVAENKTTINRIYHLDRGYEFLESKLKRCKAEIKRI

SEQ ID NO: 123351 - protein, 160 aa, Unknown
  Bacterial polypetide isolated from the Sargasso Sea
MDKLIIQGESDLFGSIDIPGSKNASLPILVASLLSEKNLNLTNIPKLQDVKSMIQLLRSFGVKINENNSKLTLNAKNLKNNIADYDLVRKMRASILVLGPLLARFKKAKISLPGGCSIGTRPIDIHLNSLNKLGINFEIENGFISGLVKNELIGNIIDLP

SEQ ID NO: 123352 - protein, 373 aa, Unknown
  Bacterial polypetide isolated from the Sargasso Sea
GEISISGSKNAALPILASTILFENEVIIKNLPRVKDIDTMINLLKSLGSEIKFNKNKKIVKITKKKKQNFFASYSLVRTMRAGILVLGALVTKHQKSITSLPGGCLIGARPVNYHLNALKKLGMKYEIKKGYIHAQTKEKLKGAKIRFSKVSVGATENTIIAACLANGISILRNCAIEPEIIDLINFLKSGGAKIKFIGKRTLKIEGIKSLESTSYSVMSDRIETGTFCVAACLTEGNLKINNFDPKIIKTELSLLKRVGAKIKVAKNQIHISGPKKIKNLTNLVTKEYPNFPTDLQAQFMVLLCKAKGKSSITESIFENRFMHVAELRRLGAEIIIKKNKAFISGNTNFQAAELMSSDLRASVALVLAAIVA

SEQ ID NO: 123353 - protein, 233 aa, Unknown
  Bacterial polypetide isolated from the Sargasso Sea
MDKLLIKGGNILEGEIYASGAKNSALPILAASLLASSSMKIGNLPHLKDVTTMIELFGSMGIDVALNDDMEVLINSSDIQNLNARYELVKTMRASILVLGPLLAKFNQANVALPGGCAIGSRPVNLHIEAMEKMGAEVSIEEGYIKAKSKKGLIGADIYLDPISVTATENIMMAASIAKGTTIIRNAAREPEVVDLANCLTQMGASIEGEGTDKIVINGVESLSGCDFKVMPD

SEQ ID NO: 123354 - protein, 165 aa, Unknown
  Bacterial polypetide isolated from the Sargasso Sea
MEKLLIKGGNSLSGTITCSGAKNAALPMIASTILCDEKVILKNLPYLQDITTMFELLGSMGADILLDENMNFTISSFALKDTEARYELVKTMRASILVLGPLIAKYGSARIALPGGCAIGSRPVNYHLDALKQMGAKIELRNGYIEASAKELLGTNIRFEGITVT

SEQ ID NO: 123355 - protein, 352 aa, Unknown
  Bacterial polypetide isolated from the Sargasso Sea
MDSLKIIGGAKLKGKIKISGAKNSALPLMACSLLISKGELKLDSMPNLADTRFMSILLSSLGMKSRIENNIAYISGEPKTYIAEYDIVRKMRASILVLGPLLAKYRIAKVSLPGGCSIGTRPVDLHINAFEKMGASILLKDGYIEAKAPNKGLYGADISFPKISVGATENVIMAASLANGRTRILNAAKEPEIIDLANCLKRMGASIKGAGSSEIIIDGVKELEGCNHKVIPDRIEAGSFAIAAAITKSSLELCNCEPKHLKSLSKKLINAGVNWESDKDIIKITSDGILKPVNVQTSEYPDFPTDLQAQFMTLMTVANGNSEIIENIFENRFMHVPELLRMGANISVNGGV

SEQ ID NO: 123356 - protein, 388 aa, Unknown
  Bacterial polypetide isolated from the Sargasso Sea
MTAALLVDGKTTINSVPDLRDTRTMIRLLEIIGAKVAFKNNSLSINASDVNNLEAPYDLVKTMRASFYVLGPLLARFGEVRVSLPGGCAWGPRPVDFHLKGLEKLGAKISLESGYILAKAKHLNGNKISFDFPSVGATGNILMASVLARGETHIENAAKEPEIVQLCEVLNQMGANIVGIGTDTLTIYGVDKLHSVDINVIPDRIEAGTYLIAGATMGGITLNNCNPKHLEDVINKLKLSGANISSNENSLSIEKIDSIESVDITTEVYPGFPTDLQAQWMAFMSIAKGKSTIIDTVYHDRFTHIPELNRLGANIQLKDNKAIVDGVNKLKGAQVMSTDIRASAALILGAIIAEGKTEISRVYHIDRGYDSIEKKFQSLGVDIVRINE

SEQ ID NO: 123357 - protein, 278 aa, Unknown
  Bacterial polypetide isolated from the Sargasso Sea
MEKGYIQCSAPKGLTGNKIELPKVSVGATENIIMAASLAKGETKIFNIALEPEVIDLINCLNTMGAKIELGDNRSVVIHGVTTLKGSNYSIIPDRIEAITYIFAGALAGDGLKIENLNIEHISNVLETLKTLPVDIIFDENTVIVNKSNISEGIEIQTKEYPGFPTDVQAQMMVLMSMAKTKSVIDENIFENRFMHVPELNRMGANIEINGKRAIINPCSGFRGAPVMATDLRASVSLILAGLAAEGETTLNRIYHLDRGYEQIEVKLEACGAEIKRV

SEQ ID NO: 123358 - protein, 407 aa, Unknown
  Bacterial polypetide isolated from the Sargasso Sea
MVCVSNNKSYLKSQHLKIIGQKTLRGKVKISGAKNSALVLLAASLLTDEKIILDNVPLLTDIEKMGNILKNLGVKLHNKDHQLIIDSKNISIQELPYELVNGLRASFFCIGALLTRFGEASIPLPGGCNIGERPINEHINGLRALGAEIIIDRDIVKAKLVKKKSKLFGANIRLNCPSVGATETLIMAASLAEGRTVIENAAREPEIQDLCQMLNKMGAKIYDSGKEKIIIDGVHKLHGCTHKVIPDRIEAGTFLIAAAATSSSITVSPVIPNHLEAVLNKLEESGSKIIIKGNSISIKGNNIKAVDIKTAPFPGFPTDLQAPFMALMTIAKGRSKITETIFENRMNHVDLLNQMGSSITLKDNIAHINGVKNLRGMTLVGLDLRSSAALIIAALTSKSVSYVYGLE

SEQ ID NO: 123359 - protein, 332 aa, Unknown
  Bacterial polypetide isolated from the Sargasso Sea
MDKLIIKGGSKISGSVNVHGSKNSALPIIVSSLLSKKTLKLSNVPNVVDVLNLIKLLKNYGVKIEHKKNKLKINPSKIKNLSADYDVVRKMRASILILGPLLSRFGEARISLPGGCAIGTRPIDIHLAGLSKLGANFEIQNGFVVGSVKSQLIGNKIKLPFPSVGATENILMASVLAKGETKISNAAREPEIEDLSKCLIKMGAKIEGHGTKTILVQGVTNLKKAEHEIIADRIVAGTYIIAALMLNSALEINNFNTIYLKSLIDILKKMGAKLKVSKNSIKVSKGSKLKSTSFSTSPYPGFPTDLQAQLMSLMCISDGKSKIKETIFENRF

SEQ ID NO: 123360 - protein, 420 aa, Unknown
  Bacterial polypetide isolated from the Sargasso Sea
MQQFLVSGGATLKGDVVISGAKNAALPILFATILAEQPSVLSNVPVLKDIDTTFKLLRIFGAEVSCEGHQVTVDATAIHSQMAPYELVKTMRASILALGPLLARFGHAEVSLPGGCAIGARPVNLHIDGLRKMGAEITVEAGYIKAKAARLHGAHIFMDMVSVTGTENLMMAAVLADGLTIIENAAREPEVVDLAKYLIAMGADIQGAGTDTIRITGKEKLHGAHHTVLPDRIETGTFLVAAAVTGGDVTCLNASPAELEVVLEKLREAGAEVSSGSDWIRLNMTGRTLKSVNVKTVPHPGFPTDMQAQFTVLNVVAEGVGMVTETIFENRFMHVPELQRMGADIQLEGNTALIKHTDKLMGAQVMATDLRASASLVIAGLVAEGETVVDRIYHIDRGYEQIEHKLKGLGANIQRINAPA

SEQ ID NO: 123361 - protein, 300 aa, Unknown
  Bacterial polypetide isolated from the Sargasso Sea
MEIKGGELLEGNIKISGAKNSALVLIAASILSKGQINLFNVPRISDVFILSKILTAMGMNIKSNSDQLGINTKKISPPSNDLFFDLFHALRGSFFCIGPLLARFGKAKIPLPGGCLIGSRPIDEHINSLKKLGVVFKFKNNYLSAEVITPNKKLIGSSINFKCKSVGATETLLMAASLAKGTTTLNNAAQEPEIIDLANMLNLMGAKVKGAGSECITIEGVESLKGCDYTVMSDRIEAGTFLIAAAITRSNISLYPCEPDHLKAVINKLELCGCKFEYSKHFLRIIPNKILSSVNMTTSP

SEQ ID NO: 123362 - protein, 418 aa, Unknown
  Bacterial polypetide isolated from the Sargasso Sea
MDKFKIDGRCTLNGEVTISGAKNAALPILFATLLCDEEIHLSNVPRLKDVGTTIKLLEMLGATTKVNGNVTVLTGAVNNHVAPYELVKTMRASILALGPLAARFGAADVSLPGGCAIGARPVNLHVHGLELMGAKIAIEDGYIKARVDGRLKGAHILMDMVSVTGTENLMMAATLADGRTVIENAAREPEVVDLANFLNALGAKIQGAGTDTLTIDGVERLHGGSYSVQPDRIETGTFLVGAAVTGGKITCRKTDPTLLEAVLVKLEEAGALIEKGEDWITLDMTGRTLKPVTIKTAPYPAFPTDMQAQFTVLNAVAKGTGMVTETIFENRFMHVPELVRMGADIELQGNVAICRDTQQLKGAQVMATDLRASASLVLAGFVAEGSTIVDRIYHIDRGYEDIEHKLQGLGGRIERIKG

SEQ ID NO: 123363 - protein, 360 aa, Unknown
  Bacterial polypetide isolated from the Sargasso Sea
MDKLIIDGGKPLAGLVRVSGAKNSVLPVLAATILAEGPVQLRNVPELRDVSTMAKLLEEMGAVTSSAEEYNVDASSLSSFRAPYELVKTMRASFLVLGPLLTKYGKAEVSLPGGCAIGARPVNLHIKGLEAMGAKIQVESGYVKARAPQGLKGAEIFLEIASVGATENLIMAAVLAEGKTVIHNAAQEPEITDLISFLMKMGAKISGAGTSVVEIEGVRSLRSISHSVIGDRVEAGTFLIAGAALGGEIEVQGFDPNHLTVVLEKLKMSGANLEISQDSVKLGMSLSRPEPVDIETGVYPGFPTDMQAQYMVLNCIASGKSVIQERIFENRFLHVQELSRLGAVIELRGNSTAVVTGVNK

SEQ ID NO: 123364 - protein, 419 aa, Unknown
  Bacterial polypetide isolated from the Sargasso Sea
MDKLMIRGGSPLNGEIYASGAKNSALPILAASLLADSPLKVGNLPHLNDVTTMLELLGSMGVDVMLSDEMEVQVDTSSIHNLNARYELVKTMRASILVLGPLLAKFGQATVALPGGCAIGSRPVNLHIEAMRAMGAEIDIEEGNIKAKVNGRLKGAKIIFEPVSVTGTENVIMAASLADGVTVIENAAREPEVVDLANCLTAMGANIQGAGTDIITIEGVEKLEGASFSVMPDRVEVGTYLTAVAMTGGKVKIKSAKPEYLSSVISKLELTGALISSGENWVEINMNEPKPKAISLTTGPYPSFPTDMQAQFVSLNAIANGNSTVTETVFENRFMHVQEIARMGGNIALKGNTAVIEGIKKLKGAPVMATDLRASASLVLAGLVAEGATTIDRIYHIDRGYERIEEKLKMLGADIERIS

SEQ ID NO: 123365 - protein, 421 aa, Unknown
  Bacterial polypetide isolated from the Sargasso Sea
MERLIIKGGNQLHGEVSCSGAKNSGLPILAATILLDTPAKIGNLPHLQDITTMLELLNSMGASINFDESGYIEIDASNIHLPEARYELVKTMRASILVMGPLVARYGKAKISQPGGCNIGTRPIDFHLDGLENMGAKIKSDSKYIYLEADKLNPIDFNFPKISVTGTENLMMAAALVKGKTVLRNCAKEPEVVELANFLNNCGASIVGAGESTIEITGSESLKSSKWDVLFDRIEAGTYMVAGAITNGHVKINQIQPETIQIISSKLVEMGAIVESGIDWVEVDATTTDLISKDLSTEPFPGFPTDMQAQFMALNTISNGHSIIEETVFENRFQHVDELKKMGADISLEKNKASVKGVSNLVGAVVSASDLRASASLVLAGLVGKNRTQIEDIYHIDRGYECIEEKLTKLGAEIFREPAEY

SEQ ID NO: 123366 - protein, 385 aa, Unknown
  Bacterial polypetide isolated from the Sargasso Sea
MDRLIIKGKAGLKGSIKIKGSKNSALPIMVSALLTKSSLKLKNLPKLDDIDNMSQLLKSYGASIKSKQDNLEIKCNNITNRDADYDIVRKMRASILILGPLLARFGKARISLPGGCAIGTRPIDIHLEGLKKLGANFRVENGYVLGAVEDELIGKHITLPFPSVGATENILMAASIAKGKTIIENAAREPEINDLAFALNKMGAKINVKKNGIIKIDGVNSLTQASHKIMSDRIVAGTFVIAAVMLNKKFEVKEIISSNLEALTSLLIKMGAKLKVKKTSIQIMPSKKLNGIKIQTAPYPGFPTDLQAQIMALMSLANGNSQIKENIFENRFMHVPELNRLGANIKVKKDIAFISGNRNLKGAQVMASDLRASVSLVLAALCAEE

SEQ ID NO: 123367 - protein, 420 aa, Unknown
  Bacterial polypetide isolated from the Sargasso Sea
MQKILINGGNLLQGSVPVSGSKNASLPIMAASILINENLELENVPDLVDVNTMSLVLSSLGVNVTKKDVKTNRLTLRYSDSESTIAEYDLVRKMRASILVLGPLLARKRHASVSLPGGCAIGARPVDLHIDALTKLGAAFELDGGYIKCSAPNGLKGNKINFSKVSVGATENIIMAASLARGESEIRNIAVEPEVMDLIDCLNKMGAKIELGENRNVHIQGVDQLQGAVHSIIPDRIEAITYIIGGTIIGNDLKITNLNLEHISNVLELLNELSINYSMGENSIIVNQSEISDGIDINTMEYPGFPTDVQAQMMVLLSLGKSKSQITENIFENRFMHVPELNRMGANIETKGKTAVINPCKGFISAQVMATDLRASVSLILAGLVAKGETTLNRIYHLDRGYEKIEKKLQACGADIRRIN

SEQ ID NO: 123368 - protein, 407 aa, Unknown
  Bacterial polypetide isolated from the Sargasso Sea
MDRLVIKGKADLKGSIKIKGSKNSALPIMVSALLSKNTLKLKNLPKLDDIKNMSKLLRSYGAIIKTSKDNLEIKCNNIINRDADYEIVRKMRASILILGPLLARFGKARISLPGGCAIGTRPIDIHLDGLKKLGANFVVENGYVFGQVSKQLHGNNIILPFPSVGATENILMAASIAKGKTIIENAAMEPEISDLAVTLNKMGAKIKIEKKGVIKINGVKSLTKASHKIMSDRIVAGTFIIAAVMLNKNFLVQEIESSHIEALTFALTKMGAKLKINKNSIKIMPSKNLKGIKIHTAPYPGFPTDLQAQIMALMSLANSNSQIKENIFENRFMHVPELNRLGAKIRVKKDIAHILGNRNFKGAQVMASDLRASVSLVLAALCAEGESIINRIYHLDRGYERIENTLG

SEQ ID NO: 123369 - protein, 389 aa, Unknown
  Bacterial polypetide isolated from the Sargasso Sea
MDKLIIQGESDLFGSIDIPGSKNASLPILVASLLSEKNLNLTNIPKLQDVKSMILLLRSFGVKINENNSKLTLNAKNLKNNIADYDLVRKMRASILVLGPLLARFKKAKISLPGGCSIGTRPIDIHLNSLNKLGINFEIVNGFISGLVKNELIGNIIDLPFPSVGATENIMMAAILAKGKTIINNAAKEPEIIDLGECLNSMGAKIIGHGTNTINIEGVNSLNDSSYDIMFDRIVAGTYVLAGVMINKKFTVKNIKSKYLESLIQTLIKMKANLMVNDNDITILPSKKIIGINIETAPYPGFPTDLQAQIMALMCMANGPSTIKEKIFENRFMHVSELNRLGANIKIKKDTAYVEGNKQFKGAQVMASDLRASVSKVLAGLCAKRGDYS

SEQ ID NO: 123370 - protein, 416 aa, Unknown
  Bacterial polypetide isolated from the Sargasso Sea
MEKLLIKGGKSLSGQIDCSGAKNAALPVIAASILSSDDITLKNLPYLQDITTMFELIGSMGADISLDEKMNFKLNTSNLSNLEARYELVKTMRASILVLGSMVAKYGYAKIALPGGCAIGSRPVNYHLKALEKLGAEISLNNGYIEAKAKKLTGANIEFEGVTVTGTENLMMAASLAEGLTTLTNVAKEPEISDLADFLNSMGAKISGAGTEEIRIEGVEELTGTTFKIPADRIEAGTYLVAAAVTNGKITINKIDPKRMGSIIETLQKAGAEVNSNGNSISLDMTKDAIKPVDIITAPFPGFPTDMQAQFTVLNCIGTGESSVTETIFENRFMHVQELNRMGTDITINGSTALINGVDSISGAQVMATDLRASASLILAGLIAKGETIVDRIYHIDRGYERIEEKLSNLGAEIMR

SEQ ID NO: 123371 - protein, 212 aa, Unknown
  Bacterial polypetide isolated from the Sargasso Sea
MEQVPKIILIEGVKSLKKTNYQILSDRIVAGTFIIAAVMINKNFKVKKINSHHLDSLIVALEKMGANLKVKKTSVEILPTEKLLGINIKTAPYPGFPTDLQAQIMALMCIVDGDSEIKETIFENRFMHVPELNRLGADIKVKKETAYIKGNRKFKGAQVMASDLRASVSLVLAALCANGKTVINRVYHLDRGYEKIEKTLGKLGPKIKREKI

SEQ ID NO: 123372 - protein, 282 aa, Unknown
  Bacterial polypetide isolated from the Sargasso Sea
MEKLLIKGGNKLSGIITCSGAKNAALPMIASTILSDEKVTLKNLPYLQDITTMFELLGSMGADILLDEDMNFTIQSNNLKDIEARYELVKTMRASILVLGPLLAKYGKARIALPGGCAIGSRPVNYHLDSLRQMGAEIVLKNGYIEASAENLQGASIRFDGVTVTGTENLMMAATLAKGTTTLLNVAREPEVADLANMLNSMGAKIDGAGSDEITIQGVKKLSGTSFQIPADRIEAGTYLAAAAVTKGDIKIEGINPNRLMNVIDKLIHTGAKVDYDENSIS

SEQ ID NO: 123373 - protein, 252 aa, Unknown
  Bacterial polypetide isolated from the Sargasso Sea
MDKFVVNGGNQISGTVDISGAKNAVLPLMTAALLVDGKTTINSVPDLRDTRTMIRLLEIIGANVAFKNNSLSIDASDVNNLEAPYDLVKTMRASFYVLGPLLARFGEVRVSLPGGCAWGPRPVDFHLKGLEQLGAKISLESGYILAKAEYLKGNKISFDFPSVGATGNILMASVLARGETQIENAAKEPEIVQLCEMLNQMGANIIGIGTDKITVNGVDKLHPVDIDVIPDRIEAGTYLIAGATMGDITLNN

SEQ ID NO: 123374 - protein, 263 aa, Unknown
  Bacterial polypetide isolated from the Sargasso Sea
MQRLIIKGNKRLSGIIKISGSKNATLPILASTILSDKKILISNIPMVKDVITMSQLLKYLGSDIKVNLKKKKILINNKKSLKTLAPYSFLKTMRAGVIVLGPLLSKFGEAKVSLPGGCAIGTRPVDIHLFGLKKLGAKIKIKNGYIQAEAKKGLIGTKIRLPKISVGATENLIIAACYANGTTFIKNCACEPEIKDLTNFLKKMGANIQWIKKREIRIIGCKKFKPVSHSVMFDRIEAGTFIIAGALIAKKLKIISIKTKIIK

SEQ ID NO: 123375 - protein, 419 aa, Unknown
  Bacterial polypetide isolated from the Sargasso Sea
MEKFSIKGPCRIRGEVEISGSKNSSLPILAATLLFNQPVILKNLPKVRDINTMINLLRSLGSKITLSKDKRVARIHNKKKLKTFASYSLVKTMRGSILVLGPLIARQYKSKISLPGGCLIGARPINYHLDSLKKLGMNYVLKDGYILAKSNGKLKGSTIKFPKLSVGATENSIIAACLAKGTTILKNCAIEPEIKDLTKFLNSAGAKISWIGRTCKIVGVKTLNPTEYSVMADRIEAGTFCVAATLAKGNLKISNFDAKIIKTELKLLKKFGAKIKSHKEKIFIKGPEKIRSIKNIKTKEYPGVATDLQSQLMVLMCKASGKSSITENIFENRFMHVAELRRLGAKINVKNNKAYIYGNTKFIGAELMSSDLRASVSLVLAAMVSKGKSIINRIYHLDRGYENIEHKLKKIGVKIKRLK

SEQ ID NO: 123376 - protein, 396 aa, Unknown
  Bacterial polypetide isolated from the Sargasso Sea
AALPVIAASILSSEDITLKNLPYLQDITTMFELIGSMGADISLDEKMNFKLNTSNLSNLEARYELVKTMRASILVLGSMVAKYGYAKIALPGGCAIGSRPVNYHLNALEKLGAEISLNNGYIEAKAKKLIGASIEFEGVTVTGTENLMMAASLADGLTVLTNVAKEPEISDLADFLNSMGAKISGAGTDEIRIEGVEELTGTTFKIPADRIEAGTYLVAAAITNGKITIKKIDSARMGSIIETLQKAGAEVCLDENSISLDMTKNTIKPVDIVTAPFPGFPTDMQAQFTVLNCIGHGESSVKETIFENRFMHVQELNRMGTDITINGTSALINGVDSISGAQVMATDLRASASLILAGLIAKGETIVDRIYHIDRGYERIEEKLSNLGAEIIRLPN

SEQ ID NO: 123377 - protein, 420 aa, Unknown
  Bacterial polypetide isolated from the Sargasso Sea
MDKFLIKGPCKIKGQVSISGSKNSALPILASTILFDEAVTIGNLPRVKDIDTMINLLKSLGSKVQYFNNKKSIKITKSKKQKIFASYSLVKTMRAGILVLGPLIAKYQKSITSLPGGCLIGARPVNYHLNALKKLGMKYKIKKGYIHAFSKGKLKGTNYKFSNISVGATENAIIASCLAKGKTILKNCAIEPEIKDLTNFLKSAGAKISWIGKRTIKIEGVKSLNSIKYSVMGDRIEAGTFCVATALTAGKLLIKNFDSTLIQTEINFLKKIGSKIKTNKKEINIKGPNKIKSIKNIITKEYPNFPTDLQAQFMVLLCKANGRSIITENIFENRFMHVAELKRLGAKIVIKGNKAIIEGNTEFLGAELMSSDLRASVALVLAAMVAKGQSVINRIYHLDRGYERIENKLRKLGVNIKRFS

SEQ ID NO: 123378 - protein, 419 aa, Unknown
  Bacterial polypetide isolated from the Sargasso Sea
MEKLLIKGGKSLSGEIDCSGGKNAALPIIAASILSSNNITLKNLPYLQDITTMFELIGSMGADISLDERINFRLNTSNLSNLEARYELVKTMRASILVLGSMVAKYGYAKIALPGGCAIGSRPVNYHLKALEKLGAEISLNNGYIEAKAKKLIGADIEFDGVTVTGTANIMMAASLAEGVTTLTNVAKEPEISDLADFLNSMGARISGAGTDEIRVEGVEELTGTTFKIPADRIEAGTYLVAAAITNGKITIKKIDPTRMGSIIETLQKAGADVNFNENSISLDMTKNAIKPVDIVTAPFPGFPTDMQAQFTVLNCIGPGESSVKETIFENRFMHIQELNRMGTDITINGTTALINGVDSISGAQVMATDLRASASLILAGLIAKGETIVDRIYHIDRGYERIEEKLSNLGAEIIRLPN

SEQ ID NO: 123379 - protein, 145 aa, Unknown
  Bacterial polypetide isolated from the Sargasso Sea
SFDDNSISISMNKDRPDPVDITTAPFPEFPTDMQAQFSVINAISSGVSNIYETVFENRFMHILELNRMGCDIEVKGNHAIINGVESIYGAEVMATDLRASASLIIAGLCAKGETVVDRIYHIDRGYERIEEKLNYLGANIVRLPS

SEQ ID NO: 123380 - protein, 188 aa, Unknown
  Bacterial polypetide isolated from the Sargasso Sea
PDRVEVGTYLTAVAMTGGLVKIKSAKPEYLSSVILKLEGCGATINQGQDWVEIKMDASRPQATSLTTGPYPSFPTDMQAQFVSLNSIAKGNSTVTETVFENRFMHVQEIARMGGNITLKGNTAVIEGINKLKGAPVMATDLRASASLVLAGLVAKGDTTIDRIYHIDRGYERIEEKLKILGADIERIS

SEQ ID NO: 123381 - protein, 355 aa, Unknown
  Bacterial polypetide isolated from the Sargasso Sea
LAQGTYLLKEVPDITDVQSMAELLRSMGLTVRNLENNQIEIMNPGDITPEAPYEQIEKMRASIVVLGPLVSTYGKARVALPGGDDFGPRPIDMHLKGLEALGVRFSSEHGYIEAEAERLIGTRVVLDFPSVGATENIMMAAVRAEGETIIENAAREPEIADLAAFLNRMGAKVLGAGSSTVTIQGVDNLVAVEHTVIPDRIEVATYLSAVGIAGGEINLLGARADHMDMLCQKLGEMGMRISSDSTGLWAMASKGLQSVDLATLPYPGLATDYKPFLVAMLSVADGVGIVTENLFSGRFRYVDELIRMGAEIRTEGHHAVIRGVPKLSGAPVRAHDIRAGAALVTAALKADGETE

SEQ ID NO: 123382 - protein, 400 aa, Unknown
  Bacterial polypetide isolated from the Sargasso Sea
MDKFQIKGPCKIKGEVEISGAKNSALILLAATLLFDKPVTLNNLPRVRDIDTMLNLLRSLGSKIILSKDKKIVKIQNKKKMKTLAKYSLVKTMRASILVLGPLISKFHKSITSYPGGCNIGSRPVNYHLSALKKLGMKYEIKQGYIHAKSNGRLNGAKINFPRISVGSTENTILAASLASGKTILKNCAIEPEIKDLTNFLNAAGAKIKWSGRTCSIIGVKSLKEINYSVMGDRIEAGTFCIAATLAEGDLQIKNFNPKNIATELKLLKKAGAKFKTYENKIFIKGPKKIKPIKNIKTKEWPGVATDMQSQLMVLMCKANGQSSITENIFENRFLHVGELQRLGAKIKIKNSTASIEGNTKFIGAELMSSDLRASVALVLAGMVSKGKSVINRIYHLDRG

SEQ ID NO: 123383 - protein, 355 aa, Unknown
  Bacterial polypetide isolated from the Sargasso Sea
MDSLIINGGKKLIGDIPISGSKNACLPMMIASLMTDEKMILNNIPMLSDVKTLISILKSLGTNAVHIKNSLNLHTKEIINHKASYDLVKKMRASFWVLAPLLAKSGYAEVSLPGGCAIGTRPIDLYLKILKEMNINYTINNGYIVAKREGPIKGLNFKLEKKSVGCTHFFLMLACLANGTSKLSNASCEPEVIHLGLLLNKMGAKIKGLGSKKIIIEGVKKLNGVNEIIPSDRIETGTFAIAVSATGGKVKLENTNYEENKLLFNILEKTGSIINKSKNSISIEKNHNKIYAANIKTSPYPGFPTDLQAQIMALMTISNGKSEIKENIFENRFMHVQELVRMGANIKLDKDRAII

SEQ ID NO: 123384 - protein, 419 aa, Unknown
  Bacterial polypetide isolated from the Sargasso Sea
MEKLLIKGGKSLSGQIDCSGAKNAALPVIAASILSSDDITLKNLPYLQDITTMFELIGSMGADISLDEKMNFKLNTSNLTNLEARYELVKTMRASILVLGSMVAKYGYAKIALPGGCAIGSRPVNYHLKALEKLGAEISLNNGYIEAKAKKLTGANIEFEGVTVTGTENLMMAASLAEGLTTLTNVAKEPEISDLADFLNSMGAKISGAGTDEIRIEGVEELTGTTFKIPADRIEAGTYLVAAAVTNGKITINKIDPKRMGSIIETLQKAGAEVDSNGNSISLDMTKDAIKPVDIVTAPFPGFPTDMQAQFTVLNCIGPGESSVTETIFENRFMHVQELNRMGSDITINGTTALINGVDSISGAQVMATDLRASASLILAGLIAKGETIVDRIYHIDRGYERIEEKLSNLGAEIIRLPN

SEQ ID NO: 123385 - protein, 194 aa, Unknown
  Bacterial polypetide isolated from the Sargasso Sea
MEKLLIKGGSSLSGKISCSGAKNAALPIIASTILSNDKVVLKNLPYLQDITTMFELLGSMGAEILLDENMDFTISSFNLNDIQARYELVKTMRASILVLGPLVAKYGKARIALPGGCAIGSRPVNYHLDALKQLGAEIKLKNGYIEASAKKLIGSNIRFDGITVTGTENIIMAATLAQGETILTNVAKEPEIID

SEQ ID NO: 123386 - protein, 315 aa, Unknown
  Bacterial polypetide isolated from the Sargasso Sea
MDKLIIQGGNPLEGEVSISGAKNSALPILSATLLTDKPVTISNVPHLHDITTTIELLGRMGSKITVSEHMHIEIDNSEINNFFAPYELVKTMRASILVLGPLLARYGKADVSLPGGCAIGSRPVNIHIQGLIAMGAEITTDTGYIRAKTSNRLKGVHLTLDLVTVTGTENLMMAATLAEGKTIIENAAREPEVKDLANCLNKMGAKIEGAGTDRIEIEGVESLNGAEHEILPDRIETGTYLVAAAMTRGKMRLRNTKSVLLESVLTKLMEAGASIELEENAISIDMDGKKPKAVDVHTSPFPGFSTDMQAQFTAM

SEQ ID NO: 123387 - protein, 240 aa, Unknown
  Bacterial polypetide isolated from the Sargasso Sea
MEKLLIKGGKSLLGEIDCSGAKNAALPVIAASILSSDDITLKNLPYLQDITTMFELIGSMGADISLDEKMNFKLNTSNLSNLEARYELVKTMRASILVLGSMVAKYGYAKIALPGGCAIGSRPVNYHLNALEKLGAEISLNNGYIEAKAKKLIGASIEFEGVTVTGTENLMMAASLADGLTVLTNVAKEPEISDLADFLNSMGAKISGAGTDEIRMKAWKNEWEQLLKFLQIELRQVHIL

SEQ ID NO: 123388 - protein, 309 aa, Unknown
  Bacterial polypetide isolated from the Sargasso Sea
VNVSLPGGCAWGPRPVDYHLKGLEQLGAELNLDGGNILAEAKELIGNDIHFEFPSVGATGNLAMAAVRASGTTRLYNCAKEPEITQLCNFLNSMGAKIEGIGTETLIIHGVGELHSADIEIIPDRIEAGTFLMAGALLGEIEVKNIIPKHLDKVVHKLREIGCILKINQNSIIITPPEKLKSVDMTTAVYPGFPTDLQAQWVAIMSLADGSSVVTDTVYHDRFSHIPELSRLGANIKVENNTAFIRGKNTLVGAPVMSTDIRASASLIIAALAAKGETQISRVYHIDRGYENIEQKFESLGGDIRRISK

SEQ ID NO: 123389 - protein, 260 aa, Unknown
  Bacterial polypetide isolated from the Sargasso Sea
MQKLEVFGAKKLKGQIKISGSKNASLPILAATLLSRKKIHLKNLPKVKDIQTMLSLLKSLGSKIKVKKNETIIDNTKQRKKFASYNLVKTMRAGILVLGPLLAKFGSAKVSLPGGCAIGTRPIDIHLKALSKLGVKYKIDQGYVIANATKGLRGNNIRFSKISVGATENLIIASSFAKGTTILSNCATEPEIKDLVNFLNQMGCKIKWTSKRTIKIIGVSQVIKTSYSIMFDRIEAGTYLLAGAVTEGNLKIQNIIPKYY

SEQ ID NO: 123390 - protein, 411 aa, Unknown
  Bacterial polypetide isolated from the Sargasso Sea
MDKLIINRTLPIDGEVSISGAKNAVLPMICASVMVSKKSVKIKNVPHLHDVTTTLRLLTQMGVTTTMDEQMSISLDASTINNSFAPYDLVKTMRASILVLGPLLAKYGEAKVSLPGGCAIGTRPVSLHIEALEKMGAVIEIENGYISAKCNKLQGTCIEFPKTTVTGTENILMASTLARGKTLIKNAAMEPEVIDLANFLIKMGAKISGHGTSTIEIDGVENLEGVSYSALPDRIETGTFLVAAAITGGKIIVKQAISSHLEAVLKKLQQSGAEIHFTESEIHLDMKGKRPKAIDIDTGPYPQFPTDMQAQLTALNAIADGTSIIRENIFENRFMHVQEMTRMGADIKLDQNRAIVVGKEELVGAQVMATDLRASASLILAGLVAKGKTEIERIYHIDRGYDCIERKTSTA

SEQ ID NO: 123391 - protein, 119 aa, Unknown
  Bacterial polypetide isolated from the Sargasso Sea
PYFPTDMQAQMTALNAVAKGDSFVRENIFENRFMHVQELERMGASIKVNDNTAKISGTKKLLAAPVMATDLRASASLILAGLAAEGTTEIARVYHIDRGYDCIEEKLQLIGARISRKPM

SEQ ID NO: 123392 - protein, 419 aa, Unknown
  Bacterial polypetide isolated from the Sargasso Sea
MEKLLIKGGNNLSGKIKCSGAKNAALPMIAATILSDEKIILKNLPYLQDITTIFELLGSMGAEILLDENMNFTISSSNLKDIEARYELVKTMRASILVLGPLLAKYGKAKIALPGGCAIGTRPVNFHLDALKQLGAEINLKNGYIEASAKKLQGNKIKFDGVTVTGTENLMMAATLAEGRTILTNVAKEPEIIDLAEMLNSMGAKISGAGSDEIIIDGVESLHRTEYVIPADRIEAGTYLAAAAVTNGNITVEGINPKRLMKVIYKLNDAGAQISHDENSISISMKKDRPRPVDVTTAPFPEFPTDMQAQFSVINAISNGTSNIYETVFENRFMHILELNRMGCDITVQGNHAVINGVPSLYGAEVMATDLRASASLILAGLCAKGETIVDRIYHIDRGYERIEEKLNYLGADITRLPS

SEQ ID NO: 123393 - protein, 418 aa, Unknown
  Bacterial polypetide isolated from the Sargasso Sea
MIVEKHIVIEGNHQLKGELEVKGAKNAVLKQMVLPILAEGDYTLTNVPNITDVSYMQEVLDVLGLKTELTDNKLNIHSPQNIGIEAPYELVQKMRASIIILGPLLARKGEAKIAFPGGDELGPRPVQMHLDALEKMGAHFTLDHGVLTGRSDGLKGVEINLPYASVGATENTLLAAVLAEGKTVIENAAREPEVVDLVEMLKKMGAEITGAGTSEITIEGVKKLNPTNHEVVGDRIAAGTFLSAFLATHGSGIVRGINPENLPMEIKKFKEIGAEIKVEDNSIEISYDGNLNAVELSTLPFPGVATDLQPVFGALLLKASGTSIITENVYDQRFQWIPEVQRMGASVQTGWQHAMIKGVNSLSGAPVNSTDIRTGASLVIAALQADGSSKITGIEHINRGYEDIVASLNSLGSKIEYN

SEQ ID NO: 123394 - protein, 352 aa, Unknown
  Bacterial polypetide isolated from the Sargasso Sea
MFDKSILSIDASKITSLEAPYDLVKTMRASFYVMGPLLARFGETKVSLPGGCAWGPRPVDYHLKGFERLGAKIELNQGYILARSSQLTGGNISFEIASVGATANILMAAVLAKGQTLITNAAIEPHIVQLCEVLIDMGADIDGVGTNKLTINGVQKLHPVEVTVIPDMIEAGTFLMAGATLGDIQLQSVDPEHLTIVLEKLQLAGCDISLETDSILIKRNNRIKPVDITTDVHPGFPTDLQAQWIALMSIADGASVVTESIYLDRFSHVPELIRLGADISLENNVAIIRGQKELIGAQVMSTDIRASASLVIAALMAKGRSDISRIYHIDRGYEKIEEKFKLLGADIHREKE

SEQ ID NO: 123395 - protein, 395 aa, Unknown
  Bacterial polypetide isolated from the Sargasso Sea
MQKLKVKGKNILSGEIKVSGSKNATLPIIAASILSEKKIDLKRVPIVKDVVTMCHLLKYMGSNIKINYKKKNISINNKNKNFKNVAPYSFVKTMRAGVIVLGSLLARFGKAKVSLPGGCAIGTRPVDIHLFGLKKLGAKIKIKNGYIFAEAKKGLIGTQIKFPSISVGATENIIIAASLAKGTTHLRNCACEPEIKNLTDFLNKMGANITWLGKREIKIIGCKKLKKVNHQIMFDRIEAGTFIIAGALIGKKLKILGIQTNLLNTEIKILRKMGVKMQINKDHINILHSPKIKPVKIKTEPYPGFPTDLQAQIMVLMSKAKGKSQIKENIFENRFMHVPELNRMGAKIYTSGNLSYIEGPQNLNGAEVMATDLRASVSLVLAGLIANNQTIINRV

SEQ ID NO: 123396 - protein, 288 aa, Unknown
  Bacterial polypetide isolated from the Sargasso Sea
MDKLIIHGGVSLEGEVSISGAKNSALPILSATLLTDQPVVIGNVPHLHDITTTIELLGRMGSRITVNECMNIEIDNAEINNFFAPYELVKTMRASILVLGPLLARYGKADVSLPGGCAIGSRPVNIHLQGLIAMGAEITTDSGYIRAVTKERLKGVQLTLDMVTVTGTENLMMAATLADGLTIIENAAREPEVKDLAICLNKMGAKISGAGTDRIEIEGVETLHGTEHKILPDRIETGTYLVAAVMTGGKMRLRNTRSVLLESVLSKLSEAGATIDTEENAISIDMRG

SEQ ID NO: 123397 - protein, 122 aa, Unknown
  Bacterial polypetide isolated from the Sargasso Sea
MDQFVIQGGTSLAGEVTISGAKNAALPILFASLLADGKSTFTNVPRLRDIVTTEALLKTLGADVNWQSDTLVIDGATVDKTLAPYDLVKQMRASVLALGPLVARFGEAQVSLPGGCAIGARP

SEQ ID NO: 123398 - protein, 316 aa, Unknown
  Bacterial polypetide isolated from the Sargasso Sea
MDKLIIKGNAKISGSVNVHGSKNAALPIIVSSLLSEKIVKLSNVPNVVDVLNLIKLLKNYGVKIEYKKDKLKINPKKIKNLSADYDVVRKMRASILILGPLLSRFGEARISLPGGCAIGTRPIDIHLAGLSKLGANFEIQNGFVVGSVKSQLIGNKIKLPFPSVGATENILMASVLAKGETKILNAAREPEIEDLSNCLIKMGAKIEGQGTKTILVQGVTNLNKVDHKIISDRIVAGTYIIAALMLNSDLEINNFNTIYLKSLIDILKKMGAKLKVSKNSIKVFKGSKLKSNSLSTSPYPGFPTDLQAQLMSLMCI

SEQ ID NO: 123399 - protein, 420 aa, Unknown
  Bacterial polypetide isolated from the Sargasso Sea
MDKFKINGPSKIRGEVSISGSKNAALPILAATLLFDKNVTIKNLPRVKDIDTMLKLLKSLGRKISFKNNKKIATISKGKKNNFFAPYSLVKTMRAGILVLGPLLAKNKKAKVSSPGGCSIGVRPIDIHLKAISKLGVKTQIEKGYVNAKAEGGLVGSEIRFSKISVGATENLILAACLAKGTTTIKNCAIEPEIKDLTNFLKTAGAKIKWIGKRTLKIEGVKTLKSITYSIMNDRIEAGTFCVAACLNSGNLKIKNFEPKVINTEIKLLKKIGANIKTTKNTIQIKGPKKIKSLDFLKTGEYPNFPTDLQAQIMVLLTRANGKSTIEENIFENRFMHVPELKRLGAKINIKGNRAIIEGTNNLEGAELMSSDLRASVALVLAAFISRGTSIINRVYHLDRGYEKIENKLKKIGVKIKRIS

SEQ ID NO: 123400 - protein, 248 aa, Unknown
  Bacterial polypetide isolated from the Sargasso Sea
MQKIVINGGQPLRGVIPVSGSKNAALPIMAASILTNEKLELSNVPDLVDVKTMSLVLSSLGVNVAKSESNKNSITLQYSDTEKTIAEYDLVRKMRASILVLGPLLARKREASVSLPGGCAIGARPIDIHIDALTKLGATFELEKGYIQCSAPKGLTGNKIKLPKVSVGATENIVMAATLASGETEISNIALEPEVIDLINCLNTMGAKIELGDNRSVVIPGVKTLNGSNYSIIPDRIEAVTYIIAGAL

SEQ ID NO: 123401 - protein, 126 aa, Unknown
  Bacterial polypetide isolated from the Sargasso Sea
VRIARHRAFPTDMQAQFTLLNLVAEGTGFITETVFENRFMHVPELSRMGAHAEIESNTVICHGVETLSGAQVMATDLRASASLVLAGCIAEGTTVVDRIYHIDRGYERIEDKLRALGANIERVKGE

SEQ ID NO: 123402 - protein, 200 aa, Unknown
  Bacterial polypetide isolated from the Sargasso Sea
MEKLIIVGQRKLKGSVRISGAKNAVLPILVSSLLTKQKLVIGNVPHLQDVTTTISLLSEMGAESTINDKMEVEICTKSVNKFIAPYEMVKTMRASILVLGPLLANYGEAKVSLPGGCAIGSRPVNLHIDGLKAMGAKIEVENGYISASSKRLKGAEINLPIPSVTGTENLMMAATLAKGKTIINNSAKEPEVVDLASCLR

SEQ ID NO: 123403 - protein, 310 aa, Unknown
  Bacterial polypetide isolated from the Sargasso Sea
MKKLEIKGGYPLNGSVKISGSKNAALPMMTASILSDDDITLNGIPDLADVKTLITLLDSMGIKAKKNHKGSFTFNASEIKSKFASYELVKTMRASIMVLGPLLAKHGEAKVSLPGGCAIGSRPVDLHIEGLEKLGATIEIKNGYILASAERLVGSTYFFPKKSVTGTANIMMAATLAEGETKIGNAACEPEIIQLGELLNSMGAKIKGLGEDFIYVEGVENLGGAEIQIIPDRIEAITMIIAGIITQGELKIENINPLHIQKPIDLIRRCGAKFEIFEDSLFLKGSNSILPISFETNPYPGIPTDIQAQL

SEQ ID NO: 123404 - protein, 359 aa, Unknown
  Bacterial polypetide isolated from the Sargasso Sea
MQKLIIKGKKNLSGTISISGSKNATLPILAATILAGNTTLTNVPLVKDIFTMLELLKFIGIKIKINKLRRSINLTSKKINIKTLAPYKLVKTMRAGVLVLGPLLTKYKKAKVSLPGGCAIGTRPVDLHLFALKKLGAKIKIKDGYIIAEAKKGLKGTRIKFPNISVGATENALLAAYGASGKTVLSNCAIEPEILDLISFLKKLGCKINIQGRKIVIESKKIKKEKVNHSIIFDRIEAGTYLVAGVLIGKKIIIKEIKPKILECEINILKKMGAKITLSKNSVSIFKSNKLNKINISTKPYPGFPTDLQAQLMVLMTQAKGISQIKENIFENRFMHVPELKRMGAKIEIKNKIAFICGP

SEQ ID NO: 123405 - protein, 247 aa, Unknown
  Bacterial polypetide isolated from the Sargasso Sea
MQKLEVFGANKLKGEIKISGSKNASLPILAATLLSNKKTYLKNLPKVKDIQTMLTLLESLGSKVKFKKNETIIDNTKQKKKIASYSLVKTMRAGILVLGPLLAKFGSAKVSLPGGCAIGTRPVDIHLKALSKLGVKYKINQGYVIANVPKGLKGNNIRFSKISVGATENLIIASSFAKGITTLSNCAIEPEIKDLVNFLNQMGCKIRWTSKRTIQIIGVNEVIKTSYSIMFDRIEAGTYFVAGAITE

SEQ ID NO: 123406 - protein, 419 aa, Unknown
  Bacterial polypetide isolated from the Sargasso Sea
MEKLLIKGGNQLSGKITCSGAKNAALPMIASTILSDEKVTLKNLPYLQDITTMFELLGSMGADILLDEDMNFTIQSNNLKDIEARYELVKTMRASILVLGPLLAKYGKARIALPGGCAIGSRPVNYHLDSLRQMGAEIVLKNGYIEASAKNLKGANIRFDGVTVTGTENLMMAATLAEGKTTLLNVAKEPEIADLADMLNSMGAKIDGAGSDKITIQGVEKLSGTSFEIPADRIEAGTYLAAAAVTKGDIKIEGINPNRLMKVIDKLINTGAKVDCDEDSISFSMSNDIPDPVDITTAPFPEFPTDMQAQFSVINAISSGTANIYETIFENRFMHILELNRMGCDISVNGNHAIIKGVKSLYGAEVMATDLRASASLILAGLCAKGETVVDRIYHIDRGYERIEEKLNYLGANILRLPS

SEQ ID NO: 123407 - protein, 421 aa, Unknown
  Bacterial polypetide isolated from the Sargasso Sea
MERLIIRGGNQLHGEVNCSGAKNSGLPILASTILLDTPAKIGNLPHLQDITTMLELLNSMGASINFDEYGYIEIDSSNISVPEARYELVKTMRASILVMGPLVAKYGKAKISQPGGCDIGTRPIDFHLDGLEKMGAKINSDAKYIYLEADKLNPIDFSFPKISVTGTENLMMAAAIIEGKTILRNCAKEPEVVELANFLNNCGANIVGAGESLIEINGIKSLKSDKWDVLFDRIEAGTYMVAGAITNGHVKINKIKPETIKIISSKLIEMGAIVNSGDDWVEVDATKTELISKDISTKPFPGFPTDMQAQFMALNSISNGSSTIEETVFENRFQHVDELKKMGADISLDKNKALVNGVSNLVGAVVSASDLRASASLVLAGLVGKNRTQIEDIYHIDRGYECIEEKLTKLGAEIFREPAEY

SEQ ID NO: 123408 - protein, 187 aa, Unknown
  Bacterial polypetide isolated from the Sargasso Sea
MDKLFIRGGSPLNGEIYASGAKNSALPILAASLLADSPLRVGNLPHLNDVTTMLELLGSMGVDVMLTDEMEVQVDTSNIQNLNARYELVKTMRASILVLGPLLARFQQASVALPGGCAIGSRPVNLHIDAMRAMGAEVSIVDGNIKAKVDGRLKGAKIIFEPVSVTGTENVIMAASLAESITTIENA

SEQ ID NO: 123409 - protein, 319 aa, Unknown
  Bacterial polypetide isolated from the Sargasso Sea
MESLVIRGGRALRGEVRIGGAKNAALPVLISALLTDQNLRVANVPHLRDITTTLELLGRLGARIEVDEKSIITVNAGSLTSRRAPYELVKTMRASILVLGPLLARFGEAEVSLPGGCAIGSRPVDLHVRALEQMGATIAVEGGYIKASTSGGRLHGAKIVFDTVTVTGTENLMMAASLAQGTTVLENAAREPEVIDLANCLVAMGARITGAGSDVIEIEGVPSLSGASHRVIPDRIEAGTFLVAGAVTQGEMHLHDVNPSHLDAVTARLRDAGAEISMTETGVSLTMRDRPRAVSISTAPYPGFPTDMQAQFLLMNCVA

SEQ ID NO: 123410 - protein, 262 aa, Unknown
  Bacterial polypetide isolated from the Sargasso Sea
IKLPKISVGATENLIIAASYANGTTIIKNCACEPEILDLTNFLKKMGVNIKWISNREIKIIGGKKFKPASHSVMFDRIEAGTFVIAGALIGKKLKIVSLETKIIKKELKILRKMGVKLKINKNEIVILNSKNIRPVKIKTEPYPGFPTDLQAQIMVLMTRANGTSKIKENIFENRFMHVPELNRMGAKIKVSGNLSKIDGINSLYGAEVMATDLRASVSLVLAGLIAKNRTIINRVYHLDRGYENLENKLRKCGANISRTNY

SEQ ID NO: 123411 - protein, 354 aa, Unknown
  Bacterial polypetide isolated from the Sargasso Sea
INKSHKDSLKFNASGVDSRFASYELVKTMRASIMVLGPLLAKYGEAKVSLPGGCAIGARPVDLHIQGLEKLGARIEIRDGYILASANRLIGSSYCFPKKSVTGTANILMAATLAEGQTEIVNAACEPEIVQLGELLNAMGAKIDGVGGDCINIEGVENLVSAEIEIIPDRIEAITMIIAGIITQGELKIENIDPSHIEGPIDLIRQCGAKLEISERSLFVKGPDQILPISFETEAYPGIPTDIQAQLMVLNSIANGDSKITETIFENRFMHVLELKRMGANISIDGSTAKISGVSRLNSAPVMATDLRASAALILAGLIAKGETVIDRIYHLDRGYQSLEKKLSNIGAKVRRID

SEQ ID NO: 123412 - protein, 187 aa, Unknown
  Bacterial polypetide isolated from the Sargasso Sea
MEKLLIKGGKSLSGKISCSGAKNAALPMIAATILCDDKVVLKNLPYLQDITTMFELLGSMGSEILLDENMDFTISSANLKDIEARYELVKTMRASILVLGPLLSKYGKARIALPGGCAIGSRPVNFHLDALKQMGASITLRNGYIEANASQLNGANIKFEGVTVTGTENLMMAATLAKGQTILNNVA

SEQ ID NO: 123413 - protein, 456 aa, Unknown
  Bacterial polypetide isolated from the Sargasso Sea
MICGSKTKSYLKSQNLKILGQGKLNGIVEISGAKNSALVLLASSLLTNEKIILENVPFLTDIEKMGNILKNLGVNLVRKNNQLEIDPTTISIKELPYELVKGLRASFFCIGALLTKFGEAQVPLPGGCNIGSRPIDEHINGLIALGADIIIEEGIVKAKTRGNKNRLHGTHIKLNCPSVGATETLIMAASLAKGRTTIENAAREPEVQDLCQMLNKMGAKIYDSGKETIIIDGVNKLGGCTHKVIPDRIEAGTFLIAAAATSSSITISPVIPHHLEAVTNKLQESGSKITIKGNSISIKSKEIKGVDIETAPFPGFPTDLQAPFTTLMTIANGESKITETIFENRMNHIYLLNEMGASIKLNKNVAYIKGVKTINGMNLVGSDLRSSAALIIAGIIAKGSSNFYGLEHLDRGYENFELKLKKLGVKITREISKNNFEENGYKIEHGSENLSKLEAA

SEQ ID NO: 123414 - protein, 314 aa, Unknown
  Bacterial polypetide isolated from the Sargasso Sea
HGFARIALPGGCAIGTRPVDFHLNALEKLGAKIELKNGYIEATAKKLVGCDINFPGVSVTGTENIMMAAVLAKGQTTLRNVAKEPEVEDLANFLNSMGAKIKGAGSDEIIIDGVDNLNGTKFSIPADRIEAGTYLIAAAITGGDVTISNVQAQRMNNILDKLKLSGAVINIGNDSIQLSMNKDSILPVDISTAPFPGFPTDMQAQFTVLNALSKGSSVVTENVFENRFMHVQELNRMGCDITVKGSNAFVKGVDSLNGAPVMATDLRASASLILAGLCAKGETVVDRIYHIDRGYERIEEKLSYLGADITRLPN

SEQ ID NO: 123415 - protein, 362 aa, Unknown
  Bacterial polypetide isolated from the Sargasso Sea
MDKLLIKGRMPLNGEIYASGAKNSALPILASSLLSDSPLVVGNLPHLNDVTTMLELLGSMGVDVMLSDDMEVRVDSSSIKNLDARYELVKTMRASILVLGPLLARYQEATVALPGGCAIGSRPVNLHIEAMNAMGAEINIEDGYIKASVDGRLKGNKILFDPVSVTATENVIMAASLAEGVTTIQNAAKEPEVVDLANCLISMGANIKGAGSDTIVVEGVDSLKGTTFSVMPDRVEVGTYLTATAMTGGNVKVKSAKPEYLSSVISKLESTGAQIQTGKDWVEISMERERPISTSLTTGPYPSFPTDMQAQFVALNAIAQGNSTVTETVFENRFMHVQEIARMGGDITLKGNTAVISGIDNL

SEQ ID NO: 123416 - protein, 422 aa, Unknown
  Bacterial polypetide isolated from the Sargasso Sea
MIVEKHISIEGNHKLSGQINVKGAKNAVLKEMILPILAEGKYLLKNVPLIDDVEYMQDVLKVLGINSNFKNNSLEIVSPSTIGVEAPYEIVQKMRASIIILGPLLARCGEARIAFPGGDQLGPRPVQMHLDALEKMGANFELDHGVLIGKTDGLNGVEINLPYASVGATENTLLAAVLAKGRTVIENAAREPEIVDIVNMLIKMGANISGAGTSEIIVEGVDKLNPADHEIIGDRIAAGTFLAAILSTKGSGRVNGINPEHLPMELKKLAEMGAKIDSTETSINIEYRDNLQSIELSTLPFPGIATDLQPIFGSALLLAEGTSILTENVYDQRFQWIPEVQRMGANIQTGWQHAMIKGVESLSGAPVHATDIRTGASLIIAALQADGFFTISGIDHISRGYEDIVTSLSSLGGTSNIMIIMD

SEQ ID NO: 123417 - protein, 419 aa, Unknown
  Bacterial polypetide isolated from the Sargasso Sea
MDSLIINGGKTLIGNIPISGSKNACLPMMIASLMTDEKMTLNNIPMLSDVKTLISILKSLGTNIEYKKDNLHLHTKEIINHKASYDLVKKMRASFWVLAPLLAKKGYAEVSLPGGCAIGTRPIDIYLEMLKEMNIKYSINNGYIVAKAESPIRGVNFKLEKKSVGCTHFFLMLACLATGTSKLSNAACEPEVVQLGMLLNKMGAKIKGLGSKKIIIEGVKKLNGINEIVPSDRIEAGTFAIAVSATGGKIKLENTNYDENKTLFKILEKTGSKINKSKNSINIEKTNDEIYPVNIKTSPYPGFPTDLQAQIMTLMAISNGQSEIKENIFENRFMHVQELVRMGANIKLDKDKALIRGARSLNGANVMATDLRASASLIIAGLVAIGKTTISRIYHLDRGFYNLECKLNNCGASIKRISE

SEQ ID NO: 123418 - protein, 360 aa, Unknown
  Bacterial polypetide isolated from the Sargasso Sea
MEKLLIKGGKSLFGEIDCSGAKNAALPVIAASILSSNDVTLKNLPYLQDITTMFELIGSMGADISLDERMNFRLNTSNLSNLEARYELVKTMRASILVLGSMVAKYGYAKIALPGGCAIGSRPVNYHLTALEKLGAEISLNNGYIEAKAKKLNGADIEFEGVTVTGTENLMMAATLAEGVTTLTNVAKEPEISDLADFLNSMGANISGAGTDKIRIEGVKELIGTTFKIPADRIEAGTYLVAGALTNGKITINKIDPSRMGAIIETLQKAGAEINSNENSISLDMKNNAIKPVDIITAPFPGFPTDMQAQFTVLNCIGNGESFVKETIFENRFMHVQELNRMGTDITIKGTTALIKGVDS

SEQ ID NO: 123419 - protein, 338 aa, Unknown
  Bacterial polypetide isolated from the Sargasso Sea
MDYFEINGSKTLNGVVEISGAKNAVLPLMAAAILNKDKLRISNVPNLSDSITMSKLLEKMGAEVNFESHNSIFVDTSNLNTPFAPYDLVKTMRASFYVLGPLLARFGKAKVSLPGGCAWGPRPVDFHLEGLKALGVKISIENGYVVADGSNLTGNKIHFPKISVGATGNVVMAAILAKGTTTITNAASEPEIQQLCEMLNGMGANISGIGSNNLTIEGVSSLNSISSISVIPDRIEAGTFLIAAAAVGGEVEVKNIIPEHLDSVIKCLQKANIQLEVKDSSIVVKSNTNNILSTNIETNEYPSFPTDLQAQWMMLMCLANGNSTIKKIFITIDFTHIW

SEQ ID NO: 123420 - protein, 293 aa, Unknown
  Bacterial polypetide isolated from the Sargasso Sea
DLHLFALKKLGATIKIKNGYILANTEKGLRGNTIKFPSISVGATENAIIASVLAEGKTTLKNCAMEPEIQDLILFLKKLGCSISSDKKRNIFVNGIKSFFPVTHKVIFDRIELGTYLIAAALAGKKVSFLNINPKIISSELKVLKKMGVRMEIKNNKITVFKSQKLKRTNIKTEPYPGFPTDLQAQIMILMTQANGKSKIKESIFENRFMHVPELKRMGAKIKIKDNTAKIYGPTKLSGAEVMATDLRASVCLVLAGLIAQKETTINRIYHLDRGYEKLEIKLKKCKAIIRRI

SEQ ID NO: 123421 - protein, 247 aa, Unknown
  Bacterial polypetide isolated from the Sargasso Sea
MDKFRVQGPTKLQGEVTISGAKNAALPILFAALLAEEPVEIQNVPKLKDVDTSMKLLSQLGAKVERNGSVHIDARDVNVFCAPYDLVKTMRASIWALGPLVARFGQGQVSLPGGCTIGARPVDLHITGLEQLGATIKLEEGYVKASVDGRLKGSHIVMDKVSVGATVTIMCAATLAEGTTIIENAAREPEIVDTANFLIALGAKITGQGTDRITIEGVERLGGGVYRVLPDRIETGTFLVAAAISRG

SEQ ID NO: 123422 - protein, 127 aa, Unknown
  Bacterial polypetide isolated from the Sargasso Sea
MEKLLIKGGNPLSGRIECSGAKNAALPMIASTILCEEEVILKNLPYLQDITTMFELLGSMGADIILNENMDFTITSKNLQDIEARYELVKTMRASILVLGPLVAKYGKARIALPGGCAIGSRPVIII

SEQ ID NO: 123423 - protein, 296 aa, Unknown
  Bacterial polypetide isolated from the Sargasso Sea
IDLHLKFLKSIGVRNHIDKGYVISKLNNIKKKNIYRFQKISVGATINSILASCLIPNKIILNNIAIEPEIVDLIKFLKKAGVKIKFLSNRKIEILGKKHLNQISYEIMPDRIEAGTYMIASAITNSKLIIKKLNINHVQNTINYLSKANITVKKIDKNSVQILPGKIKPVSFKTSPYPGFPSDMQAQFMSLMNFANGTSKIKEEIFENRFLHVSELNRMGADISIMKNVATINGVEKLRAAEVMATDLRASVSLVLAGLATKGKTVINRIYHLERGYEDLVYKLKNCGAKIKKTNV

SEQ ID NO: 123424 - protein, 238 aa, Unknown
  Bacterial polypetide isolated from the Sargasso Sea
MKKLAINGGYPLNGSIKISGAKNAALPMMTASILSDHNIVLNGVPDLADVKTMITLLESMGIETNKNHKSSLTLNASGIDSRFASYELVKTMRASIMVLGPLLAKYGEAKVSLPGGCAIGARPVDLHIQGLEKLGARIEIKDGYLLASADRLIGSSYCFPKKSVTGTANILMAATLAEGETKIVNSACEPEIVQLGELLNAMGARIEGLGEDCITIQGVENLVGAEIEIIPDRIEAIT

SEQ ID NO: 123425 - protein, 420 aa, Unknown
  Bacterial polypetide isolated from the Sargasso Sea
MDKFIVKGPCKIKGEISISGSKNAALPILASTILFEKEVIIKNLPRVKDIDTMINLLKSLGSEVKFNKNKKIVKITKKKKQSFFASYSLVRTMRAGILVLGALVTKHQKSITSLPGGCLIGARPVNYHLNALKKLGMKYDIKKGYIHAHTKEKLKGAKIRFSKISVGATENTIIAACLANGITILRNCAIEPEIIDLINFLKSGGAKIKFIGKRTVKIEGIKSLESTSYSVMSDRIETGTFCVAACLTGGNLKINNFDPKIIKTELSLLKKVGAKIKVAKKQIHISGPKKIKNLTNLVTKEYPNFPTDLQAQFMVLLCKAKGKSSITESIFENRFMHVAELRRLGAEILIKKNKAFISGDTNFQAAELMSSDLRASVALVLAAIVAKGSSTINRIYHLDRGYENIENKLRKVGVNIRRVN

SEQ ID NO: 123426 - protein, 138 aa, Unknown
  Bacterial polypetide isolated from the Sargasso Sea
NEISVAKSSIDQGIELDTEEFPGFPTDLQAQMMVLMSLGKKKSIIRENIFENRFMHVPELNRMGGNIEISGKKAIIHPCDRFLGAQVMATDLRASVSLVLAGLVANGETTLNRIYHLDRGYENIETKLQSIGADIKRI

SEQ ID NO: 123427 - protein, 420 aa, Unknown
  Bacterial polypetide isolated from the Sargasso Sea
MDKFIVKGPCKIKGEISISGSKNAALPILASTILFEKEVIIKNLPRVKDIDTMINLLKSLGSEIKFNKNRKIVKITKKKKQNFFASYSLVRTMRAGILVLGALVAKHQKSITSLPGGCLIGARPVNYHLNALKKLGMKYDIKKGYIHAHTKEKLKGAKIRFSKISVGATENTIIAACLANGITILRNCAIEPEIVDLINFLKSGGAKIKFIGKRTVKIEGIKSLESTSYSVMSDRIETGTFCVAACLTGGNLKINNFNPKIIKTELSLLKKVGAKIKVAKKQIHISGPKKIKNLNNLVTKEYPNFPTDLQAQFMVLLCKAKGKSSITESIFENRFMHVAELRRLGAEILIKKNKAFISGNTNFQAAELMSSDLRASVALVLAAIVATGSSTINRIYHLDRGYENIENKLRKVGVNIRRVN

SEQ ID NO: 123428 - protein, 420 aa, Unknown
  Bacterial polypetide isolated from the Sargasso Sea
MQQFLVSGGATLKGDVVISGAKNAALPILFATILAEQPSVLSNVPVLKDIDTTFKLLRIFGADVSRDDHQVTVDATAIHSQMAPYELVKTMRASILALGPLLARFGHAEVSLPGGCAIGARPVNLHIDGLRKMGAEITVEAGYIKAKATRLKGAHIFMDIVSVTGTENLMMAAVLADGLTIIENAAREPEVVDLAKYLIAMGADIQGAGTDTIRITGKEKLHGARHTVLPDRIETGTFLVAAAVTGGDVTCLNASPAELEVVLEKLREAGADVTTGPDWIRLNMTGRTLKSVNVKTVPHPGFPTDMQAQFTVLNVVAEGVGMVTETIFENRFMHVPELQRMGADIQLEGNTALIKHTDKLMGAQVMATDLRASASLVIAGLVAEGETVVDRIYHIDRGYEQIEHKLKGLGANIQRINAPA

SEQ ID NO: 123429 - protein, 327 aa, Unknown
  Bacterial polypetide isolated from the Sargasso Sea
RASILVLGPLVAKYGKARIALPGGCAIGSRPVNYHLDALKQLGAKIKLKNGYIEASAKKLIGSNIKFEGITVTGTENIMMAATLAEGKTILSNVAKEPEIIDLANMLNSMGADIQGAGTDEIIVQGVDELNGTVFTIPADRIEAGTYLVAAAVTNGNITIDKIDPNRLMKVISKIENTGSKISYDKDSISISMDQERPEPVDITTAPFPEFPTDMQAQFSVINAISSGVSNIYETVFENRFMHILELNRMGCDIQVNGNHALIKGVESIYGAQVMATDLRASASLILAGLCAKGETVVDRIYHIDRGYERIEEKLNYLGANIIRLPS

SEQ ID NO: 123430 - protein, 132 aa, Unknown
  Bacterial polypetide isolated from the Sargasso Sea
RHLKAVSFSTSPYPGFPTDMQAQFCALNSVANGKAEMVENIFENRFQHVVELHRMGADIQIKGNIASSTGVDSLTAAPVMATDLRASAGLIIAALAAKGETIIDRIYHIDRGYERVEEKLQQLGARVARENS

SEQ ID NO: 123431 - protein, 417 aa, Unknown
  Bacterial polypetide isolated from the Sargasso Sea
MQRLEVLGANKLKGQINISGSKNASLPILAATLLSKNKITLKNLPKVKDIETMINLLQSLGSITKFTKQSLVIDNSKQKKVFASYNLVKTMRAGILVLGPLLAKFGNAKVSLPGGCAIGTRPVDIHLKALSKLGVKFKILNGYVHANAPKGLIGTNISFSKISVGATENLIIAACFAKGKTILKNCAIEPEIKDLVNFLLKTGCKIKWIGKRSIKISGVKQIKEISYSVMFDRIEAGTYLIAAALTEGKLQIKNVIPKIIKTEIDILKKIGAKIKVNHDKINIVGNKKIKNLEIKTAPYPGFPTDLQAQIMVLLCKANKKSIIKEDIFENRFMHVAELNRMGAQILTKGNKAVVQGNINFVPAELMATDLRASVSLVLAALTAKGKSVINRIYHLDRGYENLEKKLKKVGAKIRRVN

SEQ ID NO: 123432 - protein, 420 aa, Unknown
  Bacterial polypetide isolated from the Sargasso Sea
MEKFVIRGPCRVKGTVNVSGSKNAALPILAATLLFNRPVELKNVPDVRDIKTMLNLLRFFKKKVIFLKNKKTIKIYNSKKIRTYLPYSISKTMRGSIICLGGLVSKYGKAISAYPGGCAIGMRPINLHLDALKKLGMKYEIKKGYIYATAKNGLNGNNIKFKKISVGATENTIIAASLAKGKTILRNCAIEPEIKDLTNFLSSAGANIKWIGKRTVQIVGVQKLKSTNYTVMCDRIETGTMAIAAALTGGILKIKGLNPKIINTELELVKKTGSIIKYGKNEIKIYGAKKIKNIKLIKTKEYPGFPTDLQAQFMVLLCKAEGRSVIEENIFENRFMHALELQRLGAKISLKKNKAIIEGNSKLEGAELMSSDLRASVALVLAAIASKGKSTIHRIYHLSRGYENLDKKLKKIGVNISKIY

SEQ ID NO: 123433 - protein, 188 aa, Unknown
  Bacterial polypetide isolated from the Sargasso Sea
MFDRIEAGTFIIAGALIGKKLKISGIQTRFLNTEIKILRKMGVKMKISKDYIIILHSHKIKPVNIKTEPYPGFPTDLQAQMIVLMTKAKGKSQIKENIFENRFMHVPELNRMGAKINTSGNLSYIEGPQNLNGAEVMATDLRASVSLVLAGLVANNQTIINRVYHLDRGYEDLEKKLRQCNAKISRIS

SEQ ID NO: 123434 - protein, 302 aa, Unknown
  Bacterial polypetide isolated from the Sargasso Sea
MEKLLIKGGKSLSGKISCSGAKNAALPMIAATILCDDKVVLKNLPYLQDITTMFELLGSMGSEILLDENMDFTISSANLKDIEARYELVKTMRASILVLGPLLSKYGKARIALPGGCAIGSRPVNFHLDALKQMGASITLRNGYIEANASQLNGANIKFEGVTVTGTENLMMAATLAKGQTILTNVAKEPEIADLADMLNSMGAKISGAGTDKIVIDGVDILKGTIFDIPADRIEAGTYLVAAAVTKGSITIDGINPNRLMKVIDKLRAAGAEIDYNEDSISINMKLEFPNPVDITTAPFPE

SEQ ID NO: 123435 - protein, 419 aa, Unknown
  Bacterial polypetide isolated from the Sargasso Sea
MQKLEVLGGKKLRGQIEISGSKNASLPILAATILSDEKIYLSNLPRVKDIETMINLLKSIGSNIKINNDKKSLSIINNKKLKFFAPYNLVKTMRAGILVLGPMLARFHKAKVSLPGGCSIGIRPIDIHLNCLSKLGAKYKISNGYVYASANNGLVGARIKFPKISVGATENLIIAASMAKGTSILSNCAIEPEIKDLVNFLNKIGAKIKWIGKRTVKIFGVKKFKENKYRIMPDRIEAGTYMIAAAITEGKILINGIDSKLIKTEIELLKKIGVKVFIFKNKIKVIGSNNLKNIIIKTAPYPGFPTDLQAQIMVLLCKASGLSIISEEIFENRFMHCGELNRMGAKITIKGSKAYIGGNIKLKSAELMATDLRASVCLILAALIAKGKSTINRIYHLDRGYESIEKKLRKVGAKIKRKS

SEQ ID NO: 123436 - protein, 185 aa, Unknown
  Bacterial polypetide isolated from the Sargasso Sea
MDYFEINGLKTLNGVIEVSGAKNAVLPLMAASILNQDKLKISNVPTLSDSITMSKLLKKMGADVNFESDNSISVDSSKLDNPFAPYDLVKTMRASFYVLGPLLARFGNAKVSLPGGCAWGPRPVDFHLDGLKALGVKISIENGYVIADGSNLIGNKIHFPKISVGATGNIVMVAILAKGTTTITN

SEQ ID NO: 123437 - protein, 280 aa, Unknown
  Bacterial polypetide isolated from the Sargasso Sea
LNLDGGNILAEAKELIGNDIHFEFRSVGATGNLAMAAVKASGTTRLYNCAKEPEIIQLCELLNSMGANIEGIGTEVLIIHGVDELHSADIDIIPDRIEAGTFLMAGALLGEIEVRDIIPEHLDKVVHKLRETGCLLKINQKSIIITPPEKIKSVDMATAVYPGFPTDLQAQWVAIMSLADGSSVVTDTVYHDRFSHIPELSRLGANIKVENNTAFIRGKNTLVGAPVMSTDIRASASLIIAALAAKGETQISRVYHIDRGYENIEQKFEGLGGDIRRISE

SEQ ID NO: 123438 - protein, 276 aa, Unknown
  Bacterial polypetide isolated from the Sargasso Sea
EARAKRLKGTRIVTDMITVTGTENLLMAAVLAEGETVIENAAREPEVGDLAHLLVEMGAKIEGIGTDRLVIQGVDRLHGAKHTVIPDRIEAGTFLCAVAAAGGDVTLRKVRPLILEAVTEKLREAGVTVEEGDDWMRVRMDKRPSAVSFRTSEYPAFPTDMQAQFMALNTIADGTSQVVETIFENRYMHVQELNRLGASITIDGNTALVTGVEKLSGAKVMATDLRASASLVIAALRAEGETLIDRIYHLDRGYDRMETKLNAIGAKVRRIAGSQA

SEQ ID NO: 123439 - protein, 185 aa, Unknown
  Bacterial polypetide isolated from the Sargasso Sea
MEKLLIKGGNSLKGKISCSGAKNAALPMIASTILCDEKVTLRNLPYLQDITTMFELLGSMGAEILLDENMDFTISSANLKDIEARYELVKTMRASILVLGPLIAKYGKAKIALPGGCAIGTRPVNFHLDALKKMGAKIKLKNGYIEAMAKKLHGAEIRFDGVTVTGTENLMMAASLAEGTTKLTN

SEQ ID NO: 123440 - protein, 419 aa, Unknown
  Bacterial polypetide isolated from the Sargasso Sea
MDKLLIKGRSPLNGEIYASGAKNSALPILAASLLSDSPVRVGNLPHLNDVTTMLELLGSMGVDVMLSDDMEVEVDTSSIKNLDARYELVKTMRASILVLGPLLAKYQEATVALPGGCAIGSRPVNLHIEAMSAMGAEINIEDGYIKASVNGRLKGCEISFDPVSVTGTENVIMAASLAQGLTTINNAAKEPEVVDLVNCLSSMGAKIQGAGTDIIKIEGVNSLSGTSFSVMPDRVEVGTYLTATAMTGGKVKIKSAKPQYLSSVITKLESTGAVIKIGEDWVEITMERDRPVATSLTTGPYPSFPTDMQAQFVALNSIAEGNSTITETVFENRFMHVQEIARMGGDIALKGNTAVIKGIKGLKGAPVMATDLRASASLVLAGLVAKGSTTIDRIYHIDRGYERIEEKLKMLGADIERIS

SEQ ID NO: 123441 - protein, 354 aa, Unknown
  Bacterial polypetide isolated from the Sargasso Sea
MLVEKSIQIKGKNQLTGEIEISGAKNAVLKQMILPILCEGQYKIENVPNIADVFYMQDVLGVLGITSNLEGKTLEIVSPNDISVEAPYEIVQKMRASIIVLGPLLARKGEAKIAFPGGDQLGPRPVKMHIEALEKMGASFELDHGVLIGKTDGLKGVEINLPYASVGATENTLLAAVLAEGTTVIENAAREPEVVDLIKMLKNMGADITGEGSSEIVINGVNALNSTNHKVIGDRIVAGTYIGAFLSTNGNGKIVGINPNHLPMEIKKFTEMGAKFQIDSDSIEVESPKQLSPIDISTLPFPGIATDLQPIFGASLLKANGTSIITENVYDQRFQWIPEVQRMGADIQIGWQHA

SEQ ID NO: 123442 - protein, 420 aa, Unknown
  Bacterial polypetide isolated from the Sargasso Sea
MDKFKINGPSKIRGEVSISGSKNAALPILAATLLFDKNVTIKNLPQVKDIDTMLNLLKSLGRKISFKNNKKIATISKGKKNNFFAPYSLVKTMRAGILVLGPLLAKNKKAKVSSPGGCSIGVRPIDIHLKAISKLGVKIQIKKGYVNATAQEGLIGSEIRFSKISVGATENSILAACLAKGTTTIKNCAIEPEIKDLTNFLKTAGAKIKWIGKRTLKIEGVKTLKSITYSIMNDRIEAGTFCVAACLNGGNLKIKNFEPKIINTEINLLKKIGAKIKTTKNTIQIKGPKKIRSLNFLKTGEYPNFPTDLQAQIMVLLTRANGKSTIEENIFENRFMHVPELKRLGAKINIKGNKAIIEGTNNLEGAELMSSDLRASVALVLAAFISRGTSIINRVYHLDRGYEKIENKLKKIGVKIKRIS

SEQ ID NO: 123443 - protein, 77 aa, Unknown
  Bacterial polypetide isolated from the Sargasso Sea
MGANIEIDANTAIVKGVSKLNSAQVMATDLRASAALILAGLIADGKTIIDRIYHLDRGYESVEEKLLNIGAKVRRID

SEQ ID NO: 123444 - protein, 192 aa, Unknown
  Bacterial polypetide isolated from the Sargasso Sea
MEKLLIKGGKNLFGEIDCSGAKNAALPVIAASILSSDDITLKNLPYLQDITTMFELIGSMGADISLDEKMNFKLNTSNLSNLEARYELVKTMRASILVLGSLVAKYGYAKIALPGGCAIGSRPVNYHLKALEKLGAEISLNNGYIEAKAKKLIGACIEFEGVTVTGTENLMMAASLAEGLTILTNVAKEPEI

SEQ ID NO: 123445 - protein, 248 aa, Unknown
  Bacterial polypetide isolated from the Sargasso Sea
IMAATLAEGTTRLKNVAKEPEIIDLANFLNILGANIKGAGTDEIIVEGVDELSGGRFSIPFDRIEAGTYLAAAVATNGNIKINKIDSSRMGNMIEKFQLMGAFVELKENTIHIMMEKNIEPVDVITEPFPGFPTDMQAQFTLINSIANGSATVTEKIFENRFMHVQELVRMGCDITVNGNSAFINGVKKIYGAQVMATDLRASACLILAGLCAVGETIVDRVYHIDRGYERIEEKLSYLGANIERLPR

SEQ ID NO: 123446 - protein, 418 aa, Unknown
  Bacterial polypetide isolated from the Sargasso Sea
MDKLIIKGGSKISGSIDVHGAKNSALPIIVSSLLSEKTLKLSNVPNVVDVLNLIKLLKNYGVKIEHKKNKLKISPSKIKNLSADYDVVRKMRASILILGPLLSRFGEARISLPGGCAIGTRPIDIHLAGLSKLGANFEIQNGFVVGSVKSQLIGNKIKLPFPSVGATENILMASVLAKGETKISNAAREPEIEDLSNCLIKMGAKIEGHGTKTILVQGVTNLKKAEHEIISDRIVAGTYIIAALMLNSALEINNFNTIYLKSLIDILKKMGAKLKVSKNSIKVFKGSKLKSSSLSTSPYPGFPTDLQAQLMSLMCISDGKSKIKETIFENRFMHVPELNRLGANITVEKDTATIIGNQTFKGAQVMASDLRASISLVLAAMNANGQTTLNRVYHLDRGYENIEKTLGSLGAKIKRQKN

SEQ ID NO: 123447 - protein, 184 aa, Unknown
  Bacterial polypetide isolated from the Sargasso Sea
MAKIIVNGGKELSGTIKVSGSKNAALPIMTASLLTDGELDLSNIPQLSDVTIMRELLQSLGTNISLNKSPRSLKLTTKEIRNYTADYEIVRKMRASIIVLGPILARSKIAKVALPGGCSIGSRPIDLHLKGMQAMGAKIYMEGGYVFAEAANGLQGADIKFPIVSVGATQNIVLAATLANGTTT

SEQ ID NO: 123448 - protein, 365 aa, Unknown
  Bacterial polypetide isolated from the Sargasso Sea
IVKISRFQIEFFNNKKTVKISKTKKQKYLAPYSLVKVMRGSFLSLGALLAKHHKAIISLPGGCLIGARPVNYHLSALKKLGMKYEIKKGYIHAISNGKLKASNFKFSNISVGATENSIIAACLAKGKTILKNCAIEPEIKDLTNFLNSAGAKIKWIGKRTVQVEGVKILNSIKYSVMGDRIEAGTFCVAASLTAGDLLIKNFDSSLIQTELNLLKKIGSKIKTFKKEIYIKGPNKIKSINNIVTKEYPNFPTDLQAQFMVLLCKANGRSTITESIFENRFMHVAELRRLGAKISIKENKAIIEGNTDFLGAELMSSDLRASVALVLAAMVSKGKSLINRIYHLDRGYEKIENKLKKIGVNIRRFS

SEQ ID NO: 123449 - protein, 234 aa, Unknown
  Bacterial polypetide isolated from the Sargasso Sea
ASCEPEVIHLGLLLNKMGAKIKGLGSKKIIIEGVKKLNGVTEIIPSDRIETGTFAIAVSATGGKVKLENTNYEENKLLFNILEKTGSIINKSKNSISIEKNHNKIYAANIKTSPYPGFPTDLQAQIMALMTISNGKSEIKENIFENRFMHVQELVRMGANIKLDKDRAIIKGVRRLNGANVMATDLRASASLIIAGLVATGTTKISRIYHLDRGFYNLENKLNNCGASIKRISE

SEQ ID NO: 123450 - protein, 419 aa, Unknown
  Bacterial polypetide isolated from the Sargasso Sea
MKTLEVSGKRKLKGIIRVSGSKNASLPILAASILSNKSIKILNLPKVKDIETMISLLISMGCKIKINNRKKSLEIKNSNKIKTFASYKLMKTMRAGILVLGPLLARFKKAKVSLPGGCAIGARPVDIHLKSLSKLGAKYKIKDGYIYATAPNGLKGNKIIFPSISVGATENIIIAACFAKGKTILKNCAIEPEIDDLILFLKKMGFNIEWKGKRILSIVGSRETKELIHSVMPDRIEAGTYLIAGALTNGQLCIKNINPKIILTEINILKKIGVEIKIKNSDLIVYRKKNLRSLNIKTAPYPGFPTDLQAQIMVLLCLAKGRSSITEEIFENRFMHAPELNRMGAKIKIKGNKAFIDGNINFKSAELMATDLRASVSLVLAALCADGTSKVNRIYHLERGYESLEKKLKKVGSKIKKVS

SEQ ID NO: 123451 - protein, 207 aa, Unknown
  Bacterial polypetide isolated from the Sargasso Sea
KIVIDGVDKLKGIIFDIPADRIEAGTYLVAAAVTKGSITIDGIDPNRLMKVIDKLRASGAEIDYNENSISINMKLEFPNPVDITTAPFPEFPTDMQAQFSVINAISSGTANVYETVFENRFMHILELNRMGCDISVKGNHAVIQGVKSIYGAQVMATDLRASASLILAGLCAEGETVVDRIYHIDRGYERIEEKLNYLGANIIRLPS

SEQ ID NO: 123452 - protein, 351 aa, Unknown
  Bacterial polypetide isolated from the Sargasso Sea
LHLHTKEIINHKASYDLVKKMRASFWVLAPLIAKKGYAEVSLPGGCAIGTRPIDIYLKMLKEMNIKFAINNGYIVAKAESPISGINFKLEKKSVGCTHFFLMLACLATGTSKLSNAACEPEVVHLGMLLNKMGAKIKGLGSKKIIIEGVKKLNGIDEIVPSDRIEAGTFAIAVSATGGRIKLENSNYDENKTLFKILEKTGSKINKSKNSISIEKMNDEIYPVNIKTSPYPGFPTDLQAQIMTLMTISNGKSEIKENIFENRFMHVQELVRMGANIKLDKDKALIRGIKNLNGANVMATDLRASASLIIAGLAAIGKTTISRIYHLDRGFYNLESKLNNCGASIKRIKDNG

SEQ ID NO: 123453 - protein, 295 aa, Unknown
  Bacterial polypetide isolated from the Sargasso Sea
TFHLDALKKMGAKIELKNGYIEATSKKLHGADIRFDGVTVTGTENLMMAATLAEGISTLTNVAKEPEIIDLADMLNSMGAKIKGAGSDEIIIEGVNNLNGTVFDIPADRIEAGTYLVAAAVTKGEITVEGINPERLMTVINKLENTGAKLSYDKKSISISMKKSIPEPVDITTAPFPEFPTDMQAQFSVINAISNGTSNIYETIFENRFMHILELNRMGCDIEVKGNHAKINGVENIYGAEVMATDLRASASLILAGLCAKGETVVDRIYHIDRGYERIEEKLNYLGANIVRLPS

SEQ ID NO: 123454 - protein, 256 aa, Unknown
  Bacterial polypetide isolated from the Sargasso Sea
KSVTGTANILMAATLAEGETKILNAACEPEIAQLGELLNSMGAKIQGHGKDCITIEGVENLGGAEIEIIPDRIEAITMVIAGIITRGELRIENINSSHIQQPIELIRKCGAKLEVFEDYLYLKGSDLISPISFQTNPYPGIPTDIQAQLMVLNTVAEGDSKVKETIFENRFMHILELKRMGANIGIDGNTAIITGVQKLNSAQVMATDLRASAALILAGLIADGETIIDRIYHLDRGYESIEEKLSNIGAKVRRID

SEQ ID NO: 123455 - protein, 338 aa, Unknown
  Bacterial polypetide isolated from the Sargasso Sea
ESKFASYELVKTMRASIMVLGPLLAKHGKAKVSLPGGCAIGARPVDLHIQGLEKLGATIEIKDGYILASSDRLIGSTYSFPKKSVTGTANILMAATLAEGETKILNAACEPEIVQLGELLNSMGAKIQGLGKDCITIEGVENLGGAEIEIIPDRIEAITMVIAGIITRGELRIENINSSHMQQPIELIRTCGAKLEVFEDYIYLKGSDLIFPISFQTSPYPGIPTDIQAQLMVLNTVAEGDSKVKETIFENRFMHILELKRMGANIGIDGNTAIITGVQKLNSAQVMATDLRASAALILAGLIADGETTIDRIYHLDRGYESVEEKLSNIGAKVRRID

SEQ ID NO: 123456 - protein, 311 aa, Unknown
  Bacterial polypetide isolated from the Sargasso Sea
ARIALPGGCAIGSRPVNYHLDSLKQMGAEIVLKNGYIEASAKNLKGADIRFDGITVTGTENLMMAATLAKGKTTLSNVAREPEIIDLADMLNSMGAKINGAGSDKITIQGVEKLIGTSFEIPADRIEAGTYLAAAAVTKGDIKIEGINPNRLMKVIDKLINTGAKVDYDEDSISFSMTNDIPDPVDITTAPFPEFPTDMQAQFSVINAISSGTANIYETIFENRFMHILELNRMGCDISVNGNHAIIKGVKSLYGAEVMATDLRASASLILAGLCAKGETVVDRIYHIDRGYERIEEKLNYLGANIVRLPS

SEQ ID NO: 123457 - protein, 226 aa, Unknown
  Bacterial polypetide isolated from the Sargasso Sea
IIQLGELLNAMGARIEGLGEDCITIQGVQNLVGAEIEIIPDRIEAITMIIAGIITQGEIEIENINPSHIEEPIELIRQCGAILEISDQSLFVKGPDEILPISFETKPYPGIPTDIQAQLMVLNTIAKGNSNITETIFENRFMHVLELKRMGADIGIDGNTAEIRGVTSLNSAPVMATDLRASAALILAGLIAEGETIIDRIYHLDRGYESVEEKLSNVGAKVRRID

SEQ ID NO: 123458 - protein, 116 aa, Unknown
  Bacterial polypetide isolated from the Sargasso Sea
MNKVVAILGPTAAGKTDLALEVAKNLEAQIISVDSIMVYRNLNIGSAKPSIDVLKKFPHKLVNILNPDEKYNVASFYNDVLQEINTAINKKKVPILVGGTMMYFNTLFNNGLNNLP

SEQ ID NO: 123459 - protein, 83 aa, Unknown
  Bacterial polypetide isolated from the Sargasso Sea
LGLLQEVKKHYSQNLSLELQSMKAIGIKFFFEYLSGKRNFQDAMSLTQQESRRYAKRQMTWFRNSFLMILFMKIYLKMIKNLC

SEQ ID NO: 123460 - protein, 96 aa, Unknown
  Bacterial polypetide isolated from the Sargasso Sea
ERINKRSENMIKLGAISEVRRFIKMRVPKNKSLSKAIGINEIKQYLQKKIQIEQLIEKISIKTRQYAKRQSTWARGNMKDWNKLNPSGLDKLLKKI

SEQ ID NO: 123461 - protein, 152 aa, Unknown
  Bacterial polypetide isolated from the Sargasso Sea
SSTDTQRTLRAYEVKKYTKKSIYEWAKKTKPLFKDHIFIKFFINTPKKQLLKNIELRTNSMIEKKCIDEVIRFRKRRLKKTLSPNKIIGVQEIQRYLSKEFDQKNLVELMNIKTRQYAKRQKTWSRAHMTDWHMIYSSNSSILLKKILNLVS

SEQ ID NO: 123462 - protein, 130 aa, Unknown
  Bacterial polypetide isolated from the Sargasso Sea
MNNIFILIGPTASGKSDLAMRLMSKFPFEIVNADLYSVYKELNIGTAKPSNEELNKYKHHLINILEPTMQYNVSQYCKDAHQSISEILSLNKIPLITGGTMMYVHQLLNGLSHEYNVSETDSNLIKFIQN

SEQ ID NO: 123463 - protein, 156 aa, Unknown
  Bacterial polypetide isolated from the Sargasso Sea
YSEKVHINNKKRLVRALEVFETTGKPMSENFDLMSKASKYANNYCFVYLQMKNDFLHPRILKRIELMIGDGMIEEVEEIINQKIDISHIDYIGFKELSLFIDNKISINEAIEKIFIRTRQYAKRQNKWFSSNRYDISFDLENFSSNDIVDKLIQIN

SEQ ID NO: 123464 - protein, 108 aa, Unknown
  Bacterial polypetide isolated from the Sargasso Sea
KIYIDYPKDELINKISNRVDQMMKDGAIKEVKDFLKLNLKSDSNILKVIGIREIKDFIDKKTSMHDLKLNIVIKTRQYAKRQRTWSRGQMSDWQKFDSEALLKFIKKL

SEQ ID NO: 123465 - protein, 114 aa, Unknown
  Bacterial polypetide isolated from the Sargasso Sea
PKEDFIKIYIDFPRENLLHKISKRSGQMLRQGAIKEVKKFIKLGIKKDNSSNKVIGINEIKDFLSKKINLNEVKEKITIKTRQYAKRQNTWARGQMMDWQKVNPKDLKKILKKI

SEQ ID NO: 123466 - protein, 162 aa, Unknown
  Bacterial polypetide isolated from the Sargasso Sea
FDKLVKIDSLANNKIRPTDVQRTIRAYEVKLFTNKSIFDWYKKTKSKFKNSVFVKLYIDFPRPELVERINLRTKKMLESGLIPEVKKFLKLRVPRSKSITKAIGILEIKNLIENKVPKEQVIEKISIKTRQYAKRQVTWARGNMKDWKKIKPKYLDNFLKKI

SEQ ID NO: 123467 - protein, 247 aa, Unknown
  Bacterial polypetide isolated from the Sargasso Sea
MSASKPELASDCIILTGPTASGKTALGIRIAQRLNADILSADSVAVYKGLDIGSAKPTLEEQAQATHHLLDLVDPASLFTVSDWLLAAANAIQDCRDRGRRILFVGGTPLYLRCLRDGLDESPAIDLDFRNSLTQQIAQSGPKALHEKLGRLRPDIAATIHPNDTKRIIRAFEIIQASGVDHPRSWAQARNSKKQLFPCPILVIDQPRKILNRRIHERVEAMFECGILEETEAAEQQYGIGTTAAQA

SEQ ID NO: 123468 - protein, 68 aa, Unknown
  Bacterial polypetide isolated from the Sargasso Sea
MTDPITDNFLHKVSNKPILLVGPTASGKSKLAMSLAIKLKRHIVNADSLQVYSNWRILRPDLPQKMKK

SEQ ID NO: 123469 - protein, 113 aa, Unknown
  Bacterial polypetide isolated from the Sargasso Sea
KDEFLSIYIDYPKEQLVNKITKRVDQMIKDGAVEEVKNFEKLNLNNENNLNKVIGIREIKDFIEKKTSFKEMKLNIVIKTRQYAKRQRTWSRGQMSDWQKFDPKGLLKFIKKL

SEQ ID NO: 123470 - protein, 150 aa, Unknown
  Bacterial polypetide isolated from the Sargasso Sea
NKINPTDTQRSIRAFEVKKFTKKSIHDWFKNTKSNYLEEDFFKIYIDYPRDELIERIHQRTGKMIKMGAVNEVKRFLKLKIKKQMTAFKAIGVNEIQEYLSKEKKIDEIKEKISIKTRQYAKRQSTWARGHMSDWVKLKPSEINKFLKKI

SEQ ID NO: 123471 - protein, 150 aa, Unknown
  Bacterial polypetide isolated from the Sargasso Sea
MTPQRIQRAYEVKLKTQKSLFDWFANTKSDFLDFEIKKIFIEIPRELLLKKISMRTEQMFRNNCINEVKRFNGLKVNKHLSVNKLIGVQEINDFLRGSISLEHCKDLINIKTRQYAKRQNTWARGHMKNWNKIYSKNLSNLLKKTLKVVS

SEQ ID NO: 123472 - protein, 179 aa, Unknown
  Bacterial polypetide isolated from the Sargasso Sea
LRSKIRLLHKKIGTEKFFLELIKLDPISKNFVKPTDTQRVIRAYEVKSFTKRSIYDWFKSTRSDYEKDDFFKICIDYPRVKLIERIRDRTEDMIKNGAISEVKKFIRLKVPRVKTASKAIGIAEIREYLEKKIELSEVIEKISIKTRQYAKRQSTWGRGNMMDWNKIKSGDLNKFLKKI

SEQ ID NO: 123473 - protein, 169 aa, Unknown
  Bacterial polypetide isolated from the Sargasso Sea
KFFNELIKLDPLAKSLVLPSDSQRSMRAYEVKKFTKKSLFDFLKETKSNFNNKTFKKIFLNTPRELLHKKIATRVDKMFSDGVINEVEKFYKMKVNKELSSNKIIGIKEIGDYLQNKTKLIETKELITIKTRQYAKRQFTWARGHMKSWEMIYSSNINDLYKKAINKIS

SEQ ID NO: 123474 - protein, 41 aa, Unknown
  Bacterial polypetide isolated from the Sargasso Sea
MDYKSKIILIAGPTASGKSKIAVNLAKKINGEIVNADSMQV

SEQ ID NO: 123475 - protein, 179 aa, Unknown
  Bacterial polypetide isolated from the Sargasso Sea
RNLYKKIGSKRFYDLLLKLDPKIKGRILPTDSQRIQRAYEVKIKTKKSLFDWFTNTKSDFLDFEIKKIFIDIPREELLKKISQRTELMVKNQCINEVRKFNKLKIKKSLSANKLIGVQEINDFLKRSFSLDQCKELINIKTRQYAKRQNTWARGHMKNWNKLYSKNFSILLKKSLKVVS

SEQ ID NO: 123476 - protein, 159 aa, Unknown
  Bacterial polypetide isolated from the Sargasso Sea
IKLDPVSKKFINSNDVNRSIRAYEVKKFTKKSLYKWFKETKTFFDKNEFVMTYVDYPRDALIKNIKKRIDRMFDLGAIKEVKKFNLIKINKLNSVNHVIGIKEINSYLSKKAELSDIKEQILIKTRQYAKRQSTWSRGHMSNWYKIDPKSKNPFKKILK

SEQ ID NO: 123477 - protein, 65 aa, Unknown
  Bacterial polypetide isolated from the Sargasso Sea
MNSSHPLVITLLGPTASGKTALALDIAEQLDLPVINVDSRQLYKEMDLGTAKPTAEQQARVPHHL

SEQ ID NO: 123478 - protein, 89 aa, Unknown
  Bacterial polypetide isolated from the Sargasso Sea
DLMLKSGAINEVKKFLKLKVRKDHTSCKVIGINEIRDFLEKKTNFTEVKERITIKTRQYAKRQSTWARGHMMNWHKINPKDIKKFLKKI

SEQ ID NO: 123479 - protein, 150 aa, Unknown
  Bacterial polypetide isolated from the Sargasso Sea
NRIKPSDAQRSMRAYEVKTYTKKSIYEWFNNTKSNYQHEDFYKIYIDFPKNELLNRIHSRAREMIKKGAVMEVKKFNSLKVRNDKTASKAIGIREVNEYLLKKIEIDQVIEKISIKTRQYAKRQRTWASGNMQNWNKIIPIELNKFLKKI

SEQ ID NO: 123480 - protein, 208 aa, Unknown
  Bacterial polypetide isolated from the Sargasso Sea
LYFNSLVNGLVKIPNIPIKFRNKIRLMQKKNGQKKFYKKLLKIDPKIKGKINSNDSQRSIRAYEIKSYSKKSMYDWLAQTKPHFKDSEFLKLYISFDRKKLIEKIEERTKKMIKSGAIREVKKFRDLKSSKQSSINKIIGIQELSKFLEKEIKIDKAKELIVIRTRQYAKRQATWARSKMTTWIKVDPNDFQSWFKKNKLPLKLDQLI

SEQ ID NO: 123481 - protein, 64 aa, Unknown
  Bacterial polypetide isolated from the Sargasso Sea
MNKKKALVIFGPTASGKSSKAIQVAKKYNSTIINADSIQVYKELRLITSRPSIEDEKNFDHKLY

SEQ ID NO: 123482 - protein, 252 aa, Unknown
  Bacterial polypetide isolated from the Sargasso Sea
VQVYKDLSLLSARPTTSDMQGIPHFLYGYVNSNTNYSVTDWLFQIKLKLIEIKKLQKIPILVGGTGLYLNAVINGLVPIPVISKKNKEATLLKFNEIGIDEFTKIVVEIDPAYSQKNNDKHRLLRAYSIYLETGKNISYWHKLPREKNINKKIYSFLINADRQSLYEKCDKRFNDMLFKGGLDEVNYLYNQNIDRSLPVSKSLGVKWLLSYLDNQITYEDAVRLSIRDTRRYVKRQITWFKHNYIPYKTILI

SEQ ID NO: 123483 - protein, 166 aa, Unknown
  Bacterial polypetide isolated from the Sargasso Sea
MSKNIPTIIITGPTASGKTKLSLELAKNNNGEIINADIMQMYEGFNILKAMPSTEEKFEIKHYLFGVIKKETKFTVADWIKLTKEKISEIHEKGKVPIVVGGSGMYLNAAINGLSEIPDINKVYRHKAEHLYKINGFDFILKKLIKIDKDFKNEKNDRQRLIRAYE

SEQ ID NO: 123484 - protein, 246 aa, Unknown
  Bacterial polypetide isolated from the Sargasso Sea
MTQPEPLVITLLGPTASGKTALSLEIAERLNLPVINVDSRQLYREMTVGTAKPTAEQQARVPHHLLDLRNPDQPITLQEFQAEAEPCIQRELQSRGMALLVGGSGLYLKALTSGLKPPAVPPQAQLRAQLSQLGQAICHPLLQQADPTAGARIASADAVRTQRALEVLYATGRPMSSQATAAPPPWRVLELGLDPANLRQRIQQRTDQLYSDGLVEETRQLEKRYGADLPLLQTIGYGEALQLLQG

SEQ ID NO: 123485 - protein, 128 aa, Unknown
  Bacterial polypetide isolated from the Sargasso Sea
KSIFEWYKKTKPSFKKDQFIKIYIDYPRDELVTKISKRVDQMMKNGAIQEVKDFLKLNLKSDSNIFKVIGIREIKDFIDKKTSMHDLKLNIVIKTRQYAKRQRTWSRGQMSDWQNFDPEALSKFIKKL

SEQ ID NO: 123486 - protein, 253 aa, Unknown
  Bacterial polypetide isolated from the Sargasso Sea
METNNRIPSKLIAIVGPTGIGKTALSEQILKYIDAEVVSIDSRQIYRNMNIGTAKPKPHLLKTIPHHLINIVDPMDDFSITDFLQSAKASIEDIISRGKIPLLVGGTGQYFWSLIENWTIPSVPPNPELRKKFEQIANKYGAEHLFEELKSIDVEATKIIDSKNIRRVIRALEVGIAGDKKWSELRSKDPVLYNPFIIGLTKDRTILYRDVDNRIDEMLKEGWIEEVRLLINSNIDLSYSSMSSLGYDEIYRY

SEQ ID NO: 123487 - protein, 197 aa, Unknown
  Bacterial polypetide isolated from the Sargasso Sea
MKDSSHNHLIVIAGPTASGKTSLAIELALYLKCEIISADSRQFYREISIGTAKPSENELSQVKHHFINNKNLEELYSAGEFEKDVINLLPNLFKHQNIVIMTGGSGMYIDAVCKGFDELPRSISIREELNKAYRDKGISFLQEELKLKDPDHFINVDKKNPQRLIRALEICRITNQPYSSLLNKKNKPRDFEIHKIA

SEQ ID NO: 123488 - protein, 124 aa, Unknown
  Bacterial polypetide isolated from the Sargasso Sea
MEKTLTILGPTASGKTTLAIELAKVLNGEIVGLDSRQIYKGMSIGTAQPTEAEMAGVPHYLISIRRPSESISAGEYVQLVEEKIMQIKNKGKRPIICGGSGLYFRALNEGIFKGSTTDTVIRKK

SEQ ID NO: 123489 - protein, 170 aa, Unknown
  Bacterial polypetide isolated from the Sargasso Sea
KKLGQKKFYEKLLKLDPSSRGKINPTDTQRSIRAFEVKKFTKKSITEWFKNTKSQFVENDFFKVYIDFPRQELIERINIRTSEMIENGAIKEVKNFIKLRVRKDKSANKAIGVNEITEYLKKQKDLNDTRDKIAIKTRQYAKRQSTWARGNMMSWIKLKPKDINEFLKKI

SEQ ID NO: 123490 - protein, 270 aa, Unknown
  Bacterial polypetide isolated from the Sargasso Sea
SMQIYRELKVITARPTNIDIKLIKHHLYGYVSGSERYNVEKWCNDAKNIIESLFKNNVTPIFVGGTGLYIDTLINGITSIPSIPESIKKESNNLFDKIGLDNFFELIKEIDINAVNNISKNDTQRLKRIWEVYKFTGKKFSLWKDNKNKKFLDNIEYKIILFLPDRTKNYNRVNKRVESMIENGAVHEIENLLKYNYSSKLPIMRAHGVPEISSYLQKKVTLEECINNIQLVTRHYVKRQNTWWKSSNLQFYKKFNEFPDEIDINSNNLV

SEQ ID NO: 123491 - protein, 120 aa, Unknown
  Bacterial polypetide isolated from the Sargasso Sea
MLHWLGIRWDRTALNVRIEKRIHEMVERGWLREVKELLAAGYGPQLKSMSALGYRYMAQHLEGSLSLTQAIEKTFIATRRYAKRQMTWFARMPAVTWFDGPVSLELVEGWLNEQFGTLES

SEQ ID NO: 123492 - protein, 56 aa, Unknown
  Bacterial polypetide isolated from the Sargasso Sea
MDLKSKIILISGPTASGKSDFALKLAKKINGEIINADSMQNYKELNILTARPQKDK

SEQ ID NO: 123493 - protein, 111 aa, Unknown
  Bacterial polypetide isolated from the Sargasso Sea
YIDYPRQELINRINLRVETMFQEGAIEEVKRYNKLGVKKENSSNKVIGIKEISNYLNKQCTLVQAKELIAIKTRQYAKRQTTWSRGHMQSWKKINPKNLTLVLKKVKIIAS

SEQ ID NO: 123494 - protein, 126 aa, Unknown
  Bacterial polypetide isolated from the Sargasso Sea
IFEWYKKTKPSFKKEQFIKIYVDYPKDELINKISKRVDQMIKDGAINEVKDILKLNLKSDSNIFKVIGIREIKEFIDKKISMHDLKLNIVIKTRQYAKRQRTWSRGQMSDWQKFDPEALSKFIKKL

SEQ ID NO: 123495 - protein, 92 aa, Unknown
  Bacterial polypetide isolated from the Sargasso Sea
EMIDQGFIEEVEGILKKKQMDSSKSSMKSVGYKQVSDYLEGNLSLDEMVFRAVTATRQLAKRQMTWLRSWNGVIWLEEESDNNLDIVLDTIN

SEQ ID NO: 123496 - protein, 105 aa, Unknown
  Bacterial polypetide isolated from the Sargasso Sea
HYDLLHPRILKRIKCMINDGMTNEVEKIINSKINISHIDYIGFKEISSFINKEISINEAIENIFVRTRQYAKRQKKWFDVNKYDISFDLHEISKNDIVDKLIQIN

SEQ ID NO: 123497 - protein, 146 aa, Unknown
  Bacterial polypetide isolated from the Sargasso Sea
PTDTQRSIRAYEVKKFTKKSLNEWFKNTKSNFVEDDFFKVYIDYPRQELIERINLRTTEMIENGAIKEVRGLIKLRVKKDKSANKAIGVSEIREYIKKQKDLDDTKEKIAIKTRQYAKRQSTWARGNMINWTKLKPQDINNFLKKI

SEQ ID NO: 123498 - protein, 129 aa, Unknown
  Bacterial polypetide isolated from the Sargasso Sea
KSIVDWFKRTKIFFSSEEFIKFYIDYPRDELLKRIYSRVEYMFKNGVIEEVRRFNKIGAKRENSSNKVIGITEITNLLNNQCTLQEAKDLIVIKTRQYAKRQATWARGQMQSWEKINPKNLNLILKKLK

SEQ ID NO: 123499 - protein, 35 aa, Unknown
  Bacterial polypetide isolated from the Sargasso Sea
MSALPPAIFLMGPTAAGKTDLAIEKTKVLPCELIS

SEQ ID NO: 123500 - protein, 184 aa, Unknown
  Bacterial polypetide isolated from the Sargasso Sea
MRRIITIIGPTASGKTSLAIRLSKQLNAEVIGLDSRQIYKGMSIGTAQPTIEEMDGVKHHLIGFQEPSEPISAGEYSKLLIDRVKAIRSDSKVPIICGGAGLYYRAISKGIFKGSTSDLSVRHRLEESYDNDPIKLLEKLHFIDPEYAELVHLNNKKRLVRALEIFELTGKTPSENFIDQISNP

SEQ ID NO: 123501 - protein, 77 aa, Unknown
  Bacterial polypetide isolated from the Sargasso Sea
MKVAKDLSSNKIIGISEIKDYLSGKITLIKAKELIAQKTRQYAKRQFTWARGHMKSWEMIYSSNINDLFKKTINKIS

SEQ ID NO: 123502 - protein, 157 aa, Unknown
  Bacterial polypetide isolated from the Sargasso Sea
KIDPIYVSQIKPTDIQRSIRGYEVKFYTKKSLIEWFNETKPIFDKNSFMKLYINYPRKELIERISKRSEQMVKEGVVKEVKKFLTIKVKEDINSNKVIGVSEINDYLDKIIGLETLKERISIKTRQYAKRQSTWARGQMSNWQNLEPQDLKIFLKKI

SEQ ID NO: 123503 - protein, 202 aa, Unknown
  Bacterial polypetide isolated from the Sargasso Sea
YFNTITKGISKIPNIDVKTRNKVRKLFNKLGHKEFYNQLLKIDPKVNNKILPSDSQRIQRAYEIKLKTKKSIFDWIANTKSDFLDFNIKKIFLDIPRNELLHKISERTSKMFKNNCINEVKKFNSLKINKSLSVNKLIGVNEINKYLLKTLTLEQCKELINIKTRQYAKRQNTWARGHMKNWNKIYSKNFSNLLKKSLKVVT

SEQ ID NO: 123504 - protein, 179 aa, Unknown
  Bacterial polypetide isolated from the Sargasso Sea
RNLFKKLGYKAFYEKLLDLDPKVKNKILPSDAQRSQRAYEVILNTKKSLFDWIVNTKSDFINFEVSKIYLDIPRDELLKKIYLRTELMFKNKCVEEVRKFNSLQLNNSLSANKLIGVQEINGYLREESSLDQCKERINIKTRQYAKRQNTWARGHMKNWNKLYSKDFAILLKKTLKVIS

SEQ ID NO: 123505 - protein, 56 aa, Unknown
  Bacterial polypetide isolated from the Sargasso Sea
MDIQSKIILISGPTASGKISFAVYLAKKFKGEICNADSMQVYKEINYLNCRTNLKQ

SEQ ID NO: 123506 - protein, 77 aa, Unknown
  Bacterial polypetide isolated from the Sargasso Sea
KDFLKLKIREDITSSKVIGVKEIKEFIQNNINLNELNEKISIKTRQYAKRQSTWARGHMSDWQKIKPNELNKFLKKL

SEQ ID NO: 123507 - protein, 133 aa, Unknown
  Bacterial polypetide isolated from the Sargasso Sea
MSSQPLVIVLLGPTASGKTELGLEIAERLDLPVHNVDSRQLYTGMDVGTAKPTAAQQARVVHHLLDLRSPDQPITLQEFQQEAEASIAAQLNRRGVALLVGGSGLYLKAITGGLRPPAVPPQPALREQLARLG

SEQ ID NO: 123508 - protein, 174 aa, Unknown
  Bacterial polypetide isolated from the Sargasso Sea
MEIKKDKIITIIGPTASGKTQLAVKISKELDAEVISLDSRQIYRGMEIGTAQPTEDEMENIPHHLIGFCDPSEPISAGAYAKLVFEKVHMIQNNGKLPIICGGAGLYYKAIKKGIFKGSRTDDSIRTELERLYDKNPHSLMRDLISIDPDYANIVHINNKRRLVRALEIFRITG

SEQ ID NO: 123509 - protein, 225 aa, Unknown
  Bacterial polypetide isolated from the Sargasso Sea
VEMAVHNGQIPIFVGGTGLYIKALLDGLAAIPPVGEQARKQATELYHWLGGEKFRSELAKRDPESAETIKVGDKQRMIRAWEVAVGTGTPISQWHRKKKQGALAGPSFVVKIIPDRAWLYAACERRFDQMLGTGVLDEVAAVQALELPADLPAMNVIGFCALSEYLVGHSSLAVCKSTVCQATRNFAKRQYTWFGRQLLAHREYMDVHSAKTALKDPVEEFLLTA

SEQ ID NO: 123510 - protein, 99 aa, Unknown
  Bacterial polypetide isolated from the Sargasso Sea
MEPGINYATKKIKQINKKGKVALVVGGTGLYFKALTDGFTQIPNIPEKYKKLKIEKNFVLKNPNIFKGIFLNDTQRVQRAFSVYKFTKKPLWLWQKENK

SEQ ID NO: 123511 - protein, 62 aa, Unknown
  Bacterial polypetide isolated from the Sargasso Sea
KLIGISEIEDFIQKKIQIYEVIEKISIKTRQYAKRQTTWARGNMKDWNKINPNNLNQFLKKI

SEQ ID NO: 123512 - protein, 130 aa, Unknown
  Bacterial polypetide isolated from the Sargasso Sea
MFDWYNETYSDFTQDSFIKLIIDYPRDKLIERISLRTNEILRDGAIKEAERFYKLRVKKDLSSNKVIGLSEIKEYLDKRIDLCELKEKISIKTRQYAKRQSTWARGQMSDWQKIKFNRLETFLKKFPKST

SEQ ID NO: 123513 - protein, 307 aa, Unknown
  Bacterial polypetide isolated from the Sargasso Sea
SVRSTASGKTEWAINWQSQFEDFEIISVDSVMVYKECNVGSAKPSKFILKKHPHYLVNYVSLNCIFSVADFYQAANKLIENIHSQNKIPLMVGGSMMYFNLLKNGLSALPSANKSLRKDLETRMLEKGIEVLYADLKKLDPQAAQTIKPKDSQRVIRAIEVITSTGMTINDNLLSIKPSRLKEKYKLIEFGIFPEKRSELHERIEARQGELVGERLLEEISHIKSNLNISAAHPAMKAINYRQGLNVIEGKLEKSKLFEKSLFATRQLAKRQCTWMRGWENLRNFDLHQWADATEELKNQLNLLEII

SEQ ID NO: 123514 - protein, 63 aa, Unknown
  Bacterial polypetide isolated from the Sargasso Sea
NKVIGIKEIKDFIDKKTSLKEMKLNIVIKTRQYAKRQRTWYRGQMNDWQKIDPKGLIRLIKKL

SEQ ID NO: 123515 - protein, 117 aa, Unknown
  Bacterial polypetide isolated from the Sargasso Sea
YEIKKIFIDIPREELLKKISKRTELMFKNKCIEEVKKFNSLRVNKVLSANKLIGVQEINAFLKGSISMDQCKELINIKTRQYAKRQNTWARGHMKNWNKLYSKDFSVLLKKTLKVIS

SEQ ID NO: 123516 - protein, 211 aa, Unknown
  Bacterial polypetide isolated from the Sargasso Sea
MLINNPLAIIGPTASGKSIIAVELAKRINGEIIGLDSRQIYKNMGIGTAQPTIVEQNGIAHHLIGIKSPKEAISAGAYSKLVYNLIEDIFSRNHVPILCGGSGLYYRAITRGIFKESKTDLKIREELENEYDKDGPKSLMDQLVSVDPDYAINVHPNNKKRLIRALEIYRSTGKPPSQHYNEQLNNSINKMLNLFTIYLEWEKNELNNRIQ

SEQ ID NO: 123517 - protein, 173 aa, Unknown
  Bacterial polypetide isolated from the Sargasso Sea
MENHYYKKNPTIFEGIDRNDIQRVSRAISVYEGTGLTLKEWQNKDNKKYFKAKDFVRLCLTPPKNDLEKKIKNRFDLMLKTGALNEVQKYKKTFVEPATYISANSIIGIYEIGLYQQKKIGIKDLKDRVLVRTRQYAKRQYTWQRGQMKDWKQFNDTNYLDLRKKILSYLSKT

SEQ ID NO: 123518 - protein, 164 aa, Unknown
  Bacterial polypetide isolated from the Sargasso Sea
KKFYEKLLKIDPKVKGKINSNDTQRSIRAYEIKSYSKKSMYDWLAQTKSNFKQNEFLKLYINFERKELIKRIEKRTIKMIKLGAVKEVKKFKTLKVSDQSSVNKVIGIKELSKFLEKKIKIDEAKELIAIKTRQYAKRQATWARSKMTTWNRINPKDLQLWIKN

SEQ ID NO: 123519 - protein, 216 aa, Unknown
  Bacterial polypetide isolated from the Sargasso Sea
KEKKIPVIVAGTGLYFSTITKGISKIPDIDKKTRNKVRNLYKKIGSIKFYNQLTKLDPKIIDKLLPTDTQRVQRAYEVKLKTKKSLFDWFANTKSDFLDFDIRKIFIDIPREELLKKISKRTEQMFKNNCIKEVKSFNSLKINKSLSANKLIGVREINDYLKGSINIMQCKEFINIKTRQYAKRQNTWARGHMKNWNKIYSKNFSNLLKKSLKVVS

SEQ ID NO: 123520 - protein, 96 aa, Unknown
  Bacterial polypetide isolated from the Sargasso Sea
MGPTGAGKTDLAIELYKNLDINIISVDSVQIYKHLNIGSGKPSSNILEKYPHELIDILKPNEIYSTSQFQDDAIDSIRNAFQTKRTPLLVGGTMMY

SEQ ID NO: 123521 - protein, 173 aa, Unknown
  Bacterial polypetide isolated from the Sargasso Sea
MVFNPVKKKFSAGRWLNDVVKKIERIWKKEKTPIVVGGTGLYFKALTDGLVKIPNIPNNIRTKIRKLHQRVGQKKFFSQLIKIDPLAKKFVSPTDKQRSMRAYEVKKFTKKSLYDFTKKTKPYFRKNRFIKIFIDTPKELLSKRIEKRVENMFEDGVIDEVKKFYTLGVHKDL

SEQ ID NO: 123522 - protein, 144 aa, Unknown
  Bacterial polypetide isolated from the Sargasso Sea
VYNATGITLKKWQNKKNKKYFNENAFIKICLTPPKPELEKKIKKRFLDMLNDGAIEEAKKYRNLNLSLHTLYTSNSIIGLKEIELFLAKKISMNELKEKVLIKTRQYAKRQFTWQRGQMKLWKRFSDINYLDLRNKIISYLSKT

SEQ ID NO: 123523 - protein, 236 aa, Unknown
  Bacterial polypetide isolated from the Sargasso Sea
MGINQKIVVVAGPTSSGKSEVAISLAKEFNGELICSDSMQIFRKMDVGTAKPSLQDQDLIPHHQLDLINPDENYSAGQYARDTSKIIKNIQERGRLPILVGGTGLYYRSLMYGISKIPPVPESIRKEIEGWQQKKGTKYCFKLLQKKDPEYADFIHPNDTSRILRSLEVVLSTGKSFYSYRLEQPFGEAIYQFRAVALNWDRSELYQRINKRTLSMLGSGWLAEVEMLLNNYSPEL

SEQ ID NO: 123524 - protein, 76 aa, Unknown
  Bacterial polypetide isolated from the Sargasso Sea
NFLNLKIKKDKTSNKVIGIGEIRDFLLKKTTLIEVKERISIKTRQYAKRQSTWARGHMLNWHRVKPKDLNIFLKKL

SEQ ID NO: 123525 - protein, 199 aa, Unknown
  Bacterial polypetide isolated from the Sargasso Sea
MEAVPAIIGPTASGKTTLAIHLAKKINGEIIGLDSRQIYKDIPIGTAQPNPSEKKTIKHHLIGVKPIKESINAGEYAKLVVRCIEKIKLKNKIPIICGGSGLYFRAISKGIFESSRSELDVRKKLELKYENEGGVRMLDRLKELDYEYSKHIHANNKKRLVRALEIFETTGKTPSVHFAEQKKNYAPVPKLFSIYLKWD

SEQ ID NO: 123526 - protein, 231 aa, Unknown
  Bacterial polypetide isolated from the Sargasso Sea
MDKYLILIAGPTAVGKTQLSLSIAEQYKTDIISCDSRQFYKEMCIGTAVPNADELSKIKHHFIQNLSIEDNYSIGQFERDALAKIEALHKNNNMIVMVGGSGMYIDAVCKGLDDFPPVPDSIREELNLRHQNEGLDALKKELMKLDPDYYELADSSNPHRIIRAIEICMVSGKPFSSFRKQQAKKRNFKTVKIILNRDREELYSRINKRVDRMIKEGLLEEVKNLYNYKDY

SEQ ID NO: 123527 - protein, 197 aa, Unknown
  Bacterial polypetide isolated from the Sargasso Sea
FKSITEGLVEMPNIPLSFRNKVRLLQKRLGQKKFYHNLVKIDPLIINQINPNDVQRTIRAFEIKKFTKKSITQWFKKTKTLFDPTSFIKIYIDFSREELIHRIKKRVDQMFKDGVILEVKKFNNLKVKKDNSSKKIIGIEEISMLLKGEINLIEAKERIFIKTRQYAKRQTTWARGQMTSWQKINPNNLSLTLKKLK

SEQ ID NO: 123528 - protein, 216 aa, Unknown
  Bacterial polypetide isolated from the Sargasso Sea
MSKNIPTIVITGPTASGKTKLSLELAKHNNGEIINADIMQMYEGFNILKAMPSTEETFEIKHNLFGVIKKEVKFTVADWIKLAKDKISEIHKKGKVPIVVGGSGMYLNAAINGLSEIPEIKKIYRHKAEHSYRIKGFDFILKKLIKIDKDFKIEKNDRQRLIRAYEVFLQTGKSIKWWQNNSVAEPIIKNCLKILILPPRDELYSFIDKRVDLMVK

SEQ ID NO: 123529 - protein, 167 aa, Unknown
  Bacterial polypetide isolated from the Sargasso Sea
GQKKFYEKLLKLDPSSRGKINPTDTQRSIRAYEVKKFTKKSLTEWYKNTKSNFVEDDFFKIYIDFPRQELIERINVRTSEIIENGAIKEVKDFVKLRVKKDKSANKAIGVYEIREYLKKQKDLHDTKEKIVIKTRQYAKRQSTWARGNMINWMKLKPQDINNFLKKI

SEQ ID NO: 123530 - protein, 213 aa, Unknown
  Bacterial polypetide isolated from the Sargasso Sea
MRRIITIIGPTASGKTSLAIRLSKQLNAEVIGLDSRQIYKGMSIGTAQPTIEEMDGVKHHLIGFQEPSEPISAGEYSKLLIDRVKAIRSDSKVPIICGGAGLYYRAISKGIFKGSTSDLSARHRLEESYDNNPTKLLDKLRSIDPEYAELVHLNNKKRLVRALEIFEVTGKTPSENFIDQRSNPTAELDLYTIQIKWTRNILNERIMRRTDAM

SEQ ID NO: 123531 - protein, 135 aa, Unknown
  Bacterial polypetide isolated from the Sargasso Sea
TKKSLYDWAKNTKSDFLDYDLRKFYLDTPRDILLNSIKKRTKSILGKQAILEVKKFLKMRVNKSLSANYIIGIKEIKKYIEGHITKKELIELVNIRTRQYAKRQSTWQRGHMMNWEMLYNNDFSVLFKKILKLSS

SEQ ID NO: 123532 - protein, 141 aa, Unknown
  Bacterial polypetide isolated from the Sargasso Sea
RSLRAYEIKSFTKKSMISWFKNTKSDYSHNDFFKICIDFPRKDLIERINKRSENMIKLGAILEVKRFIKLRVPKNKSLSKAIGISEIKQYLQKKIQAEQLIEKISIKTRQYAKRQSTWARGHMKDWNKVNPAGLEKLLKKI

SEQ ID NO: 123533 - protein, 156 aa, Unknown
  Bacterial polypetide isolated from the Sargasso Sea
ERSVLPTDTQRSMRAYEVKKFTGKSLFKFLRETKSNFKKNVFKKLFINIPREILNEKIEKRVEKMFSDGAVDEVKKFYKMKVNKEMSSNKIIGIKEIGDYLHGKTTLIKAKELIAQKTRQYAKRQFTWARGHMKSWETIYSTNINDLFKKTINKIS

SEQ ID NO: 123534 - protein, 153 aa, Unknown
  Bacterial polypetide isolated from the Sargasso Sea
DDVRILRALEIIHATDEKLSNVLSEKPKNSFKDDFTIFHFGIENERDVLHQRIEKRLKQIIEAGLIDEVIYLLNKYHIPSDHPLRKAVNYKQAIHYIEKKYTLKEFEQECLYATRQLAKRQVTWLRSWDKNKIYDINDTNILENKFKKAISLL

SEQ ID NO: 123535 - protein, 283 aa, Unknown
  Bacterial polypetide isolated from the Sargasso Sea
GASIEPMSSDKQENRCIVICGPTASGKSALAMKLANELNGEIINADSLQVYNELKILTSRPSINDTENIPHNLFGIRKMVEPCSVNIWIKLAKKSISQIIDRGRIPIACGGTGMYIHYLSKRLSKIPEIPNRVRLQARERLKVLGNENFSKELIKLDPLLGSKIPFGDSQRLTRAWEVMKATGQSLAAWNMEPDQATGLNLYHVLLMPDREILYRTCDQRFLGFMDQGAVAEAETIKNMNLDPSLPAMKALGLSQIIKYLDGEMNLDDAIKQAQQKTRNYAKR

SEQ ID NO: 123536 - protein, 150 aa, Unknown
  Bacterial polypetide isolated from the Sargasso Sea
GKINPTDTQRSIRAYEVKKFTKISLTEWFKNTKSNFVEDDFFKVYIDFPRQELIERINVRTSEMIENGALNEVKDFIKLRVKKDKSANKAIGVNEIREYLKKQKDLNDTKEKIAIKTRQYAKRQSTWARANMISWMKLKPQDINNFLKKI

SEQ ID NO: 123537 - protein, 261 aa, Unknown
  Bacterial polypetide isolated from the Sargasso Sea
MTKFICISGCTASGKSGLAEDLAAYLGNTVIINADALQVYKCWRILTDRPKEGSFNNLKLYGHVSCKTGYNVAHWLTEIKYLVEKFINTYETFIFVGGTGLYFNSLLNGLSQIPEIDLDIREQSIKHSNSCDFFIKELEKRDPEILKVIDNNNVRRLQRAWEVITQTGKSLNYWQNKPAHPIISNNETTKILLNPRKEELIKKIKKRVERMIARGVIDEVSSVHSKTWNTNLPFSKALGAKEIISYLNNEYNLDQMEIYDS

SEQ ID NO: 123538 - protein, 135 aa, Unknown
  Bacterial polypetide isolated from the Sargasso Sea
EVKKFTKKSLSEWFKNTKSNFVEDDFFKVYLDFPRQELIERINVRTREMIENGALKEVEDFIKLRVKKDKSANKAIGVNEIREYLKKQNNLNDTKEKIAIKTRQYAKRQSTWARGNMISWKKLKPQDINIFLKKI

SEQ ID NO: 123539 - protein, 142 aa, Unknown
  Bacterial polypetide isolated from the Sargasso Sea
MPEASLPILLLMGPTCSGKTALAIEAAQTLPIEIINVDSALVYKGLNIGAARPTEEELALAPHRLLGFRDLTEPYSAADFRADALKHIEQIHNNGKLPLLVGGTVLYFKALVEGLAPLPEADPVVRAEIAALADAQGWPAVH

SEQ ID NO: 123540 - protein, 219 aa, Unknown
  Bacterial polypetide isolated from the Sargasso Sea
MNFYIQNEFEALVISGPTGSGKNMIANIIGNHLPIMIINADAIQVYKKWKILSGRPTDIEQKKVIHKLYGHYNGNYYNVGKWIKEVAYYIDKAKKNHLLPVIVGGTGLYINILFQGISNIPSIPIKIRNKGKKILNSDPLFFYNYLKQKDPHILSIIDCNNYRRLQRAWEVMETTGVSLIEFHKDRETPILNPKKTKKIILCVDKILLNKIIDFRFDKM

SEQ ID NO: 123541 - protein, 117 aa, Unknown
  Bacterial polypetide isolated from the Sargasso Sea
MKTLSPVICILGPTNSGKTDLSLRLFDEVSAELISVDSVQIYKHADIGSNKISKELQKKYPHELIDIIEPYEIYSVGEFLKDLKCSMDKATESNKVPILVGGSMMYFFSYLVGFDDL

SEQ ID NO: 123542 - protein, 159 aa, Unknown
  Bacterial polypetide isolated from the Sargasso Sea
DPLCKKKINKNDSQRSIRAYEVKKFTNKSLFDWYSETYSDFTQDSFIKLHIDYPRDKLIEKISLRTNEMLRDGAIKEAKRFYKLRIKKDLSSNKVIGLSEIKDYLEKRINLNELKEKISIKTRQYAKRQSTWARGQMSDWQKIKFDRVKSFIKKFPKSA

SEQ ID NO: 123543 - protein, 39 aa, Unknown
  Bacterial polypetide isolated from the Sargasso Sea
MDIQSKIILISGPTASGKSRFAIKLAKKIKGEIINADSM

SEQ ID NO: 123544 - protein, 155 aa, Unknown
  Bacterial polypetide isolated from the Sargasso Sea
AELLHPNDTSRILRSLEVLLSTGKSIYSYQLEQPFGEARYPFQAVALSWDRNDLYQRINQRTLSMLGSGWLGEVEMLLNSYSPELKPMQSIGYREVVQYLQNKLKWGAMVEEIQKRTRQFAKRQLTWFRREAKIEWYEPVEHDRILADIKVYLEN

SEQ ID NO: 123545 - protein, 148 aa, Unknown
  Bacterial polypetide isolated from the Sargasso Sea
INSLDVQRSLRAFEIKSFTKKSMISWFKNTKSNYDHNDFFKICIDFPRKDLIERINKRSENMIKLGAILEVNKFIKMRVPKNKSLSKAIGISEIKQYLQKKIQTEQLIEKISIKTRQYAKRQSTWARGHMKDWIKVDPAGLEKLLKKI

SEQ ID NO: 123546 - protein, 79 aa, Unknown
  Bacterial polypetide isolated from the Sargasso Sea
EVKKFIKLRVPKDKSLSKAIGMNEIKEYLQKRIQTEQLIEKISIKTRQYAKRQSTWARGNMKDWNNVNPDALDKFLKKI

SEQ ID NO: 123547 - protein, 109 aa, Unknown
  Bacterial polypetide isolated from the Sargasso Sea
MYPRAILIGGATATGKTKLAFEISKLFPSIIINADSMQVYKDLRILTNRPSKEDEKIYNCKLFGSVSYPDALNVALWIKEVKKILSKEKKKIPIFVGGTGLYLENLIEE

SEQ ID NO: 123548 - protein, 186 aa, Unknown
  Bacterial polypetide isolated from the Sargasso Sea
MLYFLTGMTASGKSALAHKIAIERNLDIISLDSMAVYKGLDILTDKPTEVMRSQVLYYGIDIADSDQNFSVVDYLNYLIEMEIPEKSFVKDFLVVGGTGLYFRSLINSFEFRPTDPAIRSELELLNVDQLLKFHKLYDIEPPETEINKRRLIRNIENSILEDVKYVFPPINIPEKIVGVFWNHPDY

SEQ ID NO: 123549 - protein, 287 aa, Unknown
  Bacterial polypetide isolated from the Sargasso Sea
MKAILIAGPTGIGKSKLVSLLEKKINSAVINADAMQVYSSLRIITARPPSKPNYYLYGHVEDNVKYSVGNWLKDVAHTIEELSKNSPDKILIFVGGTGLYFNTLVNGISFIPDVDPEIKSKSSELFREHGIKYFLNALEKFDQITFSSIDKSNPRRVLRAWEVLNATGKPISYFHRHRMPSLISAKESVKCVLKLKKPTLDHLNAERFRGMLNAGAIEECDLARKNGMGPLSQSFKAIGVSEIANFLDGGVTLKDSEKNAITRTRQYSKRQVTWFRNNFSDWKCYSL

SEQ ID NO: 123550 - protein, 183 aa, Unknown
  Bacterial polypetide isolated from the Sargasso Sea
IPSNFRNEIRNLHKRIGQKKFFLKLLKIDPLIKDRVNYLDVQRSIRAYEIKSFTKKSMINWFKNTKSNYDHNDFFKICIDFPRKDLIERINKRTENMIKSGAILEVKKFIKLRVPKNKSLSKAIGISEIKQYLQKKMQTEQLIEKISIKTRQYAKRQSTWARGHMKDWNKVDPASLEKLLKKI

SEQ ID NO: 123551 - protein, 136 aa, Unknown
  Bacterial polypetide isolated from the Sargasso Sea
MRVKSFTKKSLYEWIKNTYSSFENEDFFKIYIDFPRIELIKQINIRVKDMIANGAILEVKKFVNLRVSKNKPASKAIGIKEIKEYLNKKIQIADVIEKISIKTRQYAKRQTTWGRGNMEDWNKIKSESLDKFLKKI

SEQ ID NO: 123552 - protein, 188 aa, Unknown
  Bacterial polypetide isolated from the Sargasso Sea
VKIPNIPIPIRNKIRRMQNSLGQKNFYSKLLKNDSSVKNRIDPTDVQRSIRAYEVISFTKKSIFEWYKKTKPSFQNDQFIKIYIDYPRDELISKISKRVDQMMKNGAIQEVKDFLKLNLKSDNNIFKVIGIREIKEFIDKKTSMNDLKQNIVIKTRQYAKRQRTWSRGQMNDWLKFDAQALLKFINKL

SEQ ID NO: 123553 - protein, 210 aa, Unknown
  Bacterial polypetide isolated from the Sargasso Sea
IIVGGTGMYIDKLINGLIDIPSIPEDVKKESEKYILENGINKFIKEVKKIDPESFKNISINDINRLRRIWEVYNYTNIKFSNWLKNKNNNYLPKQDYKLLLFTPDRNEIYSRVNRRFEEMMEKGAINEVKKLISLNLDNSLPIMRAHGVPEISSYLLKSITFDECILKGQQVTRNYVKRQLTWWRSTSLRIYGSFDKFPSNIDLNSLKLT

SEQ ID NO: 123554 - protein, 98 aa, Unknown
  Bacterial polypetide isolated from the Sargasso Sea
MIERINLRSKEMIKNGAIKEVKNFIKLKVKKDKSVNKAIGINEIRQYLNNEKKLEDIIENISIKTRQYAKRQSTWARGNMKSWLKLKPNELNNFLKKI

SEQ ID NO: 123555 - protein, 159 aa, Unknown
  Bacterial polypetide isolated from the Sargasso Sea
LIKIDPLIKNKINPKDPQRSIRAFEVKKYSKVSLIEWFKKTDKKFEDEDFLKIYIEVSRPDLIERINRRVHEMFRNGAIHEVKGFLKIKVTNDKSPNKIIGIKEIAKFLMGDYDLSTVKDLISIKTRQYAKRQSTWARGQMSSWEKIDYRDLSTFLKKF

SEQ ID NO: 123556 - protein, 58 aa, Unknown
  Bacterial polypetide isolated from the Sargasso Sea
MSKKLVLLAGPTASGKSNLAIKLAKKLNGEIINADSMQIFKEFTILSSRPTLNQTRKV

SEQ ID NO: 123557 - protein, 171 aa, Unknown
  Bacterial polypetide isolated from the Sargasso Sea
KKNIKKIRNKNKVPVLVGGTGLYFKALSDGLVKIPKIPIPVRDKIRRMQNKLGQKKFYLKLLNNDPLVKNKIDPTDVQRSIRAYEVIKFTKKSVFSWYKKTKPSFKKDQFIKIYIDYPKEILINKISKRVDQMMKNGAIQEVKDFLKLDLKSDSNIFKVIGIREIKEFIDK

SEQ ID NO: 123558 - protein, 132 aa, Unknown
  Bacterial polypetide isolated from the Sargasso Sea
KKYSYWINKKNKIFLKNFSNKIFLFIPPRDEIYKKIDFRFNTMINEGAIEEVKKLISLNLDFSLPIMKAHGVPEITNYLCGKIDLEECIKKSQQVTRNYAKRQLTWWRSSRLSINKVFDQFPNEIDEKLIKI

SEQ ID NO: 123559 - protein, 166 aa, Unknown
  Bacterial polypetide isolated from the Sargasso Sea
QKKFFFKLLKIDPLIKDQINSFDVQRSIRAYEIKSFTKKSMISWFKNTKSDYAHSDFFKIYIDFPRKDLIERINKRSKDMIKSGAILEVKKFIKLRVPKNKSLSKAIGISEIKQYLQEKIQREQLIEKISIKTRQYAKRQSTWARGNMKDWNKVNPDGLDKLLKKI

SEQ ID NO: 123560 - protein, 58 aa, Unknown
  Bacterial polypetide isolated from the Sargasso Sea
MDLKSKIILISGPTASGKSKFAIQLAKKINGELINADSMQIFKELKILTARPQRNDLK

SEQ ID NO: 123561 - protein, 96 aa, Unknown
  Bacterial polypetide isolated from the Sargasso Sea
MDLKSKIILISGPTASGKSKFAIQLAKKINGEVINADSMQIFKELKILTARPQRNDLKNIKHHLYGFKSVKDNYSTGNWLNDAKTKINNIKKKNKS

SEQ ID NO: 123562 - protein, 221 aa, Unknown
  Bacterial polypetide isolated from the Sargasso Sea
KIIKNMKKIFSFINVGGSGMYIDSLLNGLIPIPQIQEKYKNDSLSLLNEIGTKKFIEIINNFDSESLSKISLKDSSRMRRIWEVYQSTGKKYSYWINKKNKIFLKNFSNKIFLFIPPREDIYKKINSRFNTMINEGAIEEVKKLISLNLDVSLPIMKAHGVPEITNYLRGKIDLEECIQTSQQVTRNYAKRQLTWWRTSRLSINKVFDQFPNEIDEKLIKI

SEQ ID NO: 123563 - protein, 93 aa, Unknown
  Bacterial polypetide isolated from the Sargasso Sea
QAMIDQGLIEEVEGLLKKKQMDSSKSSMKSVGYKQVSDYLEGNLSLDEMVFRAVTATRQLAKRQMTWLRSWNGVIWLEEESDNNLDIVLETIN

SEQ ID NO: 123564 - protein, 242 aa, Unknown
  Bacterial polypetide isolated from the Sargasso Sea
GYVDGSNRYNVEKWCQDASQVIKSLNKKNINPIFVGGTGLYIDTLINGIASIPSVPESIRNDSKNLLQKVGKEEFYKIVKKIDEDSIKLIFPNDIQRLRRIWEVFNYSNKKFSEWKKNKNKKFITSLDYKILLFLPDRKKNYERVNKRVLTMIKSGAIEEIENLLKLNYNKDLPIMRAHGVPEISAYLKNKITLEDCIKKIQLVTRHYVKRQNTWWNSSNLQIFKKITEFPDNLDKNLINLG

SEQ ID NO: 123565 - protein, 213 aa, Unknown
  Bacterial polypetide isolated from the Sargasso Sea
PLLVGGTMMYFNALFKGINDIPEGNEAIREELQRELDNRGVEKLFNDLKEIDPESAKTIKENDKQRIIRALEVFKISGKRISDFKKEAVENIFEEFEFINIGIFPNDREILQARIRERIVEMINTGLIKEAQEIIKLENIAKNHPALNSINYKEAIQVINGELDASELEEKCVISTRQLIKRQLTWMRSFNFSKTFDTNSAIEIEKYLEEQIF

SEQ ID NO: 123566 - protein, 261 aa, Unknown
  Bacterial polypetide isolated from the Sargasso Sea
NILTARPSKKDLLEAKHELYGYVDAAVRYNVSNWCNDVLKIIKNNEENNLPSIIVGGSGMYIDSLLNGLIPIPPIPEKYKNDSLSLLNEIGIKKFKEVINNFDSESLSKISLQDSSRMRRVWEVYQSTGKKYSYWINKKNKIFLKNFSNKIFLFIPPRDDIYKKINLRFNTMINEGAIEEVKKLISLNLDVSLPIMKAHGVPEITNYLCGKIDLEECIKKSQQVTRNYAKRQLTWWRSSRLSINKVFDQFPNEIDEKLIKI

SEQ ID NO: 123567 - protein, 191 aa, Unknown
  Bacterial polypetide isolated from the Sargasso Sea
MSNSIFFITGPTGIGKSNLAIKLSKKINGEILNADSMQIYKELKIITARPTDTDNKLVNHHLYGYVSGAERYNVEKWCNDASNIINKLLKDNKTPILVGGSGLYIETLINGIASIPTIPESIKKETNDLFNKSGIEEFYNLIKKIDYESLKKISKNDAQRLKRIWEVYKHTGKKLSLWKKNNNKKFLNIEN

SEQ ID NO: 123568 - protein, 250 aa, Unknown
  Bacterial polypetide isolated from the Sargasso Sea
MSKIKVLVIAGPTTSGKSELAVAIAEQFGGVVINGDSMQLYDGLNIISAAPDKLLRKKVPHKLFGVRDPASPCSAGQWVELVQKEILNAQSSNLLPIIVGGTGMYLKALISGLVKLPPISEKIRRTLRNRLKVEGPAALHAELSQIDPVSANKLAVSDGQRVLRGLEVYLMTGKTLGQWQMDKTGQNTTEGFTFKSLLISPPRKLLYQNCNSRFEKMIKCGVIEEVRALSKKNLSPNLPAMEALGVPEII

SEQ ID NO: 123569 - protein, 85 aa, Unknown
  Bacterial polypetide isolated from the Sargasso Sea
MKKILTIIGPTASGKTSLAVHLSKKLNAEIVGLDSRQLYRGMSIGTAQPTIKEMGGVKHHLIGFQDPSDPISAGQYAKLITDKVK

SEQ ID NO: 123570 - protein, 100 aa, Unknown
  Bacterial polypetide isolated from the Sargasso Sea
AELIKRIEDRTQDMIKNGAVSEVKKFIKLKVPKVKTASKAIGIAEIREYLKKKIEISEVIQKISIKTRQYAKRQSTWGRGNMMDWNKIKSEDLNKFLKKI

SEQ ID NO: 123571 - protein, 248 aa, Unknown
  Bacterial polypetide isolated from the Sargasso Sea
MSQQLIKKICKDIVSINNDTGPVIIGIDGPTAVGKTFLAKNLKSKLKSKFKSIWICQLDWTLKSRNYRSSSLKEFRRKRNNFYYEAQDHMSLNIISENLKKIKNHNFDKKNFLKLKISSLYDRQGSSKNDLTVKTTIYKNTLIIVEGHYTSIPTLNILIDYNILLLGDKKELLNRKISRVKHYRSSSDTTEYFNLIDIPSFTNHLTLFQNNYNLIIDNTLYRKPIIKTNDYVKFWISRVFDKKSLNKS

SEQ ID NO: 123572 - protein, 296 aa, Unknown
  Bacterial polypetide isolated from the Sargasso Sea
SRKNKSAIKTFDYLPVEIISVDSVMIYKKCDIGSAKPSKEILKQYPHHLVDVESLDNIFSVADFLNLAKALIEETHDKNKIPFFVGGSMMYFRSLFYGIHELPGRDLEYRKELNEIKQNKSNSYLFKMLKGIDPNYAADIDHNDEIRIIRALEIYKNSGKKLSEIFSNNPTNGIREKYEVIQFGIKTDREILHERIKARLREMIDSGLIEEAENILKDFNIADDHPIRKAVNYKQSIEYINGKYPKDILFDKALYATRQLAKRQVTWMKSWDNYINVDIEDIKTLTNKVKNSLSSL

SEQ ID NO: 123573 - protein, 234 aa, Unknown
  Bacterial polypetide isolated from the Sargasso Sea
MTGPTAAGKTELALSLASNFPIDIVNADSAQIYRGMNIGTAKSSKSILNRYPHYLIDIIDPEESYSAGSFVRDASYQIDASIKNNRIPLIVGGTMLYLNSLCNGIAQLPEKNTEIREEIEKKAQKQGWGVIYAELKKIDLCAANNINKNDKQRIQRALEVYYITGKKISELQKKTTPQNDYQFEIFSLENINRDELYSKINNRFLDMLEAGFVDEVRILREREGLSSQHMSMHS

SEQ ID NO: 123574 - protein, 314 aa, Unknown
  Bacterial polypetide isolated from the Sargasso Sea
MTSIKTSLAIIGPTASGKSRLAIEIAKKIKGEIIGLDSRQIYKDMSIGTAQLNKEEEEGIPHHLIGIKSPAERISAGAYAKLVLDEIKNIQSRNHVPIICGGSGLYFRSLIQGIFKGSKSDYDVRKKLENEYDKLGSHVLIDRLNRIDPDYAISVHPNNKKRLIRALEIYEITGKSPTENFKQQSKKNKSKLKILSIYLEWERKILNDRIKNRTRMMLKAGWIDEVEKLIRKYPNKNLQPLDSIGYREIVLWLNSNRTLDDLEKMIYIKTRQFSVRQIKWFKKESIDFTIKMNNNSSIDKVSNNIIEKIMLSLS

SEQ ID NO: 123575 - protein, 305 aa, Unknown
  Bacterial polypetide isolated from the Sargasso Sea
MNNIFILIGPTASGKSNLAMLLMSKFPFEIINADLYSTYKGLNIGTAKPLKEELNKYKHHLINILEPATDYNVSQYCKDANECINEILSLNKIPLIVGGTMMYIYQLLNGLSHEYDLSDTDSKLIQYIQNQYTNEQIVKAISSFNPDLTNKININDSYRIEKLLERLISNKNKKNNFKGLYKEKNLKIHIIFITIDDRELLRENIKKRTSNMLHDGLIDEVKNLLCKFNLNNKTQCMKAIGYKETLQFLNKDISLEELHSSITIATQQLAKRQVTWMNKFKIDYRFSYPENNYHSLFNYIKKILN

SEQ ID NO: 123576 - protein, 314 aa, Unknown
  Bacterial polypetide isolated from the Sargasso Sea
MLNKDRNIYTIIGPTAIGKSKIAIDLVDKYPFEIISLDSSMIFREMNIGTDKPDSKILSKYKHHLIDIINPNESYNVFQYCKDIDIAIKEIFNNKKIPLLVGGTMMYFNAIINGLDNIPNKESYDKEFVSDLMNKYSSKTMHDCLKEIDHDSFLRINCNDQQRIERAIVVYVSTGKSLSSYYKSSNNIFEKYNFINIKLFTDDRNYIHNKIKMRTIRMFERGLIDEVKDIIKKYPNISKCQSMKSIGYKHIIEYLNNALKKDDLIDRCVFATRQLAKRQFTWMKNFSYETEIEISSTKNILKKIEKNLHLEKLM

SEQ ID NO: 123577 - protein, 310 aa, Unknown
  Bacterial polypetide isolated from the Sargasso Sea
MKKILTIIGPTASGKTSLAVYLSKKLNAEIIGLDSRQLYRGMPIGTAQPTNKEMGGVKHHLIGFQDPSDPISAGQYAKLITDKVKNIQANGKNPIICGGAGLYYRAISRGIFKGSVSDPINRDRLEKLYDNNPSELLDHLNAIDPEYAELVHINNKKRLVRALEIFEATGKAPSEHFHDQKSNPTTELDLFTVKIKWKRNILNERIQNRADEMLDQGWIEEVETLLKQQDREKKLYTALNSIGYSQIQSYLRNKMSYEDMREDIIIKTRQFARRQVKWFAKEPIDLALEMDNLVTKEILQILHCLFQVII

SEQ ID NO: 123578 - protein, 415 aa, Unknown
  Bacterial polypetide isolated from the Sargasso Sea
MISSGLAILFSCLVLVFPEASNNFLSRSRQFVVSRFDTLFTVSMLSFTFIIFFLIVSPFGKIKLGGKDSSPEFSFLSWICMLFAAGVGIGMTFYGAAEPLSYYTGVFGTPLNITPETEEARRLAFSATIFHWGINGWSVYAIIGLSLAFFSYNWKLPLTIRSIFFPLLGNKIWGWQGDLIDIIAVLATLFGLATSLGLGAQQASSGLFYLFNLPNNLASQSLVIIFITSVAIFSVYRGLDKGVRILSNLNIALALLLLLFVVLAGPTYQIISSYGANLTAYFQDIVPLSNWNRPEDRDWYQDWTIFYWAWWISWSPFVGMFIARISKGRTIREFLSVVMFVPLIFNLIWFSSFGGAAIFQFEEGIGRLSEPVSNISLVLFYMLDNLFLPTFTSLFALFMLVLFFVTSSDSGSLVI

SEQ ID NO: 123579 - protein, 246 aa, Unknown
  Bacterial polypetide isolated from the Sargasso Sea
MSQNKKIFSIIGPTASGKTELALKLVRELPFEIIGVDSVQIYKFFDVGSAKPSQEILDSIKHHLVDEIDPRNIFTVWNFYEEALTRVNYIFEQDKVPLFVGGSMMYFKCLFDGINDIPASNIEIRNDLEHELENNGIESLYKRLKDIDPDYARNIKQKDTQRIIRALDVFESSQKKMSELQDLPKLNLFKDFSFVNIALLPQDKMHAEESIRKRVYQMFKDGLEDEVKNLIKRDIPRDHPAMNAIK

SEQ ID NO: 123580 - protein, 63 aa, Unknown
  Bacterial polypetide isolated from the Sargasso Sea
YRQVCEYLAGDYSLDDMIDRGINSTRQLAKRQMTWMRSWDNIIFLENNSSLFTSVKDLILKNS

SEQ ID NO: 123581 - protein, 189 aa, Unknown
  Bacterial polypetide isolated from the Sargasso Sea
LVKIPSTPIKIRNEIRLMHSKVGQDKFYNKLLKLDPTSRNKINPTDPHRSIRAYEVKLHTKKSIHEWYKNTKSNFQKSDFYKIYIDFPRLELIERINLRSKEMIKNGAIKEVKNFIKLKVKKDKSVNKAIGINEIRQYLNDEKELQDIIENISIKTRQYAKRQSTWARGNMKSWLKLKPNELNNFLKKI

SEQ ID NO: 123582 - protein, 312 aa, Unknown
  Bacterial polypetide isolated from the Sargasso Sea
MQNSKIKKKIITLIGPTACNKTSNAVHLIKKFPISIIGVDSVQIYKRFNIGSAKPPKEILEKYKHHLVDSADPENIFSVKDFYDQAYRIVMQAHSNNRIPLLVGGTMMYFNALFKGINDIPEGNEAIREELQRELDNRGVDKLFNELKEIDPESAKTIKENDKQRIMRALEVFKISGKKISDFKKEDTENIFEEFEFINLGIFPSDREILQARIRERIVEMINMGLIKEAQEIIKLDNIAKNHPALNSINYKEAIQVINGELDANELEEKCVISTRQLVKRQLTWMRGFNFSKTFDINSAIEIEKYLEEQIF

SEQ ID NO: 123583 - protein, 87 aa, Unknown
  Bacterial polypetide isolated from the Sargasso Sea
MIKSGAIEEVKKFLKLKVRHDKTSNKVIGIKEIKDFIEKKSNSADLIEKISIKTRQYAKRQATWSRGQMNDWQKINPKDLRKFLKKI

SEQ ID NO: 123584 - protein, 87 aa, Unknown
  Bacterial polypetide isolated from the Sargasso Sea
FAKGAVEEVRRFNKLKVKKENSSNKVIGIKEISNFLNKKCSLDQTKELIAIKTRQYAKRQATWARGQMGSWEKINPKNLALALKKLK

SEQ ID NO: 123585 - protein, 118 aa, Unknown
  Bacterial polypetide isolated from the Sargasso Sea
VKLCLLPPKDFLEKNIKKRFNEMLKKGALEEVRNYRDNVYTPAFYFSVHTTIGISEILSYLLKKISLNECKDRVLIRTRQYAKRQYTWQRGQMKDWKQFRDTNYLDLRKKILSYLSKT

SEQ ID NO: 123586 - protein, 181 aa, Unknown
  Bacterial polypetide isolated from the Sargasso Sea
LKIRNKTRNLQKKIGQKKFYSKLLKLDPNIKSKIIETDSQRSIRAYEVKYYTKKSLYDWFKNTKSKFQNEIFFKIYIDYPRNELLERIASRSAQMLKDGAINEVKRFSKLKIKKDNSSNKVIGIAEIKEHLEKKLDLKDVNEKIMIKTRQYAKRQSTWARGQMLTWNKINPKDLKKFLKKI

SEQ ID NO: 123587 - protein, 300 aa, Unknown
  Bacterial polypetide isolated from the Sargasso Sea
MNSTLISISGPTAVGKTLFAIELANKFDTEIISFDSRQFYKEMSIGTAVPSKDELAQVKHHFIQHKSIHDQYKVSDYIHDVDELIKTLLSKKKHIILVGGSNLYLKSIIYGLDDIPEVPLEIRNKLNFEFQTHGIKYIQNLLKKLDPEYYNKVDKLNHRRIIRALEVSIFSNKPFSYFLKGTVKKRYNHHSIVLNLDRNILYERINNRVDQMIDHGLIDEVKKLNLHKNLNPLNTIGYKEIFKYLNGELDLEKSIELIKMNTRRFAKKQLTWLKNDGDHLWLDSSSNKLSNIDLLFQKLF

SEQ ID NO: 123588 - protein, 168 aa, Unknown
  Bacterial polypetide isolated from the Sargasso Sea
MGQNKFYKQLLKLDPLSKNKINPTDTQRSIRAFEVKKFTKKSLHDWFKNTKSNYLKEDFFKIYIDYPRDELVERIYQRTGKMIKMGAVNEVKRFLKLKIKKQMTAYKAIGVNEIQEYLDNEKKIDEIKEKISIKTRQYAKRQSTWARGHMSDWVKLKPSEINKFLKKI

SEQ ID NO: 123589 - protein, 275 aa, Unknown
  Bacterial polypetide isolated from the Sargasso Sea
MLYFLTGITASGKSRLAHEIAIERNFDIISLDSMAVYKGLDILTAKPNDVMRSQVLYYGLDIAEPDQNFSVVDYLNYLIEMEIPEKSFEKDYLVVGGTGLYFRSLINSFEFRPTDPAIRSELEQLNVDQLLKFHEMYEIKTPDVEINKRRLIRNIEDSILEDVKYVFPPINIPENIVGIFWNHPDYKDRISKRTDEMMKQGVIDEMNSITNPSKTVLQAIGMNLSNDLAENINLKTNRLAKKQLTWFKQEDRIKIVDTDDEKVVRKEMEMIIDGK

SEQ ID NO: 123590 - protein, 55 aa, Unknown
  Bacterial polypetide isolated from the Sargasso Sea
MNKRDVLVIFGPTASGKSKLAVQIASKQKSAIINSDSLQVYKELKILTDRPHEEI

SEQ ID NO: 123591 - protein, 189 aa, Unknown
  Bacterial polypetide isolated from the Sargasso Sea
VRIPKISAKKRKIVSGLQKKLGQINFYKKLIKLDPKIKKIVNQNDYQRSIRAYEVKKFTRKSIVDWHKDTKPLFMKDTFVKLYIDCSKDLLLERIKLRAEKMLPYGMHEVKKIRGIKIPKGYSSTKIIGFTEIKRLLDKKQDKEQTVEQIVIKTRQYAKRQATWARGKMKNWKTINTLDKKISLKKLFN

SEQ ID NO: 123592 - protein, 191 aa, Unknown
  Bacterial polypetide isolated from the Sargasso Sea
MSIYFIVGPTAIGKSDLALRIAQHINGEIINADSMQVYKNLNILTARPQKQDLKKIKHHLYGHIEGFNRYNVAHWCNESLKIIKKNNNKKPLIFVGGTGMYIDKLINGLFNIPTIPEKLKKQSEKELNKLGINKFYEEVIKVDKEATIKINSNDSIRLRRIWEIFMHTKIPMSTWTKKNEKKFIQNDDYYL

SEQ ID NO: 123593 - protein, 156 aa, Unknown
  Bacterial polypetide isolated from the Sargasso Sea
LDPTSRNKINPTDPHRSIRAYEVKLHTKKSIHEWYKNTKSNFQKSDFYKIYIDFPRLELIERINLRSKEMIKNGAIKEVKNFIKLKVKKDKSVNKAIGINEIRQYLNNEKELQDIIENISIKTRQYAKRQSTWARGNMDSWLKLKPNELNNFLKKI

SEQ ID NO: 123594 - protein, 275 aa, Unknown
  Bacterial polypetide isolated from the Sargasso Sea
MLYFLTGMTASGKSALAHKIAIERNIDIISLDSMAVYKGLDILTDKPTDVMRSQVLYYGIDIADSDQNFSVVDYLNYLIEMEIPEKSFVKDFLVVGGTGLYFRSLINSFEFRPTDPAIRSELELLNVDQLLKFHKLYDIDPPETEINKRRLIRNIENSILEDVKYIFPPINIPEKIVGVFWHHPDYLKRIKDRTSNMLDRGLVDEMNNIQNPSKTVLQAIGMNLSSDLEENINLKTNRLAKKQLTWFKQEDRIKIIETNEELVVRDELERIIDEK

SEQ ID NO: 123595 - protein, 110 aa, Unknown
  Bacterial polypetide isolated from the Sargasso Sea
FFKIYIDFPRAELIKRIEDRTRDMIKNGAVSEVKKFIKLKVPKVKTASKAIGIAEIREYLKKKIEISEVIQKISIKTRQYAKRQSTWGRGNMMDWNKIKSEDLNKFLKKI

SEQ ID NO: 123596 - protein, 177 aa, Unknown
  Bacterial polypetide isolated from the Sargasso Sea
MHKLIGQKKFYERLIKLDPISKNKISSTDTQRTLRAYEVKKYTKKSIFDWAKKTKPLFEKHVFKKFFINTPKNQLLKNIELRTQEMIDKKCINEVIRFKKRRLKKSLSPNKIIGVQEILRFLKGELDLKSLLELINIKTRQYAKRQKTWSRAHMSDWHMVYSSNSSTLLKKILNLVS

SEQ ID NO: 123597 - protein, 113 aa, Unknown
  Bacterial polypetide isolated from the Sargasso Sea
LHERIAERFRIIVADGFLDEVKALRARGDLDKNMPSIRCVGYRQAWDYLDGEYDYDEMIERGIIATRQLAKRQITWLRSWPDLHWLDTDDPDIVRNTLKILSTSAIFSRENGC

SEQ ID NO: 123598 - protein, 171 aa, Unknown
  Bacterial polypetide isolated from the Sargasso Sea
MEAVPAIIGPTASGKTTLAIQLAKKINGEIIGLDSRQIYKDISIGTAQPNPSEKKTIKHHLIGVKPINETINAGEYAKLVMRCIEKIKLKNKIPIICGGSGLYFRAISRGIFESSRSELDVRKKLELKYENEGGVRMLDRLKELDYEYSKHIHANNKKRLVRALEIFEMTG

SEQ ID NO: 123599 - protein, 174 aa, Unknown
  Bacterial polypetide isolated from the Sargasso Sea
IRDHKNIGQKNFYKKLVKLDPLVKNKIKLADVQRTIRAYEVKLFTKKSIYEWFKNTRSKYKKEEFFKIYIDYPRKELLEKIYTRVIKMIKTGAEKEVKNFLKLKIGQNKTSNKVIGINEIRDFIEKKSNLSELTEKISIKTRQYAKRQATWARGQMYDWQKVNPKDLGKFLKKI

SEQ ID NO: 123600 - protein, 101 aa, Unknown
  Bacterial polypetide isolated from the Sargasso Sea
NILIDRINKRVDRMFASDVEKEVKKFNALKVKKDYSANKVIGIREISEYLKKKATLLETKEKISIKTRQYAKRQSTWSRKHMSSWQFIDPLNVALTRKFFK

SEQ ID NO: 123601 - protein, 310 aa, Unknown
  Bacterial polypetide isolated from the Sargasso Sea
MDKIITIIGPTASGKTSLAIQLSKELEGEVISLDSRQIYKGMGIGTAQPTIEEMMGVKHHLIGCIHPKEPVSAGRYAELVIDKVALVQKNGKIPIICGGAGLYYRAIKTGIFSDSITDVNLRNELESSYDDDPNVLLKKLEEIDPEYASIVHINNKKRLVRALEIFGTTGKAPSINYQNQKSNPTKVLDLFTIRLDWDRKNLNKRINQRLDFMLSSGWIDEVNDLVKCERKENSLFPALNTIGYGQIKSFLKNDISFEKMKENIFIKTRQFAKRQNQWFNNENTELTINMDNLKIDEIIQILCGLVKVMI

SEQ ID NO: 123602 - protein, 27 aa, Unknown
  Bacterial polypetide isolated from the Sargasso Sea
MNSTLISISGPTAVGKTLFAIELAKKA

SEQ ID NO: 123603 - protein, 135 aa, Unknown
  Bacterial polypetide isolated from the Sargasso Sea
TKKSLFDWIENTKSDFVNFEIKKIFIEVPRDMLLKNIFKRTELMFKNGCIQEVQKFNLLKLNKSLSANKLIGVQEINRYLNGLISLDECKEHVNIKTRQYAKRQNTWARGHMKNWSKLYSKDFSILLKKTLKVIS

SEQ ID NO: 123604 - protein, 54 aa, Unknown
  Bacterial polypetide isolated from the Sargasso Sea
ITLKNLKDRVLIRTRQYAKRQYTWQRGQMQDWKQFTDTNYLDLRKKILSYLSKT

SEQ ID NO: 123605 - protein, 57 aa, Unknown
  Bacterial polypetide isolated from the Sargasso Sea
MKLKIFLNKKTNLNEVNEKITIKTRQYAKRQSTWARGQMTNWQKVNPKDIKKILKKI

SEQ ID NO: 123606 - protein, 65 aa, Unknown
  Bacterial polypetide isolated from the Sargasso Sea
SANKAIGVNEIREYLKKQKNLHDTKEKIAIKTRQYAKRQSTWARGNMMNWMKLKPQDINNFLKKI

SEQ ID NO: 123607 - protein, 64 aa, Unknown
  Bacterial polypetide isolated from the Sargasso Sea
ANKAIGVNEIREYLKKQKDLNDTKEKIAIKTRQYAKRQSTWARGNMISWTKLKPQDINNFLKKI

SEQ ID NO: 123608 - protein, 66 aa, Unknown
  Bacterial polypetide isolated from the Sargasso Sea
KSANKAIGVNEIKEYLKNQKDLNYIKEKIAIKTRQYAKRQSTWARGNMMSWMKIKPQDLNKFLKKI

SEQ ID NO: 123609 - protein, 77 aa, Unknown
  Bacterial polypetide isolated from the Sargasso Sea
KNLLKLRIKKDKSVLKAIGINEIKEYLYQDTQLDEIKEKISIKTRQYAKRQSTWARGNMMSWNKLKPQDLNKFLKKF

SEQ ID NO: 123610 - protein, 157 aa, Unknown
  Bacterial polypetide isolated from the Sargasso Sea
MGNQSKPSAIFLLGPTASGKTRWAIEIIDKFPKTFELISVDSVQVYKGCNVGSGKPDQDTLKKYPHYLIDHCSVSEIYNVAEFINDASNLAKKIVDDGKVPLFVGGTMMYFKSLFEGIHSLPNADSALRKKLDAELKENGPNKLFDQLVKLNPTKAR

SEQ ID NO: 123611 - protein, 103 aa, Unknown
  Bacterial polypetide isolated from the Sargasso Sea
RRFDSMIEEGLLDEVSKLIEKKLVSYESHSMQSIGYREMIDHILGKMTLDDAIESAKISSRRYAKRQLTWLRSLDDEYKLDPLDKQKFKTIEGIINNHFEDKD

SEQ ID NO: 123612 - protein, 293 aa, Unknown
  Bacterial polypetide isolated from the Sargasso Sea
MDKIITIVGPTASGKTSLAIQLSKELGSEVISLDSRQIYKGMGIGTAQPTIEEMGGIKHHLIGCIHPKEPISAGRYAELVINKVALVQQNGKIPIICGGAGLYYRAIKTGIFSDSTTDVVLRNKLESSYDDDPKLLLKKLEDIDPEYASLVHINNKKRLVRALEIFGTTGKAPSINYQNQKSNPTKVLDLFTIRLDWDRKNLNDRINHRLDFMLSSGWIEEVNDLIEYEKKENSLFPALNTIGYGQIQSFLKNEISFEKMKENIFIKTRQFAKRQNQWFNRENTELTIKMDDL

SEQ ID NO: 123613 - protein, 156 aa, Unknown
  Bacterial polypetide isolated from the Sargasso Sea
MTNSIFFIVGPTGIGKSEFGINLSKFINGQIVNADSMQIYKELNILSARPNLEDQNTIKHHLYGYINGNHRYNVEKWCNDAKKIINLSVENFFSPIFIGGTGLYIDTFLNGIISIPNIPEYIKKEANQLFNNIGLDSFYNIVKKLDYESIKNISKN

SEQ ID NO: 123614 - protein, 56 aa, Unknown
  Bacterial polypetide isolated from the Sargasso Sea
MDLKSKIILISGPTASGKTNFAIKLAKKINGEIINADSMQIYKQLKILTARPKSNE

SEQ ID NO: 123615 - protein, 184 aa, Unknown
  Bacterial polypetide isolated from the Sargasso Sea
VSKRNRNKVRNLQKKIGQKSFYKKLIKLDPSCKNNININDQNRSIRAYEVYIQTNKSLYTWFKDTTIHFHNKDFEKIFIDISRDEVVKNLSSRIEKMIKAGAIQEVKRFNKLKVKKTNSSFKIIGIREINELKPDKTNLSLIKEKITIKTRQYAKRQMTWARGHMKDWYRIAPNNLNSYLNKIS

SEQ ID NO: 123616 - protein, 123 aa, Unknown
  Bacterial polypetide isolated from the Sargasso Sea
MSSYPPHVIILIGPTASGKTELAIEIAEHFKTNIHNIDSRQIYKSMDIGTAKPSKIQQKKIKHFLIDIEEPINPINVKQFQEIAQQSIKGEIKKNKLPFLVGGSGLYMNSITKGFFVPDVPPQ

SEQ ID NO: 123617 - protein, 62 aa, Unknown
  Bacterial polypetide isolated from the Sargasso Sea
MSKKIQNKIILLFGPTASGKSKLAVDIATKFNGEILNADSMQVYKEIKILSARPEKSKIKHH

SEQ ID NO: 123618 - protein, 277 aa, Unknown
  Bacterial polypetide isolated from the Sargasso Sea
MGVIINADSMQVYSNLNILTARPSKKDLLETKHELYGYVDAAVRYNVSNWCNDVLRIIKNNEKNNFPSIIVGGSGMYIDSLLNGLIPIPPIPEKYKNNSLSLLNEIGTKKFIEIINKFDSESLSKISFQDSSRMRRIWEVYQSTGRKYSYWINKKNKIFLKNFSNKIFLFIPPRDEIYKKINSRFNMMINEGAIEEVKKLISLNLDVSLPIMKAHGVPEITNYLCGKIDLEECIKKSQQVTRNYAKRQLTWWRSSRLSINKVFDQFPNEIDEKLIKI

SEQ ID NO: 123619 - protein, 81 aa, Unknown
  Bacterial polypetide isolated from the Sargasso Sea
MDLKSKIILIYGPTASGKSNFAIKLAKKISGQIINADSMQVYKELKVLTARPFKKDHQNIKHHLYGFQNAKKKFFYREIGF

SEQ ID NO: 123620 - protein, 95 aa, Unknown
  Bacterial polypetide isolated from the Sargasso Sea
MDLKSKIILISGPTASGKSSFAIKLAKKIKGEIINADSMQVYKQLKILSARPGQKNYQSIKHHLYGFQDAKKSFSTGDWLKIANKKISEVKKRKK

SEQ ID NO: 123621 - protein, 32 aa, Unknown
  Bacterial polypetide isolated from the Sargasso Sea
MPPAIFLMGPTASGKTDLAMALCDRLPCEIIS

SEQ ID NO: 123622 - protein, 155 aa, Unknown
  Bacterial polypetide isolated from the Sargasso Sea
MTLSFYIIAGPTAIGKSEFAINLAKKINGNIINADSMQVYKDLEILTARPSNQDTKIIDHHLYGYVRANERYNVEKWCNDARNKIIESKKNNVVPILVGGTGLYIDKLINGISDIPKVPEYLKLESENLIKKKGLNYLCSLIKEFDSISLSKINP

SEQ ID NO: 123623 - protein, 104 aa, Unknown
  Bacterial polypetide isolated from the Sargasso Sea
ESRIKKRFDQMLREGAIQEAENFKKIRVNSINSSNFIIGLKEISEFLSKKISLNELKEKVVIRSRQYAKRQLTWQRGQMKDWKGFTDTNYLDLRKKILSYLSKT

SEQ ID NO: 123624 - protein, 252 aa, Unknown
  Bacterial polypetide isolated from the Sargasso Sea
MRKTIYLIAGPTASGKSQFAVDLAKKINGVAINSDSMQVYKNLEILTARPTTKEMQNIDHHLYGYVDGKERYNVEKWCNDAAKIIHENLERNLNPILVGGTGFYTYTLINGLIDIPAIPESIKNESEKIINEFGKDFLITQIQKFDPTSLKEVNSNDTVRLRRIWEVYESTGKKFSEWKLNKNRKFIENHDFKIILFLPNREKNYQIVNSRFIKMINNGAIQEVKNLLDLNLNESLPVMRAHGVPEVIKFLR

SEQ ID NO: 123625 - protein, 238 aa, Unknown
  Bacterial polypetide isolated from the Sargasso Sea
YSAADFVSDADELLDKATKDDRLPILVGGSMLYIKCLRDGISRLPKTDPEVRAYLEQRVEQNGSGELYKELKAADPEAAINIHPNNRQRVMRAMEVFLVTGKNISTFWLENPAKNLHERLGYEIKSLAIAPTQRRDLDQRIERRFRSMLEEGFLDEVRSLRQMDGLHEGSSSMRSVGYRQAWKHLDGVTNKDEFAQEALSATRLLAKKQMTWLRSWENVEFFPLSEGAELTKRALEAE

SEQ ID NO: 123626 - protein, 104 aa, Unknown
  Bacterial polypetide isolated from the Sargasso Sea
MDIKSKIILIAGPTASGKTKFAVQLAKKINGEIINADSMQIYKEFKILTARPSIKDKKNVRHHLYGFLSVKKNFSTGQWLKLVKKKITEIRERKKTPILVGGTG

SEQ ID NO: 123627 - protein, 277 aa, Unknown
  Bacterial polypetide isolated from the Sargasso Sea
KKYEGEIINADSRQIYIGMDIGTAKPRPQEISLVKHHLFSIIKPDEDFSVYDFSKMAEPLISSINLKGSVPILVGGTGQYVWSLLENWELLNGTTDFSVRESLEKRLEEEGVQSLLDELLAKDPSVLLNIDINNPRRVIRALEKINLGYKGYTPRVKDASLRDECLLIGLTSNREDLYTRVDERVNKMFKEGWIEEVQTLQNNGYHKDLSSMSGIGYQEISLLLEPSSNMSVEECKLAICSRTRKLIRSQYNWFKLKDSRIKWFDIGVLSEEYVVDE

SEQ ID NO: 123628 - protein, 178 aa, Unknown
  Bacterial polypetide isolated from the Sargasso Sea
MNKTIYFITGPTAIGKSKFAINLSKHINGEIINADSMQIYKELNILSARPSKSDLKEVRHHLYGYVMGNERFNVEKWCNNAAAKINSLNKKNVTPVFVGGTGLYIDKLINGISSIPSIPEKLKDESNNLFDKIGSKNFFKLVNELDKEATNNISPNDSQRLKRIWEVFHHTNKKFSYW

SEQ ID NO: 123629 - protein, 88 aa, Unknown
  Bacterial polypetide isolated from the Sargasso Sea
MDFKSKIILIYGPTASGKSKFATKLAKKIKGQIINADSMQVYKELKILNGRPFKKDQQEIKHHLYGFQSGKKNFSTGDWLKLVNDKIL

SEQ ID NO: 123630 - protein, 54 aa, Unknown
  Bacterial polypetide isolated from the Sargasso Sea
MDIKSKIFLIAGPTASGKSSFAIKLAKKINGEIINADSMQVYKELSVLTARLKK

SEQ ID NO: 123631 - protein, 144 aa, Unknown
  Bacterial polypetide isolated from the Sargasso Sea
MEIDQKIVVVAGPTGSGKSEVAISLAKEFNGELICSDSMQVYRQMDVGTAKPSLQEQNLIPHHQLDLINPDENYSAGQYARDTSRIIKKILERGRLPILVGGTGLYYRALMYGISKIPPVPESLRKEITVWQQEHGTQYCHKLL

SEQ ID NO: 123632 - protein, 62 aa, Unknown
  Bacterial polypetide isolated from the Sargasso Sea
MDLKSKIILIFGPTASGKSSFAIKLAKKVNGEIINADSMQVYKQLKILSARPDYNEYKKIKH

SEQ ID NO: 123633 - protein, 73 aa, Unknown
  Bacterial polypetide isolated from the Sargasso Sea
MDLKSKIILISGPTASGKSNFSIQLAKKIKGEIINADSMQVYKEFKILTARPIKRQYLKINHHLYGFQSVRRK

SEQ ID NO: 123634 - protein, 158 aa, Unknown
  Bacterial polypetide isolated from the Sargasso Sea
ELAYLVDQAGLEIPQFNRRRAMRALEIAHFGQDLENQESLYEPLIICLDDERSQLYERINHRVDLMFEAGLLDEAKWLFDHYPDVQAAKGIGYKELFPYFRGEQTLEEASESLKQATRRFAKRQLTWFRNRMQVTFYQIGESGVQDRILSQIEEFLDD

SEQ ID NO: 123635 - protein, 262 aa, Unknown
  Bacterial polypetide isolated from the Sargasso Sea
GIGKSKFALDLAKLLNGVIINSDSIQVYKDLRILSSRPSQKEEKIIEHYLYGFLNINEKFSVGKWLELLNKTLENIKKNNKIPILVGGTGLYIQAAIRGISPIPEIRDEIKKEGKLLMKKIGVDKFKTYLEKIDPDYVKSKNDVQRLLRTYNVFFSTGKTLTEWHKLPNHGGVNRKIFSILLSSDRSNIYRRCDERFDLMMHNGAMQEAKKIWNLNLDRTLSPLKSLGLRRLLEYFDGQLCLEEAIRLSKRDTRHYVKRQIT

SEQ ID NO: 123636 - protein, 223 aa, Unknown
  Bacterial polypetide isolated from the Sargasso Sea
MGNQSKPSAVFLLGPTASGKTRWAIEIIDKFPKTFELISVDSVQVYKGCNVGSGKPDQDTLKKYPHYLIDHCSVCKIYNVAEFINDASILTKKIVDDGKIPLLVGGTMMYFKSLFEGIHSLPNADSVLRKKLHSELNENGPKKLFDQLVKLNPTKAREISPNDNQRLIRAIEIELSQYNQDKDSAISGIRNEFNIIQIGIFPNQRAELHERIEKRQPSLANDK

SEQ ID NO: 123637 - protein, 247 aa, Unknown
  Bacterial polypetide isolated from the Sargasso Sea
MNDTSNRIIVIQGPTASGKTSVAVQLAKHFNTVVLSADSRQFYKEMTIGTAKPTPDEMQGIKHYFINSHSIHDEVSAFRYAEEAKKLLISLFKKHSIVILAGGSGLFIEALCKGLDPIPHDRKLHDKIVDEFNENGIDSLLMELKNKDPEFYNKIDKNNSYRVIRSIEAIRLSGKTMTALRNEKNNKEELFDTIYFTLHPERKYLYRRINKRVDLMLENGLLYEVNNLYKYRHLKSLNTVGYKEIFN

SEQ ID NO: 123638 - protein, 249 aa, Unknown
  Bacterial polypetide isolated from the Sargasso Sea
MKKTIYVIAGPTATGKSDFSVKLAKKLNGVVINSDSMQVYKNLKILTARPSSSETKNIPHYLYGYVDGKERYNVEKWCKDAVDIIHHTHRNNLTPILVGGTGLYIDTLINGLIDIPTISENIKNESEKIIQEFGKDYLISQIKNFDPNSLKEVNNNDTVRLRRIWEVYEATGKKLSEWRLSDNKKFLENFNYKIFLFLPDRKKNYDIVNSRFISMINKGAVEEVKQLLALNLNSSLPIMRAHGVPEIAK

SEQ ID NO: 123639 - protein, 107 aa, Unknown
  Bacterial polypetide isolated from the Sargasso Sea
MDLKSKIILISGPTASGKSKFAIQLAKKINGEVINADSMQIYKELKILTARPKLKDIKIVKHHLYGFKSVKDNYSTGNWLRDAKSKIKNIKKKNKIPILVGGTGFVF

SEQ ID NO: 123640 - protein, 170 aa, Unknown
  Bacterial polypetide isolated from the Sargasso Sea
MPSLAPHVIVLIGPTASGKTELAIQIAEYFQSHIHNIDSRQIYKYMDIGTAKPSKDQQKKIKHFLIDIEEPSNPINVKQFKEIAQKSIQNEIKQENIPFLVGGSGLYMNSITRGFFMPDVPPQNKLRVQLEELGQRECWALLKKCDPQSTKTIHFADQTRTIRALEVFYV

SEQ ID NO: 123641 - protein, 219 aa, Unknown
  Bacterial polypetide isolated from the Sargasso Sea
KTIANNLTPILVGGTGLYINTLINGLVDIPSIPEGIKIQSEKIIEKFGKDFLIDQIKKVDPESFQEINPNDTVRLRRIWEVFELTGKKFSEWKLNNNKQFIKNFSFKIFLFLPDREKNYQIVNSRFIKMMKEGAIEEVEKLLELNLNDSLPVMRAHGVPEIKKYLSNEISYEECISKGQQVTRNYVKRQHTWWNSSNLQIFQKFHKFPTEIDLNSIKIV

SEQ ID NO: 123642 - protein, 248 aa, Unknown
  Bacterial polypetide isolated from the Sargasso Sea
HHLYGFVKGDVRFNVQKWCEEASKKINYLVSKNITPILVGGTGLYIESLINGIVSIPSIPEKVKIESEKMILKIGNENFYNLVKELDSDAMINIAPNDIQRIRRIWEVNIFTKKKFSDWKKNKNKNFINLKNYKILLFLPDRKENYRRVDNRTHLMMQDGAIEEVKNLLKLNYNNSLPIMKAHGVPEIQSYLNNDVSIEECISKIQQVTRNYVKRQHTWWRSSNLNIFKKFNQFPDEIDLKSINFEQN

SEQ ID NO: 123643 - protein, 264 aa, Unknown
  Bacterial polypetide isolated from the Sargasso Sea
EIVNADSMQVYKEIKILSARPDDHTISHHLYGFISIKKTFSTGEWIKKAIKTIKKINKKGKIALVVGGTGLYFKALYQGFSEIPKVPKPKKDFKLKKNYILKYPNIFKYVSLNDKQRLQRAFLVFKHTGKPLWMWQQKNKRFFKSSQFHKFYLCPPKPVLESRIKKRFLSMLKKGAIREAENFKKINPNSLNSSNFIIGLKEISQFLNNEISLEELKQLVLIRSRQYSKRQFTWQRGQMKDWKGFSDTNYLDLRKKVIRYLSKT

SEQ ID NO: 123644 - protein, 274 aa, Unknown
  Bacterial polypetide isolated from the Sargasso Sea
MIVCRFIRELSILTARPTLEDYKKVNHHLYGFVKGDVRFNVKKWCEEVSKKINYLVNKNITPILVGGTGLYIESLINGIVSIPSIPEKVKIESDKMILKIGKENFFNLVKELDSDAMINIASNDIQRIRRIWEVNFFTKKKFSEWKKNKNKNFINLKNYKILLFLPDRKVNYRRVDNRTHLMMEDGAIEEVKNLLKLNYDNSLPIMKAHGVPEIQSYLNNELSIHECISKIQQVTRNYVKRQHTWWRSSNLNFFKKFDQFPDEIDIKSINLDQN

SEQ ID NO: 123645 - protein, 94 aa, Unknown
  Bacterial polypetide isolated from the Sargasso Sea
MDLKSKIILISGPTASGKSSFAIKVAKKVDGEIINADSMQVYKELKILSARPDPKKYHKIKHHLYGFHNVTKNFSTGDWLKLVIKKIKEVQKRK

SEQ ID NO: 123646 - protein, 109 aa, Unknown
  Bacterial polypetide isolated from the Sargasso Sea
MDIAQKIVVVAGPTGSGKSEVAISLAEEFNGELICSDSMQVYRQMDVGTAKPSLKEQKLIPHHQLDLINPNENYSAGQYARDTSGIIKKIRERGRLPILVGGTGLYFRA

SEQ ID NO: 123647 - protein, 105 aa, Unknown
  Bacterial polypetide isolated from the Sargasso Sea
MDLKSKIILISGPTASGKSKFALSVAKKINGEIINADSMQIFKEIKILNARPSAKDKSNIKHHLYGFLSVKKNFSVGEWLKKCLIKISEIKKRKKVPIIVGGTGL

SEQ ID NO: 123648 - protein, 286 aa, Unknown
  Bacterial polypetide isolated from the Sargasso Sea
MLNNLKQTLYFIAGPTCIGKSSLAIRIAKKINGVIINADSMQVYTNLNILTARPSKKDLLETKHELYGYVDAAVRYNVSNWCNDVLKIIKNNEKNSFPSIIVGGSGMYIESLLNGLIPIPSIPEKYKNDSLSLINEVGVKKFVEIINKFDSESLSKISLQDSSRMRRIWEVYQSTGKKYSYWINKHNKIFLKNFSSKIFLFIPPREDIYKKINFRFNTMINEGAIEEVKKLISLNLDVSLPIMKAHGVPEIMNYLCGKIDLDECIQKSQQVTRNYAKRQLTWWRSS

SEQ ID NO: 123649 - protein, 244 aa, Unknown
  Bacterial polypetide isolated from the Sargasso Sea
MGEIINSDSMQIYNEIKILNARPKIKEIKNITHHLYGFHSVKKNFSTGDWLKKVIKIINQIQKKNKTPILVGGTGLYFKTILNGLAKIPMIPVKYRNKIRKQHLKIGQKKFYKNLIKLDPLAKSQINANDSQRSIRAFEVKKYTKISLFKWFEKTKKYFNEKEFLKIYIDCPKEDLIRRIDRRVNSMISAGAVNEVKKFRRLKVNKDKSSNKIIGISEISKFLNGEQNIDVTKVQISMKTRQYA

SEQ ID NO: 123650 - protein, 105 aa, Unknown
  Bacterial polypetide isolated from the Sargasso Sea
MDLKSKIILISGPTASGKSSFAIKLAKKVNGEIINADSMQVYKQLKIISARPDQKKYQKIRHHLYGFHDVKKNFSTGKWLKLVFKKIKEIKKRNKTPILVGGTGL

SEQ ID NO: 123651 - protein, 120 aa, Unknown
  Bacterial polypetide isolated from the Sargasso Sea
MSKKIILLAGPTASGKSKLAIRLAKKLNGEIVNADSMQVFKEFKILSSRPDLSDTKKIKHHLYGVISAKRYFSAGEWLKEAKKKIDNCSKRKKVPIVVGGTGLYFNTITKGISKIPIIDL

SEQ ID NO: 123652 - protein, 102 aa, Unknown
  Bacterial polypetide isolated from the Sargasso Sea
MDLKSKIILISGPTASGKSKVALKIAKKLNGEIINADSMQVYKELNILTARPSKTDLNKIDHYLYGFKSVKKEFSSGEWLKLAKKNIKKIRDKNKIPILVGG

SEQ ID NO: 123653 - protein, 256 aa, Unknown
  Bacterial polypetide isolated from the Sargasso Sea
QKYPHKLIDILEPNETYSTSKFQVDVINSISNTFQAEKVPVLVGGTMMYFHHLVNGISRLPSVDSQIRKKVKEEFEEMGVNKMYKYLEKIDKSSSLKIHPNDTQRIKRAIEVFLATGKEFSKWQAENKKEINKVITESRLIQIAIRPKDKDIHREIIAQRFKGMINDGLIQEVENILELQGMNTNSQSMKSVGYRQVCEYLSGDSSLDDMIDRGINSTRQLAKRQMTWMRSWDNLIILENNSSLSNSLKDLILNNL

SEQ ID NO: 123654 - protein, 215 aa, Unknown
  Bacterial polypetide isolated from the Sargasso Sea
NNITPILVGGTGLYIESLINGIFQFPSIPEKLKIESEKMILKIGKENFYNLVKELDSDAMINIAPNDIQRIRRIWEVNFFTNKKFSDWKKSKNKNFINLKNYKILLFLPDRKENYRRVDHRTHLMMEDGAIEEVKNLLKLNYNNSLPIMKAHGVPEIQSYINNEVSIEECISKIQQVTRNYVKRQHTWWRSSNLNIFKKFNQFPDEIDLKSINLD

SEQ ID NO: 123655 - protein, 93 aa, Unknown
  Bacterial polypetide isolated from the Sargasso Sea
MSSYPPHVIILIGPTASGKTELAIEIAEYFKTRIHNIDSRQIYKSMDIGTAKPSKNQQKKIKHFLIDIEEPIHPINVKQFQDIAQKSIKREIK

SEQ ID NO: 123656 - protein, 200 aa, Unknown
  Bacterial polypetide isolated from the Sargasso Sea
KGKTPIFVGGTGLYFQSLLNGLAEVPKIPKKTKNKVRKLHEKLGQKNFYKALKKIDKKIKKNFDPQDSQRSIRAYEVKIHTKKSLYDWFKETKPTFKKNNFIKYYLIHEKKSLLKRIEKRVNLMFKKGAVDEVEKVKKQNISKDSSCNKIIGYMEIKNYLNGKLNLKDTKEKMIIKTRQYAKRQNTWYNSRMRDWEILKF

SEQ ID NO: 123657 - protein, 77 aa, Unknown
  Bacterial polypetide isolated from the Sargasso Sea
MDYKSKIILISGPTASGKSKIALNLAKKINGEIVNADSMQVYKQLKILTARPSEKDQKKIKHHLFGTIDVRKRFSTG

SEQ ID NO: 123658 - protein, 252 aa, Unknown
  Bacterial polypetide isolated from the Sargasso Sea
HPHHMINVVNLNTIFTVADFYSISHKLIEKAHLNNKLPVFVGGSMMYFNSLYKGIHNLPKRDEEYRDELEVLKSENESNYLYKLLKDIDPIYAKSINQNDDIRIIRALEVYKATGKPLSKILSDEPKNNLSDQYQVHQFGILDERDKLHQRIEIRLREIFDMGLVREAENILNKYNISQDHPIRRSVNYKQAIGHINSEYGIEVAFEKALFATRQLAKRQTTWLRGWEEFKKVKIKEIKVMENEFKKIISLL

SEQ ID NO: 123659 - protein, 167 aa, Unknown
  Bacterial polypetide isolated from the Sargasso Sea
MSSHLPHVIILIGPTASGKTELAIEIAEYFQTHIHNIDSRQIYKSMDIGTAKPSKIQQKKIKHFLIDIEEPINPINVKQFQEIAQKSIEGEIKQDNLPFLVGGSGLYMNSITKGFFVPDVPPQNNFRRQLEELGQEKCWDLLKNCDPLSTKKINFTDQIRTIRALEV

SEQ ID NO: 123660 - protein, 222 aa, Unknown
  Bacterial polypetide isolated from the Sargasso Sea
KLAKKNIKKIRDKNKIPVLVGGTGLYFKALTDGLVKIPNIPISFRNKIRRMQISLGQKKFYSKLLKNDSLVKNRIDPTDLQRSIRAYEVISFTKKSIFEWYKKTKPSFRNDQFIKIYIDYPRDELIRNISKRVDQMMKNGAIQEVKDFLKLNLKSDSNIFKVIGIREIKEFIDKKTSMHDLKLNIVIKTRQYAKRQRTWSRGQMRDWQKFDSEALLKFIKKL

SEQ ID NO: 123661 - protein, 86 aa, Unknown
  Bacterial polypetide isolated from the Sargasso Sea
MKLPLIFIVGPTAVGKSNFALRIAKILGGEIINADSMQVYSELRTLTARPSLNDEKLFPHHLYGYIKGSERYNVFKWCNDLSEIVN

SEQ ID NO: 123662 - protein, 246 aa, Unknown
  Bacterial polypetide isolated from the Sargasso Sea
HHLYGTISVKKYFSAGDWLKKAKKKIDSCVKRKKIPIVVGGTGLYFNTIIKGMSKIPDIDLKTRNTVRNLYIKIGCKEFYSQLLELDPKAKGRIHPTDAQRLQRAYEVKLKTNKSLFDWIANTKSEFKDFEIRKIFINTPREALLKKISLRTQQMFNNKCINEVKKFNNLKIKKSLSANKLIGVQEINDFLQKSISLEQCKELINIKTRQYAKRQNTWARGHMKNWNKIYSKNFSNLLKKSLKVVS

SEQ ID NO: 123663 - protein, 88 aa, Unknown
  Bacterial polypetide isolated from the Sargasso Sea
MDLKSKIILISGPTASGKSNFAISLAKKIKGEIINADSMQVYKELRILTARPKQKDYQKIRHHLYGFLNVTKNFSTGQWLKLCQKKIK

SEQ ID NO: 123664 - protein, 94 aa, Unknown
  Bacterial polypetide isolated from the Sargasso Sea
MDFKSKIILISGPTASGKSSFAIKLAKKINGEIVNADSMQVYKQLKILSARPDPKKYLKIRHHLYGFQDARKNFSTGNWLKLVFKKIEEIKKRK

SEQ ID NO: 123665 - protein, 258 aa, Unknown
  Bacterial polypetide isolated from the Sargasso Sea
PTINDQKKINHHLYGFVKGDVRFNVQKWCEEASKKINYLINKNITPILVGGTGLYIETLINGIVSIPSIPEKVKIESDKMILKIGKENFFNLVKDLDSEAMINIAPNDIQRIRRIWEVNFFTKKKFSDWKKRKNQNFINLKNYKILLFLPDRKENYRRVDHRTHLMMEDGAIEEVKNLLKLNYNNSLPIMKAHGVPEIQSYLNNELSIEECISKIQQVTRNYVKRQHTWWRSSNLNIFKKFNEFPDEIDLKSINLDQN

SEQ ID NO: 123666 - protein, 57 aa, Unknown
  Bacterial polypetide isolated from the Sargasso Sea
MKHGKKIILLAGPTASGKSRLAVKLAKHFNGEIINADSMQIYKEISILTSRPNLEDT

SEQ ID NO: 123667 - protein, 234 aa, Unknown
  Bacterial polypetide isolated from the Sargasso Sea
DFYSISHKLIEKAHLKNKLPVFVGGSMMYFNSLYKGIHNLPKRDEDYRNELETLKVENESNYLYKLLENIDPIYAKDVNQNDDIRIIRALEVYKATGKPLSKILSDKPKNNLSDQYQVHQFGILDERDKLHQRIKIRLREIFDMGLVKEAENILNKYNISQDHPIRRSVNYKQAIGHINSEYGIEVAFEKALFATRQLAKRQITWLRGWEEFKRVKIKEIKVIENEFKKIISLL

SEQ ID NO: 123668 - protein, 270 aa, Unknown
  Bacterial polypetide isolated from the Sargasso Sea
MGRKSKIILISGPTTSGKSNFAIQVAKKIRGEIINADSMQVYKEFRILTARPSIKEQKKIKHHLYGFYSVKKNFSTGHWLKIVYKKIEEIQKRKKIPILVGGTGLYFKALTEGLVKIPNIPIKYRKKITSLQKKIGQIKFFSKLVSLDPLIKDKIKPSDTQRSIRAYEVKLYTKKSLIEWFNKTKSKYDKNDFIRIYIDFPRVDLIQRISNRTDEMIKKGAIDEVKKFLKMKVKKSNSSNKIIGINEISEYLKKNSELSKVKEKISIKTR

SEQ ID NO: 123669 - protein, 48 aa, Unknown
  Bacterial polypetide isolated from the Sargasso Sea
MTRKPVIVVGGPTASGKSSVALAIAEAFNGSIVNADSMQIYNGLGIVT

SEQ ID NO: 123670 - protein, 204 aa, Unknown
  Bacterial polypetide isolated from the Sargasso Sea
MNKVISLLGPTASGKTDLAIHLSKNFDFDIISVDSVMLYKEFNIGSAKPNQETLLKFPHKMVDILNPSDKYSVARFYNDLIKNIKNSHSLGKIPLLVGGSMMYFKTFFSGGLSDVKEVSSDVKDHVRNMMQEYSLDYLHNYLKDIDISSAKNIHFNDRYRISRMLEIFFSNNEKPSIILNKCAENVQYFQNLNLSIIPIDRVIL

SEQ ID NO: 123671 - protein, 178 aa, Unknown
  Bacterial polypetide isolated from the Sargasso Sea
MPRIQNFDEINQNTPVLIAGQTASGKSQLALEIAEKYGGIIVNADAIQVYKNWQILTARPSSADEAKIKHKLYGHIDGITDYSVGTWIKEIRDILSSASRPIIVGGTGLYFSALTAGLVDIPEISESIRLEANNKITKNGFGSLIGEIDEETVKKIDINNPMRVQRAWGSSQVNWGEG

SEQ ID NO: 123672 - protein, 66 aa, Unknown
  Bacterial polypetide isolated from the Sargasso Sea
MDLKSKIILIYGPTASGKSKFAIELAKKINAEIVNADSMQIYKDLRTLSARPSKKDYQKIRHHLYG

SEQ ID NO: 123673 - protein, 65 aa, Unknown
  Bacterial polypetide isolated from the Sargasso Sea
KKIILIAGPTASGKSQLAIKLAGHAGVKGEIINADSMQIYKEISILTSKPNFIDRKIVKHHLYGI

SEQ ID NO: 123674 - protein, 271 aa, Unknown
  Bacterial polypetide isolated from the Sargasso Sea
RFALELAKSLNGVIINSDSMQVYKDLRILSSRPGHLEEKIIEHYLYGFLNINEEFSVGRWLELLKKTLEKIKNNNKIGILVGGTGLYIQAAIRGISPIPKIKNEIKKEGQLLINKIGIKKFKKFLENIDPEYINLNNDVQRLLRSYNVYFSTGKTLTEWHKMPNLGSVNRKIFSILLSSDRTNIYRNCDKRFDLMMSNGGLMEAKKIWQHNFDRNLSPLKSLGLRRLLEYFDGKLTLQEAIRMSKRDTRHYVKRQITWFKHNFNSNIIINL

SEQ ID NO: 123675 - protein, 124 aa, Unknown
  Bacterial polypetide isolated from the Sargasso Sea
MSSYPPHVIILIGPTASGKTDLAIEIAEYLKTRIHNIDSRQIYKSMDIGTAKPSKNQQKKIKHFLIDIEEPIHQINVKQFQEIAQKSIKKEIKQNYLPFLVGGSGLYMNSITKGFFVPDRPSSK

SEQ ID NO: 123676 - protein, 118 aa, Unknown
  Bacterial polypetide isolated from the Sargasso Sea
MSASHDLRALPLVIVGPTACGKSSFAMKVARSFPRVELLSIDSMQVYRGMNVGTAKPSTEEQSEVAHHLIDLVAPTESFTLVDFQNAYATALSEITKRDGIPVLVGGTGLYLRAVLDG

SEQ ID NO: 123677 - protein, 93 aa, Unknown
  Bacterial polypetide isolated from the Sargasso Sea
MDLKSKIILIAGPTASGKSNFSLKLAKKINGEVINADSMQVYKQLQILTARPNKKDIKKIKHHLYGFCDVKKNFSTGEWLKLSIKKIKGIQKK

SEQ ID NO: 123678 - protein, 245 aa, Unknown
  Bacterial polypetide isolated from the Sargasso Sea
KIKHHLFGIIDVRKRFSTGQWLKECIKIINLIRKKKKIPIVVGGTGLYFKALVDGLARIPKFKLSEKNKILKLHNKLGQKQFYKKLIKLDPLSKKFINSNDVNRSIRAYEVKKLTKKSLFKWFKKTKTFFDKNEFVMIYVDYPRDKLIKNIKKRIDRMFGLGVIKEVKKYNLIKINKMNSVNHVIGIKEINSYLSKKAELNDIKDQILIKTRQYAKRQSTWSRGHMINWHKIDPKSKNPFKKILK

SEQ ID NO: 123679 - protein, 56 aa, Unknown
  Bacterial polypetide isolated from the Sargasso Sea
MNINGIIIAGPTASGKTKIAKQISSKFPSTIINADSMQVYEDLQIITNRPSNKEIN

SEQ ID NO: 123680 - protein, 89 aa, Unknown
  Bacterial polypetide isolated from the Sargasso Sea
MDLKSKIILISGPTASGKSDFAIKVAKKIGGEIINADSMQVYKQLKILSARPDPKKNRKVKHHLYGFQDVTKNFSTGNWLNLVIKKIRE

SEQ ID NO: 123681 - protein, 86 aa, Unknown
  Bacterial polypetide isolated from the Sargasso Sea
MDLKSKIILISGPTASGKSKLALKIAKKINGEIINADSMQVYKELKILTARPSKIDLKKIEHHLYGFRTVKKDFSSGEWLKLAKKN

SEQ ID NO: 123682 - protein, 190 aa, Unknown
  Bacterial polypetide isolated from the Sargasso Sea
KEYNGEIVNADSMQIYKEVKILSARPSDKNINHHLYGFLSVKNNFSTGSWYKLAAKKIKQINKKGKTALVVGGTGLYFKSLTDGLSEIPEVPKTNMNSKVDKNYILKNPKIFKGISINDKQRIQRAISVYKHTGKPLWLWQKKNKKIFNTKKLVKIFLNPPKLEIENRIKKRFDEMLRKGAIKEVEHFKK

SEQ ID NO: 123683 - protein, 204 aa, Unknown
  Bacterial polypetide isolated from the Sargasso Sea
FVGGTGLYFKALTEGLVEITKIPLKFRNKIRFLQKSIGQEKFYSKLLKLDPTTINHINPTDAQRSIRAYEVKSFTKKSISEWYKDTKSKFKKNEFLKLYIDYPRLELIDRINLRTRQMLDSGAVLEVKNFAKLKISKNKSVSKAIGLIEIKDFIKNKIDKEEVIEKISIKTRQYAKRQVTWARGNMKSWKKIKPKRLNIFLKKI

SEQ ID NO: 123684 - protein, 189 aa, Unknown
  Bacterial polypetide isolated from the Sargasso Sea
MDLKSKIILIAGPTGSGKSRLAVMMAKKFSGEIINADSMQVYKIFKILTARPNIKSEKKIKHHLYGFVNFNKKYSTGQWLKDTIKKINQIKKRNKIPILVGGTGLYFHSLINGLVKIPNIPIKIRKKIRLLHKKFGQKIFYKKLLKLDPKIKNKFDKNDVQRSLRAFEIKKHTKISMYDWLKKTKAILN

SEQ ID NO: 123685 - protein, 117 aa, Unknown
  Bacterial polypetide isolated from the Sargasso Sea
MSSYLPHVIILIGPTASGKTELAIEIAEYFKTHIHNIDSRQIYKSMDIGTAKPSKIQQKKIKHFLIDIEDPINPINVKQFQEIAQKSIKREIKQDNLPFLVGGSGLYMNSITKGFFV

SEQ ID NO: 123686 - protein, 207 aa, Unknown
  Bacterial polypetide isolated from the Sargasso Sea
MSSHPPHVIILIGPTASGKTELAIEIAENFKTNIHNIDSRQIYKSMDIGTAKPSKIQQEKVTHFLIDIEEPINPINVKQFQEIAQKSIKGEIKQDNLPFLVGGSGLYMNSITKGFFVPDVPPQNNLRKQLEELGQEKCWDLLRNCDPLSTTKINFADHIRTIRALEVFYVTGKPLSTLKVQKPPNWKILELGLDRDNLKERIFQRTK

SEQ ID NO: 123687 - protein, 64 aa, Unknown
  Bacterial polypetide isolated from the Sargasso Sea
MDLKSKIILISGPTASGKSSFAIKVAKKVNGEIINADSMQVYKQLKILSARPDPKKYQKIKHHL

SEQ ID NO: 123688 - protein, 178 aa, Unknown
  Bacterial polypetide isolated from the Sargasso Sea
MDLKSKIILISGPTASGKSIFAIKLAKKINGEIVNADSMQVYKELKVLSARPNPKDYQKIKHHLYGFHNVKKNFSTGDWLKLAIKKVKEIKKRKHIPIFVGGTGLYYKALTEGLVKIPNIPIRLRNKIRSLHKTLGQKKFYKKLLKLDPISKNKINSTDSQRSIRAYEVKKFTKKSLH

SEQ ID NO: 123689 - protein, 105 aa, Unknown
  Bacterial polypetide isolated from the Sargasso Sea
MDFKSKIILISGPTASGKSSFAIKVAKKINGEIINADSMQIYKQLKILSARPDPKKYQKIEHHLYGFHDAKKSFSPGDWLKLVNKKIKEVKNKNKTPILVGGTGL

SEQ ID NO: 123690 - protein, 222 aa, Unknown
  Bacterial polypetide isolated from the Sargasso Sea
MINTVYVIAGPTGSGKSDFSIDLAKKVNGVVINSDSMQVYQNLRVLTARPSSIDMKSIDHYLYGYIDGKERFNVDRWCNDASEVINKSSAKNLTPILVGGTGLYINTLINGLIDIPTIPESIKIESEKIIKKFGKDYFINQIKNFDYKSLKEININDTVRLRRIWEVFESTGKKLSEWKLDNNKQFLKNYNIKIILFLPDRKKNYEIVNSRFLNMINMGANR

SEQ ID NO: 123691 - protein, 79 aa, Unknown
  Bacterial polypetide isolated from the Sargasso Sea
MDLKSKIILISGPTASGKSKFAVKLAKKVKGEVINADSMQVYKELRILTARPLKKDYNKIKHYLYGFESVKKKFSTGKW

SEQ ID NO: 123692 - protein, 268 aa, Unknown
  Bacterial polypetide isolated from the Sargasso Sea
MNKTVYFITGPTGIGKSKFAINLSKQINGEIINADSMQIYKELKIISARPILSDIKKVQHHLYGYVSGNERYNVEKWCSDALLKINSLYKKNTTPIFVGGTGLYIDTLINGITSIPSVPEYIKDKSKELLDKIGFENFFKLVKELDNEAVKKISQNDTQRLTRIWEVYNYTNKKFSSWKKTNNKKFLNPLNCKVILFLPERNKNYKRVNERVLKMINQGAIEEISELLKLNYKKNLPIMRAHGVPEIISYLENSISLEECIKKIQLVT

SEQ ID NO: 123693 - protein, 73 aa, Unknown
  Bacterial polypetide isolated from the Sargasso Sea
MDLKSKIILIYGPTASGKSQFAIKLAKKINGEIINADSMQVYKQLKILSARPSQKEYQNIKHHFIWVFKVLKG

SEQ ID NO: 123694 - protein, 131 aa, Unknown
  Bacterial polypetide isolated from the Sargasso Sea
MNKKKALVIFGPTASGKSSKAIQVAKKYNSTIINADSIQVYQELRLITSRPSIEDEKNFDHKLYGFLQGNQNCTVSMWLELIKKEIKASFDNDKLPIIVGGTGMYLKSLIDGISMIPNIPISVKEETKKKV

SEQ ID NO: 123695 - protein, 141 aa, Unknown
  Bacterial polypetide isolated from the Sargasso Sea
MEKRDILVIFGPTASGKSKLATQIASKQKSAIINFDSLQVYKDLKILTDRPNDEMCKKFDHRLYGMLKGSESCSAAIWLERAEYEINNCFDNKLLPIVVGGTGLYLKALMDGLSEIPSIKKNIGEQAMLDLETNGLDHLYK

SEQ ID NO: 123696 - protein, 189 aa, Unknown
  Bacterial polypetide isolated from the Sargasso Sea
MDKKSKIILIAGSTASGKSNFAIQLAKKVNGEIINSDSMQIYKEIKILNARPISKNIKKITHHLYGFHSVKKNFSTGQWLKKTIRLIKEIKKKNKIPILVGGTGLYFKAITSGLTKIPLIPMKYRNKLRVEHKKIGQKKFFNKLVKLDPLAKSRINDNDAQRTLRAYEVKKYTKTSMFKWHESTPKKFE

SEQ ID NO: 123697 - protein, 93 aa, Unknown
  Bacterial polypetide isolated from the Sargasso Sea
QEEVEALRQQPQLNADLPGIRAVGYRQMWEYLDGMYGYDSMVERGIIATRQLAKRQFTWLRKWPELQWFDSNDRSQRDALFGLLAKNCKSVFS

SEQ ID NO: 123698 - protein, 238 aa, Unknown
  Bacterial polypetide isolated from the Sargasso Sea
MKNTIYFIIGPTAIGKSSLALNISKQINGEIINADSMQIYKELEIISARPTSADTKQIKHHLYGYVSGKQRFNVEKWCTDATKIINILNNKNVTPIFVGGTGLYIDILLNGIIPIPNIPEIIKKESNNLFDKIGSKKFFQLVKDLDNESVINISQNDTQRLKRIWEVFQYTEKKFSYWKKNEKKTFLKNKNFKILLFLPDRKKNYQRVDKRVFKMIDNGAINEIKELLKLNYNKDLPI

SEQ ID NO: 123699 - protein, 255 aa, Unknown
  Bacterial polypetide isolated from the Sargasso Sea
TARPKKEDQKKINHHLYGFQKSSKKFSTGDWLQLASKKIQQIKKKNKIPIFVGGTGLYFKSLTDGLVKIPKISIKKRNYVRHLQKKLGQKKFYKKLIEIDPLSKNIVNEHDIQRSIRAFEIKKYTKKSMAQWFKDTKALFAHDVFIKLYLDFPRIELLNRIEKRTKQMFKEGAIQEVIKFNRLKIKKENSANKVIGINEINRYLNGELSLKETKEIIFIKTRQYAKRQTTWARGQMKSWLKVNPKDLNLLIKKFK

SEQ ID NO: 123700 - protein, 136 aa, Unknown
  Bacterial polypetide isolated from the Sargasso Sea
NNPMRVQRAWEVLRSTGRGLNSWHQATPKPTLDLNACKALLLDGEVSLMNNRINNRFDQMIEKGLIQEAKNNLVTWNPIHPSSKAIGACELIAYLNNEISIDQMREQIVTATRQYAKRQRTWFRSKMQSWERYSIQ

SEQ ID NO: 123701 - protein, 246 aa, Unknown
  Bacterial polypetide isolated from the Sargasso Sea
MQNVNEGNVAIPCQPPVLVIAGPTASGKSHLAMAMAEAFDGEIVNADSMQVYRELALLTARPSPTDESRVPHHLYGIQSVSEISSAGAWLKAAVPVIDDIRRRGRWPIVCGGTGLYLKVLREGIAPIPDIPGDLFDLARRLYEDEGAMAFHERLVAVDPVAADRLPPGDRQRLIRAYAVKQATGRTLGEWQAMQSDEAPLEGPFFTVVLTPPRDALYARIDQRFDAMIDAGALEEVIALDPTLDVS

SEQ ID NO: 123702 - protein, 51 aa, Unknown
  Bacterial polypetide isolated from the Sargasso Sea
MKPQIYFVLGPTASGKSKFALSLANKLNGEIINADSMQIYRELSILTARPT

SEQ ID NO: 123703 - protein, 155 aa, Unknown
  Bacterial polypetide isolated from the Sargasso Sea
MPRLKNFAEIDPNMPILIAGQTASGKSYLALEIAKKYGGIIINADAIQIYKNWKILTARPSSLDEVKIKHKLYGHIDGASEYSVGTWIKEIKEILSSNSRPIIVGGTGLYFSALTNGLVDIPEISDSIRQEANNRIKENGFKSLVEEIDQETVQK

SEQ ID NO: 123704 - protein, 222 aa, Unknown
  Bacterial polypetide isolated from the Sargasso Sea
MNINKKKLIVIIGPTASGKTTLSIKLAKQFKCSIISADSRQFYKEMNIGTAKPTKSELDEVPHFFINNLSIHDSYSVGKFIDEANDFFNYYYLKNDLLIMVGGSGLFIDGLLKGLDPFPSINEEIRSRLNSDLEDIGLKKLSEKLKRVDPNYYDIVDLNNPRRVIRALEVYYSSNKPYSSFIQGNNSYRNDLNINFIGLNPKRDKLNKRIELRVDDMILNGL

SEQ ID NO: 123705 - protein, 95 aa, Unknown
  Bacterial polypetide isolated from the Sargasso Sea
MFTPKPLVIVLIGPTASGKTELGIDIAKYFNINIHNVDSRQLYRFMDIGTAKPTKEQQKSIKHFLIDLEEPSKQVNAKQFQEIATKSINRELIKK

SEQ ID NO: 123706 - protein, 285 aa, Unknown
  Bacterial polypetide isolated from the Sargasso Sea
NKLNGEIINADSMQIYNELSILTARPTINDQKKINHHLYGFVKGDVRFNVQKWCEEASKKINNLVDKNITPILVGGTGLYIESLINGIVPIPSIPEKVKIESDKMILKIGKENFFNLVKELDSDAMINIESNDIQRIRRIWEVNFFTKKKFSEWKKNKNINFINLKNYKILLFLPDRNENYKRVDQRTHLMIKDGAIEEVKYLLKLNYNNSLPIMKAHGVPEIQSYLNNEVSIAECISKIQQVTRNYVKRQHTWWKSSNLDIFKKFDQFPDEIDLKSINLDQKLN

SEQ ID NO: 123707 - protein, 143 aa, Unknown
  Bacterial polypetide isolated from the Sargasso Sea
FSVYKFTKKPLWLWQKENKKEFKKSQFTKIFLCPPKIEIEKRIRKRFSDMLKGGAIKETENFKKKRVNSLKSSNFIIGINEISEFLKNKISLEEVKERVAIRTRQYAKRQLTWQRGQMKDWKGFYDTNYLDLRKKILTYLSKT

SEQ ID NO: 123708 - protein, 95 aa, Unknown
  Bacterial polypetide isolated from the Sargasso Sea
MDLQSKIILISGPTASGKSGFAVNLAKKINGEIINADSMQVYKEVKILTARPTTKDQRKIKHHLYGFISVKRKFSTGQWLKHASKKINEIRKKNK

SEQ ID NO: 123709 - protein, 283 aa, Unknown
  Bacterial polypetide isolated from the Sargasso Sea
ASGKSKLAIDIAKKFNAEIINADSMQVYKEIKILSARPTYQSIKHHMYGFVSVKHSFSTGEWLKRASKIIKRINKKGKIALVVGGTGLYFKALTHGFSEIPNIPKPKANFKLNKNYIVKFPKIFKDISFNDKQRLQRAFLVYKHTGIPLWKWQKKNKKFFNSKDFNKIYLYPPKIEVENRIKKRFLEMIKKGAINETKKFIKINTNPMSPSNFIIGLKEISEFLGNEISLETLKEKVVIRSRQYAKRQYTWQRGQMKGWRGFSDTNYLDLRKKVIRYLSKTDP

SEQ ID NO: 123710 - protein, 114 aa, Unknown
  Bacterial polypetide isolated from the Sargasso Sea
ISCGALNRYRNDLYQRINKRTLSMLGSGWLAEVEMLLNRYSPELKPMQSIGYREVVQYLQNKLKWDTMVEEIRKRTRQLAKRQLTWFRREAKIEWYQPVEQDQILADIKVYLEN

SEQ ID NO: 123711 - protein, 215 aa, Unknown
  Bacterial polypetide isolated from the Sargasso Sea
MICGPTAAGKSAAALALAERSGGTVINADSMQVYSDLRVVTARPGSDDEARVPHRLYGIVDGGERASVASWLGLAAEAVDKARNAGSLPIIVGGTGMYLQAARNGIAPIPEVPAEIHQTCLEELASRGGAAFREELSKLDEEAASRLFDGDSQRLVRAMGVVRATGRPISAWQSDPHQGALAGEAVAISVMPPRADTYARIDWRFAQMMEEGAVE

SEQ ID NO: 123712 - protein, 298 aa, Unknown
  Bacterial polypetide isolated from the Sargasso Sea
MGKTKLAIHLEKKFPLEIISVDSAMVYREMDIGTDKPPKNILDTIKHHLINIRNPNEDFNVADFFHDTNQLIRDIHSRNKVPLLVGGSLMYFNSLYEGLSTLPKKNTSDRNLIDSLLEVYTPHDLHNCLKKIDLKTYNKIQSNDKQRIQRALEVYMSSGNPISSLLKNKKSFSESYDILTIKMFSSDRSVIHEKILSRMMDMFDQGLINETKYLLEKYKLTSDSQSMKIIGYRHVLDHLRDNSSIDDLKNKCLFATRQLAKRQITWLKQFPCNHGIDILDNDPTITYKVVDSHCNLVQ

SEQ ID NO: 123713 - protein, 135 aa, Unknown
  Bacterial polypetide isolated from the Sargasso Sea
MFQPKPLVIVLIGPTASGKTELGIDIAKHFNINIHNIDSRQLYRCMDIGTAKPTKEQQNTIKHFLIDLVEPSSKVNAKQFQEIATKSINRELSQKRIPFLVGGSGLYMNSIIKGFFAPGFTSSKSFKVTIEKLGQ

SEQ ID NO: 123714 - protein, 299 aa, Unknown
  Bacterial polypetide isolated from the Sargasso Sea
MSLDPPHVIILIGPTASGKTELAIEIAENFKTNIHNIDSRQIYKSMDIGTAKPSKIQQKKIKHFLIDIEEPINPINVKQFQEIAQKSIKGEIKQDKLPFLVGGSGLYMNSITKGFFVPDVPPQNNLRKQLEELGQEKCWDLLKTCDPLSTKKINIADHIRTIRALEVFYVTGKPLSTLKVQKPPNWKILELGLDRYNLKERIFQRTKNMFLSGIIEETNHLISKYGFDLPILETIGYREARDILNNRSTIDKAIELTATKTIQFAKRQKTWFRNKNNPLWLNNKNLLKDAIIKIESFLS

SEQ ID NO: 123715 - protein, 299 aa, Unknown
  Bacterial polypetide isolated from the Sargasso Sea
MSSYLPHVIILIGPTASGKTELAIEIAEYFKTHIHNIDSRQIYKSMDIGTAKPSKIQQKKIKHFLIDIEDPINPINVKQFQEIAQKSIKGEIKQNNLPFLVGGSGLYMNSITKGFFVPDVPPQNNLRRQLEELGQEKCWDLLKNCDPLSTKKINFADHIRTIRALEVFYVTGKPLSTLKVQKPPNWKILELGLDRDNLKERIFQRTKNMFLSGIIEETKHLISKYGFDLPILETIGYREARDVLNNRSTIDKAIELTATKTIQFAKRQKTWFRNKNNPLWLNNKNLLKDAIIKIESFLS

SEQ ID NO: 123716 - protein, 298 aa, Unknown
  Bacterial polypetide isolated from the Sargasso Sea
MNNKNLIYIGGPTGVGKTAIAIHIAKNLSAEIVSCDSRQFYKEMSIGTAVPSNEEINLVKHHFIQDRSIKNPLNVGTYQKESISKINKILENNKYVILVGGSGLYANSVLFGIDKFPKVNNSTIRKLNNIYINGGIKILQKELKIRDYESYKSIDINNHRRLIRVLSVCVETNLKYSSFLGKTKEVRKFNHQIYIISDDRNIIYNKINKRVDRMIKNGLENEAESLYKDNNSIVFETVGYKEWVSYWNGLKSKTKTIDEIKKNTRRYAKRQLTWFKKYDEALWLKPNGAANKILNNYK

SEQ ID NO: 123717 - protein, 316 aa, Unknown
  Bacterial polypetide isolated from the Sargasso Sea
MNYKFEFPAIFLIGPTASGKTELSLSIAKEFPVEIISVDSAMVYKGLDIGTSKPSKNIRESFKHHLIDILSPEQDFDLGFFLEETAKALKNIRAKNKLPLFVGGSMLFHKTLLEGIHNFPSDINVRKEIAALNKSYGLEGMSKELKNIDPETYQIIDIKNARRVERALEIIRITGKKLSQLKTEPKEMFFDQNKCLLLGISDKKNKLEDLANIRLLKMVDEGFINELENLKKEYKLTSESQSMNSINYKQFLPHINGIISLDAAFNDAFDATKQLIKTQLNWMKKFELNYYANTEDINDSKVFSDTITTYLRSFDK

SEQ ID NO: 123718 - protein, 169 aa, Unknown
  Bacterial polypetide isolated from the Sargasso Sea
MSSHTPHVIILIGPTASGKTELAIEIAEYFKTNIHNIDSRQIYKSMDIGTAKPSKIQQKKIKHFLIDIEEPINPINVKQFQEIAQISIKEEIKQDNLPFLVGGSGLYMNSITKGFFVPHVPPQNNLRKQLEELGQEKCWELLKNCDPLSTKTINFADHIRNIRALEVFY

SEQ ID NO: 123719 - protein, 169 aa, Unknown
  Bacterial polypetide isolated from the Sargasso Sea
MVLVLGPTASGKTGLGIALAQRLDCRVLSIDSRQLYAGMDIGTAKPTPEEQQQAPHELLNLSTPDVPINLQQFCRHAQPLIQQEQRRGKPALLVGGSGLYMQALSQGLQPPALPPQPVLRQQLQQLGQTCCHQLLSQADPEAAAKIQPNDPVRTQRALEVLYGTGAPIS

SEQ ID NO: 123720 - protein, 72 aa, Unknown
  Bacterial polypetide isolated from the Sargasso Sea
MDLKSKIILISGPTASGKSSFAIKVAKKVDGEIINADSMQVYKELKILSARPDPKKYQKIKHHLYGFHNVTK

SEQ ID NO: 123721 - protein, 302 aa, Unknown
  Bacterial polypetide isolated from the Sargasso Sea
MKKIISIFGPTGIGKSSIAIELAKKNNGEIIGVDSRQIYKGVSIGTAQPNQNQLNEVPHHLIGFKDLNEKISAGEYLQLIDKKIDQILSENKSPILCGGTGLYFKSLVEGIFSGSHTNEVIRKRLEQEYENDKEKLFKRLIEIDPTYSEKVHINNKKRLVRALEVFETTGKPMSENFDLISKASKYTDDYCFVYLQMKNHLLHPRIQKRIEFMINSGMIEEVEEIINKKIDISHIDYIGFKELSLFINNKISIEQAIENIFIRTRQYAKRQNKWFSANRYDINFDLENFSSNDIVDKLIQIN

SEQ ID NO: 123722 - protein, 46 aa, Unknown
  Bacterial polypetide isolated from the Sargasso Sea
MDLKSKIILIAGPTASGKSNFAINLAKKINGEIINADSMQIYKQLK

SEQ ID NO: 123723 - protein, 292 aa, Unknown
  Bacterial polypetide isolated from the Sargasso Sea
MEKRDILVIFGPTASGKSKLATQIASKHKSAIINFDSLQVYKDLKILTDRPDDEICKKFDHRLYGMLKGNESCSAAIWLEKAEHEINNCFDNKLLPIVVGGTGLYLKALMDGLSEIPSIKKNIEEQAKLDLETYGLDHLYKKILIKYQGTKINPNDKQRIMRSYSLLLQTGKVLEEWQFNPNKKIDNVNYRVILTGNLREKLYESAEQRVDNMFHDGAVDEVQSLIDKNYSAELSIMKAIGVREITNFIDGKVSLDEAKSIMKKNTRNYIQRQDTWIKGNNITQNVDIKKYL

SEQ ID NO: 123724 - protein, 206 aa, Unknown
  Bacterial polypetide isolated from the Sargasso Sea
IVGGTGLYFKSLTDGLAKIPNIPSKLRKEIIKFHKKLGQKKFFRELIKLDPKCKTRLDPSDSQRSIRAFEVKKFSGISLFDWFSKTKSNYDKNQFIKIYLDFPREIILKRIEARSKKIIGKRSINEVKKFNRLKVKKSLSSNKIIGISEITDFLDKKYDLKELQEKISIKTRQYAKRQATWARGHMSDWTRLSLIETKKYIKNFKY

SEQ ID NO: 123725 - protein, 251 aa, Unknown
  Bacterial polypetide isolated from the Sargasso Sea
IQDLKKVKHHLYGIIDVNKNFSTGDWLKLSIKTIKEIRKRKKIPIIVGGTGLYFKALTEGFVKIPTVPIRVRNQIRKLQKKIGQEKFFNKLNEIDPKVKNKIEKNDTQRSIRAYEIKYYTKKSLFEWFKNTKKYFLDNEFIKIYINYPKNEVIKKANSRVNIMLKSGAIAEVKKFNTLKIRKQNSVNKVIGIVEISNYLNDNCNLDEAKDLISIKTRQYIKRQFTWARGQMANWKHIDPKLSSSDLKKILR

SEQ ID NO: 123726 - protein, 89 aa, Unknown
  Bacterial polypetide isolated from the Sargasso Sea
MDLKSKIILISGPTASGKSKFALKIAKKLNGEIINADSMQVYKELNVLTARPSKIDLKKIEHHLYGFRSVKKEFSTGEWLQLANKNIKK

SEQ ID NO: 123727 - protein, 49 aa, Unknown
  Bacterial polypetide isolated from the Sargasso Sea
MQKKKQKKIILLFGPTASGKSRLAIDLAKELNGEIINADSMQVYKEVRI

SEQ ID NO: 123728 - protein, 132 aa, Unknown
  Bacterial polypetide isolated from the Sargasso Sea
MQKSPLVVVGPTACGKSAFALEIARRVRGVELISIDSMQVYRKMNIGTAKPTIEEQLETPHHLIDLVEPSESFTLVDFQQAHDSVRRDIEERAGVPVLVGGTGLYVRAIVDRLTPPPRFAQIASQLDEEQDT

SEQ ID NO: 123729 - protein, 142 aa, Unknown
  Bacterial polypetide isolated from the Sargasso Sea
MDYKSKIILISGSTASGKSNFSLKLSKKINGEIINADSMQVYKELRILTARPKKNQYQNIKHHLYGFQSVKKSFSAGNWLKLAIKKIHTIKKRKKIPILVGGTGLYFKVLIDGIVKIPNIPIKLRNKVRTLHQKLGQKKFYN

SEQ ID NO: 123730 - protein, 69 aa, Unknown
  Bacterial polypetide isolated from the Sargasso Sea
EAKNNLPTWNKSHPSSKAIGAHELIAFLNNEISKDQLRKQIVIATRQYAKRQRTWFRSKMKNWDRYIIE

SEQ ID NO: 123731 - protein, 247 aa, Unknown
  Bacterial polypetide isolated from the Sargasso Sea
SARPENTSIKHHLYGCVSVKNRFSTGLWIKKAVKKINQIQKKGKIALVVGGTGLYFKALTEGFSEIPGIPKPNKNFEFNKSYAVKYPKIFKGVSLNDKQRVQRAFLVYKHTGKPLWLWQKKNKKFFKSSDFIKIYLQPSKLEIDERIKERFTDMLRKGAIREAKKFIKINPSSMNSSNFIIGLKEISLFLNGELSIEKLKEKVSIRSRQYAKRQFTWQRGQMKHWKGFGDTNYLDLRKKVISYLSKT

SEQ ID NO: 123732 - protein, 62 aa, Unknown
  Bacterial polypetide isolated from the Sargasso Sea
MREKKIISIVGPTASGKSDLAISIAEKYKLSIINSDSKLLYKGLNIGTAKPSIEELNKTKHY

SEQ ID NO: 123733 - protein, 107 aa, Unknown
  Bacterial polypetide isolated from the Sargasso Sea
MKKTIYVIAGPTATGKSDFSIKLAKKINGVVINSDSMQVYKNLQILTARPTSSETKNIPHYMYGYIDGKERYNVDKWCNDVVGIIHQTCRNNFSPILVGGTGLYIDT

SEQ ID NO: 123734 - protein, 44 aa, Unknown
  Bacterial polypetide isolated from the Sargasso Sea
MDLKSKIILISGPTASGKSSFAIKVAKKVDGEIINADSMQVYKE

SEQ ID NO: 123735 - protein, 237 aa, Unknown
  Bacterial polypetide isolated from the Sargasso Sea
PDGNYSAGQYARDTSKIIKNIQERGRLPILVGGTGLYYRSLMYGISKIPPIPESLRIEIKGWHQNHGTSYCYKLLQKNDPEFAEFLHPNDTSRILRSLEVVLSTGKSIHSYRLEQPFGEALYQFQAVALNWDRTDLYQRINKRTLSMLGSGWLAEVEMLLNNYSTELKPMQSIGYREVVQYLQNKLKWEVMVEEIQKRTRQFAKRQLTWFRREAKIEWYQPVEKDRILADIKVYLEN

SEQ ID NO: 123736 - protein, 96 aa, Unknown
  Bacterial polypetide isolated from the Sargasso Sea
MDFKSKIILISGPTASGKSSFAIKLAKKLNGEIINADSMQVYKQLKILSARPDQKKYQKIKHHLYGFHDVKKNFSIGNWLKLVLKKIEEIKRRKKT

SEQ ID NO: 123737 - protein, 178 aa, Unknown
  Bacterial polypetide isolated from the Sargasso Sea
RDKIRRLQNRIGQRKFFKKLIKLDPLINDKINPTDMQRSIRAYEVKFYTKKSIVDWFKKTKSKYADEDFVKIYIDFPKQDLLDNISTRVDQMFEQGAIMEVKKFMKLKLRSDSSVNKVIGINEIKDFINKNSDLNETREKITIKTRQYAKRQSTWARGQMKDWQKVNPNDLKKFLKKI

SEQ ID NO: 123738 - protein, 121 aa, Unknown
  Bacterial polypetide isolated from the Sargasso Sea
FIKLYLDYSREELLKRINVRTKKMIKSGAVSEVKKLLKERNVKKENYYKIIGFKEIEMFLEGKIDKNNLCDQINIRTRQYAKRQITWFRGKMKSWTPIDPNKLTPFIKKLNKSSLKLDQLI

SEQ ID NO: 123739 - protein, 313 aa, Unknown
  Bacterial polypetide isolated from the Sargasso Sea
MLSSKKKPVVFLFGPTASGKTELAINLVDKFPIQLISVDSVMVYKDCNIGSAKPTKEILKKYPHHIIDVVSPNEIFTVADFCAISKKIIKNAHYKKKLPVLIGGSMMYFKSLLDGIHDLPARDENYRQELSKLKLNNNDNFLYNLLNDIDSDYAKKINKNDEVRIIRALEVFKVTGKLMSEIISNNSNKKLSFDYEIAQFGIIHDRELLHKRIESRLNKIIEEGLLEEAKSLLKKYNIDLEHPLRRAVNYKQAFSYLNNEYEYDTFYKKALYATRQLAKRQTTWLRSWKEFEEIDINQQNNIENSIKNLISLL

SEQ ID NO: 123740 - protein, 89 aa, Unknown
  Bacterial polypetide isolated from the Sargasso Sea
MTYRFQSPAVFLIGPTASGKTDTAIKLAEKYPFEIISVDSAMVFKDMNIGTCKPSNQDLERIPHHLIDIIKPDTKFDVGLFVNYVESAV

SEQ ID NO: 123741 - protein, 47 aa, Unknown
  Bacterial polypetide isolated from the Sargasso Sea
MNLRTKIILVAGPTASGKSTFALKIAKKIKEEIINADSMQVYSDLKI

SEQ ID NO: 123742 - protein, 316 aa, Unknown
  Bacterial polypetide isolated from the Sargasso Sea
MNYKYNFPAIFLIGPTASGKTAASIALAENLPIEIVSVDSAMVYKGMDIGTSKPPEIERKGIPHHLIDIISPDRNFDLGLFLQETHRAIEEILKNKNFPLFVGGSMLFQKVLLNGIHDFPSDENIRKQIQKDIKENGIDFLIDELRLKDEETFTSIDLKNLRRVERAVEIIRITETKLSILKKQEIEKFFDYNKCLVLGIFNKKSTLESLAKKRLEIMVNQGILNELENLKKEYKLNAGHQSMNAINYKQFLAHLDGKVSLESAFEQAFDATKNLIKTQLTWMKKFNFNNSMNAEYADDSDTFSDTINTYLRSFNK

SEQ ID NO: 123743 - protein, 105 aa, Unknown
  Bacterial polypetide isolated from the Sargasso Sea
LDLSMCKAFLVDGEVSLINNRILQRLDQMIEKGLIQEAENNLATWNTLHPSSKAIGAHELIAYLNNEISMEQLREQIVIATRQYAKRQRTWFRSKMKSWERYYFK

SEQ ID NO: 123744 - protein, 52 aa, Unknown
  Bacterial polypetide isolated from the Sargasso Sea
MDLKSKIILISGPTASGKSSFAIKVAKKVDGEIINSDSMQVYKELKILSARP

SEQ ID NO: 123745 - protein, 68 aa, Unknown
  Bacterial polypetide isolated from the Sargasso Sea
WEIIQFLRGELKSSDLVPLIQQRTRQYAKRQLTWFRKENHLVWSHPDKKEQILKECMVCLEKIVQNQA

SEQ ID NO: 123746 - protein, 255 aa, Unknown
  Bacterial polypetide isolated from the Sargasso Sea
ARPTIKDTKEVKHHLYGFINVTKNFSTGEWLKLSKKKIKEIRKRKKIPIIVGGTGLYFKALTDGFVQIPNVPFKIRSKIRKLQNKLGQDKFFSELKKIDPLVKNKIEKNDSQRSIRAYEIKYYTKKSLFKWFQNTKKNFLDTEFIKIYIDYPRDELVKKANLRVNKMFEIGAVAEVRKFNRLKVKKQNSANKVIGIEEITNYLNNRCDLREAKDLISIKTRQYIKRQITWARGQMANWTYIDKNITSSNLKKILR

SEQ ID NO: 123747 - protein, 83 aa, Unknown
  Bacterial polypetide isolated from the Sargasso Sea
MFQPKPLVIVLIGPTASGKTELGIEIAKYFNLNIHNVDSRQLYRFMDIGTAKPTKEQQKTIKHFLIDLEEPSSQVNAKQFQEI

SEQ ID NO: 123748 - protein, 133 aa, Unknown
  Bacterial polypetide isolated from the Sargasso Sea
MDLKSKIVLIYGPTASGKSLFAIKLAKKIGGEIINADSMQVYKELKVLTARPLKKDYNNIKHHLYGFQSVKKKFSTGDWLKLVKEKIENIKKRKKVPILVGGTGLYFKALTDGLVDIPNIPMKFRKNIRYLHK

SEQ ID NO: 123749 - protein, 200 aa, Unknown
  Bacterial polypetide isolated from the Sargasso Sea
MLYLNSLSNGIAQLPEKNMQIREEIEKKAQKKGWGEMHAELKKIDSCAASNINKNDKQRIQRALEVYYVTGKKISELQKKATPQNNYQFEVFSLKNINRDELYSKINNRFLGMLEAGFVDEVRILREREGLSSENMSMRSVGYRQIWKYLDNEIDLNEATELAQTATRQLAKRQLTWMRSMKNLKQESHKNIYKKIESLT

SEQ ID NO: 123750 - protein, 177 aa, Unknown
  Bacterial polypetide isolated from the Sargasso Sea
MDLKSKIVLIYGPTASGKSDFAIKLAKKIKGEIVNADSMQVYKELKILTARPIRKNFQKIKHHLYGCQKSYKDFSTGDWLNFAEKKIKEIRLRKKTPILVGGTGLYFKALTDGLVEIPSIPLKFRNKIRSMHKSVGQDKFYKKLLKLDPLIVNQINSTDTQRSLRAYEVKLFTKKSV

SEQ ID NO: 123751 - protein, 205 aa, Unknown
  Bacterial polypetide isolated from the Sargasso Sea
MIKKLILISGPTASGKSKLAVKLAKKIKGEIINADSMQIYKELSILTSRPSKKNQREINHHLYGFLSAKKYFSVGQWLELVKKKIQQINNRKKIPIVVGGTGLYFNAITKGISKIPKINEKSRKRIRKYHKKIGQEKFYQELLNIDPKSKNKILSTDTQRTLRAYEVKFCTNKSIFEWAENTKSDFLNYDIKKILIEVPRNKSFN

SEQ ID NO: 123752 - protein, 173 aa, Unknown
  Bacterial polypetide isolated from the Sargasso Sea
MKTQIYFVLGPTASGKSKFALSLAKKLNGEIINADSMQIYKELSILTARPTIHDQKKINHHLYGFVKGEIRFNVQKWCEEASTKINYLVDKNITPILVGGTGLYIESLINGIVSIPFIPEKVKKESEKMILKIGKENFFNLVKEHDVDAMKNISPNDIQRIRRIWEVNFFTKK

SEQ ID NO: 123753 - protein, 183 aa, Unknown
  Bacterial polypetide isolated from the Sargasso Sea
MENKIILIAGPTASGKSSLANALAKKIDGEIINADSIQIYKDLEILTARPKPKQNDPNHHLYGFVNGDELWSVGKWINEAKKITQKILKKNSTPILVGGTGLYFKAITDGLSPIPDINYEIRGSLKKELNIRGLEKLYEELKVTDIQAYESIDRNDQQRILRALEVFRGTGKRYLIIGNWIDK

SEQ ID NO: 123754 - protein, 160 aa, Unknown
  Bacterial polypetide isolated from the Sargasso Sea
MDLKSKIILISGPTASGKSKFAVKLAKKIKGEIINADSMQVYKELRILTARPAKSDYNKIKHHLYGFESVKKNFSTGKWLKLANKKIDIIKKRKKIPILVGGTGLYFKALTDGLVKIPNIPIQSRNKIRNLQKKLGQKKFFMRLIKLDPSVKEKIKSTDV

SEQ ID NO: 123755 - protein, 238 aa, Unknown
  Bacterial polypetide isolated from the Sargasso Sea
MDLKSKIILIYGPTASGKSNFAVKLAKKIDGEIINADSMQVYKELKVLSARPFKKDYQKIKHHLYGFQSVTKNFSTGDWLKLIDQKISNLKKRKKVPVIVGGTGLYFKALTDGLVNIPSIPIKFREKIRSLHKKIGPKRFFSRLIKLDPLAKHNLNYSDTQRCIRAYEVKLFTKSSIYDWFKKTKSNYEQKDFYKIYIDFPRNQLLDRINLRAKEMIKKGAVLEVKRFIKIKVRKDKT

SEQ ID NO: 123756 - protein, 161 aa, Unknown
  Bacterial polypetide isolated from the Sargasso Sea
MDLKSKIILISGPTASGKSKLAIEFAKKINGEIINADSMQIYKELKILTARPIKENINKIKHHLYGFQSCKNEFSTGEWLKLVKKKINEIRNKNKIPILVGGTGLYFKALTDGLVKIPNIPSKIRNKIRNIQKQIGQKKFYIKLLKLDKSVKNKIDPTDVQ

SEQ ID NO: 123757 - protein, 175 aa, Unknown
  Bacterial polypetide isolated from the Sargasso Sea
MSKKIILLAGPTASGKSRLAIQLAKKLNGEIINADSMQIYKEFSILSSRPNSKELKKIKHHLYGIISAKKYFSAGEWLKFAKNRINYCHKFKKIPIIVGGTGLYFNTITKGISKIPHIDIQIRNKVRNLFKKLGYKVFYEKLLDLDPKVKNKILPSDTQRSQRAYEVILKTKKSL

SEQ ID NO: 123758 - protein, 121 aa, Unknown
  Bacterial polypetide isolated from the Sargasso Sea
MDLKSKIILIAGPTASGKSKFAIQLAKKINGEIINADSMQIYKELKILTVRPKKIDQKKIKHHLYGIQSVKKDFSSGKWLKHAYKKIIEIRKRNKTPIFVGGTGLYFKSLTDGLTKYQIFL

SEQ ID NO: 123759 - protein, 143 aa, Unknown
  Bacterial polypetide isolated from the Sargasso Sea
MDLKSKIILIAGPTASGKSNFSLKLAKKINGEVINADSMQVYKQLQVLTARPIKKDIKKIKHHLYGFCDVKKNFSTGEWLKLSIKKIKGIRKKKKVPIIVGGTGLYFKALTEGLVKIPNIPIRLRNKIRLMQKQLGQKKFYKK

SEQ ID NO: 123760 - protein, 187 aa, Unknown
  Bacterial polypetide isolated from the Sargasso Sea
MDHQSKIILIAGPTASGKSNFAVNLAKKIDGEIINADSMQIYKQLKILTARPNKNEQKNIRHHLYGIININKNFSSGTWLKLAIRKIKEIRKRKKIPIVVGGTGLYFQSLINGLVKIPNISMKLRNKIRSMQKKYGQKNFYKKLLKLDPKVKNKFDPNDTQRSIRAFEIKTHTKISMYDWFHKTKPI

SEQ ID NO: 123761 - protein, 129 aa, Unknown
  Bacterial polypetide isolated from the Sargasso Sea
MYKKLILIAGPTASGKSKLAIHLSKKLNGEIINADSMQIYKEFSILSSRPTKNEEKKIKHHLYGFISVRKRFSAGDWLKLAKVKINNCYKNKKIPIIVGGTGLYFNTITKGISKIPNIDLKTRYKVRSL

SEQ ID NO: 123762 - protein, 138 aa, Unknown
  Bacterial polypetide isolated from the Sargasso Sea
MDLKSKIILIAGPTASGKSKFAVQLAKKINGEIINADSMQIYKELKILTARPKKIDQKKIKHHLYGIQSVKKDFSSGKWLKHAKKKIKEIRKRNKTPIFVGGTGLYFKSLTDGLTKIPNIPIKFRNKIRNLQNKIGQE

SEQ ID NO: 123763 - protein, 235 aa, Unknown
  Bacterial polypetide isolated from the Sargasso Sea
MQKKIILLAGPTASGKSNLAILLAKKIKGEIINTDSMQVYKEFLILSSRPSKNDLKKVSHHLYGFLSVKKNFSTGEWLKLVKKKIYQITKKKRIPILVGGTGLYFNAITKGISKIPVISDKYRETIRANHKLIGQKKFYEKLIELDPLSQKNISPNDTQRSIRAYEVKFFTGKSLYEWISKTKSDFIDYDIRKIYLDTPRDVLLKKIEHRTNKMFKENCAKEVKNFLSLNIKNHF

SEQ ID NO: 123764 - protein, 256 aa, Unknown
  Bacterial polypetide isolated from the Sargasso Sea
MKTQVYFVLGPTASGKSKFALKLAEKLNGEIINADSMQIYSELSILTARPTINDLKKINHHLYGFVTGDVRFNVQKWCEEASKKINHLVNKNITPILVGGTGLYIESLINGIVSIPLIPEKIKIESDKMISKIGKENFFNLVKELDSDAMKKISPNDIQRIRRIWEVNFFTKKKFSYWKQNKNKKQINLKDYKILLFLPNKNENYKRVDDRTHIMMNEGAILEVEKLLKLKYNNSLPIMRAHGVPEIKSYLNNQIS

SEQ ID NO: 123765 - protein, 222 aa, Unknown
  Bacterial polypetide isolated from the Sargasso Sea
MGQKKTILLFGPTASGKSKLAVDIAKKLNGEIVNADSMQIYKEIKILSARPNEQTVKHHLYGFISAKNNFSVGAWYKLAATKIKEIKKRNKTAIVTGGTGLYFKALVDGLAQIPNVPKIDYSYLNPIGRFMMKNHYQKKYPKIFKGINTNDIQRVSRAISVYNATGVTLNEWQNKKNKKYFNSKEFIKICLIPPKPVLEEKIKKRFSEMLKKGAIQEARKYR

SEQ ID NO: 123766 - protein, 157 aa, Unknown
  Bacterial polypetide isolated from the Sargasso Sea
GARIHPNDPQRLSRALEVYRISGKTLTELTQVQGEGLPYRVLQFAIAPSDRAVLHQRIELRFDKMLQGGFEQEVRALYQRGDLTPDLPSIRCVGYRQMWDYLAGEVEYDEMRYRGIVATRQLAKRQMTWLRGWSDVTWLESGESGNLARVVARAGVA

SEQ ID NO: 123767 - protein, 296 aa, Unknown
  Bacterial polypetide isolated from the Sargasso Sea
MDLKSKIILIYGPTASGKSQFAVKLAKKINGEIINADSMQVYKELKILSARPFKKDQQKISHHLYGFQNVKNNFSTGDWLKLVNKKIFIIKKRKKIPILVGGTGLYFKALTDGLVDIPNIPNKLRERIRSLHKKLGAKKFFLELKKIDPLIKNQINFSDTQRSIRAYEVKLYTKRSIYDWFENTKSNYQQKDFYKICIDFPKNELLLRINLRTLDMIKKGAILEVRKFNKIKVRKDKTATKAIGINEVNEYLQKKIEIKELIEKISIKTRQYAKRQRTWASGNMQNWIKLTPKDFN

SEQ ID NO: 123768 - protein, 228 aa, Unknown
  Bacterial polypetide isolated from the Sargasso Sea
MDLKSKIILIYGPTASGKSEFAVKLAKKMRGEIINADSMQVYKELKILSARPSKKDYKKIKHHLYGFHSVKKNYSSGEWLKAAKKKISEIRKRKNVPIIVGGTGLYFKTLTDGIVNIPKIPIQIREKVRKLNSSMGNKIFLKKLKKLDPKIQDYVNPSDTQRLIRAYEVKLFTKKTLLEWFKTTKSIFEDKDFYKIYIDYPRDILVKKIHNRAQDMINKGAILEAKRF

SEQ ID NO: 123769 - protein, 278 aa, Unknown
  Bacterial polypetide isolated from the Sargasso Sea
MDLKSKIILISGPTASGKSNFAVNLAKKIKGEIINADSMQVYREPKILTARPDIKEQKKVKHHLYGFLSIKRKFSTGRWLNLVLKKIKKIQKRKKIPILVGGTGLYFKTLIDGLVKIPKISLEKRKDIVNLQKKLGQKIFYQKLIQLDPKIKNIINLNDIQRSIRAYEVKKYTKISLVDWHKNTKSFYKKNDFIKIYLDCPRNVLLERIKTRTHQMLKKGAIKEVKKIKKIKVPTANSSIKIIGVNEIKNFLSKNQNIEQTIEQIIIKTRQYAKRQAT

SEQ ID NO: 123770 - protein, 134 aa, Unknown
  Bacterial polypetide isolated from the Sargasso Sea
MDLKSKIILISGPTASGKSKLALKIAKKLNGEIINADSMQVYKELNILTARPSKIDLKKIEHHLYGFRTVKKEFSSGEWLKLAKKNIKKIRDKNKIPVLVGGTGLYFKALTNGLVKIPKIPTPIRNQVRLMQNR

SEQ ID NO: 123771 - protein, 269 aa, Unknown
  Bacterial polypetide isolated from the Sargasso Sea
VYKELKILTARPSKNEQKNIKHHLYGFQSVKKIFSTGSWLKLTIKKIKEIQRKNKIPILVGGTGLYFKALTDGLVTIPNIPKKIRLQIRKLQKKIGQRKFYKMLVKFDPLSKNKINSNDSQRTIRAYEIKKYTKKSLFEWFDKTKPNFQRSQFIKFYIDFPRSELINRINKRVDKMFDMGAIREVKIFFKLKVRKENSSYKVIGIREISEFIEDYKDLEETKDRIAIKTRQYAKRQSTWARRYMNDWNKIDLNRVNFSDLKKILNNNLF

SEQ ID NO: 123772 - protein, 271 aa, Unknown
  Bacterial polypetide isolated from the Sargasso Sea
MDDLKSKIILIAGPTASGKSKFAIQLAKKINGEIINADSMQVYKELKILTARPKKTDQNKVKHHLYGIQSVRKDFSAGAWLKYVNKKTKEIRKRNKTPILVGGTGLYFKSLTDGLVKIPNIPKKFRKKIRILQSRLGQKEFYNRLVEIDPKAKAYIKPNDAQRSIRAYEIKKYTKLSILDWFRKTKKIFDEDEFVKIYIDIPREKLLERISERINQMFKEKVVNEVIKFNKLKLKKDKSANKVIGIEEITSYMKGFHTIEEIKEKILIKTR

SEQ ID NO: 123773 - protein, 238 aa, Unknown
  Bacterial polypetide isolated from the Sargasso Sea
SVGRFVRESEEVINKLKLRKKIPILVGGTGMYLRSLLFGLSEIPEVSSNIKLQVKKWQKEEGTLACWQKLKEVDPEGAEKSHPNDTSRIMRALEVVISSGQPISSFQDNDNSNAQRYSFFGMICDRPRQELYDRINRKTQEMMDQGWIDEVRNLLAQFPENLKPFQSIGYREIIQFLRGELESSDLVPLIQQRTRQYAKRQLTWFRKENQLVWSHPDKKEQILKECMVCLEKIGQNQA

SEQ ID NO: 123774 - protein, 217 aa, Unknown
  Bacterial polypetide isolated from the Sargasso Sea
VKRNKIPILVGGTGLYFNAITRGISKIPKIENKLRMNIRGLHNKIGQKKFYQKLISIDPMSKNRVSSQDTHRTMRAYEVKISTKRSLYDWASNTKSDFLDFDIRKIFIDIPREALLKNISLRTDLMFKKRCVQEVKNFLRLKLNKALSANKIIGVREIEEYLDGSRNTREVIDLINIRTRQYAKRQNTWSRGHMKTWKKLYSKDFSVLTRKVLKEIS

SEQ ID NO: 123775 - protein, 297 aa, Unknown
  Bacterial polypetide isolated from the Sargasso Sea
TLFGPTASGKSRLAVDIAKEYNGEIVNADSMQVYNEIKILSARPNNKDVKHHLYGFISVVENFSVGSWYQLASEKIKQINRKGKTAIVVGGTGLYFKVLTDGLVEIPKVPKIDYSYLNPIGAFFMLKHYSGRYPKIFEGINIKDMQRVSRAISVYDATGITLSDWQKKKNKKYFEKNEFIKICLLPPKKELEKRIEKRFLEMLKNGAIEEAKKYRELGLSMYSLYTSNKIIGLEQIASFIDKKISMKELKEAVFIKTRQYAKRQYTWQRGQMKDWKGFTDTNYLDLRKKILSYLSKT

SEQ ID NO: 123776 - protein, 175 aa, Unknown
  Bacterial polypetide isolated from the Sargasso Sea
MSKIILISGPTASGKSEFAVKIAKKVNGEIINADSMQIYKEIKILNTRPDKNLTKKVKHHLYGFVSVKKNFSVGKWIILTNKLIKKIIYKKKVPIIVGGTGLYFKSLTDGLVKIPNIPVSFRKKIIDYQKKVGQKKFYKHLIKIDPKSKSKINSKDVQRSIRAFEVKKISKISLL

SEQ ID NO: 123777 - protein, 264 aa, Unknown
  Bacterial polypetide isolated from the Sargasso Sea
MQVYKDLKILSARPLKKNYQKIKHHLYGFISAKKNFSSGDWLKLTKKKIFDIRKRKKTPILVGGTGLYFKALTDGLVNIPNIPIKHRKQIRLLYKKLGSKKFYSKLIKLDPLVRGKINPSDPQRAIRAYEIKLFTKRSMYEWFKNTKSDYEKDDFYKIYIDFPRDRLIKRIHARTTDMINGGAIMEVKKFLKLKIQSSKTAHKAIGIQEIREFLNKKIEISEVIERISIKTRQYAKRQVTWARGNMFDWNKINSNALNKFLKKI

SEQ ID NO: 123778 - protein, 146 aa, Unknown
  Bacterial polypetide isolated from the Sargasso Sea
MDLKSKIILIYGPTASGKSQFAVKLAKKINGEIINADSMQVYKELKILSARPFSKDYQKIKHHLYGFQNSKKIFSTGIWLKLASQKILEIKKRKKTPILVGGTGLYFKALTEGIVNIPNIPVKFREKIRSLHKKLGQKKFFLKLIK

SEQ ID NO: 123779 - protein, 221 aa, Unknown
  Bacterial polypetide isolated from the Sargasso Sea
LAKIKILELKKRKKTPILVGGTGLYFKALIEGLVSIPNIPISTRNKVRSLHKKLGQKKFFSQLIKIDPLVKNHINPLDTQRSIRAYEVKLFTKKSLFMWFKDTRSNYFKKDFFKIYIDFPRNDLLKQINFRAQEMIKNGAVLEVKRFMKSKVPKDKSANKAIGISEINQYLAKKIEISDVIEKISIKTRQYAKRQCTWARGNMENWNRMSPNRLNKFLKKI

SEQ ID NO: 123780 - protein, 297 aa, Unknown
  Bacterial polypetide isolated from the Sargasso Sea
LARLLPCDLISVDSALIYRGMDIGTAKPERAILDAFPHALIDIRDPAESYSAAEFRADALAAMAASAARGRIPLLVGGTMLYYKALLEGLADMPSADPAVRAELEARAAAEGWEALHRELAAVDPESAARIHPNDPQRLTRALEVYRVSGLSMSEHRRRQAAGNSDTGTSAGGQLPYTVAQLAIAPAQRQVLHERIAQRFQAMLEQGFVDEVEALRRRSDLHAGLPSIRAVGYRQVWEYLDGGLSREQMVERGIIATRQLAKRQFTWLRGWDGLHWLDSLACNNLSRALKYLESVSI

SEQ ID NO: 123781 - protein, 263 aa, Unknown
  Bacterial polypetide isolated from the Sargasso Sea
FIKNLNILTARPNLKQNNKIKHHLYGFLSIKKKFSTGQWLKLASKKIKEIRNRNKIPILVGGTGLYFKALIEGLAKIPKISATKRKQVTNLQNKLGQIYFYKKLTKIDPKIKNFVNSNDVHRSIRAYEVKYYTKKSLLEWYNDTRPPFSNEEFIKIYLDCPKDYLLDRIKVRTQKMFPKAIKEVKKINSIKIPKSNSSTKIIGITEIKNFLDKKLNKAQTIEHIVIKTRQYAKRQATWARGQMKDWKIICATNTKMSSKKLFN

SEQ ID NO: 123782 - protein, 293 aa, Unknown
  Bacterial polypetide isolated from the Sargasso Sea
MDFKSKIILIYGPTASGKSKFAVNLAKKISGEIINADSMQVYKELKILSARPYQKNYKKIRHHLYGFQNVKKKFSTGQWLELANKKISDIRKRKKVPILVGGTGLYFKALTEGLVKIPNIPIKFRNEIRTLHKKIGSKRFFSRLTKLDPLVKKKLNPLDTQRVIRAYEIKSFTKKSMFEWFKNTKSKYEQRDFYKIYIDFPRDELIKRINSRASEMIDRGAILEVKKFIKLKVSKNKTASKAIGISEIKEFLNKKIQISELIDKISIKTRQYAKRQVTWSRGHMSDWDKIKSN

SEQ ID NO: 123783 - protein, 182 aa, Unknown
  Bacterial polypetide isolated from the Sargasso Sea
MLKKNKKIILLFGPTASGKSKLAIDIAKKINGEIVNADSMQVYKEINILSARPDKNKIKHHLYGFLSIKKSFSTGAWLKKATVKIKEINKRGKVALVVGGTGLYFKALIDGFSYIPKTPKPKKNFQLKKSYLKKHYNIFKDIPINDNQRLQRAFLVHKYTGKPISFWQKKNKKPFNSYEFVK

SEQ ID NO: 123784 - protein, 186 aa, Unknown
  Bacterial polypetide isolated from the Sargasso Sea
MPKNIKKKIILLFGPTASGKSKLAIDIATKFNGEILNADSMQVYKEIKILSARPEKSKIKHHFYGFISAKKSFSVGEWYKLVSKKIKEIQKRKRVPVVAGGTGLYFRALTEGLVEIPKVEKKDFSHLIPLERRMIENEYEKKNPTIFQGIDRNDTQRVSRAISVYEGTGLTLKEWQNKENKKYFKS

SEQ ID NO: 123785 - protein, 121 aa, Unknown
  Bacterial polypetide isolated from the Sargasso Sea
MKKIILLFGPTASGKSKLAIDLAQNYNGEIVNADSMQVYSEIKILSARPYEKHVKHHLYGCASVNDNFSVGKWYTLATNKIKEINKKNKVAIVVGGTGLYFKVLIDGLIDIPEIPKIEMNL

SEQ ID NO: 123786 - protein, 118 aa, Unknown
  Bacterial polypetide isolated from the Sargasso Sea
MKRKIILLAGPTASGKTKIAIKLAKRINGEIINADSMQVYKDFQILSSRPSKNELRLAKHHLYGFQSSGAVFSTGKWLKLASDKINQIVKKNKVPILVGGTGLYFKAITDGISKIPNI

SEQ ID NO: 123787 - protein, 216 aa, Unknown
  Bacterial polypetide isolated from the Sargasso Sea
LPIICGGTGLYIKFLLNELSTIPEIPPSIKLEAREKLEDLGNENFRELLSKNDPVSARRIKSGDTNRLLRAWEVFTATNKPLSYWHEQSRETGSQHKFFKVCLMPERKALYSKCDKRFLDFIEQGAADEARALDCINVSPELPASKTLGLLELIKYTKGELELSDAIAQAQRITRRYAKRQLTWFRHQLDEDFLIQNLRCRKTVSDCFKKIVNFLG

SEQ ID NO: 123788 - protein, 243 aa, Unknown
  Bacterial polypetide isolated from the Sargasso Sea
MKTQIYFVLGPTASGKSKFALSLANKLNGEIINADSMQIYNELSILTARPTINDQKKINHHLYGFVKGDVRFNVQKWCEEASKKINYLVNKNITPILVGGTGLYIESLINGIVSIPSIPEKVKIESEKMILKIGKENFYNLVKELDSDAMINIASNDIQRIRRIWEVNIFTKKKFSDWKKSKNKNFINLINYKILLFLPDRKENYRRVNHRTHLMMEDGAIEEVKNLLKLNYNNSLPIMKAHG

SEQ ID NO: 123789 - protein, 279 aa, Unknown
  Bacterial polypetide isolated from the Sargasso Sea
MKKTILLFGPTASGKSKLAIDLAQNYNGEIVNADSMQVYSEIKILSARPDEKHVKHHLYGCASVNDKFSVGKWYTLATNKIKEINKKNKVAIVVGGTGLYFKVLIDGLVDIPEIPKIEMNLNPLGRHMMINSYSSKYPGIFDHLDDLNDTQRLYRAIAVYEHTGMTVSEWHTKENKKNFQTNDFIKVCLIPEKKEIEKRIQKRFDNMLNSGAVEEAKNFYKLEIWKKSLHTANSIIGLREIHLYLSKKISLDELKNDVLVRTRQYAKRQYTWQRGQMKD

SEQ ID NO: 123790 - protein, 265 aa, Unknown
  Bacterial polypetide isolated from the Sargasso Sea
LSARPDPKKYQNIKHHLYGFHNVTKNFSTGDWLKLVIKKIKEVQKRKKTPIIVGGTGLYFKALTDGLVNIPNISLKLRNQIRELQKKHGQKKFYEKLIKLDPSTRGKIKPTDTQRSIRAYEVKKFTKKSLTEWFKNTKSNFVTDDFFKVYIDFPRKELIERINIRTREMIENGAIKEVKDFIKLRVRKDKSAYKAIGVNEITEYLKKQKNLNDTREKIAIKTRQYAKRQSTWARGNMNKWMKLKPQDINKFLKENLKFSLLNLTT

SEQ ID NO: 123791 - protein, 210 aa, Unknown
  Bacterial polypetide isolated from the Sargasso Sea
MDLKSKIILISGPTASGKSKFAIQLAKKINGEVINADSMQIFKELKILTARPQQDDLKNIKHHLYGFKSVKNNYSTGNWLKDAKKKIKNVKKKKKIPILVGGTGLYFKALIDGIVKIPDIPLTIRNRIRKRQLKIGQIKFYSELIKLDPLCKKKINKNDSQRSIRAYEVKKFTNKSLFDWYSETYSDFNQDSFIKLHIDYPREKLVERIS

SEQ ID NO: 123792 - protein, 281 aa, Unknown
  Bacterial polypetide isolated from the Sargasso Sea
KSRLALDIAKKYNGEIVNGDSMQIYKEAKILSARPTGKNIKHHLYGFISAKKHFSVGLWYKQAIKIIKEIKKKEKVPIITGGTGLYFKVLVEGLVQIPEVPKINYSSYVVDQYKKKYPKILEGINLRDTQRIFRAISVYKHTGISLREWYKKENKKYFDSEVFTKILLIPPKSELEKKIKKRFIKMLKNGAIKEAKNFKKLEISRNSLLSANSIIGLNEIALFLDKRISMEELKEKVLIRTRQYAKRQFTWARGQMKDWKGFTDINYLDLRKKVLSYLSKT

SEQ ID NO: 123793 - protein, 284 aa, Unknown
  Bacterial polypetide isolated from the Sargasso Sea
MDYKSKIILIAGPTASGKSKIAINLAKKINGEIVNADSMQVYKQLKILTARPSEKDQKTIKHHLFGIIDVRKRFSTGQWLKKCIKMINLIRKKNKTPIIVGGTGLYFKALVDGLVSIPKFKPSEKNKILKLHKRLGQKQFYKKLVKLDPVSKKFINSNDVNRSIRAYEVKKLTKKSLYKWFKETKTFFDKNEFVMTYVDYPRDALIKNIKKRIDRMFDLGAIKEVKKFNLIKINKLNSVNHVIGIKEINSFLSKKAELSDIKEQILIKNGQYAKRQSTWSRGHM

SEQ ID NO: 123794 - protein, 259 aa, Unknown
  Bacterial polypetide isolated from the Sargasso Sea
SARPDPKKYQKIKHHLYGFHNATKNFSTGDWLKLAIKKIKEVQKRKKTPILVGGTGLYFKALTDGLVKIPNISLKLRNQIRDFQKKLGQKEFYEKLLQLDPSSKGKIKPTDTQRSIRAYEVKKFTKISLTEWFKNTKSNFVEDDFFKVYIDYPRQELIERINVRTGDMIENGAIKEVKDFIKLRVRKDKSANKAIGVTEITEYLKKQKDLNCTRDKIAIKTRQYAKRQSTWARGNMISWIKLKPQDINNFLKKIKNFHS

SEQ ID NO: 123795 - protein, 126 aa, Unknown
  Bacterial polypetide isolated from the Sargasso Sea
MSERILALMGPTASGKSSLAERLAERFDGELISVDSALVYRGLSIGAAKPDYPHHLVHLRDPVDPYTAADFARDAKRCMEEIIARGRRPILVGGSMLYFRALIHGLDDIPSIDPAIRTAIEHEARE

SEQ ID NO: 123796 - protein, 176 aa, Unknown
  Bacterial polypetide isolated from the Sargasso Sea
MDLKSKIFLIAGPTASGKSSFAIQLAKKINGEIINADSMQVYKQFKILTARPKFNKINNVIHHLYGFLDVKKKFSTGKWLNLTIIKVNKIKKKNKIPILVGGTGLYFKALTEGLVKIPNIPIKTRNETRKLQKKIGQKKFYQKLLKIDKFSKNIINKNDVQRSIKAYEVKKFTKIS

SEQ ID NO: 123797 - protein, 206 aa, Unknown
  Bacterial polypetide isolated from the Sargasso Sea
MDLKSKIILIYGPTASGKSKFAIKLAKKISGEIINADSMQVYKELKILTARPINKDDQKIKHHLYGFHSVKKKFSTGDWLKLANQKIFDCKNREKVPILVGGTGLYFKALTDGLVKIPNIPMNLRKKIRLLHKKIGPKNFFSKLLKLDPLTKGRINPSDTQRVIRAYEVKLYTKKSMYDWFKNTKSIYCQNDFFKIYIDFPRTDLL

SEQ ID NO: 123798 - protein, 288 aa, Unknown
  Bacterial polypetide isolated from the Sargasso Sea
MDLKSKIILISGPTASGKSKFALKIAKKLNGEIINADSMQVYKELNILTARPSKVDLKKIEHHLYGFRSVKKEFSSGEWLQLANKNIKKIRDKNKIPILVGGTGLYFKALTDGLVKIPKIPIPIRNKIRQMQNNLGQKKFYLKLLKIDPSVKNRIDPTDAQRSIRAYEVILISKKSIFEWYKKTKPIFKKDQFIKIYIDYPKDELINKIYKRVDQMMKDGAIQEVKDFLRLNLKSDSNIFKVIGIREIKDFIDKKTSMHDLKQNIVIKTRQYAKRQRTWSRGHMSDWQ

SEQ ID NO: 123799 - protein, 272 aa, Unknown
  Bacterial polypetide isolated from the Sargasso Sea
MSKKIILLAGPTASGKSKLAIQLAIKINGEIINADSMQVYKEFKILSSRPSNSDIKKIRHHMYGFLSAKNYFSVGDWLMLVKEKIKTCHKNHKIPIIVGGTGLYFKAITKGISKIPDIDNKTRNKVRLLFKKLGKEKFYNKLLKIDPKIKSKIFKSDTQRLQRAYEVKLKTKKSLFDWNTNTKSEFVDYELRKIFINTPRNKLLKNIKTRINLMFEDDCVLEVKKFNKCNIKKTLSANKLIGVSEINLFLKGQISLNDCKELINIKTRQYAK

SEQ ID NO: 123800 - protein, 115 aa, Unknown
  Bacterial polypetide isolated from the Sargasso Sea
MDLKSKIILISGPTASGKSKFAIQLAKKINGEVINADSMQIFKELKILTARPHRNDLKKIKHHLYGFKSVKENYSTGNWLKDAKLKINNIKKKNKIPILVGGTGLYFKAIIDGIV

SEQ ID NO: 123801 - protein, 226 aa, Unknown
  Bacterial polypetide isolated from the Sargasso Sea
LAKIKINQCQKAKKIPIIVGGTGLYFNTIVKGISKIPNIDIETRNKVRNLFKKLGYKNFYQKLLNIDPKIKNKILPTDSQRIQRAYEVILKTKKSLFDWTKNTKSDFIDFEIKKIFIDIPREELLKKINQRTELMFKNKCMEEVKRFNSFKLSKSFSANKLIGVQEINNHLKGLISLDQCKELINIKTRQYAKRQNTWARGHMKNWNKLYSKDFSTLFKKTLKVVS

SEQ ID NO: 123802 - protein, 209 aa, Unknown
  Bacterial polypetide isolated from the Sargasso Sea
KKVPILVGGTGLYFKALTDGLVNIPNIPIKFRNKVRNLHKKIGAKKFFIELIKLDPLAKKKINPLDSQRAIRAYEVKSFTKKSMYDFFKNTKSLYQKEDFYKIFINFPRDELIKKIDYRSKEMIKKGLISEVKRFKKLKVSKKMTASKAIGINEVSSYLDKKILITELIDKISIKTRQYAKRQMTWGRGHMREWIKIESNSLNKFLKKI

SEQ ID NO: 123803 - protein, 233 aa, Unknown
  Bacterial polypetide isolated from the Sargasso Sea
MIKTIFFIAGPTASGKSNFSIDLAKKINGVVINSDSMQVYKNLEILTARPNKNEMQNIDHYLYGYVDGMERYNVEKWCNDATDIIHKTFDKNLNPILVGGTGLYIHTLINGLIDIPKIPERIKNESEKIIKEFGRDFLINQIRKLDPKSLVEVNSNDTVRLRRIWEVYESTGKKFSEWKLNKNKKFIENYDFKIFLFLPNRETNYEIVNSRFIKMINGGAIEEVIKLLDLNPQ

SEQ ID NO: 123804 - protein, 239 aa, Unknown
  Bacterial polypetide isolated from the Sargasso Sea
IDIIDPEESYSAGSFVRDASFQIDASIKNNRIPLIVGGTMLYLSSLCNGIAQLPEKNMEIREEIEKKAQKQGWGEIYAELKKIDLCAANNINKNDKQRIQRALEVYYITGKKISELQKKTKPQNDYQFEVFSLKNINRDVLYSKINNRFLDMLEAGFVEEVRILREREGLSSGHMSMRAVGYKQIWKYLDNEIDLNEATKLAQTSTRQLAKRQLTWMRSMKNLKQESHKNIYKKIESLI

SEQ ID NO: 123805 - protein, 267 aa, Unknown
  Bacterial polypetide isolated from the Sargasso Sea
KKIKGEIVNADSMQVYKQLQILTARPQKKDLKKIKHHLYGFCDVRKNYSTGEWLKLLLKKIKDIQKRKKVPIIVGGTGLYFKALTDGLVKIPNIPIKVRNKIRLLQRKLGQKKFYNRLLKLDPLIKNTIEKNDVQRSMRAYEIKSHTKKSIINWFKKTKKYISSDVFIKIYIDHPRESLIKKINLRVDDMFTSGAVEEVRQFNKLKVKKENSSNKVIGIKEITNFLNRQCSLNQAKELIAIKTRQYAKRQATWARGQMGSWQKLILK

SEQ ID NO: 123806 - protein, 138 aa, Unknown
  Bacterial polypetide isolated from the Sargasso Sea
MDLKSKIILISGPTASGKSNFAISLAKKINGEIINADSMQVYKELRILTARPKQKDYQNIRHHLYGFLNVTKNFSTGQWLKLCQKKIKEIQSRNKIPILVGGTGLYFKALTDGLVKIPTIPLKIRNNIRNLQKKLDKK

SEQ ID NO: 123807 - protein, 276 aa, Unknown
  Bacterial polypetide isolated from the Sargasso Sea
MDLKSKIILISGPTASGKSKFAIQLAKKINGEVINADSMQIFKELKILTARPQQNDLKNIKHHLYGFKSVKKNYSTGNWLKDAKLKIDNIKKKNKTPILVGGTGLYFKALIDGIVKIPDIPLTIRNRIRKKQSKIGQIKFYSELIKLDPLCKKKINKNDSQRSIRAYEVKKFTNKSLFDWYSETYSDFNQDSFIKLHIDYPREKLIERISIRTNEMLRDGAIKEAKRFYKLRVKKDLSSNKVIGLSEIKEYIDKRIDLTELKEKISIKTRQYAKRQ

SEQ ID NO: 123808 - protein, 280 aa, Unknown
  Bacterial polypetide isolated from the Sargasso Sea
INLSKKIILLAGPTASGKSKLAISLAKKLNGEIINADSMQIFREFKILSSRPNLIDTKKIKHHLYGIISVKRYFSAGDWLKKVRKKIDICLKRKKVPIIVGGTGLYFKTITKGISKIPNIDNKTRNKVRHLYKKLGHKKFYNLLVKLDPKIKGRIFATDSQRVQRAYEVKLKTNKSLFDWFANTKSDFLDFEIKKLFIEIPRDKLLKKISMRTELMFKEKCVNEVRKFNKLKIKKDLSANKLIGVQEINDFLSGSISLEQCKELINIKTRQYAKRQNTGQ

SEQ ID NO: 123809 - protein, 206 aa, Unknown
  Bacterial polypetide isolated from the Sargasso Sea
MDIKSKIILIAGPTASGKSSFAIKLAKKINGEIINADSMQVYKELKILTARPKKKEQKNIKHHLYGFQSVKKNFSTGEWLAFAKKKIKEIKKKNKIPILVGGTGLYFKAITEGLVKIPKVPLKLRNRIRDLQKKLGQDEFYKRLIKIDPLIKNKINPKDPQRSIRAYEVKKYSKVSLIDWFKKTNKKFEDEDFLKIYIEFSRPDLI

SEQ ID NO: 123810 - protein, 103 aa, Unknown
  Bacterial polypetide isolated from the Sargasso Sea
MKKIILLFGPTASGKSKLAIDLAQNYNGEIVNADSMQVYSEIKVLSARPDEKHIKHHLYGCASVNDNFSVGKWYTLATNKIKEINKKNKVAIVVGGTGLYFKV

SEQ ID NO: 123811 - protein, 169 aa, Unknown
  Bacterial polypetide isolated from the Sargasso Sea
MSKKIILLAGPTASGKSNLAIHLAKKLDGEIINADSMQIYKEFSILSSRPTKSETKKVKHHIYGIISVKKHFSAGDWFKEAKKKINNCFQKKKVPIVVGGTGLYFNTITKGISKIPDIDFKTRSKVRNLYVKLGFKKFYEKLIELDPQVKNKILPTDSQRAQRAFEVKL

SEQ ID NO: 123812 - protein, 237 aa, Unknown
  Bacterial polypetide isolated from the Sargasso Sea
QSVKKDFSTGSWLKLVNKKIKEIRKRNRVPILVGGTGLYFKSLTDGLVKIPNISKKFRNKIRTLQSRIGQKEFYNRLIKIDSKAKAYAKPNDVQRSVRAYEIKKYTKLSILDWFKKTKKTFNEDEFIKIYLDVKREKLINIIIKRIEQMFIDKVINEVIRFNKIKIKKNKSANKIIGITEITSYLKGLYNLEETKEKILIKTRQYAKRQTTWSRGQMINWIKLDFFKKKKFLLKFNS

SEQ ID NO: 123813 - protein, 212 aa, Unknown
  Bacterial polypetide isolated from the Sargasso Sea
MTNKLNFQKKIILIAGPTASGKSKLAISLAKKINGEIINADSMQVYKEFSVLSSRPSENDLKKVKHYLYGILSVKKYFSTGEWLILAKKKINKCINKKKIPIIVGGTGLYFNAITKGISKIPQIDSDIRENIRNLHRKIGQKRFYNRLILIDPLSKNKIVASDTQRTLRAYEVKIFTKKSLYEWISNTKSEFLNYDIRKIFINTPREDLLKN

SEQ ID NO: 123814 - protein, 303 aa, Unknown
  Bacterial polypetide isolated from the Sargasso Sea
MSFRKIILLFGPTASGKSRLAVDIAKELKGEVVNADSMQVYKEIKILSARPNNKSIKHHLYGFVSAKENFSVGSWYKLAATKIKKINKKGKIAIVVGGTGLYFKVLVDGLAEMPEVQKIDYSYLNPIGRWMMQNYYSKRYPKIFEGINRNDIQRISRAISVYNATGITLSDWQKKKNKKYFNSKEFIKICLIPPKSELEERIKKRFLHMLKKGAIKEAKKYKELDLSLHSLHTSNSIIGLSEIESFLAKKISMNELKEQVLIKTRQYAKRQYTWQRGQMKDWKGFEDTNYLDLRKKVLSYLSK

SEQ ID NO: 123815 - protein, 61 aa, Unknown
  Bacterial polypetide isolated from the Sargasso Sea
MRPRPSSFLMSALPPAIFLMGPTASGKTDLALELARLLPCELISVDSALVYRGMDIGTAKP

SEQ ID NO: 123816 - protein, 196 aa, Unknown
  Bacterial polypetide isolated from the Sargasso Sea
MGPTASGKTGLALDIAAKVDSEVISVDSALVYKGMDIGTAKPSQDEQAGVVHHLIDIIDPAESYSVSQFVNDTNALIGDILSRGKVPILAGGTMMYFNALINGISPLPKSDEKVRDEITQQAQRLGWSKLHDELRGVDPISGERIHPNDPQRITRALEVYRSTGKTLTHWQQQEGERCPYNIAQFAIAPADRAVCT

SEQ ID NO: 123817 - protein, 295 aa, Unknown
  Bacterial polypetide isolated from the Sargasso Sea
MPKKINRKIILLFGPTASGKSKLAEDIAKIYDAEIVNADSMQIYKEVKILSARPKKKNIKHHLYGFVSIKKRFSTGAWYKLATKKIKQINKKGKIAIVVGGTGLYFKALTDGFSQIPTIPEKYKKLKIDKNFVLNNPKIFKGISLNDKQRVQRAFLVYKFTKKPLSSWQKRNKKEFKKSEFVKIFLCPPKTEIERRIRKRFLDMLQNGAIKETENFKKKRVNSLKSSNFIIGINEISEFLKNKISIDEVKEKVVIRTRQYAKRQMTWQRGQMKDWKGFNDTNYLDLRKKIINLLI

SEQ ID NO: 123818 - protein, 256 aa, Unknown
  Bacterial polypetide isolated from the Sargasso Sea
MDLKSKIILISGPTASGKSKFAIKLAKKINGEIINADSMQVYKEFRILTARLNIKEYSNIKHHLYGFQNVKKNFSTGEWLKLVKKKILEIRKRKKIPILVGGTGLYFKSLIDGLVKIPNIPIRYRNKIRLYQKKIGQKNFFKKLLKIDPSIKNKIKSTDTQRSIRAYEVKTFTKKSINEWYKKTKSQFSKNEFFKIYIDFQRPEIISRISDRTEKMIKRGAINEVKRFLKLKIKKDKTSSKIIGVQEIMEFMEKKI

SEQ ID NO: 123819 - protein, 199 aa, Unknown
  Bacterial polypetide isolated from the Sargasso Sea
MDLKSKIILVSGPTASGKSNFSIQLAKKINGEIINADSMQVYKELNILTARPNKNEHKNIKHHLYGFLSVKKDFSTGAWLKLIFQKIKEIKKRKKIPILVGGTGLYFKSLTDGLVKIPNIPKNYRNKIRKHHKIIGQKTFYKKLVKLDPLSKNKIELTDVQRSIRAYEVKQFTKKSIFEWFKKTKSPYPKRSIFLKYIL

SEQ ID NO: 123820 - protein, 130 aa, Unknown
  Bacterial polypetide isolated from the Sargasso Sea
MSKKIILLAGPTASGKSKLAVQLAKKLNGEIINADSMQVYREFSILSSRPDNKDLKKVKHHLYGIIPAKKHFSAGDWLKLAKNRINYCHKFKKIPIIVGGTGLYFNTITKGISKIPDIDLQTRNKVRNLF

SEQ ID NO: 123821 - protein, 274 aa, Unknown
  Bacterial polypetide isolated from the Sargasso Sea
MDLRSKIILIYGPTASGKSEFAVKLAKKVKGEIINADSMQVYKELQILTARPLKKNMRSIKHHLYGFRDAKKDFSTGDWINLVIKKMRIIRNQNKIPILVGGTGLYFKALTEGLVEIPNVPNKIRNQIRALQKKIGQKNFFKKLINIDPLVNNKIKPTDTQRSIRAYEVKLFTKISIFEWYKKTKSKFKNKDFLKLYIDFPRSELVERINLRTKKMLESGSIPEVKKFINHRISSNKSITKAIGIVEIKNLIQNKLSKGQVIEKISIKTRQYAK

SEQ ID NO: 123822 - protein, 257 aa, Unknown
  Bacterial polypetide isolated from the Sargasso Sea
MSKKLVLLAGPTASGKSNLAIKLAKKLNGEIINADSMQIFKEFNVLSSRPALNQTKKVKHHLYGIVTVKKHFSAGDWLKQVKIKINTCVKKKKIPIIVGGTGLYFNTITKGISKIPDVDLKTRKKVRNLYKKLGIKKFYNALIKLDPKVKDRILPTDSQRVQRAYEVKLKTKKSLYDWFEKTKSDFLEFDIRKIFIDIPRDILLNKISMRTEQMFKKKCINEVKNFNNLKVNKSFSANKLIGVREINDYLEGLTTIE

SEQ ID NO: 123823 - protein, 185 aa, Unknown
  Bacterial polypetide isolated from the Sargasso Sea
MDLKSKIILISGPTASGKSSFAIKVAKKVDGEIINADSIQVYKELKILSARPDPKKYQKIKHHLYGFHNVTKNFSTGDWLKLVIKKIKEVKKRKKTPILVGGTGLYFKALTDGLVKIPNISVKLRNQIRNMQKKLGQKKFYEKLLKLDPSLKGKINPTDSQRSIRAYEVKKFTKKSLYEWFKNTK

SEQ ID NO: 123824 - protein, 261 aa, Unknown
  Bacterial polypetide isolated from the Sargasso Sea
GKEDLKKVKHNLYGFIDINKSFSTADWLKFVIKKIKEINRKKKIPIIVGGTGLYFYSLVEGFAKLPTIPIKFRNKIRNLNKKIGQKNFYKRLVKIDPLSKNKINSNDVQRSIRAYEVKKYSNKSIYEWQKKTKTIFNNKRFIKLYLNYSREELLKRINLRTRKMIKYGAVSEVKKLLNKSNVKKEHYYKIIGFREIEKFLEGKIDKNTLCDQINIRTRQYAKRQTTWFRGKMESWTPIDPNKLTPFIKKLNKSSLKLDQLI

SEQ ID NO: 123825 - protein, 165 aa, Unknown
  Bacterial polypetide isolated from the Sargasso Sea
MSAAPHANPSPTTIACLLGPTASGKTAAALALAARRPIEIVSVDSALVYRDMDIGTAKPSLDERASVPHHLIDIIDPADAYSAASFRADTLRLIGEITARGRTPLLAGGTMLYYKALTQGLNDLPGADPDVRATLDAEAERDGWPALHARLAQVDPDTAARLAPN

SEQ ID NO: 123826 - protein, 296 aa, Unknown
  Bacterial polypetide isolated from the Sargasso Sea
KIILISGPTASGKSSFAIKLAKKIKGEIINADSMQVYKQLKVLSARPNPKNFQSIKHHLYGFQDAKKRFSAGDWLKIANKKIIEVRKRKKIPILVGGTGLYFKALTNGLVQIPIIPIKFRNQIRNLNKKIGQNKFYKQLLKLDPLSKNKINPTDTQRSIRAFEVKKFTKKSLHEWFKNTKSNYLEEDFFKIYIDYPREELVERIHQRTVKMIKMGAVNEVKKFLKLKIKKQMTANKAIGINEIKEYLAKEKKIDEIKELISIKTRQYAKRQSTWARSHMSDWIKLKPLEINKFFKK

SEQ ID NO: 123827 - protein, 249 aa, Unknown
  Bacterial polypetide isolated from the Sargasso Sea
MKTPVYFVLGPTASGKSKFALSLANILNGEIINADSMQIYSELSILTARPTINDQKKINHHLYGFVKGDVRFNVQKWCDEASKIINHLVNKNITPILVGGTGLYIESLINGIVSIPSIPEKIKIESEKIISKIGKENFFNLVKELDSDAMKNISPNDIQRIQRIWEVNFFTKKKFSYWKQNKNKKLINLKDYKILLFLPERNENYKRVNDRTHIMMNEGAISEVEKLLKLKYDNSLPIMRAHGVPEIQS

SEQ ID NO: 123828 - protein, 209 aa, Unknown
  Bacterial polypetide isolated from the Sargasso Sea
MDLKSKIILISGPTASGKSKFAIQLAKKINGEVINADSMQIFKELKILTARPQRNDLKNIKHHLYGFKSVKENYSTGNWLNDAKKKINNIKKKNKIPILVGGTGLYFKALIDGIVKIPDIPFIIRNRIRKKQSKIGQTKFYSALIKLDPLCKKKINKNDTQRSIRAYEVKKFTNKSLFDWYSETYSDFTQDSFIKLHIDYPRDKLMRKS

SEQ ID NO: 123829 - protein, 266 aa, Unknown
  Bacterial polypetide isolated from the Sargasso Sea
SGKSSFALKLARKIKGEIINADSMQVYKQLKVLTARPKKKELKKIKHHLYGFCDVKRKHSTGEWITLLLKKISDIRTRKKIPIIVGGTGLYFKALTEGLVKIPNIPIKVRSKFRKMQKKLGQKKFYKKLINFDPLIKNKIDKNDVQRSIRAYEIKYQTKKSIFDWFKKTKNFFSSDEFIKIYIDYPREELIKKINLRVEEMFKDGAIEEVKRFNRLKVKKENSPNKVIGIKEITNLLNKQCTLEQAKELIAIKTRQYAKRQATWAR

SEQ ID NO: 123830 - protein, 256 aa, Unknown
  Bacterial polypetide isolated from the Sargasso Sea
RPQQNDLKNIKHHLYGFKSVKNNYSTGNWLKDAKKKINNIKKKNKIPILVGGTGLYFKALIDGIVKIPDIPLTIRNRVRKKQSKIGQIKFYSELIKLDPICKKKINKNDSQRSIRAYEVKKFTNKSLFDWYSETYSDFNHGSFIKLHIDYPREKLIERISVRTNEMLRDGAIKEAKRFYKLRVKKDLSSNKVIGLGEIKEFLDKRIDLNELKEKISIKTRQYAKRQSTWARGQMSDWQKIKFNTLKSYLKKFPKSA

SEQ ID NO: 123831 - protein, 235 aa, Unknown
  Bacterial polypetide isolated from the Sargasso Sea
MKTQIHFVLGPTASGKSKFALNLAEKLNGEIINADSMQIYRDLSILTARPTLEDQKKVNHHLYGFVKGDVRFNVQKWCEEVSKKVNYLVNKNITPILVGGTGLYIESLINGIVSIPSIPEKVKIESDKMILKIGKENFFNLVKELDSDAMINIAPNDIQRIRRIWEVNFFTKKKFSEWKKNKNKNFINLKNYKILLFLPDRKENYRRVDHRTHLMMEDGAIEEVKNLLQLNYDNS

SEQ ID NO: 123832 - protein, 227 aa, Unknown
  Bacterial polypetide isolated from the Sargasso Sea
MKKIILISGPTASGKSKLALNIAKKIKGEIINADSMQVYKEFSVLSSRPSKSDTKRVKHYLYGFLSVKKHFSTGEWLKLAKKNISNCIKKKKIPILVGGTGLYFNAITKGISKIPKINKKHRNEVRALHSKIGQKKFYEELIYFDPKSKGKISPTDTQRAIRAYEVKKFTNKSIYDWASNTHSDFLDFDIRKIFINTPREELLENIKKRTNTMFENKCIEEVKNFLK

SEQ ID NO: 123833 - protein, 256 aa, Unknown
  Bacterial polypetide isolated from the Sargasso Sea
ARLIMDFKSKIILISGPTASGKSSFAIKLAKKINGEIINADSMQVYKQLKILSARPLKKNYQKIRHHLYGFHDVQKNFSTGKWLRLAFKKIEEIKKRKKTPILVGGTGLYFKALTDGLVKIPNIPSKIRNQIRGLQLKIGQDKFYKKLLKFDPSCKSKINPTDPHRSIRAYEVKLYTNKSIHEWYKNTKSNFQKSDFNKIYIDYPRAELIERINLRSTEMIKNGAIKEVKNFIKLKVRKDKSVNKAIGINEIRQYL

SEQ ID NO: 123834 - protein, 276 aa, Unknown
  Bacterial polypetide isolated from the Sargasso Sea
SLQKKLMGEIINADSMQVYKQLKILSARPDPKKYQKIKHHLYGFHNVTKNFSTGDWLKLVIKKISEVQKRKKTPILVGGTGLYFKALTDGLVKIPNITLKLRNQIRDLQKKLGQKKFYEKLLKLDPSSRGKINPTDTQRSIRAYEVKKFTKKSLTEWFKNTKSNFVEDDFFKVYIDFPRQELIERINVRTREMIKNGAIKEVKDFIKLRVRKHKTANKAIGVNEIREYLKKQKDLNDTRDKIAIKTRQYAKRQSTWARGNMISWMKLKPQDINNFL

SEQ ID NO: 123835 - protein, 203 aa, Unknown
  Bacterial polypetide isolated from the Sargasso Sea
ALLEGLSPLPSADPAVRAEIERQAAERGWDALHQQLQTIDPVAAARIHPNDPQRLSRALEVFFISGKTLTDLTQTSGDTLPYQVHQFAIAPASRELLHQRIEQRFHQMLASGFEAEVRALFARGDLHTDMPSVRCVGYRQMWSYLEGEISYDEMVYRGVCATRQLAKRQITWLRGWDGVHWLDSEKPQESYNEVLQVIGAIAN

SEQ ID NO: 123836 - protein, 209 aa, Unknown
  Bacterial polypetide isolated from the Sargasso Sea
MDFKSKIILIYGPTASGKSHFAVQLAKKINGEIINADSMQIYKELKILTARPYKKDYQKIKHHLYGFQSVKKNFSTGEWLKLVNKKILEIKKRKKIPILVGGTGLYFKALTEGLVSIPNIPIKFREKIRLLHKNFGTKKFFKELLKIDPLVKNQINPLDTQRSIRAYEIKIFTKKSMYTWFKNTKSNYEKDNFYKIYIDFPRKGFIKKN

SEQ ID NO: 123837 - protein, 130 aa, Unknown
  Bacterial polypetide isolated from the Sargasso Sea
MKTQIYFVLGPTASGKSKFALNLAEKLNGEIINADSMQIYRELSILTARPTIKDQKKINHHLYGFVKGSVRYNVQKWCEEASKKINYLVNKNITPIIVGGTGLYIESLINGIVSIPFIPEKVKIESDKMI

SEQ ID NO: 123838 - protein, 153 aa, Unknown
  Bacterial polypetide isolated from the Sargasso Sea
MDIKSKIILISGPTASGKTEFAIKLAKKIKGEIINADSMQVYNQLRILTARPSKRDEKKINHYLYGFLNVKKNFSTGSWLKEVLKKIKYIKKKNKIPILVGGTGLYFKALTDGLVKIPNIPLNFRIKIRNLQKRIGQKKFYKKLISLDKYIKD

SEQ ID NO: 123839 - protein, 186 aa, Unknown
  Bacterial polypetide isolated from the Sargasso Sea
MDLKSKIILVSGPTASGKSSFAIKLAQKINGEIINSDSMQIYKEFKILTARPRKKDCKNIKHHLYGFQSVKKNFSTGKWLKLASQKINEIKKRKKVPIIVGGTGLYFKALTEGLVKIPNIPIKFRNKIRLMQKRIGQKKFFNKLSELDPLIINKIIDKDIQRSLRAYEVKSYTGKSLVDWFKYTKS

SEQ ID NO: 123840 - protein, 260 aa, Unknown
  Bacterial polypetide isolated from the Sargasso Sea
MDIKSKIVLISGPTASGKSKFALKLAKKIDGEIINADSMQVYKQLKILTARPSIKDTKEVKHHLYGFINVTKSFSTGEWVKLSKKKIEEIRKRKKIPIIVGGTGLYFKALTEGFVQIPNVPMRIRSKIRKLQNKLGQDKFFSKLKKIDPLVKNKIEKNDSQRSIRAYEIKYYTKKSLFKWFQNTKKSFPDTEFIKIYIYHPREDLIKKANLRVSKMFKNGAIAEVRKFNRLKLKKQNSAKKVIGIEEITNYLNNKYDLRA

SEQ ID NO: 123841 - protein, 142 aa, Unknown
  Bacterial polypetide isolated from the Sargasso Sea
MDLKSKIILIYGPTASGKSNFAIKLSKKINGEIINADSMQVYKELKVLSARPSKNEYKRIRHHLFGFHSVKKKFSTGDWLKLVNQKILDIKKRKKVPILVGGTGLYFKSLTDGLVSIPNIPIKFREKVRSLHKKIGSKKFFK

SEQ ID NO: 123842 - protein, 265 aa, Unknown
  Bacterial polypetide isolated from the Sargasso Sea
MDLKSKIILIAGPTASGKSNIAINLAKKIKGEIVNADSMQVYKQLKILTARPSEKDQKTIKHHLFGIIDVRKRFSTGQWLKKCIKIIKLIRKKNKTPIIVGGTGLYFKALVDGLVSIPKFKPSEKNKILKLHKKLGQKQFYKRLVKLDPVSKKFINSNDVNRSIRAYEVKKLTKKSLYKWFKETKTFFDKNDFVMAYVDYPRDKLIKNIKKRIDRMFDLGAINEVRKFNLIKIDKLNSVNHVIGIKEINSFLSKKAELNDIKEQI

SEQ ID NO: 123843 - protein, 248 aa, Unknown
  Bacterial polypetide isolated from the Sargasso Sea
SMQVYKDFEILSSRPSRDEIKLAKHHLYGFQSSGVIFSTGKWLKLAAEKINQIVKKGKVPILVGGTGLYFKAITDGISKIPNIKFSDRNKIRNLHKKIGQKKFFEKLIKLDPISKNKISSSDTQRSLRAYEVKKFTKKSIYEWAKKTKPLFKDYVFKKFFINTPKNQLLKNIELRTNSMIKKKCINEVIKFKKRKLKKSLSPNKIIGVKEIQRFLSGDLDQKNLVELMNIKTRQYAKRQKTWSRAHMS

SEQ ID NO: 123844 - protein, 204 aa, Unknown
  Bacterial polypetide isolated from the Sargasso Sea
MDPKVIFLMGPTASGKTALAIDLYKSIPSELISVDSALIYKGMDIGTAKPTAAELLEAPHHLIDILDPAFAYSAADFRNDALRLIADIHSRGKTAILVGGTMLYFRTLLQGISPLPEADPEIRQQIETEAAEHGWSYLHQQLAEFDPVSAARIHPNDPQRVNRAVEVYRLTGKSLTELTEQKGEPFPYQVQQFAINPTDRSELH

SEQ ID NO: 123845 - protein, 265 aa, Unknown
  Bacterial polypetide isolated from the Sargasso Sea
MDLKSKIILISGPTASGKSKLALKIAKKINGEIINADSMQVYKELKILTARPSEIDLKKIKHHLYGFRTVKKDFSSGEWLKLAKKNIKKIKDKNKIPVLVGGTGLYFKALTDGLVKIPNIPISFRNKIRRMQNSLGQKKFYSKLLKNDSLVKNRIDPTDLQRSIRAYEVISFTKKSIFEWYKKTKPSFKKDQFIKIYIDYPRDELISKISKRVDQMMKNGAIKEVKDFLKLNLVSDSNIFKVIGIREIKEFIDKKTSMHDLKLNI

SEQ ID NO: 123846 - protein, 189 aa, Unknown
  Bacterial polypetide isolated from the Sargasso Sea
ADPEIRQQIEAEAAEHGWGYLHQQLADFDPVSAARIHPNDPQRVNRAVEVYRLTGKTLTELTEHKSEPFPYPVQQFAINPTDRSELHQRIAVRFRQMLDCGFADEVKTLMQRPDLHLDLPSMRCVGYRQMWLHLQGQLSEQEMIDQGIAATRQLAKRQLTWLRSWPELNWLKTEDKQAENLQAILTSLS

SEQ ID NO: 123847 - protein, 249 aa, Unknown
  Bacterial polypetide isolated from the Sargasso Sea
RDEKKIQHHLYGFLSIKKKFSTGQWLQLSSKKIKDIQYKNKIPILVGGTGLYFKALMEGLVKIPKISIKKRQTIINLQKKLGQRKFYKKLIKIDPKVSKLINPNDVQRSIRAYEVKMFTNKSLIDWYKNTKSLFLQHNFIKIYFDCPRDLLLKRIKIRIDKMLPEAIKEVKKIQKLKIPKGNSSNKIIGINEIKYFIDKKLNKDQTAELIAIKTRQYAKRQATWARGQMKNWKTLSSNDTKLSLKKLFN

SEQ ID NO: 123848 - protein, 168 aa, Unknown
  Bacterial polypetide isolated from the Sargasso Sea
MDLKSKIILISGPTASGKSKFALKIAKKLNGEIINADSMQVYKELNILTARPSKNDLNKIDHYLYGFRSVKEEFSTGEWLKLANKNIKKIRDKNKIPVLVGGTGLYFKALTDGLVKIPKIPIPIRNKIRRMQNNLGQKKFYLKLLKNDPLVKNRIDQTDVQRSIRAYE

SEQ ID NO: 123849 - protein, 251 aa, Unknown
  Bacterial polypetide isolated from the Sargasso Sea
SEKDQKKIKHHLFGIIDVRKGFSTGQWLKECIKIINLIRKKKKIPIIVGGTGLYFKALVDGLARIPKFKPSEKNKILKLHKKLGQKQFYKELVKLDPISKKFINSNDVNRSIRAYEVKKFTKKSLYKWFKETKSFFDKNEFVMTYVDYPRDKLIKNIKKRIDRMFDLGAIKEVKKFNLIKIKKLNSVNHVIGIKEINSYLSKKAELNHVKEQILIKTRQYAKRQSTWSRGHMINWHKIDPKSKNPFKKILK

SEQ ID NO: 123850 - protein, 143 aa, Unknown
  Bacterial polypetide isolated from the Sargasso Sea
MDLKSKIILIYGPTASGKSQFAIRLSKKVNGEIVNADSMQVYKEFQILSARPLPKDYKKIRHHLYGFYSVKKNFSSGDWLKLVNKKILDIKKRNKTPILVGGTGLYFKAITEGLVNIPNIPIRLRSKIRLLHKKMEQRSFFQN

SEQ ID NO: 123851 - protein, 168 aa, Unknown
  Bacterial polypetide isolated from the Sargasso Sea
MGPTGSGKTALAMALYSRFPVDVISVDSALVYRGLDIGTAKPTLAERKAVPHQLIDCLEPTESFSAGQFCECAEAAIAKSVAGGRVPVLVGGTMLYFNRLQQGFADLPDANPKVREKITQEAKMVGWPALHARLALLDPKAHARIHPNDSQRIQRALEIAQLTGRPMS

SEQ ID NO: 123852 - protein, 226 aa, Unknown
  Bacterial polypetide isolated from the Sargasso Sea
LLLKKIEDIRKRKKVPIIVGGTGLYFKALTDGLVKIPNIPIKVRNKIRLIQKKIGQKRFYNRLLKVDPLIKNKIDKNDVQRSVRAYEIKYQTKKSIVEWFKKTKIFFPTSEFVKLYIDYPRQDLIKRINLRVDAMFREGAIDEVRRFRKLGVKKENSSNKVIGIKEITDFLNKQSTLGQAKELIAIKTRQYAKRQTTWSRGHMKSWQKINTKKLSLVLKKVKIIES

SEQ ID NO: 123853 - protein, 253 aa, Unknown
  Bacterial polypetide isolated from the Sargasso Sea
MDLKSKIILISGPTASGKSKFAIRLAKKINGEIINADSMQIFKEIKILNARPSTKDKSNIKHHLYGFLSVKKNFSVGDWLKKCLSKISEIKKRKRVPIIVGGTGLYFKSLVDGLAKVPKISKRNRDKVRNLQKKIGQKSFYKSLIKLDPLCKDNINMNDQNRSIRAYEVYIQTNKSLYTWFKNTKIHFQDKDFEKIFIDISRDEVLKSLSNRIEKMIKAGAIQEVKRFNNLKVKKANSSFKIIGIREINELKP

SEQ ID NO: 123854 - protein, 195 aa, Unknown
  Bacterial polypetide isolated from the Sargasso Sea
MDLKSKIILIYGPTASGKSKFAIKLAKKISGQIINADSMQVYKDLKILTARPYKKDHQNIKHHLYGFQNAKKNFSTGDWLKLAKEKILQCRKIKKTPILVGGTGLYFKALTDGLVNIPKIPVNFRNKVRNLHKRIGQKKFFLKLLEIDPLIKDRINSLDVQRSLRAYEIKSFTKKSMISWFKSTKSNYDHNDFSK

SEQ ID NO: 123855 - protein, 220 aa, Unknown
  Bacterial polypetide isolated from the Sargasso Sea
ANQKIKDIKKRKKTPILVGGTGLYFKAITDGLVKIPNIPIKFRQEVRSLHKKIGNKNFFLKLIKLDPLSKNRIKPSDTQRSIRAYEIKSYTKKSIFDWFKKTKSTYEKEDFFKIYIEFPRDELLKRINDRSKEMIKKGAVQEVKRFVKLKIPKNKTVSKAIGINEIIEYLDKKIQIPQVIDKISIKTRQYAKRQTTWGRGNMLDWNKIEFKALNKFLKKI

SEQ ID NO: 123856 - protein, 153 aa, Unknown
  Bacterial polypetide isolated from the Sargasso Sea
MYKKTKKKIILLFGPTASGKSRLAIDIAKELDGEIVNADSMQVYKEIKILSARPDKSEIRHHFYGFISAKNTFSVGKWCKLVAKKIKEIQKRKKVAIVVGGTGLYFRALTEGLVKIPKVKKIDYSYLNPIGRWMMGNHYHKKNPTILKVLIEM

SEQ ID NO: 123857 - protein, 237 aa, Unknown
  Bacterial polypetide isolated from the Sargasso Sea
MFYSPKIITIIGPTASGKTNLSIKLAKKFNGEIINADSRLFYRGMDIGTSKPNKKELQDVKHHLINIMTPEKSNNLHDFLIDANNIIKTIIRSGKTPIIVGGTGQYIWALHEGWKLDENPINKQLRNKLEKLDLEELQKLYYKENSSKSSDIDIQNKRRIIRFIEKSREGNTNNKQRIPPNWNSFIIGLHLQRNLLHSYILLRINRMLKQGLINEIKSFLDMSLPKDSPFYNIIGYR

SEQ ID NO: 123858 - protein, 220 aa, Unknown
  Bacterial polypetide isolated from the Sargasso Sea
MSDVTEPSLLKAIFLMGPTASGKTALAIALRKVLPVELISVDSALIYRGMDIGTAKPDAAELSAAPHRLLDILDPAEAYSAADFRRDALAEMADIVAAGRIPLLVGGTMLYFKALLEGLSPLPSADPEVRARIEQQAAEQGWNALHQQLQEIDPVAAARIHPNDPQRLSRALEVFFISGKTLTELTQTSGDALPYKVHQFAIAPASRELLHQRIEQRFHQ

SEQ ID NO: 123859 - protein, 204 aa, Unknown
  Bacterial polypetide isolated from the Sargasso Sea
MDYKSKIFLIAGPTASGKSKIAINLAKKINGEIINADSMQVYKQLKILTARPSEKDQKTIKHHLFGIIDVQKRFSTGQWLKKCIKIINLIRKKNKAPIIVGGTGLYFKALVDGLVRIPKFKPSEKNKILKLHNKIGQKQFYKKLVKLDPVSKKFINSNDVNRSIRAYEVKKLTKKSLYKWFKETKTFFDKNEFVMTYVDYQERN

SEQ ID NO: 123860 - protein, 216 aa, Unknown
  Bacterial polypetide isolated from the Sargasso Sea
MDFKSKIILISGPTASGKSSFAINLAKKVNGEIINADSIQVYKQLKILSARPDQKKYQKIRHHLYGFHDVKKNFSTGNWLKLVFKKIEEIKKRKKIPILVGGTGLYFKALTDGLVKIPNIPIKFRNQIRAHHLKIGQKKFYNKLLKLDPASKNKINQTDPHRSIRAYEVKLYTKKSIHEWYKNTKSNFKKNDFYKIYIDFPRLELIERINLRSKEM

SEQ ID NO: 123861 - protein, 206 aa, Unknown
  Bacterial polypetide isolated from the Sargasso Sea
GTGLYFRALEKGLDKLPEANYQIRAKITKEAEKLGWQQMHNKLAAIDPKSACKINLNDTQRIQRALEVYEITGCLLSDLIAKPEKKIFPYPIKKIILFPENRTLLHQRIEKRFKAMIKNGFVEEVESMYHRGDLTPDLPSMRLVGYRQIWKYLDNQFNYNEMQEYSITATRQLAKRQLTWCKTEDNANYYNPYDSEIFTEILDNLQ

SEQ ID NO: 123862 - protein, 272 aa, Unknown
  Bacterial polypetide isolated from the Sargasso Sea
NADSMQIFKELKILTARPQQDDLKNIKHHLYGFKSVKDNYSTGNWLKDAKKKINNVKKKKKIPILVGGTGLYFKALIDGIVKIPDIPITIRNRIRKRQSKIGQIKFYSELIKLDPLCKKKINKNDSQRSIRAYEVKKFTNKSLFDWYSETYSDFNQDSFIKLHIDYPREKLIERITIRTNEMLRDGAIKEAKMFYKLRVKKDLSSNKVIGLSEVKDYLEKRINLNELKEKISIKTRQYAKRQSTWARGQMSDWQKIKFDRVKSFIKKFPKPA

SEQ ID NO: 123863 - protein, 257 aa, Unknown
  Bacterial polypetide isolated from the Sargasso Sea
MQIYKEVKILSARPEKKNIKHHLYGFVSIKKTFSTGAWYKLATKKIKQINKKGKVALVVGGTGLYFKALTDGFTQIPNIPEKYKKLKIEKNFVLKNPNIFKGIFLNDTQRVQRAFSVYKFTKKPLWLWQKENKKEFKKSQFAKIFLCPPKIEIEKRIRKRFSDMLKGGAIKETKNFKKKRVNSLKSSNFIIGINEISEFLKNKISLEEVKERVAIRTRQYAKRQLTWQRGQMKDWKGFYDTNYLDLRKKILTYLSKT

SEQ ID NO: 123864 - protein, 185 aa, Unknown
  Bacterial polypetide isolated from the Sargasso Sea
MDKKSKIFLIFGPTASGKSSLAIKLAKKINGEIVNADSMQVYKELKILTARPTKKNQKNIKHHLYGFQSVKKNFSTGQWLILAKKKIKEIQKKNKTPILVGGTGLYFKAITEGLVKIPKIPLKFRNKVRNLQKKLGQEEFYKKLIKIDPLVNHKINPKDPQRSIRAYEVKKYSKVSLIEWFKKSR

SEQ ID NO: 123865 - protein, 156 aa, Unknown
  Bacterial polypetide isolated from the Sargasso Sea
ARIHPNDPQRLSRALEVYRISGKTLTELTQVQGEGLPYRVLQFAIAPSDRAVLHQRIELRFDKMLQGGFEQEVRALYQRGDLTPDLPSIRCVGYRQMWDYLAGEVEYDEMRYRGIVATRQLAKRQMTWLRGWSDVTWLESGESGNLARVVARAGVA

SEQ ID NO: 123866 - protein, 250 aa, Unknown
  Bacterial polypetide isolated from the Sargasso Sea
MSKKIILLFGPTASGKSKLALDIAEEFDGEIINADSMQVYKEIKILSARPDKSKIKHHFYGFVSAKEKFSVGKWYELIAKKIKEIKKRKKIPIVVGGTGLYFRALTEGLVKIPQVEKKDFSYLNPMGRWMMGNHYHKKNPTIFEGIDRNDIQRVSRAISVYEGTGLTLKEWQSKENKKYFKSTDFIKLCLLPSKNELEKKIKKRFNQMLKKGALQEVRKYKKIFLEPASHISANSIIGIYEIGLYLQKYI

SEQ ID NO: 123867 - protein, 301 aa, Unknown
  Bacterial polypetide isolated from the Sargasso Sea
LKSKIILIAGPTASGKSKFAVQLAKKANGEIINADSMQVYKELKILTARPKKIDQKKIKHHLYGIQSVKKDFSSGKWLKHANKKIKEIRKRNKIPIFVGGTGLYFKSLTDGLSKIPNIPINFRNKIRNLQKKIGQEKFYNKLIKLDPKIKNYAKSNDVQRSIRAYEIKKYTKLSILDWFEKTKKTFNQNEFLKIYIDFPRYLLLKRISKRIDQMFKEKVINEVIRFNELKVKRDKSANNVIGIKEITLYTKNIGTLEDTKEKILIKTRQYAKRQTTWARGQMQTWIKLDPENLNSYIKNLS

SEQ ID NO: 123868 - protein, 238 aa, Unknown
  Bacterial polypetide isolated from the Sargasso Sea
IWFHNVTKNFSTGDWLKLVTKKIIEVKKRKKTPILVGGTGLYFKALTDGLVKIPHISIKLRNQIRNLQKKIGQKKFYEKLLKLDPSLSGKINPTDTQRSIRAYEVKKFTKKSLTEWFKNTKSNFVEDDFFKVYIDFPRQELIERINMRTKEMIEKGAIKEVKDFIKLRVRKDKSANKAIGVNEITEYLKKQKNLNDTRDKIAIKTRQYAKRQSTWARGNMISWMKLKPQDINNFLKKI

SEQ ID NO: 123869 - protein, 216 aa, Unknown
  Bacterial polypetide isolated from the Sargasso Sea
MDLKSKIILISGPTASGKSSFAIKVAKKVDGEIINADSMQVYKQLKILSARPDPKKYQKIKHHLYGFHNVTKNFSTGDWLKLVIKKITEVQKRKKIPILVGGTGLYFKALIDGLVKIPNISIKLRTQIRDLQKKLGQKKFYEKLLKLDPSSKSKINPTDTQRSIRAYEVKKFTKKSIHEWFKNTKSSFMENDFFKVYIDYPRQELIERINARTSKM

SEQ ID NO: 123870 - protein, 277 aa, Unknown
  Bacterial polypetide isolated from the Sargasso Sea
KIILLAGPTASGKSKLSIMIAKFFGGEIINADSMQIYKEINILTSKPTAKDKKLVKHHLYGFNSVEKEFSTGHWLDKATKNIKLQWAKGKIPIVVGGTGLYFKALIDGLVKIPEISKSVKKDVRKLHKKIGQKRFYKKLIKIDPFAKTMILPTDSQRSIRAYEVKKFNKKSIFNFMKDTKSNFDKDVFIKIFINVPKEILHKKINERVESMFNQGAVKEVKKFLKMKINKDLPPNKIIGMREIREFLEEKASLSETKELIKIRTRQYAKRQFTWRED

SEQ ID NO: 123871 - protein, 235 aa, Unknown
  Bacterial polypetide isolated from the Sargasso Sea
MKTQIYFVLGPTASGKSKFALKLANKLNGEIINADSMQIYNELSILTARPTINDQKKINHHLYGFVKGDVRFNVQKWCEEASKKINYLVNKNITPILVGGTGLYIESLINGIVSIPSIPEKVKIESEKMILKIGKENFCNLVKELDSDAMINIAPNDIQRIRRIWEVNIFTKKKFSDWKKSKNKNFIDLKNYKILLFLPDRKENYRRVDHRTLLMMEDGAIEEVKNLLKLNYNNN

SEQ ID NO: 123872 - protein, 153 aa, Unknown
  Bacterial polypetide isolated from the Sargasso Sea
MDLKSKIILISGPTASGKSNFAIQISKKLNGEIVNADSMQVFKELKILTARPKVKDYKNIKHHLYGFLSVKKNFSVGDWLKLTLKKINEIKKRKKVPIIVGGTGLYFKVLTEGLVKIPIIPFKFRNKIRNLQRSIGQKKFFKKLTKLDPLAKN

SEQ ID NO: 123873 - protein, 219 aa, Unknown
  Bacterial polypetide isolated from the Sargasso Sea
LKKLGEVQKRKKTPILVGGTGLYFKALTDGLVKIPNISLKLRNQIRDLQKKLGQKKFYEKLLKLDPSSIGKINPTDTQRSIRAYEVKKFTKKSLHEWFKNTKSNFMEDDFFKVYIDYPRKELIERINVRTSDMIENGALKEVKDFIKLRVRKDKSANKAIGVNEIREYLKKQKDLHDTKEKIAIKTRQYAKRQSTWARGNMMNWMKLKPKDINNFLKKI

SEQ ID NO: 123874 - protein, 290 aa, Unknown
  Bacterial polypetide isolated from the Sargasso Sea
MDLKSKIILISGPTASGKSKFAIQLAKKINGEVINADSMQIFKELKILTARPHRNDLKKIKHHLYGFKSVKENYSTGNWLKDAKLKINNIKKKNKIPILVGGTGLYFKAIIDGIVKIPEIPLIFRNRIRKKHSKIGQKKFYLELLKLDPLCKKKINKNDTQRSIRAYEVKKFTNKSLFDWYIETYSDFTKDSFIKLLIDYPRDKLVERISLRTNEMFRDGAIKEAKRFYKLRVKKDLSSNKVIGLSEIKEYLDKRININELKEKISIKTRQYAKRQSTWARGQMSDWQNI

SEQ ID NO: 123875 - protein, 167 aa, Unknown
  Bacterial polypetide isolated from the Sargasso Sea
MEHQKKIILLAGPTASGKSKLAIKLAKYFNGEIVNADSMQVYKEISILTSKPKPKDIKNIKHHLYSFKSVKDKFSAGHWLKLTIENIKEQWRNKKTPIIVGGTGLYFKALTEGLVKIPEIPNKFRKEIRNLHTKIGQKKFFDKLIILDPIAKDFCIPSDAHRSMRAY

SEQ ID NO: 123876 - protein, 204 aa, Unknown
  Bacterial polypetide isolated from the Sargasso Sea
MDLKSKIILIYGPTASGKSKFAIKLAKKISGQIINADSMQVYKELKVLTARPFKKNYQNIKHHLYGFQSARKNFSTGDWLKLANQKILQCKKKKQIPILVGGTGLYFKALTNGLVNIPNIPLSFRNKVRNLHKKLGQKKFFSELLILDPLIKDQINNKDAQRSIRAYEIKSYTKKSITRWFKNTKSDYDYNDFFKICIDFPRKD

SEQ ID NO: 123877 - protein, 299 aa, Unknown
  Bacterial polypetide isolated from the Sargasso Sea
MEIDQKIVVVAGSTASGKSEVALSLANEFKGELICSDSMQVYRHMDVGTAKPSLRERTLVPHHQLDLINPDENYSAGQYARDTSKIIKNIQERGRLPILVGGTGLYLRALMNGISKIPRIPESLRKEITCWYDEYGNKHCHNLLQKYDPEGAALVHPNDTSRILRSLEVVIFTGESIFSYRTAQPFGTSIYKSYEVALNWDRNELYNRINNRTISMLGSGWLAEVEMLLESYSPKLKPMNSIGYREVVQYLQNKLNWDTMVDEIQKRTRQFAKRQLTWFRSEEKIEWYKPDEKDRILAD

SEQ ID NO: 123878 - protein, 239 aa, Unknown
  Bacterial polypetide isolated from the Sargasso Sea
SVRKYFSAGDWLKEAKKKIKLCLKNKKLPIIVGGTGLYFNTITKGISKIPDIDLRTRAKVRNLFKKLGYKKFYEKLLSLDPKVKNKILPSDSQRTQRAYEVKLKTKKSLFEWIANTKSDFFDYDIKKIFLNTPREELLTKIYNRTEQMFKQNCIAEVKKFNLLKLNKSFSAHKLIGVQEITKYLDENLTLDQCKELINIKTRQYAKRQNTWARGHMKNWNKLYSKDFSILLKKSLKAAS

SEQ ID NO: 123879 - protein, 260 aa, Unknown
  Bacterial polypetide isolated from the Sargasso Sea
MPKKNKKKIILLFGPTASGKSKLAVDIAKKFNCEIINADSMQVYKEIKILSARPDKSKIKHHFYGFISAKKTFSVGKWYKLVSKKIKEIQKKNKIPIVVGGTGLYFRALTEGLVNIPKVKKLDYSHLSPLGRWMMGNYYYRKNPTIFEGINRNDIQRVSRAISVYEGTGLTLKEWQNKENKKYFKSYDFIKLCLLPTKDDLEKKINSRFIQMLKKGALDEVRNYNKKFFVPASHISANSIIGIYEIGLYLQKSISLKSLK

SEQ ID NO: 123880 - protein, 142 aa, Unknown
  Bacterial polypetide isolated from the Sargasso Sea
MDLKSKIILISGPTASGKSELAIKFAKKINGEIINADSMQVYKELKILTARPIKENKNKIKHHLYGFQSVKNDFSTGQWLKLVKKKIKEIRNKNKIPILVGGTGLYFKALIDGLVKIPKIPSKIRNKIRNMQTRIGQKKFYL

SEQ ID NO: 123881 - protein, 229 aa, Unknown
  Bacterial polypetide isolated from the Sargasso Sea
MDLKSKIILIYGPTASGKSKFAIQLAKKISGQIINADSMQVYKELKVLTARPFKKDYQNIKHHLYGFQNAKKNFSTGDWLKLAKQKILQCKKIKKTPILVGGTGLYFKALTEGLVNIPKIPNNFRNKVRSLHKRIGQKKFFQKLLQIDPLIKNQINSLDTQRSIRAYEIKSFTQKSMISWFKNTKSDYSHNDFFKICIDFPRKDLIERINQRSENMIKLGAISEVKKFI

SEQ ID NO: 123882 - protein, 221 aa, Unknown
  Bacterial polypetide isolated from the Sargasso Sea
MQKKIIKKTILLYGPTASGKSRLAIDIAKKYNGEILNADSMQVYKEIKILSARPDKSKIKHHFYGFISAKNTFSVGKWCKLVVKKIKEIQKKNKIPIIVGGTGLYFRALTEGLVKIPKVKKLDYSHLNSIGRWMMVNHYYKKNPTIFEGINKNDIQRVSRAISVYEGTGLTLREWQSKENKKYFNSSDFIKLCLLPPKDDLEKKINNRFIQMVKKKVRLMK

SEQ ID NO: 123883 - protein, 160 aa, Unknown
  Bacterial polypetide isolated from the Sargasso Sea
MKTQIYFVLGPTASGKSKFALSLAKKLNGEIINADSMQIYKELSILTARPTIHDQKKINHHLYGFVKGDIRFNVQKWCEEASTKINYLVDKNITPILVGGTGLYIESLINGIVSIPFIPEKVKKESEKMILKIGKENFFNLVKKHDFDAMKNISPNDIKE

SEQ ID NO: 123884 - protein, 255 aa, Unknown
  Bacterial polypetide isolated from the Sargasso Sea
MDIQSKIILISGPTASGKSNFALKLAKKFKGEIINADSMQIYKELKILTARPMKKDQRKIKHHLYGIQSAKKNFSTGSWFKNALKIIKKVEKKNKVPILVGGTGLYFKSLTEGIVKIPSIPLKLRNETRNLQKKIGQKKFYKILIKIDPLSKKIHFQDIQRTIRAYEIIKFTKISIFQWFKKTRAPYQDNKFIKIYIDYPRTELIRRINSRVESMFKNGVVNEVKSFLKLKIKRENSVNKVIGIREISNYINNNQ

SEQ ID NO: 123885 - protein, 253 aa, Unknown
  Bacterial polypetide isolated from the Sargasso Sea
YFVLGPTASGKSKFALSLANKLNCEIINADSMQIYNELSILTARPTINDQKKINHHLYGFVKGDVRFNVQKWCEEASKKINYLVNKNITPILVGGTGLYIESLINGIVSIPSIPEEVKIESDKMILKIGKENFFNLVKELDGDAMINIAPNDIQRIRRIWEVNYFTKKKFSDWKKSKNKNFINLKNYKILLFLPDRKENYRRVDHRTHLMMEDGAIEEVKNLLKLNYNNSLPIMKAHGVPEIQSYLNNEVSIE

SEQ ID NO: 123886 - protein, 201 aa, Unknown
  Bacterial polypetide isolated from the Sargasso Sea
MSAAPHANPSPTTIACLLGPTASGKTAAALALAARRPIEIVSVDSALVYRDMDIGTAKPSLDERASVPHHLIDIIDPADAYSAASFRADTLRLIGEITARGRTPLLAGGTMLYYKALTQGLNDLPGADPDVRATLDAEAERDGWPALHARLAQVDPDTAARLAPNDSQRIQRALEVFMLSGQPMSVLLAAPRRTDDAAAAY

SEQ ID NO: 123887 - protein, 240 aa, Unknown
  Bacterial polypetide isolated from the Sargasso Sea
MRKAVLITGPTAAGKTEIAMEVFDRIGGESKATLISVDSALVYRGMNIGTAKPNKDALIKYPHALIDIRDPREAYSAADFVSDVDELLDKAAKEDRLPILVGGSMLYIKCLRDGISRLPKTDPEARAYLEQRVEQNGLGDLYKELKAADPEAATNIHPNNRQRVIRAMEVFLVTGKNISTFWLENPAKNLHQRSGYTLKSLAIFPKQRGDLDQKIERRFRSMMEEGFLNEVRSLKQMDGM

SEQ ID NO: 123888 - protein, 239 aa, Unknown
  Bacterial polypetide isolated from the Sargasso Sea
YQKIKHHLYGFHNVKKNFSTGDWLKLVIKKIKEVQQRNKTPILVGGTGLYFKALTDGLVKIPNISIKLRNEIRDLQKQLGQRKFYEKLLELDPYSEGKINPTDTQRSIRAYEVKKFTKKSLTEWFKNTKSKFVEDDFFKVYIDFPRQELIERINLRTREMIENGAIKEVKDFIKLRVRKDKTANKAIGVNEIIEYLKKQKNLNDTRDKIAIKTRQYAKRQSTWARSNMISWMKLKPQDI

SEQ ID NO: 123889 - protein, 222 aa, Unknown
  Bacterial polypetide isolated from the Sargasso Sea
MNKKIILLFGPTASGKSKLAIDIANKHNGEILNADSMQVYKEIKILSSRPDKNKIKHHFYGFISAKKNFSVGEWYKIVSKEIKKIQKRKKVPIVVGGTGLYFRALTEGLAQIPKVKKLDYSHLSPLGRWMMGNHYHRKNSTIFEGINLNDIQRVSRAISVYEGTGLTLKEWQNKENKKYFKSSDFIKLCLLPPKDDLEKKINGRFIQMLKKGALDEVRKYNK

SEQ ID NO: 123890 - protein, 124 aa, Unknown
  Bacterial polypetide isolated from the Sargasso Sea
MDTKSKIILIFGPTASGKSYFATRLAKKINGEIINADSMQVYKEIKILNARPKTKDQKNIKHHLYGFQSVKNNFSTGKWLSLAKKKIQEIQRKKKVPILVGGTGLYFKSITNGLVKIPKVPLSV

SEQ ID NO: 123891 - protein, 265 aa, Unknown
  Bacterial polypetide isolated from the Sargasso Sea
EFSILSSRPNNKEIKKAKHHLYGIISVKKYFSAGDWLKLVKKKINQCYKNKKVPIIVGGTGLYFNTITKGISKIPDIDNNTRNKVRNLFKRIGYKKFHKKLLTIDPKIKDRILPTDSQRTQRAYEVILKTRKSLFDWIKETKSDFKNFEMIMIFLNIPREKLLNKISLRTELMFKNNECIKEVKRFNFLKLDKSLSANKLIGVQEINAYLKGSISLNECKELINIKTRQYAKRQNTWARGHMKNWNKLYSNDFSVLLKKTLKVIS

SEQ ID NO: 123892 - protein, 173 aa, Unknown
  Bacterial polypetide isolated from the Sargasso Sea
MKSKIVLVSGPTASGKTNFSIKLAKKINGEIINADSMQVYKELKILTARPFKNDQKKIKHHLYGFQTVKKNFSTGSWLKLVIKKILDIQKKNKIPILVGGTGLYFKVLTDGLVKIPEIPKKTRLEIRNIHKKVGQRKFYKMLIKIDPLSKNKINSNDSQRTIRAYEVKKNTKK

SEQ ID NO: 123893 - protein, 253 aa, Unknown
  Bacterial polypetide isolated from the Sargasso Sea
RNDLKNIKHHLYGFKSVKNNYSTGNWLKDAKKKINNIKKKNKIPILVGGTGLYFKALIDGIVKIPEVPQYIRNKIRKKQSKIGQIKFYSELIKLDPLCKKKINKNDTQRSIRAYEVKKFTNKSLFDWYSETYSDFNQDSFIKLHIDYPREKLIERISVRTNEMLRDGAIKEAKRFYKLRVKKDLSSNKVIGLSEIKEYLDKRIDLTELKEKISIKTRQYAKRQSTWARGQMSDWKKIKFNTLKSYLKKFPKSA

SEQ ID NO: 123894 - protein, 180 aa, Unknown
  Bacterial polypetide isolated from the Sargasso Sea
MDLKSKIILISGPTASGKSSFAIKVAKKLDGEIINADSMQVYKELKILSARPDPKKYQKIKHHLYGFHNVSKNFSTGDWLKLVIKKIKEVQRRKKTPILVGGTGLYFKALTDGLVKIPNISLKLRKQIRDLQKKLGQKKFYEKLLKLDPSSSGKINPTDTQRSIRAYEVKKFTKKSLTEW

SEQ ID NO: 123895 - protein, 260 aa, Unknown
  Bacterial polypetide isolated from the Sargasso Sea
MSAAPHANPSPTTIACLLGPTASGKTAAALALAARRPIEIVSVDSALVYRDMDIGTAKPSLDERASVPHHLIDIIDPADAYSAASFRADTLRLIGEITARGRTPLLAGGTMLYYKALTQGLNDLPGADPDVRATLDAEAERDGWPALHARLAQVDPDTAARLAPNDSQRIQRALEVFMLSGQPMSVLLAAPRRTDDAAAAYRFVPVALEPVSCSPHRAARTMRPQLTASCRSRSNRQIARYCTNGSRSASTQCSTRASST

SEQ ID NO: 123896 - protein, 245 aa, Unknown
  Bacterial polypetide isolated from the Sargasso Sea
NIKHHLYGFLSIKKNFSTGQWLKLATKKINEIHKKNKIPILVGGTGLYFQALIYGLVKIPKISFKKRLTILNLQKKLGQYKFYKKLIKIDPKIDVFINPNDIQRSIRAYEVKWFTKKSLLDWYKDTKPIFIKDDFIKLYIDCPRDLLLEKIKIRAKKTLPQGIKEVKKIKSIKVPKTNSSNKIIGIREIKNLLEKKLNKDQTIELMVIKTRQYAKRQATWARGKMKNWKTVSVADTKLSLKKLLN

SEQ ID NO: 123897 - protein, 254 aa, Unknown
  Bacterial polypetide isolated from the Sargasso Sea
KFEIKRARHHLYGILSVKKYFSAGDWLKEVKKKISLCSKKKKIPIIVGGTGLYFNTITKGISKIPDIDGKTRAKVRNLFKKLGFKKFYEKLLKLDPKVKGKILPTDTQRTQRAYEVKLKTKKSLFDWIANTKSDFVDFNLKKIFLDIPRAELLHKISKRTDLMFKENCVAEVKKFNLLKINNSLSANKLIGVQEINRYLNGTISLEECKNLINIKTRQYAKRQNTWARGHMKNWTKLYSKNFSILSKKTLKAVS

SEQ ID NO: 123898 - protein, 106 aa, Unknown
  Bacterial polypetide isolated from the Sargasso Sea
MDFKSKIILISGPTASGKSKFAIRLAKKINGEIINADSMQVYKELRILSARPDTKKFQKIRHHLYGFHNVTKNFSTGNWLKLVSKKIGELKKRKKTPILVGGTGLY

SEQ ID NO: 123899 - protein, 228 aa, Unknown
  Bacterial polypetide isolated from the Sargasso Sea
MDLKSKIILISGPTASGKSKAALKIAKKLNGEIINADSMQVYKELNILTARPSKTDLNKIDHHLYGFRSVKKEFSSGEWLKLAKKNIKKIRNKNKIPVLVGGTGLYFKALTDGLVKIPKIPISVRDKIRKMQNKLGQKKFYLKLLKIDPLVKNKIDLTDVQRSIRAYEVISISKRSIFEWYKKTKPSFKKDQFIKIYIDYPKEELINNISKRVDQMMKDGAIKEVKDF

SEQ ID NO: 123900 - protein, 275 aa, Unknown
  Bacterial polypetide isolated from the Sargasso Sea
GVIINADSMQVYKDLRILTARPSEEEEALVPHRLYGTMSVSEKNSAVKWREMAITEINNTRKLNKTPILVGGTGLYFKTLLEGLAQIPPISSEASLEVKALLEELGVKNMYKKLVKIDPKIAIKISQNDSQRISRAIEVFISTGIPLSEWHESDKLLPPVGGNVKKILFDPPREVLYRACDQRFELMLEKGALEEVDKLIRLPLDSSHPILKALGVRELSLFLKGEIGFDLAKKRSQQATRRYAKRQSTWFRNQFGKSKRLSAQYSESLYRKIFS

SEQ ID NO: 123901 - protein, 303 aa, Unknown
  Bacterial polypetide isolated from the Sargasso Sea
MDLKSKIILISGPTASGKSNFAINLAKKVKGEIINADSMQVYKEFKVLTTRPTRLEQKKIKHHLYGFLTIKRKFSTGQWLKLASKKIKEIKDKNKIPILVGGTGLYFKALADGLVKIPKISIKKRQRVVYLQKKLGQGNFYKKLIKIDPKIKETINSNDIQRSIRAYEVKKYTKKSIVDWYMDTKSLFKKDQFIKIYLDCPRDLLLKRIKYRTERMFLGSIKEVKKIKTIKFSKSNSSSKIIGFNEIKNHLNKKLNKDQTIELIVIKTRQYAKRQATWARGQMKNWKTISCLDTKASLKNLFN

SEQ ID NO: 123902 - protein, 302 aa, Unknown
  Bacterial polypetide isolated from the Sargasso Sea
MDLKSKIILISGPTASGKSKAALKIAKKLNGEIINADSMQVYKELNILTASPSKIDLNKIDHHLYGFRSVKKEFSSGEWLKLAKKNIKKIRDKNKIPVLVGGTGLYFKALTDGLVKIPKIPISVRDKIRRIQNKLGQKKFYLKLLKNDPLVKNKIDPTDVQRSIRAYEVISFTKKSVFDWYTKTKPSFKKDQFIKIYVDYPKDKLINKISKRVDQMMKDGAIQEVKDLLKLNLKSDSNIFKVIGIREIKEFIDKKTSMHDLKLNIVIKTRQYAKRQRTWARGQMSDWQKFDAEALSKFIKKL

SEQ ID NO: 123903 - protein, 306 aa, Unknown
  Bacterial polypetide isolated from the Sargasso Sea
MDPKVIFLMGPTASGKTSLAIDLYKSIPSELISVDSALIYKGMDIGTAKPTAAELLDAPHHLIDILDPASAYSAADFRTDALRLIADIHSRGKTAILVGGTMLYFRTLLQGISPLPEADPEIRQQIEAEAAEHGWGYLHQQLANFDPVSAARIHPNDPQRVNRAIEVYRLTGKSLTELTEHKGEPFPYPLQQFAINPTDRSELHQRIAVRFRQMLDCGFADEVKNLMQRADLHLDLPSMRCVGYRQMWLHLQGQLSEQEMIDQGIAATRQLAKRQLTWLRSWPELNWLKTEDKQAENLQAILTSLS

SEQ ID NO: 123904 - protein, 304 aa, Unknown
  Bacterial polypetide isolated from the Sargasso Sea
MGQKKTILLFGPTASGKSKLAVDIAKKLNGEIVNADSMQIYKEIKILSSRPSDQSIKHHLYGFISAKNNFSVGEWYKLAAIKIKEIKKRNKTAIVTGGTGLYFKALVDGLVQIPDVPKIDYSYLNPPARIMMKNHYQKIYPKIFEGIKANDIQRISRAISVYNATGITLSEWQKKKNKKYFNSKDFIKICLIPSKSFLEEKIKKRFSQMLKKGAIQEAKKYKDLNLSVHALHSSNSIIGLKEIESFLAKKISIVDLKEQVLIKTRQYAKRQFTWQRGQMKDWKGFGDTNYLDLRKKVLSYLSKT

SEQ ID NO: 123905 - protein, 305 aa, Unknown
  Bacterial polypetide isolated from the Sargasso Sea
MSKKIILLAGPTASGKSKLAIQLSKKLNGEIINADSMQIYKEFSVLSSRPDIKEIKKAKHHLYGIISVKKYFSAGDWLKLARNTINQCHKNTKIPIIVGGTGLYFNTITKGISKIPNIDIKTRNKVRSLFKRLGYKNFYKKLLNIDPKVKNRILPTDSQRAQRAYEVILKTKKSLFDWTANTKSDFINFEIKKIFIDIPREELLKKISERTETMFENKCIEEVKKFNLLKLKKSLSANKLIGVQEINAYLKGLISLDQCKELINIKTRQYAKRQNTWARGHMKKWNKLYSKDFSILLKKTLKVVS

SEQ ID NO: 123906 - protein, 353 aa, Unknown
  Bacterial polypetide isolated from the Sargasso Sea
MQSWPAHLGAAGHGGSRQTVSARTLIVTEPVLALTGPTASGKSALAERLAETFDCELISVDSALVYRGLSIGAAKPDYPHHLVHIREPDDPYTAADFASDAKQCIDEIRGRGRRPILVGGSMLYFRALIQGLDDIPAIDPAIRADIEAEATRSGWPALHQQLTQIDPETAGRLHPNHSQRICRALEVYRGTGTLLSEWQQGNPTSASQDYECIALCPEDRAALHARIASRLDAMFAEGLVAEVTRLFEQEGLHTGLPAIRAVGYRQVWSYLEGEIDLATCREKVLAATRQLAKRQLTWLRGWPDLTWIWTNEMGQLVQGSDSAADAPDSSDHGLSAPSGGIWFGRLQWLMRNF

SEQ ID NO: 123907 - protein, 302 aa, Unknown
  Bacterial polypetide isolated from the Sargasso Sea
MDLKSKIILVSGPTSSGKSNFAVKLARKINGEIINADSMQVYKELKILTARPKIKEYKNIKHHLYGFLSVKKNFSTGSWLKLTLQKIKEIKKRKKVPILVGGTGLYFKALTEGLVKIPNIPSKLRNKIRKNHKIIGKKKFFTKLVKLDPLTKNKIKLTDVQRAIRAYEVKLFTKKSIFEWFKNTKSKYPKDEFIKIYIDYPRAELVEKISERTSKMVKSGAINEVKNFLKLNIRNDKTSTKVIGINEIRDFIDKKSNLSELTEKISIKTRQYAKRQATWARGQMSDWQKIKPKDIVKLLKKI

SEQ ID NO: 123908 - protein, 302 aa, Unknown
  Bacterial polypetide isolated from the Sargasso Sea
MDLKSKIILISGPTASGKSKAALKIAKKLNGEIINADSMQVYKQLKILTARPSKSDLNKIDHHLYGFRSVKKEFSSGEWLKLAKKNIKKIRNKNKVPVLVGGTGLYFKALTDGLVKIPKIPISVRDKIRRMQNKLGQKKFYLKLLNNDPLVKNKIDPTDVQRSIRAYEVIKFTKKSVFSWYKKTKPSFKKDQFIKIYVDYPKEILINKISKRVDQMMKNGAIQEVKDFLKLDLKSDSNIFKVIGIREIKEFIDKKISMHDLKLNIVIKTRQYAKRQRTWSRGQMSDWQKFDAEALSKFIKKL

SEQ ID NO: 123909 - protein, 298 aa, Unknown
  Bacterial polypetide isolated from the Sargasso Sea
MGPTASGKTDLAIELCQALPCDIISVDSALIYRGMDIGTAKPTADELARAPHRLIDILDPAVSYSAADFCKDALREMKEIADRGRIPLLVGGTMLYFKALLEGLSPLPSADPVIRAGIEEEAARLGWQALHDELVRIDPVAGARIHPNDPQRLSRALEVYRISGKTLTELTLVQGEGLPYRVLQFAIAPSDRAVLHQRIELRFDKMLQGGFEQEVRALYQRGDLTPDLPSIRCVGYRQMWDYLAGEVEYDEMRYRGIVATRQLAKRQMTWLRGWSDVTWLESGESGNLARVVARAGVA

SEQ ID NO: 123910 - protein, 279 aa, Unknown
  Bacterial polypetide isolated from the Sargasso Sea
MKKIILIAGPTASGKSSLANILAKKINGEIVNADSVQIYKDLKILTARPDIQKNDPLHHLYGFAKGNELWSVGRWIKKAKKVTDNILTKNSIPILVGGTGLYFKAVTEGLSPIPEIDETVREELNEDLKEKGLSYLYNELKSQDIKAYELIDKNDQQRILRALEVYRGSGKKISTYWGMERSKVFNNNFIKIKLNADREYLYNKCDDRCEDMFQSGVIEEVKKLMEMKYEDNAPIFNAIGVKEINKYLQKEIDKDEAKDLIKFRTHQYAKRQITWLKHQ

SEQ ID NO: 123911 - protein, 316 aa, Unknown
  Bacterial polypetide isolated from the Sargasso Sea
MNYKFNFPAIFLIGPTASGKTEQSFSITKNFPVEIISVDSAMVFKGMDIGTSKPSKDMRESFPHHLIDIISPEQDFDLGLFLEETDRAVKAIREKNKFPLFVGGSMLFHKTLLEGIHNFPSDLNIRKDIEALKKSKGLDVLVQELKSSDPETHQSIDIKNARRVERALEIIRISGKKLSELKTEPKVMFFDQNNCLLLGILDQKSRLEALAKLRLSEMIEKGLINELENLKKEYRLSPELQSMNSINYKQFLPHINGVISLDQAFNDAFDATKQLIKTQLNWMKKFELNHCANTADINDSEIFSDTINTYLGSFDK

SEQ ID NO: 123912 - protein, 303 aa, Unknown
  Bacterial polypetide isolated from the Sargasso Sea
MDIKSKIILISGPTASGKTEFAIKLAKKIEGEIINADSMQIYKELKILTARPNKIDTKKVKHHLYGIKSVNSKFSTGSWLKEVKKKIKYIKKKNKIPILVGGTGLYFKSLTEGLVKIPNIPISFRKNIRSLQNKIGQKKFYQKLIKIDNSVKGSIDPNDVQRTIRAYEIMKYTKKSITEWFKKTKPIFDNTVFVKYYIEYPRDKLLDKIHSRIERMFNLGAIEEVKKFNYLKVKKENSASKVIGIREINDLIEGNSNLKQTKEKIAIKTRQYAKRQMTWARGHMKSWHTIQPNAINSVLKKFN

SEQ ID NO: 123913 - protein, 297 aa, Unknown
  Bacterial polypetide isolated from the Sargasso Sea
MGPTASGKTGLALDIAAKVESEVISVDSALVYKGMDIGTAKPTQEEQAGVVHHLIDIIDPAQSYSVSQFVNDTNALIGDILARGKVPILAGGTMMYFNALINGISPLPKSDEKIRDEITQQAQRLGWSKLHDELRGVDPISGERIHPNDPQRITRALEVYRSTGKTLTHWQQQEGEKCPYNIAQFAIAPADRAVLHERIATRFDLMLEQGFENEVVKLYERSDLHEDLPSIRSVGYRQMWQYLDGQLSYAEMRERGIIATRQLAKRQLTWLRGWEQVTWLDTFANDNLTKITAKVTL

SEQ ID NO: 123914 - protein, 312 aa, Unknown
  Bacterial polypetide isolated from the Sargasso Sea
MRSKKVIILRGPTASGKTDLSLELAEKFPIDLISVDSVMVYKGLNIGSAKPSKQTLKRYPHHLIDICEPNEKYSAGRFIVDVQKIIGDIQSNDRIPLLVGGTMMYYKVLQDGMSQLPAANDEVRTQIDLKAEKIGWQEMHAELGKVDPESAKEIKPNDKQRIQRAIEVYMITGIAMSELRREGKSNNKFDYLSISLLPNDREALYENINNRFDSMIKEGLLDEVSTLLNTERVSNESHSMRSIGYREMLEYIRGEKTLEVAIDTAKLSSRRYAKRQITWLRSFDDQYKLEPMETDNIKTIEEILNNHFEVLD

SEQ ID NO: 123915 - protein, 310 aa, Unknown
  Bacterial polypetide isolated from the Sargasso Sea
MLGPTASGKTAAALALAARRPIEIVSVDSALVYRDMDIGTAKPSLDERASVPHHLIDIIDPADAYSAASFRADTLRLIGEITARGRTPLLAGGTMLYYKALTQGLNDLPGADPDVRATLDAEAERDGWPALHARLAQVDPDTAARLAPNDSQRIQRALEVFMLSGQPMSVLLAAPRRTDDAAAAYRFVPVALEPSDRAVLHKRIAQRFDAMLDAGFIDEVERLRRREDLHPDLPSMRCVGYRQAWEFLDGDTDYRTMRDKGIFATRQLCKRQITWLRAMPERIVVDCIAPDSTARALDALERVLDGKPPG

SEQ ID NO: 123916 - protein, 303 aa, Unknown
  Bacterial polypetide isolated from the Sargasso Sea
MDYKSKIILIAGPTASGKSKIAINLAKKINGEIVNADSMQVYKQLKILTARPSEKDQKKIKHHLFGIIDVRKRFSTGQWLKECIKIINIIRKKKKIPIIVGGTGLYFKALVDGLVSIPKFKPSEKNNILMLHNKLGQKQFYKKLVKLDPVCKKFINSNDVNRSIRAYEVKKLTKKSLYKWFKETKTFFDKNEFVMTYVDYPRDKLIKNIKKRIAKMFDLGAIKEVKKFNLIKINKVNSVNHVIGIKEINSYLSKKAELSDIKEQILIKTRQYAKRQSTWSRGHMFNWHKIDPKSKNPFKKILK

SEQ ID NO: 123917 - protein, 312 aa, Unknown
  Bacterial polypetide isolated from the Sargasso Sea
MKAKNAIIIRGPTASGKTELSLKLAEKYPIDIISVDSVMVYKGLDIGSAKPSQDILKKYPHHLIDICEPNDKYSAGRFIDDAHKKIKEIQSNDRIPLLAGGTMMYFKVLQDGLSELPSANQKIRKKIDIKAKEIGWPEMHIELEKIDPDAAKKIKPNDKQRIQRAMEVFMISGIPMSKLRRKTRIDNEFEYLDISLMPNDRESLYRNIDRRFDSMIEEGLLDEVSKLIEKKLVSYESHSMQSIGYREMIDHILGKMTLDDAIESAKVSSRRYAKRQLTWLRSLDDEYKLDPLDKQKFKTIEGIINNHFEDKD

SEQ ID NO: 123918 - protein, 265 aa, Unknown
  Bacterial polypetide isolated from the Sargasso Sea
SMQVYKELKILTARPLKNESSKIKHHLYGFQSVKRKFSTGKWLKLATEKISKIKKNKKIPILVGGTGLYFKALTDGLVKIPNIPIKFRNKIRNLQKQIGQKKFYEKLIKLDPLIKEKINPTDIQRSIRAYEVKVYTKKSLIEWFKNTKSKFTKDDFFKIYIDFPRQELLSKISSRIDQMFKKGAVKEVKKFLKLKVAPEMTPNKVIGISEIKDFLNKGSDLKEVKDKITIKTRQYAKRQSTWARGQMKSWEKVNPKTLKHILKKI

SEQ ID NO: 123919 - protein, 301 aa, Unknown
  Bacterial polypetide isolated from the Sargasso Sea
MSNYSSILISGPTASGKSQLAVRLAKIYDGVVINADAMQIYDVLSIITARPNTKSQETVPHFLYGYVNPQIRYSVGEWQKDIARLLVFLEKINVLPIIVGGTGLYFSGLLGEIAEIPNISKEIRSKWLKIKDENDTHYLHEYLKKIDPKSYEKINPNDPSRILRAIEVYEQTGVSIQDWQENQGVQLIEKSKSKFIYFCPNKEDLHLNIKNRTAQMLSSEELYREVSDLRELKVPPAYPSMKAIGVREVIDLIDGKTNKDQVEISINNQTKRYVKRQITWARKKMVDWDWIDDEKQISELS

SEQ ID NO: 123920 - protein, 281 aa, Unknown
  Bacterial polypetide isolated from the Sargasso Sea
GEIINTDSMQIYKEIKILNARPKIKETKNIKHYLYGFHSVKKNFSTGDWLKKTIKLIKQIHNKNKIPILVGGTGLYFRAIINGLVKIPTIPKKYRNQIRNNHRKIGQKKFYNNLIKLDPLVISKINPNDAHRSLRAYEVKKYTKISLYKWFEKTKKNFDENDFLKIYIDCPRDDLIKRINTRVNKMISSGAVNEVKKFRHLKIRKDKTSNKVIGISEICKFLDGDQNIDITKEQISIKTRQYAKRQRTWARNQMIDWEKVDYKKLSSFLKKIKISSLKLDQ

SEQ ID NO: 123921 - protein, 169 aa, Unknown
  Bacterial polypetide isolated from the Sargasso Sea
MKRKIILLAGPTASGKTKIAIKLAKRINGEIINADSMQVYKDFHILSSRPSENELRLAKHHLYGFQSSGAVFSTGKWLKLASDKINQIVKKDKVPILVGGTGLYFKAITDGISKIPNIKFSNRNSIRNLHKKIGQKEFYKKLIKLDPISRNKISPSDTQRSLRAYEVKK

SEQ ID NO: 123922 - protein, 302 aa, Unknown
  Bacterial polypetide isolated from the Sargasso Sea
MDLKSKIILIAGPTASGKSKFAIKFAKKINGEIINADSMQVYKELSILTARPKKEDLKKIKHHLYGFQTVKRNFSTGNWLKLVKTKIKQIKKKKMTPILVGGTGLYFKALTHGLVKMPKIPLRFRNNIRKLHKKKGQSIFHKELIKLDPLAKNKINPNDAQRSIRAYEIKKYSKKSIFKFFKETNNSFFDKDFFKIYIEFPRSELIKRIDKRVDKIFKDGVTNEVKSFLKHKVNKDKSVAKVIGLNEIEKYLKKELNLSQTKELISIKTRQYAKRQTTWARGQMSNWQKIDYKDLNSLLKKI

SEQ ID NO: 123923 - protein, 228 aa, Unknown
  Bacterial polypetide isolated from the Sargasso Sea
MDLKSKIILISGPTASGKSSFAIKLAKKINGEIINADSMQVYKQLKVLSARPNPKNYQSIKHHLYGFQDAKISFSTGDWLKIANKKIIEVRKRKKIPILVGGTGLYFKALTDGLVRIPNIPVRFRNQIRNLNKQIGQNNFYKQLLKLDPLSKYNINPTDTQRSIRAFEVKKFTKKSLQEWFKNTKSNYLEEDFIKIYIDYPREELVERIHQRTGKMIKMGAVNEVKRF

SEQ ID NO: 123924 - protein, 307 aa, Unknown
  Bacterial polypetide isolated from the Sargasso Sea
MKTQIYFVLGPTASGKSKFALSLANKLNGEIINADSMQIYHELSILTARPTINDQKKINHHLYGFVKGDVRFNVQKWCEEASKKINYLLDQNISPILVGGTGLYIESLINGIVSIPSIPEKVKKESDKMILKTGKENFFNLVKELDSDAMINIAPNDIQRIRRIWEVNFFTKKKFSEWKKSKNKNFINLKNYKILLFLPDRKENYKRVDHRTHLMMEDGAIEEVKNLLKLNYNNSLPIMKAHGVPEIQSYLNNEVSIEKCISKIQQVTRNYVKRQHTWWRSSNLNIFKKFDQFPDEIDIKSINLEQN

SEQ ID NO: 123925 - protein, 299 aa, Unknown
  Bacterial polypetide isolated from the Sargasso Sea
MIAGPTASGKSQFSIDLAKKINGVVINSDSMQVYKNLKILTARPNKKEMQNIKHYLYGYVNGVERYNVEKWCNDAAKIINKTFERNSNPILVGGTGLYIHTLINGLIDIPAIPESIKNKSEKIIKEFGKDFLITQIKKFDPRSLKEVNSNDTVRLRRIWEVYESTGKKFSEWKLNENKKFIENLDFKIILFLPNREKNYQIVNSRFIKMINDGAIEEVKNLLDLNLNDSLPVMRAHGVPEIIKFLRNEISLEECISKGQQVTRNYVKRQHTWWNSTNLDIFHQFDKFPIEIDINSIKID

SEQ ID NO: 123926 - protein, 283 aa, Unknown
  Bacterial polypetide isolated from the Sargasso Sea
MDIQSKIILISGPTASGKTNFSIKLAKKIKGEIINADSMQVYKEFKILTARPSLKEQKKIKHHLYGFLSIKQKFSTGQWLKLAFKKIKLIQKKNKIPILVGGTGLYFKALVDGLVKIPKISIKKRKAIINLQNELGQINFYKKLIKIDPKIKGLINSNDAQRSIRAYEVKWFTGKSLFDWYKDTKSLFSNDDFIKIYIDFPRNELLSRIKFRTKNMLPKAINEVKRLKGLRVAKSNSSNKIIGIDEIKKLLEKKLDKDQAIELIAIKTRQYAKRQATWARSQR

SEQ ID NO: 123927 - protein, 269 aa, Unknown
  Bacterial polypetide isolated from the Sargasso Sea
MKKNKTILLTGCTGSGKSTLAIELAKLSDSIIINADSMQVYKCLKILTSRPTDSQILTCEHALYGHVDCQNNYNYSAGTWLSEIKNILSYSKMNKLRPIIVGGTGLYFSLLINGLSNIPKISIKVKNAAAEIKKTDPHKFFLDLKNFDPEILTSIDSKNSVRLQRAWEVYFETGKSIRFWQKEFLQQPLIDLSNVKPIILSCETELLKTRIDTRFKKMKELGVIEEVKTFIQQSKMFSGEQLAKRAIGVVEIGKYLSGEMTLKDTEKFI

SEQ ID NO: 123928 - protein, 302 aa, Unknown
  Bacterial polypetide isolated from the Sargasso Sea
MDLKSKIILISGPTASGKSSFAINFAKKVNGEIINADSMQVYKQLKILSARPDPKKYQKIKHHLYGFHNVTKNFSTGDWLKLVIKKISEVQKRKKTPIVVGGTGLYFKALTDGLVKIPNISLKLRTQIRDLQKKLGQKKFYEKLLKLDPSSIGKINPTDTQRSIRAYEVKKFTKKSLHEWFKNTKSNFTEDDFFKVYIDYPRQELIERINVRTSEMIENGAIKEVKGFIKLRVRKDKSANKAIGVNEIREYLKKQKDLKDTKEKIAIKTRQYAKRQSTWARGNMMSWIKLKPRDINNFLKKI

SEQ ID NO: 123929 - protein, 147 aa, Unknown
  Bacterial polypetide isolated from the Sargasso Sea
MDLKSKIILIYGPTASGKSKFVIKLAKKISGQIINADSMQVYKELKVLTARPFKKDYQNIKHHLYGFQNAKKTFSTGDWLKMAKQKISQCKKIKKTPILVGGTGLYFKALTNGLVNIPKIPINFRNKIRNLHKRLGQKKFFQKLLKL

SEQ ID NO: 123930 - protein, 208 aa, Unknown
  Bacterial polypetide isolated from the Sargasso Sea
VLCGGTGLYFKSLKEGIFQGSHTNEDIRNKLEEEYDIDKEKLFKTLQKIDPEYSNKVHINNKKRLIRALEVYETTGKPMSKNFDSLSKNSRYANDYYFVYLKMNNDLLHPRILNRIKCMIDDGMINEVEEIIKRKINISHINYIGFNEISSFINKEISINEAIEDIFVRTRQYAKRQKKWFNMNNYDISFDLHEISKNDIVDKLIQIN

SEQ ID NO: 123931 - protein, 204 aa, Unknown
  Bacterial polypetide isolated from the Sargasso Sea
MDIKSKIILISGPTASGKSKQADKLAKKIGGEIINADSMQVYKELKILTARPSINNKIKYHLYGFLSVRNKFSTGDWLKLTLTKIKQIKAKGKIPILVGGTGLYFKSLVDGLAKIPNIPLKYRNSIRIEHSKIGQKKFYKKLLKIDPKIKNYINPQDTHRTLRAYEIKKFTKVSMIDWFKKTKKYFGDKDFVKIYFDIPKKYTD

SEQ ID NO: 123932 - protein, 290 aa, Unknown
  Bacterial polypetide isolated from the Sargasso Sea
PTASGKSELAIKFAKKINGEIINADSMQVYKELKILTARPIKENTNKIKHHLYGFQSVKNEFSTGQWLKLVKKKIKEIRNKNKIPILVGGTGLYFKALTDGLVKIPKIPNAIRNEIRSKQKQMGQKKFYLKLLKLDKFVKNKIVSTDIQRSLRAYEVIYFTKKSIFEWYKKTKSKYKINEFLKIYIDYPKEILVNKISKRVDQMIKDGAVEEVQNFEKLNLKSDNNLYKVIGIKEIKDFIDKKTSLKEMKLNIVIKTRQYAKRQRTWSRGQMSDWQKFDPKELSKFIKKL

SEQ ID NO: 123933 - protein, 272 aa, Unknown
  Bacterial polypetide isolated from the Sargasso Sea
PERAILDEFPHALIDIRDPVESYSAAEFRADALAAMAESAARGRIPLLVGGTMLYYKALLEGLADMPSADPAIRAELEARAAAEGWEALHRELAEVDPQSAARIHPNDPQRLTRALEVYRVSGLSMTEHRLRQAAGNPDAGTSGTGQLPYTVAQLAIAPAQRQVLHDRIAQRFRVMLEQGFVEEVEALRRRSDLHAGLPSIRAVGYRQVWEYLDGELSRDDMVERGIIATRQLAKRQFTWLRGWENLHWLDSLACDNLSRALKYLESVSILK

SEQ ID NO: 123934 - protein, 145 aa, Unknown
  Bacterial polypetide isolated from the Sargasso Sea
MDLKSKIILISGPTASGKSNFAVKLAKKINGEIINADSMQVYKELKILSARPNLKDYQKIRHHLYGFHNVKNNFSTGDWLKLTIKKINEIKKRKHIPILVGGTGLYYKALTEGLVRIPNIPIRFRNKIRSLHKTLGQKRFYKKLL

SEQ ID NO: 123935 - protein, 268 aa, Unknown
  Bacterial polypetide isolated from the Sargasso Sea
MICQNWTICFSVEGELRKAVLITGPTAAGKTEIAMELYDRIGGESKATLISVDSALVYRGMNIGTAKPHKDALIKYPHALIDIRDPQEAYSAADFVSDADELLYKATKEDRLPILVGGSMLYIKCLRDGISRLPKTDPEVRAYLEQRVEQNGLGEVYKELKAADPEAAINIHPNNRQRVMRAMEVFLVTGKNISTFWLENPAKNLHQRVGYEITSLAIAPKQRRDLDQRIESRFRLMLEEGLLDEVRSLRQIDGLHEGSASMRSVGYR

SEQ ID NO: 123936 - protein, 300 aa, Unknown
  Bacterial polypetide isolated from the Sargasso Sea
MDLKSKIILISGPTASGKSNFAIKIAKYVNGEIINADSMQVYKELKILTARPNDKQLKKIKHHLYGFQNVKKKFSTGIWLKKTLKKIKEIQKRKKIPILVGGTGLYFKALTEGLVKIPTISLRKRNQIRKLQIKLGQKKFYQKLINLDPLSKNKIDGNDTQRSIRAYEIKKFTSKSIFKWFEETNILFRPKTFIKIYINFPREDLIKKINDRVNQMFKDGAVNEVKNFIKLKIKDDQSPNKVIGIKEITQFIKGDISLREAKEQICIKTRQYAKRQSTWSKGQMQSWQRIEPKNLKLSSI

SEQ ID NO: 123937 - protein, 144 aa, Unknown
  Bacterial polypetide isolated from the Sargasso Sea
MSKKIILLAGPTASGKSKLAIQLAKKINGEIINADSMQIYKEFTVLSSRPIDREINNPKHHLYGIISVRKTFSAGDWLKLIKSKVKQCHSKKKIPIIVGGTGLYFNMITRGLSKIPSIDFATRNKVRQLFKKLGYKNFYQKLIN

SEQ ID NO: 123938 - protein, 302 aa, Unknown
  Bacterial polypetide isolated from the Sargasso Sea
MDFKSKIILISGPTASGKSSFAIKLAKKVNGEIINADSMQVYKQLKVLSARPDQKKSQKIRHHLYGFHDIKKNFSTGNWLKLVFKKIEEIKKRKKTPILVGGTGLYFKALTDGLVKIPSIPVKIRNQIRLMHSKVGQDKFYNKLLKLDPTSRNKINPTDPHRSIRAYEVKLHTKKSIHEWYKNTKSNFQKSDFYKIYIDFPRLELIERINLRSKEMIKNGAIKEVKNFIKLKVKKDKSVNKAIGINEIRQYLNNEKKLEDIIENISIKTRQYAKRQSTWARGNMKSWLKLKPNELNNFLKKI

SEQ ID NO: 123939 - protein, 244 aa, Unknown
  Bacterial polypetide isolated from the Sargasso Sea
HLYGFKSVKDNYFTGNWLKDAKLKINNIRKKNKIPILVGGTGLYFKAIIDGIVKIPDIPITMRNRIRKRQLKIGQTKFYSELIKLDSLCKKKINQNDTQRSIRAYEVKKFTNKSLFDWYSDTYPDFTKDSFIKLHIDYPREKLTERISLRTNEMLRDGAIKEAERFYKLRVKKDLSSNKVIGLSEIKEYLDKRIDLRELKEKISIKTRQYAKRQSTWARGQMSDWQKIKFNRLEIFLKKFPKSS

SEQ ID NO: 123940 - protein, 90 aa, Unknown
  Bacterial polypetide isolated from the Sargasso Sea
MRNWINCFFVAGKNQRKPDVICLMGPTASGKTNLAVELVKLHPFEIINVDSAQIYRGMDIGTGKPSQATLKVAPHRLLDIRDPAEMYSAA

SEQ ID NO: 123941 - protein, 305 aa, Unknown
  Bacterial polypetide isolated from the Sargasso Sea
MSKKLVLLAGPTASGKSNLAIKLAKKLNGEIINADSMQIFKEFTVLSSRPTLNQTKKVKHHLYGIITVKKHFSAGEWLKKVKIKINTCVKKKKIPIIVGGTGLYFNTITKGISKIPDIDLKTRNKVRNLYKKLGIKKFYNALIKLDPKSKGRILPTDSQRIQRAYEVKLKTKKSLYDWFEKTKSDFLEFDIRKIFIEIPRDILLNKISRRTEQMFKKKCINEVKKFNNLKVNKSFSSNKLIGVQEINDYLKGLITLEQCKGLINIKTRQYAKRQNTWARGHMKNWNKLYSKNFSNLLKKSLKVVT

SEQ ID NO: 123942 - protein, 200 aa, Unknown
  Bacterial polypetide isolated from the Sargasso Sea
MDFKSKIILISGPTASGKSSFAIKLAKKINGEIINADSMQVYKQLKILSARPDQKKYQKIRHHLYGFHDVKKNFSTGNWLKLVLKKIDEIKKRKKTPILVGGTGLYFKALTDGLVKIPNIPIKIRNQIRVMHSQIGQDKFYKKLLKLDPSSKNKINPTDPHRSIRSYEVKLYTKKSIHEWYKNTKSNFQKSDFYKIYINF

SEQ ID NO: 123943 - protein, 238 aa, Unknown
  Bacterial polypetide isolated from the Sargasso Sea
MDFQSGKKNFSTGDWLKLVNDKILYCKKMKKTPILVGGTGLYFKALTDGLVNIPKIPSNFRNEIRNLHKRIGQKKFFLKLLKIDPLIKDRVNYLDVQRSIRAYEIKSFTKKSMINWFKNTKSNYDHNDFFKICIDFPRKDLIERINKRTENMIKSGAILEVKKFIKLRVPKNKSLSKAIGISEIKQYLQKKIQTEQLIEKISIKTRQYAKRQSTWARGNMKDWIKVNPDGLYKLLKKI

SEQ ID NO: 123944 - protein, 232 aa, Unknown
  Bacterial polypetide isolated from the Sargasso Sea
NKYSTGEWLKLLLKKIKDIRKIKKVPIIVGGTGLYFKALTDGLVEIPNIPLKVRNKTRSMQKKLGQKKFFNKLLKLDPKIKGKIDKNDVQRSIRAYEIKYKTKKSIVDWFKRTKIFFSSEEFIKFYIDYPRGELLNRIYSRVEYMFKNGAIDEVRRFNKIGAKKENSSNKVIGIAEITNLLNNQCTLQEAKDLISIKTRQYAKRQVTWARGQMQSWEKINPENLNLILKKLK

SEQ ID NO: 123945 - protein, 303 aa, Unknown
  Bacterial polypetide isolated from the Sargasso Sea
MGPTGVGKTDLAIELYAKLPIRIISVDSVQIYKFLNIGSGKPSKKVLKDFPHDLIDWIEPTENYSTARFQDDVVRSIKESFESNLTPVLVGGTMMYFHHLINGISNLPNVPKKIRQDIEEEFSEKGSNAMHEHLKEIDEKSSLKIHPNDSQRIKRAIEVYKATGKKFSEWLAEQKVEVNPIITDSNLIQIAIKPEDKQLHRESVAKRFNKMIDDGLVSEVENILNMEGMSSNSQSMKSVGYRQVCEFLEGGYNFDDMIDKAINSTRQLAKRQMTWISGWSDLVLLEKNRTLPKSVEDLILNNS

SEQ ID NO: 123946 - protein, 124 aa, Unknown
  Bacterial polypetide isolated from the Sargasso Sea
MEDKPFLVVVTGPTSSGKSSLGLWLAEQLDGELICCDSMQVYRGMDIGTAKPRETERNRVSHHLFDLVNPDETYSVGRFVRESEDVIKKLKLRKKIPILVGGTGMYLRSLLFGLSQIPEVSSNI

SEQ ID NO: 123947 - protein, 140 aa, Unknown
  Bacterial polypetide isolated from the Sargasso Sea
MKTQIYFVLGPTASGKSKFALGLATKLNGEIINADSMQIYNELSILTARPTINDQKKINHHLYGFVKGDVRFNVQKWCEEASKKINYLVDKNITPILVGGTGLYIESLINGIVSIPSIPEKVKIESDKMILKIGKDNFFN

SEQ ID NO: 123948 - protein, 150 aa, Unknown
  Bacterial polypetide isolated from the Sargasso Sea
MDLKSKIILISGPTSSGKSNFAIKLAKKIKGEIINADSMQVYKQLQILTARPKKEDLKKIKHHLYGFCDVKKKYSTGEWLKLLLKKIKDIRKRKKVPIIVGGTGLYFKALTDGLVKIPNIPIKVRNKIRLMQKKLGQKEFYNKLLKLDPL

SEQ ID NO: 123949 - protein, 135 aa, Unknown
  Bacterial polypetide isolated from the Sargasso Sea
MDLKSKIILISGPTASGKTNFAVKLAKKISGEIINSDSMQVYKELKILTARPKKLDQNKIKHHLFGFQTVKNSFSTGKWLKLTLLKIKEIKKRGKVPILVGGTGLYFKSITDGLTKIPKIPNKLRNQIRKKQKNL

SEQ ID NO: 123950 - protein, 308 aa, Unknown
  Bacterial polypetide isolated from the Sargasso Sea
MNKELQPKVVFLMGPTASGKTALALELAEKHNCEIISVDSALIYRGMDIGSAKPSAEELARGPHRLIDIRDPSESYSAADFRADALREIEQIISMGKTPLLVGGTMMYFKALLEGLSPLPSADEAIRADIQAEADTNGWEALHEQLREIDPVSAERIHPNDPQRLSRALEVYRISGKSLTELTMTKSTPLPYDVVQFAIAPRERKVLHALIGQRFRIMLEQGFIDEVVQLKARGDLHLDLPSMRCVGYRQCWQYLDGEFDYDTMVEKAVAATRQLAKRQLTWLRSWPELNWLESGAEGNLVTLMRQCR

SEQ ID NO: 123951 - protein, 302 aa, Unknown
  Bacterial polypetide isolated from the Sargasso Sea
MDLKSKIILISGPTASGKSKLAIDFAKKVNGEIINADSMQVYKELKILTARPIKENTNKIIHHLYGFQSVKNEFSTGQWLKLVKKKIKEIRNKNKIPILVGGTGLYFKALTDGLVKIPKIPNTIRNKIRSKQKQMGQKKFYLKLLKLDKFVKNKIVSTDIQRSLRAYEVIYFTKISIFEWYKKTKSQYKIDEFLKIYIDYPKEILVNKISKRVDQMIKDGAVEEVQNFEKLNLKSDNNLYKVIGIREIKDFIDKKTSFKEMKLNIVIKTRQYAKRQRTWSRGQMSDWQKFDPKGLLKFIKKL

SEQ ID NO: 123952 - protein, 141 aa, Unknown
  Bacterial polypetide isolated from the Sargasso Sea
MDLKSKIILISGPTASGKSSFAIKVAKKVDGEIINADSMQVYKELKILSARPDPKKYQKIKHHLYGFHNVTKNFSTGDWLKLVIKKIIEVKKRKKTPILVGGTGLYFKALTDGLVIIPNISLKLRNQIRDLQKKLGQKKFY

SEQ ID NO: 123953 - protein, 217 aa, Unknown
  Bacterial polypetide isolated from the Sargasso Sea
MPKKINKKIVLLFGPTASGKSRLAIDIAKKYDGEILNADSMQVYKEIKILSARPDKSEIKHHFYGFISAKNTFSVGKWYELVAKKIKEIQKKNKTPIVVGGTGLYFRALIEGLVTIPKVKKLDYSHLNPIGRWMMGNHYHKKNPTIFEGINRNDIQRVSRAISVYEGTGLTLKEWQNKENKKYFNSSDFIKLCLLPPKDDLEKKINSRFIQMLKKGA

SEQ ID NO: 123954 - protein, 307 aa, Unknown
  Bacterial polypetide isolated from the Sargasso Sea
MKPQIYFVLGPTASGKSKFALSLANKLNGEIINADSMQIYRELSILTARPTVNDQKKINHHLYGFVKGDVRFNVQKWCEEASKKINYLLDKNINPILVGGTGLYIESLVNGIVSIPSIPEKVKLESEKMISKIGKENFFNLVKELDSNAMKNISPNDIQRIRRIWEVNFFTKKKFSDWKQNKNKKLINMEDYKILLFLPEKSENYKRVDNRTHVMIQDGAIEEVKNLLKLNYNNSLPIMKAHGVPEIQSYLNNEVSIKECISKIQQVTRNYVKRQHTWWRSSNLNIFKKFDQFPDKIELKSINLEQN

SEQ ID NO: 123955 - protein, 147 aa, Unknown
  Bacterial polypetide isolated from the Sargasso Sea
MDYKSKIILIAGPTASGKSKIAINLAKKINGEIVNADSMQVYKQLKILTARPSEKDQKTIKHHLFGIIDVRKRFSTGQWLKECIKIINLIRKKNKTPIIVGGTGLYFKALVDGLVSIPKFKPSEKNKILKLHKKLGQKQFYKKLVKL

SEQ ID NO: 123956 - protein, 302 aa, Unknown
  Bacterial polypetide isolated from the Sargasso Sea
MDLKSKIILISGPTASGKSSFAIKFAKRVNGEIINADSMQVYKQLKILSARPDPKKYQNIKHHLYGFHNVTKNFSTGDWLKLVIKKIDEVQKRKKTPILVGGTGLYFKALTDGLVKIPNISLKLRTQIRDLQKKLGQKKFYEKLLKLDPSSIGKIKPADTQRSIRAYEVKKFTKKSLYEWFKNTKTNFMEDDFFKVYIDFPRQELIERINVRTTEMIKNGAIKEVNDFIKLRVRKDKSANKAIGVNEISEYLKKQKNLNDTREKIAIKTRQYAKRQSTWARGNMMSWIKLKPQDINNFLKKI

SEQ ID NO: 123957 - protein, 200 aa, Unknown
  Bacterial polypetide isolated from the Sargasso Sea
NALINGISPLPKSDEKIRDEITQQAQRLGWSKLHDELRGVDPISGERIHPNDPQRITRALEVYRSTGKTLTHWQQQKGEKCPYNIAQFAIAPADRAVLHERIATRFDMMLEQGFEKEVVKLYERSDLHEDLPSIRSVGYRQMWQYLDGQLSYAEMRERGIIATRQLAKRQLTWLRGWEQVTWLDTFANDNLTKITAKVTL

SEQ ID NO: 123958 - protein, 302 aa, Unknown
  Bacterial polypetide isolated from the Sargasso Sea
MGPTGIGKTDLAFQLYDSTDIEIIGVDSVQVYKHLNIGSGKPNKELLRKYPHKLIDIIEPHENYSTGKFQKDCIKEIKTINTSNKTPLLVGGTMLYFKNLFYGLSKLPESTKDIRDQVEMECKKKGLEAMYEYLIKIDPKSASNIHPNDSQRIKRAIEVYRLTNKPISLWRQESYTEVHEDIKPFNVFQFAIKPKDKELHREKIAIRFKDMIDMGLIKEVEEILNIKQMSTDKPSMNSVGYKEVSDYLNGDLSFDEMIARGIIATRQLAKRQMTWLRSWNKIIWLEEDSVNNLKIILDSIKK

SEQ ID NO: 123959 - protein, 186 aa, Unknown
  Bacterial polypetide isolated from the Sargasso Sea
MDLKSKIILIYGPTASGKSNFAIKLAKKINGEIVNADSMQVYKELKILSARPLPKNYKNIKHHLYGFQNVNKNFSSGNWLKLVNKKILDIRKRKKIPILVGGTGLYFKAITEGLVNIPNIPIRIRSKIRFLHKKLGVKKFFSKLTKLDPVSKNFVKPTDTQRVIRAYEVKLFTKRSIYDWFKTTRS

SEQ ID NO: 123960 - protein, 303 aa, Unknown
  Bacterial polypetide isolated from the Sargasso Sea
MENKIILIAGPTASGKSSLANTLAKKIDGEIINADSIQIYKDLEILTARPKPKENDPNHHLYGFVNGDELWSVGKWINEAKKITQKILKKNSTPILVGGTGLYFKAMTDGLSPIPDINYEIRGRLKKELNIRGLEKLYGELKVIDIQAYESIDRNDQQRILRALEVFRGTGKKISDYWKLERIKVFEDNFIKIKLNTDREKLYQNCDDRCDHMFQLGVIEEVQSLIDKNYDDKAPILNAIGVSEIKEYLQKKINIDEVKDLIKFRTHQYAKRQITWLKHQMISWKSFSTQESDKIIDYFIKKL

SEQ ID NO: 123961 - protein, 302 aa, Unknown
  Bacterial polypetide isolated from the Sargasso Sea
MDSKSKIILIYGPTASGKSNFAIKLAKKINGEIVNADSMQVYKELKILSARPLPKDYKNINHHLYGFQSVKKNFSSGDWLKLVNKKILDIKKRNKTPILVGGTGLYFKAITEGLVNIPNIPIRLRSKIRLLHKKIGTKKFFSELVKLDPISKNFVKPTDTQRIIRAYEVKLFTKRSIYDWFKSTRSDYENDDFLKIYIDYPRVELIKRISDRTKDMIKNGAISEVKKFIRLKVPRVKTASKAIGIAEIREYLEKKIGISEVVEKISIKTRQYAKRQSTWGRGNMMDWNKIKSVDLNKFLKKI

SEQ ID NO: 123962 - protein, 175 aa, Unknown
  Bacterial polypetide isolated from the Sargasso Sea
MDLKSKIILIAGPTASGKSNFSLKLAKKINGEVINADSMQVYKQFQVLTARPIKKDIKKIKHHLYGFCDVKKNFSTGKWLKLSIKKIKEIRKKKKVPIIVGGTGLYFKALTDGLVKIPNIPIRLRNKIRIMQNQLGQKKFYKKLLMLDPLIKNKIEKNDIQRSIRAYEIKYHTKK

SEQ ID NO: 123963 - protein, 237 aa, Unknown
  Bacterial polypetide isolated from the Sargasso Sea
MLSKCKEKFSTGDWLKLIDQKISNLKKRKKVPIIVGGTGLYFKALTDGLVNIPSLPIKFRKKIRSLHKKIGPKRFFSRLIKLDPLVKHNLNYSDTQRCIRAYEVKSFTKTSIYHWFKKTKSNYEQKDFYKIYIDFPRNELLDRISLRAKEMIKKGAVLEVKRFIKIKVRKDKTAHKAIGINEIAQYIQKKIEINQVIEKISIKTRQYAKRQSTWARGNMQNWIKMKPTVLKKFLKKI

SEQ ID NO: 123964 - protein, 294 aa, Unknown
  Bacterial polypetide isolated from the Sargasso Sea
MDLRSKIILISGPTASGKSSFAIKVAKKVHGEIINSDSMQVYKELKILSARPDPKKYQKIKHHLYGFHNVTKNFSTGDWLKLVIKKIMEVKKRKKTPILVGGTGLYFKALTDGLVKVPHISLKLRNQIRDLQKKLGQKRFYEKLLKLDPSIRGKINPLDTQRSIRAYEVKKFTKKSLTEWFKNTKSNFVEDDFFKVYIDFPRQELIERINVRTKEMIENGAIKEVNDFIKLRVRKDKSANKAIGVNEITEYLKKQKDLNDTRDKIAIKTRQYAKRQSTWARGNMISWMKLKPQD

SEQ ID NO: 123965 - protein, 282 aa, Unknown
  Bacterial polypetide isolated from the Sargasso Sea
MILEEKPFLVVVTGPTSSGKSSLAIWLAEQLGGELICCDSMQVYCGMDIGTAKPTETERNRVSHHLFDLVNPDESYSVGRFVRESEEVINKLKLRKKIPILVGGTGMYLRSLLSGLSQIPEVSSNIKLQVKKWQKEKGTPACWQKLKEVDPEGAEKLHPNDTSRIMRALEVVISSGQPISSFQGNDAPIGPKYPFYGMICDRPRQELYDRINRKTLEMMDQGWIDEVRKLMARYPENLKPFQSIGYREIIQFLRGELESSDLVPLIQQRTRQYAKRQLTWSA

SEQ ID NO: 123966 - protein, 311 aa, Unknown
  Bacterial polypetide isolated from the Sargasso Sea
MTNRLNFQKKLVLIAGPTASGKSRLAIHLAKKIKGEIINADSMQVYKQFSVLTSRPSSSDLLKVKHHLYGFLSVKKYFSTGEWLSLAKDKINQCIKKKRIPILVGGTGLYFNAITKGMSKIPQIDSNLRYSIRLLHKKIGQKKFYKKLIAIDPSSKRIISETDTQRTLRAYEVKKSTKKSIFEWSSNTKSEFLDFEIKKIFINIPKEELLKNITKRTELMFRNKCTEEVKNFLKLKIDNTLSANKIIGVREISNYLDGIKGKTETIDLIKIRTRQYAKRQNTWSRGHMATWKKLYSKDFSILFKKVLKETT

SEQ ID NO: 123967 - protein, 104 aa, Unknown
  Bacterial polypetide isolated from the Sargasso Sea
MKKKKIIIVVSDYYNDLSNRITENIIKRIKTKYIFKIVKVPGAFEIPVTISRKIKNFDAAIAVGCIIKGKTPHFDHIARASIDGIMRVSLDNKKPIGNCILTCL

SEQ ID NO: 123968 - protein, 160 aa, Unknown
  Bacterial polypetide isolated from the Sargasso Sea
MSTKKAGKNLTRSFKIINPEKIKIACVISEWHSEITENLFIGVKKKLMMHGLIEKNIHEIHVPGSFELIFGTKTLINKDYDAIISIGCIIKGETKHFDFISDAVIKGIKDLNVLSDTPIILCVTTDNNIQQSIDRSGGKYGNKGEDSAEAALKMILINSK

SEQ ID NO: 123969 - protein, 220 aa, Unknown
  Bacterial polypetide isolated from the Sargasso Sea
MLVSTFAIANEVNIFNARHYKADAELYDKFTAATGIKVNLINGKSGALEKRMIEEGTDSSADLYITADAGRCGAFQAKGMTQSGLTSATIKSSVPKNFRTSHWVGVAKRARIIYYSPERVTGAELSGMSYEGLADPKWKGRLVIRKSSNIYNKSLVASLIANNGKKATAEWAKGVVANMARPSEGNDRAQIMAVAAGEADIAVANTYYLALMLSGNKGAE

SEQ ID NO: 123970 - protein, 148 aa, Unknown
  Bacterial polypetide isolated from the Sargasso Sea
STGNDRAQIMAVAAGEADIAVANTYYLALMLSGNKGAEQQEAAKKVKAFFPNQDGRGTHMNISCAALVKGAPNKANAIALVDFLLSPEAQEHFTNNTFEFPMIAGVSPSPLVVNNLGLDFKQDLKTKVSSYGKHQAAALEVMTAAGWK

SEQ ID NO: 123971 - protein, 270 aa, Unknown
  Bacterial polypetide isolated from the Sargasso Sea
MKKVTIISLFVSLIVSSFAFANEVNIFNARHYKADNELYSKFTNKTGIKVNLINGKASALEKRMIEEGTDSSADLYITADAGRCGAFKTKGMTQSGLVSPTIKSSVPKNFRTTHWVGVAKRARIIYYSPERVSGAELSGLTYEDLADPKWKGRLVIRKSSNIYNKSLVASLIENNGKKAAAEWSKGVVSNMARTPKGNDRAQIMAVAAGEADIAVANTYYLALMLSGNKGAEQQAAAKKVKAFFPNQNDRGTHMNISCAALVKGAPNKAN

SEQ ID NO: 123972 - protein, 153 aa, Unknown
  Bacterial polypetide isolated from the Sargasso Sea
MKGLDSNQISQESKKKVYAITYTSWNSEIVGSLLDEVTKELLRNGVDEKNILSKEVPGAFELPLASKVYALKEKVDVVIALGAIIRGDTPHFDYISKACIEGLMTASLETKKPIVCGVLTTDDIAQAQKRSDPNQMNKGAEFAVTAMSMAGLD

SEQ ID NO: 123973 - protein, 142 aa, Unknown
  Bacterial polypetide isolated from the Sargasso Sea
WLWYKNYKTRINLMKKKYLIVVADYYKDISEGLIKSALKIISKKNIIKIIKVPGAFEIPVTISKNIKKFDGFLALGCVIKGQTPHFDFISQASTDAIMKLSIDSKKPIGNGIITCLNMTQARARRKKGAEAAKAVISVLSQK

SEQ ID NO: 123974 - protein, 149 aa, Unknown
  Bacterial polypetide isolated from the Sargasso Sea
MATKKNNIHIAIVASNFNRDIVDRLYSGAISTLEKNGINEEKVKVVRVPGAFEIPVTVKSLLDKKQYNAIITLGVIIRGETPHFEYISNACAHGISQLAINSGTPIIFGVLTVDNKTQAEKRSNIDPMEKNKGSEAAQAALDMVDLDWL

SEQ ID NO: 123975 - protein, 250 aa, Unknown
  Bacterial polypetide isolated from the Sargasso Sea
TQSGLVSPTIKSSVPKNFRTTHWVGVAKRARIIYYSPERVSGAELSGLTYEGLADPKWKGRLVIRKSSNIYNKSLVASLIENNGKKVAAEWSKGVVANMARTPKGNDRAQIMAVAAGEADIAVANTYYLALMLSGNKGAEQQAAAKKVKAFFPNQNDRGTHMNISCAALVKGAPNKANAIALVDFLLSPEAQEHFTNNTFEFPMIAGVSPNPLVVNNLGLDFKQDLTTKVSSYGKNQAAALEVMTAAGWK

SEQ ID NO: 123976 - protein, 144 aa, Unknown
  Bacterial polypetide isolated from the Sargasso Sea
MKYWLIKTEPEEWSWQQQVKSGNKGAEWSGVRNFQAAKNLREMKIGDKCFFYHTGKSKSIMGIVVIAKEAFLDKSDKTRKFVSVIVKALYPLKREVSLKEIKKNKAFRDFSLVKQSRLSVMSVSLKHWKKICKMGRVLYLGVFL

SEQ ID NO: 123977 - protein, 95 aa, Unknown
  Bacterial polypetide isolated from the Sargasso Sea
MKIKICIIMSRYNKDITNKLFSSAKKVLQKELKKKIYIDLIEVPGAFEIPVSISRVVKKYDGFIAIGCIIKGETANFNLISSAITNAIMQISINE

SEQ ID NO: 123978 - protein, 108 aa, Unknown
  Bacterial polypetide isolated from the Sargasso Sea
MNKKYLIVVADYYKDIAEGLIKSALKIIPKKNIIKIIKVPGAFEIPVTISKNLKKFDGFLALGCVIKGQTPHFDFISQASTDAIMKLSIDSKKPIGNGIITCLNMTQA

SEQ ID NO: 123979 - protein, 106 aa, Unknown
  Bacterial polypetide isolated from the Sargasso Sea
NIHEIHVPGSFELIFGTKTLINKDYDAIISIGCIIKGETKHFDFISDAVINGIKDLNILSNIPIILCVTTDNNIQQSIDRSGGKYGNKGEDSAEAALKMILISSKK

SEQ ID NO: 123980 - protein, 293 aa, Unknown
  Bacterial polypetide isolated from the Sargasso Sea
MKKVTIISLFVSLIASSFAIANEVNIFNARHYKADNELYSKFTNKTGIKVNLINGKAGALEKRMIEEGTDSSADLYITADAGRCGAFKAKGMTQSGLVSPTIKSSVPKNFRTTHWVGVAKRARIIYYSPERVSGAELSGLTYEGLADPKWKGRLVIRKSSNIYNKSLVASLIENNGKKAAAEWSKGVVANMARTPKGNDRAQIMAVAAGEADIAVANTYYLALMLSGNKGAEQQAAAKKVKAFFPNQNDRGTHMNISCAALIKGAPNKANAIALVDFLLSPEAQEHFTNNTFE

SEQ ID NO: 123981 - protein, 310 aa, Unknown
  Bacterial polypetide isolated from the Sargasso Sea
DSDSLTKSAMTMTITTDEVLASPPTVSIFDESYGSGSTYGAHASDSDLNNLGAAASVTVTLSDTTIVDTDKDGSFIDELVLAGATGVHPVTAATLVNLEITAASNSSDDASVTIKNNNSAALANDSADKIRISGNFDAGAGGTVATSTTVAAEGTVTAVAQDSKTYKATFSGSAFSDAAANDSKAVVVSATDASTSPNTGTVGTRDQGSASVYKFRLDKTAPVLKNDPDGDGAVGSTTTLPRPYVIFEFTDNSNVTVVSASFGGDDVLASLATTNNKKYFMVPSADLTAKTYVIKAKGTDLAGNKGAEGT

SEQ ID NO: 123982 - protein, 266 aa, Unknown
  Bacterial polypetide isolated from the Sargasso Sea
MKKVTIISLFVSLIVSSFAIANEVNIFNARHYKADNELYSKFTDKTGIKVNLINGKAGALEKRMIEEGSDSSADLYITADAGRCGAFKAKGMTQSGLVSPTIKSSVPKNFRTTHWVGVAKRARIIYYSPERVSGAELSGLTYEGLADPKWKGRLVIRKSSNIYNKSLVASLIENNGKKAAAEWSKGVVANMARTPKGNDRAQIMAVAAGEADIAVANTYYLALMLSGNKGAEQQAAAKKVKAFFPNQNDRGTHMNISCAALIKGAP

SEQ ID NO: 123983 - protein, 249 aa, Unknown
  Bacterial polypetide isolated from the Sargasso Sea
QGGLISPTIKNSVPKNFRTSHWVGVAKRARIVYYAPERVSGAELSGLTYESLADPKWKGRIAIRASSNIYNKSLVASLVKNNGKKATAEWAKGVVANMARDPKGNDRAQIMAVAAGEADIAVANTYYLALMLSGNKGAEQQAAAKKVKAYFPNQNDRGTHMNISCAALVKGAPNKANAIALVDYLLSPEAQEHFTNNTFEFPMIAGVSPNPLVVNNLGLDFKQDLKTKVSSYGAKQADALEVMTAAGWK

SEQ ID NO: 123984 - protein, 122 aa, Unknown
  Bacterial polypetide isolated from the Sargasso Sea
LALMLSGNKGAEQQEAAKKVKAFFPNQDGRGTHMNISCAALVKGAPNKANAIALVDYLLSPEAQEHFTNNTFEFPMIAGVSPSPLVVNNLGLDFKQDLKTKVSTYGKNQAAALEVMTAAGWK

SEQ ID NO: 123985 - protein, 212 aa, Unknown
  Bacterial polypetide isolated from the Sargasso Sea
MFTGIIEELGDMHSIRSHGDGCRLKINAHTILSDVSIGDSISVNGCCLTVVEYENKSSDSWFAVDVVPESLSLTTMGKLAEREIVNLERSMSANGRFGGHVVQGHVDAIAEVLHIHDHEDGSKRLTFNIPKDVSGQIVRKGSVALDGISLTVASTNQEQGTFDIAVIPHTLEVTTLGKKIVGDQVNVEADLFARYIAGIINSDSYVALKGKK

SEQ ID NO: 123986 - protein, 241 aa, Unknown
  Bacterial polypetide isolated from the Sargasso Sea
MSLFVSAFAVANEVNIFNARHYKADAEMYDKFTAATGIKVNLINGKSGALEKRIAEEGVDSSADLYITADAGRCGAMDAKGLLQGGLSSKTIKASVPKNFRTNKWVGVAKRARIIYYSPERVSGAELSGLTYEGLADPKWKGRLVIRKSSNIYNKSLVASLIENNGKKATAEWAKGVVANMAREPKGNDRAQIMAVAAGEADIAVANTYYLALMLSGNKGAEQQAAAKKVKAFFPNQNDRG

SEQ ID NO: 123987 - protein, 118 aa, Unknown
  Bacterial polypetide isolated from the Sargasso Sea
IADISVRWVPGAFEIPFTCQEVIDKTHVDAIIALGSVVKGGTPHFDFVAGECIRGIQAVSLSTKTPISLGVLTTNTYEQALERSDSSYVDHDGSSGDKGTSAAEAAITMIRLVRSLTG

SEQ ID NO: 123988 - protein, 181 aa, Unknown
  Bacterial polypetide isolated from the Sargasso Sea
IYNKSLVASLIENNGKKATAAWAKGVVANMARESTGNDRAQIMAVAAGEADIAVANTYYLALMLSGNKGAEQQEAAKKVKAFFPNQDGRGTHMNISCAALVKGAPNKENAIALVDYLLSPSAQEHFTNNTFEFPMIAGVSPSPLVVNNLGLDFKQDLKTKVSSYGKNQAAALEVMTAAGWK

SEQ ID NO: 123989 - protein, 132 aa, Unknown
  Bacterial polypetide isolated from the Sargasso Sea
MKKKVCIVLSTYNYKITSKLYSSAVKELKKLNLKKVYLVKVPGAFEIPVSISKLVKKYDGFIAIGCVIKGETHNFDLISKAITNGIMKISIKEKKPIGNSILTLFNKKQSYKRYNRGKEAAKAVYEVLKIDT

SEQ ID NO: 123990 - protein, 233 aa, Unknown
  Bacterial polypetide isolated from the Sargasso Sea
MLSTFAIANEVNIFNARHYKADAELYGKFTAATGIKVNLINGKSGALEKRMIEEGADSSADLYITADAGRCGAFQAKGMTQSGLVSSTIKSSVPKNFRTTHWVGVAKRARIIYYSPERVTGAELSGMSYEGLADPKWKGRLVIRKSSNIYNKSLVASLIDNNGKKATADWAKGVVANMARESTGNDRAQIMAVAAGEADIAVANTYYLALMLSGNKGAEQQAAAKKVKAFFPN

SEQ ID NO: 123991 - protein, 120 aa, Unknown
  Bacterial polypetide isolated from the Sargasso Sea
LCYLGNKGAEQQAAAKKVKAFFPNQNDRGTHMNISCAAMVKGAPNKSNAIALVEYLLTPEAQKHFTNNTFEFPMIEGVSPNPLVVHNLGLDFKQDLKTKVSSYGAKQTDALEVMTAAGWK

SEQ ID NO: 123992 - protein, 315 aa, Unknown
  Bacterial polypetide isolated from the Sargasso Sea
ASHVSYVRPYEISIEISELELRRYGITLNQVSQAIRSSSFDMPGGTIKTNNGEILIRTTGQAYWGAEFEEVVVVTKKDGTRVTLGDIATIRDTFEEGDLVAEFNGVRGVVVNVSQVGKEDLMQIARDTKVVVDKFRASLPQEISLDIWIDTSEELKERMNVLLKNAGGGLILVLIILTLFLKFKIAMWVAIGIPVALLGTLAFLPLFDMTISTMTVMAFILVLGIVVDDAIVVGERIYGHEQLGKDPLKAAVEGTWEVSTPVIFGVLTTIAAFLPLVISEGRMTPFFAPIGYVVIIALACSNIESQLILPSHLAH

SEQ ID NO: 123993 - protein, 96 aa, Unknown
  Bacterial polypetide isolated from the Sargasso Sea
MDKSSIKICIVASQFNELIVDSLIKSSIQALEENGYQSDPEIFKVPGAYELPLAVKNVAEKKKPDGIIALGAIVRGATPHFDYIASETAAGLTKIS

SEQ ID NO: 123994 - protein, 141 aa, Unknown
  Bacterial polypetide isolated from the Sargasso Sea
MGTNLNQEPDHYIEPNQSIIGSLNGTNLSIGIVCAQFNQFITKSLLMGAINGLTEHGVTKDSIFTHWVPGAFEVPLITDLILPKYDAVIAIACVIRGDTPHFDYVCDGITSGLTNAINTHQKPTIFCVITTNTAEQAEERS

SEQ ID NO: 123995 - protein, 270 aa, Unknown
  Bacterial polypetide isolated from the Sargasso Sea
SALEKRMIEEGTDSSADLYITADAGRCGAFKAKGMTQSGLVSPTIKSSVPKNFRTTHWVGVAKRARIIYYSPERVSGAELSGLTYEGLADPKWKGRLVIRKSSNIYNKSLVASLIENNGKKAAAEWSKGVVANMARTPKGNDRAQIMAVAAGEADIAVANTYYLALMLSGNKGAEQQEAAKKVKAFFPNQNDRGTHMNISCAALVKGAPNKANAIALVDFLLSPEAQEHFTNNTFEFPMIAGVSPNPLVVNNLGLDFKQDLTTKVSSYGK

SEQ ID NO: 123996 - protein, 271 aa, Unknown
  Bacterial polypetide isolated from the Sargasso Sea
MRFNGKRCAVVHVARTGDQNALKIEHTVKDYLAKLMPQLPEGVSINIWNNRADIIKKRLVTLNDSAFVGIGCIIVLLGLFLRPGVAFWVCLGVPIAFMGAFAMMPYLGVTINLFTLYGFILVLGILVDDAIVTGERIHAFQQRGGTGLEGAIKGAQEVATPVIFGVLTTAIAFVPLLLVEGRRGQIFAQIPLVVIPCLLFSLVESKLILPAHLSHLSTGKPPRNKLSTLARMQRWCADSLEWCIDRIYRPTLGMASVHRYATLAIFVGIAV

SEQ ID NO: 123997 - protein, 78 aa, Unknown
  Bacterial polypetide isolated from the Sargasso Sea
MKKKILIVVANYYENIARSLLNSAKNKIKNKCSIKVIYVPGAFEIPVTISKNLNKFDGFIALGCVIKGQTPHFDFISK

SEQ ID NO: 123998 - protein, 321 aa, Unknown
  Bacterial polypetide isolated from the Sargasso Sea
NLDARLNGVNAAIIDVMRVGDEDIITSAAQVREFMASANFNLPAGMELEIVSDSSESTKTRIDTVAKNAYTGLILVLVILAMFLRFKIAIWVAAGIPIAILGALIAFPPMGLTISSLTVMGFILVLGIVVDDAIVVGERVHAYEQKGLSKSAAAIEGTVEVSIPVIFGVLTTIAAFLPLLVDDTQFSSFSKLIGGTVVFCLIASLLESQLILPGHIAHRKTRGYFMEGSRLVNAWQSFQSRIASALENFAELGYKRALTVVLKYRYAAWATATGVIVVVLALLWSGRVVFQFMPSIEGDRIWSTITMPAGVPASLTQEAVG

SEQ ID NO: 123999 - protein, 194 aa, Unknown
  Bacterial polypetide isolated from the Sargasso Sea
KWKGRLVIRKSSNIYNKSLVASLIENNGKKAAAEWSKGVVANMARTPKGNDRAQIMAVAAGEADIAVANTYYLALMLSGNKGAEQQEAAKKVKAFFPNQNDRGTHMNISCAALVKGAPNKANAIALVDFLLSPEAQEHFTNNTFEFPMIAGVSPNPLVVNNLGLDFKQDLTTKVSSYGKNQAAALEVMTSAGWK

SEQ ID NO: 124000 - protein, 129 aa, Unknown
  Bacterial polypetide isolated from the Sargasso Sea
MKKKYLIVVADYYKDISDGLITSALKIIPKKNIIKIIKVPGAFEIPVTISKNLKKFDGFLALGCVIKGQTPHFDFISQSSTDAIMKLSIESKKPIGNGIITCLNMAQARARRKKGAEAAEAVISVLSQK

SEQ ID NO: 124001 - protein, 93 aa, Unknown
  Bacterial polypetide isolated from the Sargasso Sea
MDKSSIKICIVASQFNELIVDSLIKSSIQTLEKNGYQSDPETFKVPGAYELPLAVKNVAEKKKPDGIIALGAIVRGATPHFDYIATETAAGLT

SEQ ID NO: 124002 - protein, 97 aa, Unknown
  Bacterial polypetide isolated from the Sargasso Sea
FELPIAAKTLMKKKSYDVVIALGAVIRGETSHYDVVISEASKGISQVSNENNVPIIFGVLTTDTMQQALERAGIKNNLGWNYALQAIEMGSLIKNLN

SEQ ID NO: 124003 - protein, 182 aa, Unknown
  Bacterial polypetide isolated from the Sargasso Sea
NIYNKSLVASLIENNGKKATAAWAKGVVANMARESTGNDRAQIMAVAAGEADIAVANTYYLALMLSGNKGAEQQEAAKKVKAFFPNQQDRGTHMNISCAALVKGAPNKENAVALVDFLLSPESQEHFTNNTFEFPMIAGVSPSPLVVNNLGLDFNQDLKTKVSSYGKYQADALEVMTAAGWK

SEQ ID NO: 124004 - protein, 94 aa, Unknown
  Bacterial polypetide isolated from the Sargasso Sea
MAIFEGSFTNASTLKVGIVIARFNDLITNKILSGCLDCLKRHGLDTSELSNQVDIVWVPGSFELPIAAKTLMKKKSYDVVIALGAVIRGETSPL

SEQ ID NO: 124005 - protein, 152 aa, Unknown
  Bacterial polypetide isolated from the Sargasso Sea
MIAIIKSEFNKEIVDGLLEGCKRALDTKEVKLKFRKSKVFEVITVPGAFELPAAAKSCLSNHNVGGSYFSSKYKAIITLGCVIKGETDHYDYICQAVTQGIMDVSIQSQVPILFGVLTCQNAELAFERSRDNDSNKGYEVGLAALELLNLSK

SEQ ID NO: 124006 - protein, 148 aa, Unknown
  Bacterial polypetide isolated from the Sargasso Sea
MRVAIVVAEYHHAMTSELLRAATARLAEHGVSLSSQDVTWVPGAVELPIAAQRYALTGRFDAIIVFGVVIEGETAHFTYVCQQVSAGVSQVSLTHNIPVLFGVLTTPSEALTWERLGGNSGHMGIEAADGAVNMVNALRAIDGESAGD

SEQ ID NO: 124007 - protein, 249 aa, Unknown
  Bacterial polypetide isolated from the Sargasso Sea
DTMKKVTIISLFVSLLVSSFAIANEVNIFNARHYKADNELYNKFTNKTGIKVNLINGKAGALEKRMIEEGTDSSADLYITADAGRCGAFKAKGMTQSGLVSSTIKSSVPKNFRTTHWVGVAKRARIIYYSPERVSGAELSGLTYEGLADPKWKGRLVIRKSSNIYNKSLVASLIENNGKKAAAEWSKGVVANMARTPKGNDRAQIMAVAAGEADIAVANTYYLALMLSGNKGAEQQAAAKKVKAFFPNQ

SEQ ID NO: 124008 - protein, 137 aa, Unknown
  Bacterial polypetide isolated from the Sargasso Sea
MQYWLIKTEPEDWSWEEQVKCGNKGAEWNGVRNFQATKNLKNMKIGDKCFFYHTGKIKSIIGIAKVTKDAFLDKTDKTKKFVSVVVKALYPLKREVSLQEIKKNKEFRDFSLVRQSRLSVMAVDLKYWKKICKMGKV

SEQ ID NO: 124009 - protein, 153 aa, Unknown
  Bacterial polypetide isolated from the Sargasso Sea
MNQIEGDLIATDLKIAFVVSRFNEFVCERLLEGALDSLVRHGGNKDEVTVLRVPGAFELPLAAKKMAESGNCDAIVCLGVVIRGETSHYDYICANASSGIASVSLETGIPVSFGLLTTETLEQAIERSGSKAGNHGRYATECAIEMIRLIKQI

SEQ ID NO: 124010 - protein, 126 aa, Unknown
  Bacterial polypetide isolated from the Sargasso Sea
MTLSDFDLVIRGGTIVNAAEISKCEVGITDGRIVALGEALGTGKQEIDAAGKFVMPGGIDSHCHIDQRSSGGGRNAETFLSGTRSAACGGTTTIICFAAQEKGELLTPVVEEYHKRAKQSCIDYSF

SEQ ID NO: 124011 - protein, 119 aa, Unknown
  Bacterial polypetide isolated from the Sargasso Sea
MRTTKELLKNGVDKKNILVQEVPGAFELPLASKKCALKENIDIVIALGAIIRGDTPHFDYISKACIDGLMSVSLETKKPIICGVLTTDDESQANKRADPDQMNKGSEFALTAMSMVDPD

SEQ ID NO: 124012 - protein, 72 aa, Unknown
  Bacterial polypetide isolated from the Sargasso Sea
IRGETPHFDYVAANAANGIASVSLDSGIPVSFGILTTDTIEQAIERSGTKAGNQGRNATLTAIEMASLLAKI

SEQ ID NO: 124013 - protein, 279 aa, Unknown
  Bacterial polypetide isolated from the Sargasso Sea
MKKITIITVLFAIWTSISFANEVNIFNARHYKADAELYNKFTALTGIKVNLINGKSGALEKRMIEEGPDSSADLYITADAGRCGAFQAKGMTQGGLTSSTIKSSVPKNFRTSHWVGVAKRARIIYYSPERVTGAELSGMTYEGLADPKWKGRLVIRKSSNIYNKSLVASLIANNGKKATAEWAKGVVANMARPSEGNDRAQIMAVAAGEADIAVANTYYLALMLSGNKGAEQQEAAKKVKAFFPNQDGRGTHMNISCAALVKGAPNKANAIALVDYLCH

SEQ ID NO: 124014 - protein, 139 aa, Unknown
  Bacterial polypetide isolated from the Sargasso Sea
MFAIVKSNFNTKVTSGLLNGCLDALNKQGFNDQQIKIFEVPGAFEIPFAINKILKSRADFDAIIALGAIIKGETDHYHYISDSVTKGIMQITQNSEIPIIFGVLTCQNSQLAFLRSNNDKKNKGFEAGEAAIEMLNQDS

SEQ ID NO: 124015 - protein, 268 aa, Unknown
  Bacterial polypetide isolated from the Sargasso Sea
MKKVTIISLFVSLIVSSFAFANEVNIFNARHYKADNELYSKFTNKTGIKVNLINGKASALEKRMIEEGTDSSADLYITADAGRCGAFKAKGMTQSGLVSPTIKSSVPKNFRTTHWVGVAKRARIIYYSPERVSGAELSGLTYEGLADPKWKGRLVIRKSSNIYNKSLVASLIENNGKKAAAEWSKGVVSNMARTPKGNDRAQIMAVAAGEADIAVANTYYLALMLSGNKGAEQQAAAKKVKAFFPNQNDRGTHMNISCAALVKGAPNK

SEQ ID NO: 124016 - protein, 192 aa, Unknown
  Bacterial polypetide isolated from the Sargasso Sea
KGRLVIRKSSNIYNKSLVASLIENNGKKAAAEWSKGVVSNMARTPKGNDRAQIMAVAAGEADIAVANTYYLALMLSGNKGAEQQAAAKKVKAFFPNQNDRGTHMNISCAALVKGAPNKANAIALVDFLLSPEAQEHFTNNTFEFPMIAGVSPNPLVVNNLGLDFKQDLTTKVSSYGKNQAAALEVMTAAGWK

SEQ ID NO: 124017 - protein, 297 aa, Unknown
  Bacterial polypetide isolated from the Sargasso Sea
NIFNARHYKADAELYDKFTAATGIKVNLINGKSGALEKRMIEEGSDSAADLYITADAGRCGAFQAKGMTQSGLTSSTIKSSVPKNFRTSHWVGVAKRARIIYYSPERVTGAELSGMTYEGLADPKWNGRLVIRKSSNIYNKSLVASLIANNGKKATAAWAKGVVANMARESTGNDRAQIMAVAAGEADIAVANTYYLALMLSGNKGAEQQEAAKKVKAFFPNQDGRGTHMNISCAALVKGAPNKANAIALVDYLLSPSAQEHFTNNTFEFPMISGVSPSPLVVNNLGLDFKQDLTTK

SEQ ID NO: 124018 - protein, 152 aa, Unknown
  Bacterial polypetide isolated from the Sargasso Sea
MARESTGNDRAQIMAVAAGEADIAVANTYYLALMLSGNKGAEQQEAAKKVKAFFPNQDGRGTHMNISCAALVKGAPNKANAIALVDFLLSAEAQEHFTNNTFEFPMIAGVSPSPLVVNNLGLDFKQDLKTKVSSYGKHQAAALEVMTAAGWK

SEQ ID NO: 124019 - protein, 227 aa, Unknown
  Bacterial polypetide isolated from the Sargasso Sea
MLVANSVFANEVNVFSARHYDSDVQLYKKFTSKTGIKVNVVSGKDKALQKRIKEEGKDSKADIYITADAGRLGAFQSEGMFQKGASSAAIKKVVPANFRSPYWVGIAKRARIIYYNPKTVDPSWNMSYEDLADPKYKGRVVIRKSSNIYNQSLVASLIKNNGEKKTAAWAKGMVNNFARKPTGNDRAQILAVAAGEADWAVANTYYLALMLSGNKGAEQQAAAKKVM

SEQ ID NO: 124020 - protein, 274 aa, Unknown
  Bacterial polypetide isolated from the Sargasso Sea
KDSSADLYITADAGRCGAFKAKGMTQSGLVSSTIKSSVPKNFRTTHWVGVAKRARIIYYSPERVSGAELSGLTYEGLADPKWKGRLVIRKSSNIYNKSLVASLIENNGKKAAAEWSKGVVANMARTPKGNDRAQIMAVAAGEADIAVANTYYLALMLSGNKGAEQQAAAKKVKAFFPNQNDRGTHMNISCAALVIGAPNKANAIALVDFLLSPEAQEHFTNNTFEFPMIAGVSPNPLVVNNLGLDFKQDLTTKVSSYGKNQAAALEVMTAAGWK

SEQ ID NO: 124021 - protein, 85 aa, Unknown
  Bacterial polypetide isolated from the Sargasso Sea
MTLKICIVSSKYNEKIIDGIYKNAVAELNAVKIKKFDSISVPGAFEIPVAISKIIKKYDGVIAIGCIIKGETPNFDFISKSITDG

SEQ ID NO: 124022 - protein, 82 aa, Unknown
  Bacterial polypetide isolated from the Sargasso Sea
MKTKICIVVSTYNEDITKKLYSNAKEELEKSGIKRIDTIEVPGAFEIPVVISKLSKKYDGFIAIGCIIKGETANFDLISNAI

SEQ ID NO: 124023 - protein, 143 aa, Unknown
  Bacterial polypetide isolated from the Sargasso Sea
KAARIAIVASVYNAEYVDSMIDAALETLAGSGVDDVELIRVPGAFEIPVVAAKLAQRKRLRPEAVMCLGVILRGKTTHAEHIGQSVTQSLAQIATDTTVPMIHEVLLLENKAQAKERCLSPKTNRGFEAAHTALIMAGLIREI

SEQ ID NO: 124024 - protein, 104 aa, Unknown
  Bacterial polypetide isolated from the Sargasso Sea
NILSKEVPGAFELPLASKVYALKEKVDVVIALGAIIRGDTPHFDYISKACIEGLMTASLETKKPIICGVLTTDDIAQARKRSDPNEMNKGAEFAVSAMSMAGLD

SEQ ID NO: 124025 - protein, 96 aa, Unknown
  Bacterial polypetide isolated from the Sargasso Sea
MAIFEGSFTNASTLKVGIVIARFNDLITNKILSGCLDCLKRHGLDTSELSNQVDIVWVPGSFELPIAAKTLMKKKSYDVVIALGAVIRGETSHYDV

SEQ ID NO: 124026 - protein, 237 aa, Unknown
  Bacterial polypetide isolated from the Sargasso Sea
MIISTFATANEVNIFNARHYKADAELYGKFTAATGIKVNLINGKSGALEKRMIEEGSDSAADLYITADAGRCGAFQAKGMTQSGLTSSTIKSSVPKNFRTSHWVGVAKRARIIYYSPERVTGAELSGMTYEGLADPKWKGRLVIRKSSNIYNKSLVASLIANNGKKATAEWAKGVVANMARESTGNDRAQIMAVAAGEADIAVANTYYLALMLSGNKGAEQQEAAKKVKAFFSKSRR

SEQ ID NO: 124027 - protein, 342 aa, Unknown
  Bacterial polypetide isolated from the Sargasso Sea
MKKISIFALIITLLGSTIVTANEVNIFNARHYKADAELYGKFTAATGIKVNLINGKSGALEKRMIEEGADSAADLYITADAGRCGAFQSKGMTQSGLTSSTIKSSVPKNFRTSHWVGVAKRARIIYYSPERVTGAELSGMTYEGLADPKWKGRLVIRKSSNIYNKSLVASLIENNGKKATAEWAKGVVANMARDSKGNDRAQIMAVAAGEADIAVANTYYLALMLSGNKGAEQQAAAKKVKAFFPNQQDRGTHMNISCAALVKGAPNKANAIALVDYLLSAEAQEHFTNNTFEFPMIAGVSPNPLVVNNLGLDFKQDLTTKVSSYGKKQADALEVMTAAGWK

SEQ ID NO: 124028 - protein, 232 aa, Unknown
  Bacterial polypetide isolated from the Sargasso Sea
RTTHWVGVAKRARIIYYSPERVTGAELSGMTYEGLADSKWKGRLVIRKSSNIYNKSLVASLIANNGKKATAEWAKGVVANMARESTGNDRAQIMAVAAGEADIAVANTYYLALMLSGNKGAEQQAAAKKVKAFFPNQDGRGTHMNISCAALVKGAPNKANAIALVDYLLSPEAQEHFTNNTFEFPMIEGVSPSPLVVNNLGLDFKQDLKTKVSSYGKHQAAALEVMTAAGWK

SEQ ID NO: 124029 - protein, 220 aa, Unknown
  Bacterial polypetide isolated from the Sargasso Sea
RIIYYSPERVSGAELSGLTYEGLADPRWKGRLVIRKSSNIYNKSLVSSLIENNGKKAAAEWSKGVVANMARTPKGNDRAQIMAVAAGEADIAVANTYYLALMLSGNKGAEQQAAAKKVKAFFPNQNDRGTHMNISCAALIKGAPNKANAIALVDFLLSPEAQEHFTNNTFEFPMIAGVSPNPLVVNNLGLDFKQDLTTKVSSYGKNQAAALEVMTAAGWK

SEQ ID NO: 124030 - protein, 342 aa, Unknown
  Bacterial polypetide isolated from the Sargasso Sea
MKKVTIISLFVSLIVSSFAFANEVNIFNARHYKADNELYSKFTNKTGIKVNLINGKASALEKRMIEEGTDSSADLYITADAGRCGAFKAKGMTQSGLVSPTIKSSVPKNFRTTHWVGVAKRARIIYYSPERVSGAELSGLTYEGLADPKWKGRLVIRKSSNIYNKSLVASLIENNGKKAAAEWSKRVVSNMARTPKGNDRAQIMAVAAGEADIAVANTYYLALMLSGNKGAEQQAAAKKVKAFFPNQNDRGTHMNISCAALVKGAPNKANAIALVDFLLSPEAQEHFTNNTFEFPMIAGVSPNPLVVNNLGLDFKQDLTTKVSSYGKNQAAALEVMTAAGWK

SEQ ID NO: 124031 - protein, 549 aa, Unknown
  Bacterial polypetide isolated from the Sargasso Sea
AVLSIDVKGIITNCNDIALKTFGYTRSELIAQSVEILMPEPYASNHAFYMRNYMETGVGKIIGVGRQLPAKRKNGDIFQMELSLSESFDQGERGFIGVIRDISERIEAQDTIYNLAYTDSVTRLRNQQWFHQRFKDLMLRASLKQEYIHILLLDIDNMAQINTRFGFGNGNYAIRKIAEQLLFVIGHDYEIFKYGGDSFVVLSKKTYIKEDLHKFDANLVESALLSPRHFDIVINSVKWSLTASLGSAIFNPQGQSFESIINVIEQAVKRAKRSAPFGLCHISEDGFKEFDRYLDIKSKLEQAIERDELSIVLQPQVTHDGTVSSFEALVRWYSKELGPVSPSEFIPIAEESYAICEIGDIVLRKTLSVISNFVKSGLKTSIAINISARQIVVPDFINSLLSRVNQYGIPPHMLMLELTETALVVDIELVKETMLELARFGFRFSIDDFGTGYSSLAYLKVLPISELKIDKYFVDDIGKDFDGKAAQIVDAIIEMAKALNVTCIAEGVESEEQLKYLIGKGCGKFQGYYFSRPEPEAHWAGINENTKLP

SEQ ID NO: 124032 - protein, 237 aa, Unknown
  Bacterial polypetide isolated from the Sargasso Sea
MKKITTISLILSLFVSTFVIANEVNIFNARHYKADAELYGKFTAATGIKVNLINGKSGALEKRMIEEGADSAADLYITADAGRCGAFQAKGMTQNGLTSATIKSSVPKNFRTSHWVGVAKRARIIYYSPERVTGAELSGMTYEGLADPKWKGRLVIRKSSNIYNKSLVASLIANNGKKATAEWAKGVVANMARESTGNDRAQIMAVAAGEADIAVANTYYLALMLSGNKGAEQQAGC

SEQ ID NO: 124033 - protein, 171 aa, Unknown
  Bacterial polypetide isolated from the Sargasso Sea
MEIGQYQPNLEGDGLRIGIVQSRFNEPVCNGLADACVEELERLGVTGEDVLLVSVPGALEIPLALQKLAESGQFDALIALGAVIRGETYHFELVSNESGAGITRIGLDFNLPIANAVLTTENDEQAVARMTEKGRDAARVAVEMANLTMALDQLGDDDEDEEEEDDEEERA

SEQ ID NO: 124034 - protein, 156 aa, Unknown
  Bacterial polypetide isolated from the Sargasso Sea
MSKKGLSEDITITKTSSGSFYGIISTNWNSHIVDVLKENAISALLENGVDESHIIQRVVPGAFELPVAAKNLCPDVDAVIALGAIIKGETPHFDFISQACSIGLMQASLETSKPVLFGVLTTENEQQAKDRASAKKQNKGRELALSALQMVELLRK

SEQ ID NO: 124035 - protein, 342 aa, Unknown
  Bacterial polypetide isolated from the Sargasso Sea
MKKLSILALALSLLVSTFVIANEVNIFNARHYKADAELYGKFTAATGIKVNLINGKSGALEKRMIEEGADSSADLYITADAGRCGAFQAKGMTQSGLTSATIKSSVPKNFRTPHWVGVAKRARIIYYSPERVTGAELSGMTYEGLADPKWKGRLVIRKSSNIYNKSLVASLIANNGKMATAEWAKGVVANMARESTGNDRAQIMAVAAGEADIAVANTYYLALMLSGNKGAEQQAAAKKVKAFFPNQDGRGTHMNISCAALVKGAPNKANAIALVDFLLSPESQEHFTNNTFEFPMIAGVSPSPLVVNNLGLDFKQDLKTKVSKYGKHQAAALEVMTAAGWK

SEQ ID NO: 124036 - protein, 324 aa, Unknown
  Bacterial polypetide isolated from the Sargasso Sea
MKKVTIISLFVSLIASSFAFANEVNIYNARHYKADNELYSKFTNKTGIKVNLINGKASALEKRMIEEGTDSSADLYITADAGRCGAFKAKGMTQSGLVSPTIKSSVPKNFRTTHWVGVAKRARIIYYSPERVSGAELSGLTYEGLADPKWKGRLVIRKSSNIYNKSLVASLIENNGKKAAAEWSKGVVSNMARTPKGNDRAQIMAVAAGEADIAVANTYYLALMLSGNKGAEQQEAAKKVKAFFPNQNDRGTHMNISCAALVKGAPNKANAIALVDFLLSPEAQEHFTNNTFEFPMIAGVSPNPLVVNNLGLDFKQDLTTKVSS

SEQ ID NO: 124037 - protein, 330 aa, Unknown
  Bacterial polypetide isolated from the Sargasso Sea
MIVSSFAIANEVNIFNARHYKADAELYGKFTAATGIKVNLINGKSGALEKRMIEEGADSSADLYITADAGRCGAFQAKGMTQGGLISPTIKSSVPKNFRTAHWVGVAKRARIIYYSPERVTGAELSGMTYEGLADPKWKGRLVIRKSSNIYNKSLVASLIENNGKKATAAWAKGVVANMARESTGNDRAQIMAVAAGEADIAVANTYYLALMLSGNKGAEQQEAAKKVKAFFPNQQDRGTHMNISCAALVKGAPNKANAIALVDFLLSPESQEHFTNNTFEFPMIAGVSPSPLVVNNLGLDFNQDLKTKVSSYGKYQADALEVMTAAGWK

SEQ ID NO: 124038 - protein, 295 aa, Unknown
  Bacterial polypetide isolated from the Sargasso Sea
IKVNLINGKAGALEKRMIEEGADSAADLYITADAGRCGAFKAKGMTQAGLVSPTIKSSVPKNFRTTHWVGVAKRARIVYYAPERVSGAELSGLTYESLADPKWKGRIAIRASSNIYNKSLVASLVKNNGKKAAGEWAKGVVANMARDPKGNDRAQIMAVAAGEADIAVANTYYLALMLSGNKGAEQQAAAKKVKAFFPNQNDRGTHMNISCAALVKGAPNKANAIALVDYLLSPEAQEHFTNNTFEFPMISGVSPNPLVVNNLGLDFKQDLTTSVASYGDKQADALEVMTAAGWK

SEQ ID NO: 124039 - protein, 235 aa, Unknown
  Bacterial polypetide isolated from the Sargasso Sea
KNFRTSHWVGVAKRARIIYYSPERVTGAELSGMTYEGLADPKWKGRLVIRKSSNIYNKSLVASLIANNGKKATAEWAKGVVANMARDSEGNDRAQIMAVAAGEADIAVANTYYLALMLSGNKGAEQQAAAKKVKAFFPNQDGRGTHMNISCAALVKGAPNKANAIALVDFLLSPESQEHFTNNTFEFPMIAGVSPSPLVVNNLGLDFKQDLKTKVSSYGKHQAAALEVMTAAGWK

SEQ ID NO: 124040 - protein, 306 aa, Unknown
  Bacterial polypetide isolated from the Sargasso Sea
ELYSKFTEKTGIKVNLINGKAGALEKRIIEEGADSLADLYITADAGRCGAFKAKGMTQSGLVSPTIKSSVPKSFRTTHWVGVAKRARIIYYSPERVTGAELSGLTYEGLADPKWKGRLVIRKSSNIYNKSLVASLIENNGKKSAAEWSKGVVANMARTPKGNDRAQIMAVAAGEADIAVANTYYLALMLSGNKGAEQQAAAKKVKAFFPNQNDRGTHMNISCAALVKGAPNKANAIALVDFLLSPEAQEHFTNNTFEFPMIAGVSPNPLVVNNLGLDFKQDLTTKVSSYGKNQAAALEVMTAAGWK

SEQ ID NO: 124041 - protein, 104 aa, Unknown
  Bacterial polypetide isolated from the Sargasso Sea
MIVIVKSEFNKEIVDGLLKGCKRALAEKEIKIISVPGAFELPAAAKNVSIQSNLPEAVITLGCVIKGDTDHYDYICQAVTNGIMDISVQSSVPVLFWSSYMSEC

SEQ ID NO: 124042 - protein, 129 aa, Unknown
  Bacterial polypetide isolated from the Sargasso Sea
MKKKYLIVVADYYKDIANGLISSALKIIPKKNKIKIIKVPGAFEIPVTISKNLKKYDGFLALGCVIKGKTPHFDFISQASTDAIMKLSIDSKKPIGNGIITCLNIAQARARRKKGAEAAEAVISVLSQK

SEQ ID NO: 124043 - protein, 174 aa, Unknown
  Bacterial polypetide isolated from the Sargasso Sea
MRVPPQSVPHSEAVAGCKKYALQTASVPGTVRVAIAVSKYNEAITGRLVNGAVETLNAAGVSSDRIEIAEVPGAFELPLAAHALAGSGRFAAVLCLGAVIRGETTHDQHINTAVANGVESVGRQCGIPVLFGLLTCETRGQAEARAGGDVGNKGDECAKAAIAIMNLLEDLPKN

SEQ ID NO: 124044 - protein, 287 aa, Unknown
  Bacterial polypetide isolated from the Sargasso Sea
KSGALEKRMIEEGADSAADLYITADAGRCGAFQAKGMTQSGLTSPTIKSSVPKNFRTSHWVGVAKRARIIYYSPERVTGAELSGMSYEGLADPKWKGRLVIRKSSNIYNKSLVASLIANNGKKATAEWAKGVVANMARPSEGNDRAQIMAVAAGEADIAVANTYYLALMLSGNKGAEQQEAAKKVKAFFPNQDGRGTHMNISCAALVKGAPNKANAVALVDYLLSPSAQEHFTNNTFEFPMIAGVSPSPLVVNNLGLDFKQDLKTKVSTYGKNQAAALEVMTAAGWK

SEQ ID NO: 124045 - protein, 131 aa, Unknown
  Bacterial polypetide isolated from the Sargasso Sea
MKKKICIVPSVYNAEITNKMAQGAIRVLKANNVKTLKIIKVPGAFEIPQVISMLINKYDGFVAIGCIIKGETANFNLLSSAVTNGIMKLSILNKKPISNGLITSFTRKQATKRIDNGMEAARAVIKALKII

SEQ ID NO: 124046 - protein, 240 aa, Unknown
  Bacterial polypetide isolated from the Sargasso Sea
KAAVPSNFRTNHWTGIAKRARIVYYAPDRVSGAELSGLTYESLADPKWKGRLVIRASGNIYNKSLVASLVKNNGKKATADWAKGVVANMARTPTGNDRAQIMAVAAGEADIAVANTYYLALMLSGNKGAEQQAAAKKVKAFFPNQNDRGTHMNISCATLVKGATNKANAIKLVEFLLTPEAQEHFTNNTFEFPMIDGVSPSPLVVNNIGLDFKQDLKTKVSSYGAKQADALEVMTAAGWK

SEQ ID NO: 124047 - protein, 342 aa, Unknown
  Bacterial polypetide isolated from the Sargasso Sea
MKKISISALILSLFISTFAIANEVNIFNARHYKADAELYSKFTAATGIKVNLINGKAGALEKRMIEEGEDSSADLYITADAGRCGAFKAKGMTQGGLISPTIKNSVPKNFRTTHWVGVAKRARIVYYAPERVSGAELSGLTYESLADPKWKGRIAIRASSNIYNKSLVASLVKNNGKKAAREWAKGVVANMARDPKGNDRAQIMAVAAGEADIAVANTYYLALMLSGNKGAEQQAAARKVKAFFPNQNDRGTHMNISCAALVKGAPNKANAIALVDYLLSPEAQEHFTNNTFEFPMIAGVSPNPLVVNNLGLDFKQDLTTSVASYGAKQADALEVMTAAGWK

SEQ ID NO: 124048 - protein, 1974 aa, Unknown
  Bacterial polypetide isolated from the Sargasso Sea
YASRIVLVGTENGVGVSNKGVLAAQAGDLVLSTNGLLTLAGQTSASGNLALSARDGIDNSGTTYAQHNVTANTSGALTNSGVLAAQQNTTVNAGSVASTGTLGAGVNGDGSLAQAGDLSVTAGGTLTATGRNAAGGNAALNGATVNLARSRTSANGALVLTASGGDLNLSGATVTAGGALDTRASGTLTNDSGVLSSGGAQTVTAGALSNRGGQIASGGTLNVTATSDLLNQGGTLQAAGAFSVNAGSLDNTGGHVAALGADGLTLTTTGLLNNGASGTGVGTIGGNGNVAVQAGQIANAGSITAVQSLIAGAVQSLFNGGTLAANGNVTLATGSTLTNANTIAAGRLVTLSAATFDNSHGNLGADQLALHAADLVNRGGTITQTGTGTTTLDVTGTLDNSGGTLQTNSDSLSLSPAALVNDNGTIASSGTGTLTVNTGTLSNNGGTIATNGALDVRSGAASNRGGTLAAQTGATLHVASLDNSSGGYVGAQTVSVSGTGAVNNAGGTIQADDTLSISAQSLANDGGSIANGGTGTTTVSASGAITNTTNGLIGGNGDVSVSGGSIGNAGGTVTAGGAATVQSGSTLDNRAGLTQGSGAVSVSARGAIDNTGGQIEADGTAAMLAVTGASLDNTNGRIANTGSGATTVSAATVTNSNTGGVAGAGTIGGNGDLSVNADTLSNTNGAQLVSGHDLTLTITQLADNTNATLSGANNVTLNGPNAGVINAGGSIRGNGAITLNAASLDNTSGRIGNDTGSGGSISVNAGTLANQDGAIGSDQNLSVTANQLTGDGRIIAGNDGAVTVNGDYTLTGSNQIQANHDLTFTAAGTFTNQGTLGAVNALTVNAANVDNQAGADLNSSTTTVNAANAITNEGRIEGDTVTTHSGSLANTAAIIGNTVTLNASHSIANTGTAAVMAAASQLNLYSPGDISNTGGANLFSLGDISIAADGTRDANGVLANRSHSVTNDQSTIEAQGSIEIATQTLTNTRPAPTVETVTTGVEAEHQTKRSKYMACTTTNADKGYCTQAMWDNGYIAPVNATFSSADVVSQASGPNATDRTLVVNINGQPQTIWYNTLTANTDGTITVSYWDGYDPHVNYDPGTEYASRNDAHKGYQRVEIARDTTTTTQQDQVSGPQAQQAQIMAGGNMVLANVGTLNNEYSAIGAGGSIQIGSADASTDATGDVASGNYGGTLVNNIGQTLYQYQKQDIVSTYAWNENISRDVGTVVEPSIVLSPVAIGGTGGTIIANNTVQISATDIDNTNVAAANSATGATGGTLGANGTVGGITGTGAQTVNLATGQTQTINAPQSIAGPGGALNITLPSSGLYTFNTAPGASYLVVTDPRLTSYTSFISSDYMLGALGLDPSKTIRRLGDGAYEEQMVRNQITQLTGRVYLQGYTSNEDEYRALMNSGVNVAKAFNLEPGMALSAAQMDALTSDIVWLVSQSVTLPDGTTQTVLAPVVYLAHAHANDLQPGGALIAADDVEIHATGSATNSGVIRGGTQTVIAATSILNRGGSIGNGSGSSTDSGTTVVSATNDVVNASGRITGNRVAVLAGHDIVNTTLVDSVGVSSAVGDSKISQSLLGTQGTIASTGDLLVVAGNDLSVHGANIAAGGNAQIAAGHDITVDTVQSDTSQSVTKNDQHHWEASSTLNQTSGISAGGDLAMQSGNDTTLKGATLSAGGDMTVVAGGNLTATTVTNTATYNNVATDDKTRKQSERSYDEQAVGTNLIAGGNATLAALSADPGKGSVTLTGSSLAAGSGAATIAATSDVTINEGREEHDSYAATESKRGSFVHGSTTDTMRNTQANIGVGSTVSGDTVTVSAGRDLSVKGSTVAGTNDVNLAAAGNVNITTSQDTQGTSSYYQKHASGFGTSGGIGISVGSRTQTDTAHDATVTNTGSTVGSLNGSLNLTAGKDLHVTGSDLVAGQNVTGTGANVTIDSAVDTMHHDETHAVKQSGFTLAIKAPVVDAVS

SEQ ID NO: 124049 - protein, 318 aa, Unknown
  Bacterial polypetide isolated from the Sargasso Sea
NIFNARHYKADAELYGKFTAATGIKVNLINGKSGALEKRMIEEGSDSAADLYITADAGRCGAFQAKGMTQSGLTSSTIKSSVPKNFRTTHWVGVAKRARIIYYSPERVTGAELSGMTYEGLADPKWKGRLVIRKSSNIYNKSLVASLIANNGKKATAEWAKGVVANMARESTGNDRAQIMAVAAGEADIAVANTYYLALMLSGNKGAEQQEAAKKVKAFFPNQDGRGTHMNISCAALVKGAPNKANAIALVDYLLSPESQEHFTNNTFEFPMIAGVSPSPLVVNNLGLDFKQDLKTKVSSYGKHQAAALEVMTAAGWK

SEQ ID NO: 124050 - protein, 321 aa, Unknown
  Bacterial polypetide isolated from the Sargasso Sea
MKKVTIISLFVSLIVSSFAIANEVNIFNARHYKADNELYSKFTNKTGIKVNLINGKASALEKRMIEEGADSSADLYITADAGRCGAFKAKGMTQSGLVSPTIKSSVPKNFRTTHWVGVAKRARIIYYSPERVSGAELSGLTYEGLADPKWKGRLVIRKSSNIYNKSLVASLIENNGKKAAAEWSKGVVANMARTPKGNDRAQIMAVAAGEADIAVANTYYLALMLSGNKGAEQQAAAKKVKAFFPNQNDRGTHMNISCAALVKGAPNKANAISLVDFLLSPEAQEHFTNNTFEFPMIAGVSPNPLVVNNLGLDFKQDLKTK

SEQ ID NO: 124051 - protein, 129 aa, Unknown
  Bacterial polypetide isolated from the Sargasso Sea
MKKKYLIVVADYYKDIADGLISSALKIIPKKNIIKIIKVPGAFEIPITISKNLKKYDGFLALGCVIKGQTPHFDFISQASTDAIMKLSIDSKKPIGNGIITCLNMAQARARRKKGSEAAEAVISVLSQK

SEQ ID NO: 124052 - protein, 205 aa, Unknown
  Bacterial polypetide isolated from the Sargasso Sea
MFTGIVQGTAELVAIDELPNFRTHVIRMPSPAWGEGLALGASVAHNGCCLTVTRVEGELVSFDLMQETLRLTNLGQLQPGDKVNVERAARFGDEIGGHAMSGHIMGTAQVVSVIDTPNNRQVWYRLAPTLMKYVLTKGYIGIDGISLTVGEVRSNEFCVNLIPETLARTNLGWVKAGWHTNIEIDPQTQAIVDTVERVLAARQPG

SEQ ID NO: 124053 - protein, 131 aa, Unknown
  Bacterial polypetide isolated from the Sargasso Sea
MKPKICIVISTYNSGITNKLLFSAKNELKRYGVTRAKDYKVPGAFEIPVAIARLAKKYDAFIAIGCIIKGQTANFDLISNAITNAIMHLSITKKKPIGNSIITLFNKNQASKRYNKGKEAAKAVIEVLKIK

SEQ ID NO: 124054 - protein, 257 aa, Unknown
  Bacterial polypetide isolated from the Sargasso Sea
MLISTFAIANEVNIFNARHYKADAELYGKFTAATGIKVNLINGKSGALEKRMIEEGADSAADLYITADAGRCGAFQAKGMTQNGLTSPTIKSSVPKNFRTAHWVGVAKRARIIYYSPERVTGAELSGMSYEGLADPKWKGRLVIRKSSNIYNKSLVASLIANNGKKATAEWAKGVVANMARESTGNDRAQIMAVAAGEADIAVANTYYLALMLSGNKGAEQQEAAKKVKAFFPNQDGRGTHMNISCAALVKGAPNKA

SEQ ID NO: 124055 - protein, 117 aa, Unknown
  Bacterial polypetide isolated from the Sargasso Sea
SGNKGAEQQAAAKKVKAFFPNQNDRGTHMNISCAALIKGAPNKANAIALVDFLLSPEAQEHFTNNTFEFPMIAGVSPNPLVVNNLGLDFKQDLTTKVSSYGKNQAAALEVMTSAGWK

SEQ ID NO: 124056 - protein, 132 aa, Unknown
  Bacterial polypetide isolated from the Sargasso Sea
MNKKICIVISTYNEHITINLLKSAKKELEKNKFKKISVIKVPGAFEIPVTISKLINKYDGFIAIGCIIKGETTNFDLISKAITNGIMSLSISNKKPIGNSILTLLKKKQAFNRFNRGKEAAKAVYQVLKIEN

SEQ ID NO: 124057 - protein, 129 aa, Unknown
  Bacterial polypetide isolated from the Sargasso Sea
MKKKYLIVVADYYKDIADGLISSALKIIPKKNIIKIIKVPGAFEIPVTISKNLKKYDGFLALGCVIKGQTPHFDFISQASTDAIMKLSIDSKKPIGNGIITCLNMAQARARRKKGAEAAEAVISVLSQK

SEQ ID NO: 124058 - protein, 129 aa, Unknown
  Bacterial polypetide isolated from the Sargasso Sea
KILSGCLDCLKRHGLDTSELSNQVDIAWVPGSFELPIAAKTLVKKKSYDVVIALGAVIRGETSHYDVVISEASKGISQVSNENNVPIIFGVLTTDTMQQALERAGIKNNLGWNYALQAIEMGSLIKNLN

SEQ ID NO: 124059 - protein, 110 aa, Unknown
  Bacterial polypetide isolated from the Sargasso Sea
KGYDYELVEVPGAFEVPAALAYAAKTSKYIGYVALGCVIRGETSHYDYVCNESARALMQLSIEGLSIGYGILTCESKEQAIARANPKGLNKGKAATLACLRMIELKKEID

SEQ ID NO: 124060 - protein, 158 aa, Unknown
  Bacterial polypetide isolated from the Sargasso Sea
MAIFEGSFTNASTLKVGIVISRFNDLITNKILSGCLDCLKRHGLDTSELSNQVDIVWVPGSFELPIAAKTLMKKKSYDVVIALGAVIRGETSHYDVVISEASKGISQVSNENNVPIIFGVLTTDTMQQALERAGIKNNLGWNYALQAIEMGSLIKNLN

SEQ ID NO: 124061 - protein, 114 aa, Unknown
  Bacterial polypetide isolated from the Sargasso Sea
DTSELSNQVDIVWVPGSFELPIAAKTLMKKKSYDVVIALGAVIRGETSHYDVVISEASKGISQVSNENNVPIIFGVLTTDTMQQALERAGIKNNLGWNYALQAIEMGSLIKNLN

SEQ ID NO: 124062 - protein, 162 aa, Unknown
  Bacterial polypetide isolated from the Sargasso Sea
MATFEGRFSDTSGLRIAVVVARFNDLVTSKLLSGCLDCLHRHGIDISAESAQLDVAWVPGSFELPVVTQQLARSGRYEVLITLGAVIRGDTPHFDVVVAESSKGIAAVSRDTGIPVIFGVLTTDTMQQALERAGIKSNLGWSYGLQALEMGSLMATLESASA

SEQ ID NO: 124063 - protein, 158 aa, Unknown
  Bacterial polypetide isolated from the Sargasso Sea
MAIFEGSFTNASTLKVGIVIARFNDLITNKILSGCLDCLKRHGLDTSELSNQVDIVWVPGSFELPIAAKTLMKKKSYDVVIALGAVIRGETSHYDVVISEASKGISQVSNENNVPIIFGVLTTDTMQQALERAGIKNNLGWNYALQAIEMGSLIKNLN

SEQ ID NO: 124064 - protein, 163 aa, Unknown
  Bacterial polypetide isolated from the Sargasso Sea
MTPENSESNQNQSLSIAIVAGKFNLEITERLIDGAKSYLESQGIAPDSIHTYWVPGAFEIPFACSAIAKNASVDGIVTLGAVVRGGTPHFEFVAGECARGVREVSIDTGIPIAFGVLTTDTLEQAHQRSDISYVDHDGSTGDKGSAAASAVFEMINLVRTLNA

SEQ ID NO: 124065 - protein, 158 aa, Unknown
  Bacterial polypetide isolated from the Sargasso Sea
MAIFEGSFTNASTLKVGIVIARFNDLITNKILSGCLDCLKRHGLDTSELSNQVDIVWVPGSFELPIAAKTLMKQKSYDVVIALGAVIRGETSHYDVVISEASKGISQVSNENNVPIIFGVLTTDTMQQALERAGIKNNLGWNYALQAIEMGSLIKNLN

SEQ ID NO: 124066 - protein, 298 aa, Unknown
  Bacterial polypetide isolated from the Sargasso Sea
MRVGDEDIVTSASQVREFMASTNFNLPAGMQLEIVSDSSESTKTRIQTVSKNAYTGLVLVLVILALFLRFKIAIWVAAGIPIAILGALIAFPPMGLTISSLTVMGFILVLGIVVDDAIVVGERVHAYEQKGLSKNAAAIEGTVEVSVPVIFGVLTTIAAFLPLLIDNTQFSSFSKLIGGTVVFCLIASLIESQLILPGHIAHRKTKGYFMDGSRLVKAWQNFQGRIASALENFAELGYKRALKVVLDYRYAAWAAATGVICVVLALLLSGRVVFQFMPSIEGDRIWSTLTMPAGVPAS

SEQ ID NO: 124067 - protein, 145 aa, Unknown
  Bacterial polypetide isolated from the Sargasso Sea
VEARFYKEIADEMVAGAIAALELANAEFERYPVPGAFEIPAAVKFAVKAMEIDETRQRFNGYVTLGCVIRGETTHYDYVCGESARGLMDLANRYSLAIGYGILTCENREQAWARASRDCGDKGAAAANACLDMLRMKSGFGLYSR

SEQ ID NO: 124068 - protein, 158 aa, Unknown
  Bacterial polypetide isolated from the Sargasso Sea
MATIEGTFVNSSSLRVAIVIARFNDLITNKLLSGCIDCLSRHGIDVSESSNQLDIAWVPGSFELPIISQKLARDGNYEVVITLGAVIRGDTPHFDVVVSEASKGIATVSRETGVPIIFGVLTTDTMQQALERAGIKNNLGWSYALQALEMGSLMKALS

SEQ ID NO: 124069 - protein, 156 aa, Unknown
  Bacterial polypetide isolated from the Sargasso Sea
IFEGSYTNASTLKVGIVIARFNDLITNKILSGCLDCLKRHGLDTSELSNQVDIVWVPGSFELPIAAKTLMKNKSFDVVIALGAVIRGETSHYDVVISEASKGISQVSNEYNIPIIFGVLTTDTMQQALERAGIKNNLGWNYALQAIEMGSLIKNLN

SEQ ID NO: 124070 - protein, 155 aa, Unknown
  Bacterial polypetide isolated from the Sargasso Sea
MAIFEGSFTNASTLKVGIVIARFNDLITNKILSGCLDCLKRHGLDTSELSNQVDIVWVPGSFELPIAAKILMKKKSYDVVIALGAVIRGETSHYDVVISEASKGISQVSNENNVPIIFGVLTTDTMQQALERAGIKNNLGWNYALQAIEMGSLIK

SEQ ID NO: 124071 - protein, 158 aa, Unknown
  Bacterial polypetide isolated from the Sargasso Sea
MTIFEGSFTNASTLKVGIVVARFNDLITNKILSGCLDCLKRHGLDTSETSKELDIVWVPGSFELPIAAKTLLKKSNYDVVIALGAVIRGETSHYDVVISEASKGISQVSYENNVPIIFGVLTTDSMQQALERAGIKNNLGWNYALQAIEMGSLIKNLN

SEQ ID NO: 124072 - protein, 76 aa, Unknown
  Bacterial polypetide isolated from the Sargasso Sea
AVIRGDTPHFDVVVAEASKGIAAVARDAAVPVIFGVLTTDTMQQALERAGIKSNLGWSYGLEALEMGSLMRALPSA

SEQ ID NO: 124073 - protein, 150 aa, Unknown
  Bacterial polypetide isolated from the Sargasso Sea
MIEGDLNGSNLKIGIVCAKFNQTITKSLLMGAISGLTDHKVDESNIDTYFVPGAFEVPIVVDRIFPKYDVVIAIACVIRGGTPHFDYVCDGITTGITTAIHTHQKPCIFCVLTTDNEEQAHDRSKENSKDNKGYEAALAAIETANILTNV

SEQ ID NO: 124074 - protein, 105 aa, Unknown
  Bacterial polypetide isolated from the Sargasso Sea
MKEITGDVVAQGFKFAFVVARFNELIGERLLEGALDTFQRHGGDPDNALVIRVPGAYEIPLAANKIAGKGEHDAVVCLGAVIRGETPHFDYVAAQCCERDCFGLP

SEQ ID NO: 124075 - protein, 158 aa, Unknown
  Bacterial polypetide isolated from the Sargasso Sea
MTVFEGSFTNASTLKVGIVIARFNDLITNKILSGCLDCLKRHGLDTSDLSNQVDIVWVPGSFELPIAAKTLMKKKSYDVVIALGAVIRGETSHYDVVISEASKGISQVSYENNVPIIFGVLTTDTMQQALERAGIKNNLGWNYALQAIEMGSLIKNLN

SEQ ID NO: 124076 - protein, 137 aa, Unknown
  Bacterial polypetide isolated from the Sargasso Sea
MDKSSIKICIVASQFNELIVDSLIKSSIQTLEKNGYQSDPEIFKVPGAYELPLAVKNVAEKKIPDGIIALGAIVRGATPHFDYIATETAAGLTKVSLEYNIPVGFGVLTCDTMEQAIERSGEGSGNKGIESTEAVME

SEQ ID NO: 124077 - protein, 143 aa, Unknown
  Bacterial polypetide isolated from the Sargasso Sea
MSIFEGSFTNASTLKVGIVIARFNDLITNKILSGCLDCLKRHGLDTSELSDQVDIVWVPGSFELPIAAKTLMKKKNYDVVIALGAVIRGETSHYDVVISEASKGISQVSNENNVPIIFGVLTTDTMQQALERAGIKNNLGWNY

SEQ ID NO: 124078 - protein, 133 aa, Unknown
  Bacterial polypetide isolated from the Sargasso Sea
MIQKKCNVLIVAATFYKSIIDELIKGAGQVLNDSDVSFNIIEVPGAFELPAVVSMALAVEKSENKKIYDGYITLGCVIRGETTHYDYVCGETARALQELSTKHQLALGFGLLTVENVDQAKERAFVDRKNKGG

SEQ ID NO: 124079 - protein, 145 aa, Unknown
  Bacterial polypetide isolated from the Sargasso Sea
MDKSSIKICIVASQFNELIVDSLIKSSIQTLEKNGYQSDPEIFKVPGAYELPLAVKNVAEKKKPDGIIALGAIVRGATPHFDYIATETAAGLTKVSLEYNIPVGFGVLTCDTMEQAIERSGEGSGNKGIESTEAVIGMIEFLHNL

SEQ ID NO: 124080 - protein, 96 aa, Unknown
  Bacterial polypetide isolated from the Sargasso Sea
MIVESRYYEEIAEELLSSVKHELQVAGATYELFEVPGAFEIPTAIKCAIDAQANGSSLSSFDGFIALGCVIRGQTTHYDYVCGESARGLQDIAINY

SEQ ID NO: 124081 - protein, 146 aa, Unknown
  Bacterial polypetide isolated from the Sargasso Sea
MIVEARFYDDLADALLEGAKETLKARGADFDVITVPGALEVPPAIALAEEAGRFPTAPRYDGYVALGTVIRGETYHFEIVSDQSAAGIMALGVKGVIIGNGILTTEDEDQAWYRARLSEGDKGGGAAKACLDLIALKKRLRHGVGA

SEQ ID NO: 124082 - protein, 153 aa, Unknown
  Bacterial polypetide isolated from the Sargasso Sea
MKEITGDVVAQGFKFAFVVARFNELIGERLLEGALDTFQRHGGDPDNALVIRVPGAYEIPLAAKKIAGKGEHDAVVCLGAVIRGETPHFDYVAANAANGIASVSLDSGIPVSFGILTTDTIEQAIERSGTKAGNQGRNATLTAIEMASLLAKI

SEQ ID NO: 124083 - protein, 158 aa, Unknown
  Bacterial polypetide isolated from the Sargasso Sea
MAIFEGSFTNASTLKVGIVIARFNDLITNKILSGCLDCLKRHGLDTSELSNQVDIVWVPGSFELPIAAKTLIKKKSYDVVIALGAVIRGETSHYDVVISEASKGISQVSSENNVPIIFGVLTTETMQQALERAGIKNNLGWNYALQAIEMGSLIKNLN

SEQ ID NO: 124084 - protein, 158 aa, Unknown
  Bacterial polypetide isolated from the Sargasso Sea
MAIFEGSFTTASTLKVGIVIARFNDLITNKILSGCLDCLKRHGLDTSELSNQVDIVWVPGSFELPIAAKTLMKKKSYDVVIALGAVIRGETSHYDVVISEASKGISQVSNENNVPIIFGVLTTDTMQQALERAGIKNNLGWNYALQAIEMGSLIKNLN

SEQ ID NO: 124085 - protein, 153 aa, Unknown
  Bacterial polypetide isolated from the Sargasso Sea
MKEITGDVVAQGFKFAFVVARFNELIGERLLEGALDTFQRHGGDPDNTLVIRVPGAYEIPLAAKKIAGKGEHDAVVCLGAVIRGETPHFDYVAANAANGIASVSLDSGIPVSFGILTTDTIEQAIERSGTKAGNQGRNATLTAIEMASLLAKI

SEQ ID NO: 124086 - protein, 158 aa, Unknown
  Bacterial polypetide isolated from the Sargasso Sea
MAIFEGSFTNASTLKVGIVIARFNDLITNKILSGCLDCLKRHGLDTSELSNQVDIVWVPGSFELPIAAKTLMKKKSYDVVIALGAVIRGETSHYDVVISETSKGISQVSNENNVPIIFGVLTTDTMQQALERAGIKNNLGWNYALQAIEMGSLIKNLN

SEQ ID NO: 124087 - protein, 186 aa, Unknown
  Bacterial polypetide isolated from the Sargasso Sea
MIRPFTRLGAHSKHYGIHMEIGQYQPNLDGDGLRIGIVQARFNEPVCNGLADSCIEELERLGVTGEDVLLVTVPGALEIPLALQKLAESAQFDALIALGAVIRGETYHFELVSNESGAGITRIGLDFGIPVANAVLTTENDEQAVARMTEKGRDAARVAVEMANLAVALEQLGGDDEEEDEEEEEA

SEQ ID NO: 124088 - protein, 96 aa, Unknown
  Bacterial polypetide isolated from the Sargasso Sea
MIAVIISEFNKEIVDGLLEGCKKSLKDHKLNIIKVPGAFELPASAQKCVESERYDAVITLGCVIKGDTDHYDYICQAVSNGIMNISIKSHIPCLFG

SEQ ID NO: 124089 - protein, 117 aa, Unknown
  Bacterial polypetide isolated from the Sargasso Sea
MIRIIKSNFNQKVVDGLLDGCLLALKEKNIKDENINISEVPGAFEIPFTIKNILANDNISTQAIITLGCVIKGETDHYNFISQAVTNSIMDLTLTSKTPILFGVLTCQSAQLAYDRS

SEQ ID NO: 124090 - protein, 145 aa, Unknown
  Bacterial polypetide isolated from the Sargasso Sea
MDKSSIKICIVASQFNELIVDSLIKSSIKTLEENGYQSDPEIFKVPGAYELPLAVKNVAEKKKPNGIIALGAIVRGATPHFDYIASETSAGLTKVSLESNIPVGFGVLTCDTMEQAIERSGEGSGNKGIESTEAVLGMIELLADL

SEQ ID NO: 124091 - protein, 145 aa, Unknown; identical to SEQ ID NO: 124079
  Bacterial polypetide isolated from the Sargasso Sea

SEQ ID NO: 124092 - protein, 165 aa, Unknown
  Bacterial polypetide isolated from the Sargasso Sea
MLINKIKSTGENDLNNYYSTKKPIIFIIKSLYHGDITDSIAFDFIDNLPDEYKNKVIVFEVPGAFEIPLIIKQTLDKYRKKNKEIYILALGCVIKGETKHDEYISSTIINAIRNLSLEYNTLIINGILTTLTIKQAIERAGIKQRKGKEYAEGLSVMSQLINKLR

SEQ ID NO: 124093 - protein, 142 aa, Unknown
  Bacterial polypetide isolated from the Sargasso Sea
IGIVIARFNEFITKQLLEGALETLTNSGVKESDITVTWVPGAFELPVVAKNLADNTDVNSVICLGAVIKGETDHYDMVAGNAASGILTTSLSTSKPIIFGVLTTDTLEQAINRSGGKSGNAGRHAAEAAIETSTVINQINNK

SEQ ID NO: 124094 - protein, 133 aa, Unknown
  Bacterial polypetide isolated from the Sargasso Sea
MIAVIISEFNKEIVDGLLEGCKKSLKDHKLDIIKVPGAFELPASAQKCVESERYDAVITLGCVIKGDTDHYDYICQAVSNGIMNISIKSHIPVLFGVLTCQNAQQAFERSRDNDLNKGFEVGNAARTLLKSTR

SEQ ID NO: 124095 - protein, 153 aa, Unknown; identical to SEQ ID NO: 124082
  Bacterial polypetide isolated from the Sargasso Sea

SEQ ID NO: 124096 - protein, 158 aa, Unknown
  Bacterial polypetide isolated from the Sargasso Sea
MSSIKTIEGGYSFGSANYGIAVSRFNGFIVERLLSGALEALRKHGVEDREISIIKVPGAFELPLAVKAMAESENYDAIIALGAVIRGGTAHFEYVAGECVKGISHVGLTLGLPVSFGVLTVDTIEQAIERAGSKAGNKGEEAALTAMEMLSLMRQIKG

SEQ ID NO: 124097 - protein, 153 aa, Unknown
  Bacterial polypetide isolated from the Sargasso Sea
MNQIEGDLIATDLEIAFVVSRFNEFVCERLLEGALDSFSRHGGSKDQVTVIRVPGAFELPLAAKKLAESGKFDAIVCLGAVIRGETSHYDYVCANASSGIASVSLDTGVPVSFGLLTTDSLEQAIERSGSKAGNQGRYAIECAIEMTRLMKQM

SEQ ID NO: 124098 - protein, 138 aa, Unknown
  Bacterial polypetide isolated from the Sargasso Sea
EYIDSENDKEALFDAASGVLTNPAIKGITCEYQIKKVPGAFEIPFLIDLNKDLYDGFIALGCIIRGETYHFEVISNEVTRKLMDLSIDIQKPIGFGILTCENIKQALERSDPNKGNKGAEAAKACLSLMFYPRYSKDE

SEQ ID NO: 124099 - protein, 92 aa, Unknown
  Bacterial polypetide isolated from the Sargasso Sea
MADIKVIEGDFTQCSGRYALVVGRFNGFVVESLVEGAVDTLRRHGIADDDITIIRVPGAYEMPLAVKRVAETSDYDAIIALGAVIRGGTPHF

SEQ ID NO: 124100 - protein, 157 aa, Unknown
  Bacterial polypetide isolated from the Sargasso Sea
MNIKFIEGDYQLASARFGIAVARFNSFIVDRLLEGALEALQKHGVMERDITVVKVPGAYELPLAVKMMLDQNSYDGIIAVGAVIRGGTPHFEYVAGECVKGLSQAGLNASLPVSFGVLTVDTIEQAIERAGTKAGNKGAEAAMTAMEMVSLSRQLKA

SEQ ID NO: 124101 - protein, 111 aa, Unknown
  Bacterial polypetide isolated from the Sargasso Sea
MPLKTIEGTFIAPQGKYALVVGRFNSFVVESLVSGAVDALVRHGVSENDITIIRAPGAFEIPLVAQKVAQQGEYDAIVALGAVIRGGTPHFEYVAGECTKGLAQVSMEFGV

SEQ ID NO: 124102 - protein, 128 aa, Unknown
  Bacterial polypetide isolated from the Sargasso Sea
MQVIEGNIRATGKKFAIVVSRFNSFVVESLLEGALDTLERHGEVSDDDITLVRVPGAYELPVVAKKLAEKKSFDAIIALGAVIRGGTPHFDFVAGECNKGLAQVSLEYGVPVSFGVITTESIEQAIER

SEQ ID NO: 124103 - protein, 157 aa, Unknown
  Bacterial polypetide isolated from the Sargasso Sea
MTEVKITEGDLHPRDARFAIVASRFNEFVVNALIKGSLDCLDRHGVDKNAIEIIKVPGAYEIPLAVSKLAKTKRVDGIIALGAVIRGATSHFDYVSSECARGLSEIQSQEGIPVGFGVLMVDTLEQALERAGTKAGNKGEEATLAVIEMVNLLRKID

SEQ ID NO: 124104 - protein, 158 aa, Unknown
  Bacterial polypetide isolated from the Sargasso Sea
MSTIKTIEGNYALGSSSYGIVISKFNSFIVERLLEGALEAFRKHGVQDRDISIVKVPGAYELPLTAKVMAESGKYDAIVALGAVIRGGTPHFEYVAGECVKGLGQVALTAGLPLAFGVLTVDTIEQAIERAGTKAGNKGEEAALTAMEMLSLVRQLRT

SEQ ID NO: 124105 - protein, 158 aa, Unknown
  Bacterial polypetide isolated from the Sargasso Sea
MNVVQGNIEAKNAKVAIVISRFNSFLVESLLEGALDTLKRFGQVSDENITVVRVPGAVELPLAARRVAASGKFDGIIALGAVIRGGTPHFDFVAGECNKGLAQIALEFDLPVAFGVLTTDTIEQAIERSGTKAGNKGGEAALSLLEMVNVLQQLEQQL

SEQ ID NO: 124106 - protein, 158 aa, Unknown
  Bacterial polypetide isolated from the Sargasso Sea
MSSIKTIEGGYGFGSANYGIAVSRFNGFIVERLLSGAVEALQKHGVEDREISIIKVPGAFELPLAVKTMAESANYDAIIALGAVIRGGTAHFEYVAGECVKGISHVGLTLGLPVSFGVLTVDTIEQAIERAGSKAGNKGEEAALTAMEMLSLMRQIKG

SEQ ID NO: 124107 - protein, 154 aa, Unknown
  Bacterial polypetide isolated from the Sargasso Sea
MQVIEAGLTAKGKKFAIVVARFNSFIVESLLDGAVDTLKRVGDIADQDITVVRIPGAFEMPLAVQKVAASGKYDAIIALGAVIRGGTPHFEYVAGECTKGLAQVMMQHSIPVAFGVLTVDSIEQAVERAGTKMGNKGAEAAMSSLEMVNVLSQL

SEQ ID NO: 124108 - protein, 153 aa, Unknown
  Bacterial polypetide isolated from the Sargasso Sea
MNQIEGDLIATDLKIAFVVSRFNEFVCERLLEGALDSFSRHGGSKDKVTILKVPGAFELPLAAKKLAESRKFDAIVCLGAVIRGETSHYDYVCANASSGIASVSLETGVPVSFGLLTTDSLEQAIERSGSKAGNQGRYATECAIEMTSLLKQI

SEQ ID NO: 124109 - protein, 159 aa, Unknown
  Bacterial polypetide isolated from the Sargasso Sea
MTVFEGRFTDAGGLRIAVVVARFNDLVTGKLLSGCLDCLSRHGIDVAETSSQLDLAWVPGSFEIPLLAKRLAGSGRYDVVITLGAVIRGDTPHFDVVVAEVSKGVAAVARESGVPVIFGVLTTDTLQQALERAGIKSNLGWNYGLQALEMGSLMRSVPA

SEQ ID NO: 124110 - protein, 157 aa, Unknown
  Bacterial polypetide isolated from the Sargasso Sea
MTEVKITEGDLHPRDARFAIVASRFNEFVVNALIKGSLDCLDRHGVDKNAIEIIKVPGAYEIPMAVSKLARTKRVDGIIALGAVIRGATSHFDYVSGECARGLSEIQSQEGIPVGFGVLMVDTLEQALERAGTKAGNKGEEATLAVIEMVNLLRKID

SEQ ID NO: 124111 - protein, 158 aa, Unknown; identical to SEQ ID NO: 124105
  Bacterial polypetide isolated from the Sargasso Sea

SEQ ID NO: 124112 - protein, 154 aa, Unknown
  Bacterial polypetide isolated from the Sargasso Sea
MKIIEGNKYAPGKKFAIVISRFNDFIGSSLLEGAVDELKRTGGVSDDDITVIYVPGAVELPLAAKRVAAKKEYDAIIALGVVIRGGTPHFDLVAGESNKGLAQVSLEYDIPVAFGVLTTESIEQAIERAGTKMGNKGGEAALGALEMVNVLDKI

SEQ ID NO: 124113 - protein, 162 aa, Unknown
  Bacterial polypetide isolated from the Sargasso Sea
MATFEGRFSDASGLRIGVVVARFNDLVTAKLLSGCLDCLKRHGLDVSETSGQLDVAWVPGSFELPIVAQQMARSGRYHVLITLGAVIRGDTPHFDVVVAEASKGIAAVARDAAVPVIFGVLTTDTMQQALERAGIKSNLGWSYGLEALEMGSLMQALPQAAS

SEQ ID NO: 124114 - protein, 150 aa, Unknown
  Bacterial polypetide isolated from the Sargasso Sea
ILATAKGIGSGFPLGACLASNKVSIGMVQGKHGSTYGGNPLAVSVGREVLDIISNKKFLKNVDTISRYLWKNLIKLKKDYNQIVEIRGAGLLLGIKTKQNNLVVSNKLKNNKLLTVPASDNVIRLAPPLIINKKHVDEAIHIIEETLKKL

SEQ ID NO: 124115 - protein, 89 aa, Unknown
  Bacterial polypetide isolated from the Sargasso Sea
RIKRQNKKYISEVRGRGLFIGIDIIKNSNQLKPNKQLAKKIINFMRNNGILLSTDGPHDNVIKIKPPLVFNKQNVDNVCENLESFFKKI

SEQ ID NO: 124116 - protein, 106 aa, Unknown
  Bacterial polypetide isolated from the Sargasso Sea
LQENASSVGNHLLDGLKNIQNKYNIIGDVRGRGLFIGIELIKDMDNLVPAVDEAEIVVNTMKKKGILISSDGPDHNVLKIKPPLVFNKKNANYFLESFEAVISKNF

SEQ ID NO: 124117 - protein, 134 aa, Unknown
  Bacterial polypetide isolated from the Sargasso Sea
DIAIQIDIALATDTPEMSGNGDIKLGNGPSMSLYSFHGRGTLNGVIPHPKLVKLFENTASKQNINLQRSATSGILTDASYVQLLGKGIACIDLGFPIRYSHSPNEVCDIRDIFKLKELLFKTIISIDNKINLKR

SEQ ID NO: 124118 - protein, 160 aa, Unknown
  Bacterial polypetide isolated from the Sargasso Sea
MNGAKIKPDILATAKGIGSGFPLGACLATSKASLGMTKGRHGSTYGGNPLAVSVGREVLKIISNKKFLKDVDFIARYIWKKLKKLERNYDEIVDVRGAGLLLGIKTKQNNVMISNKLKINKLLTVPAGENVIRLAPPLIINKKHADEAISIIDQTLKKLS

SEQ ID NO: 124119 - protein, 206 aa, Unknown
  Bacterial polypetide isolated from the Sargasso Sea
MENLKSEGVRLENIAAFFVESFQGWGAIFYPKEYIKAMRKWATTNNTLLIFDEIQAGFGRTGKFFAYEHYEVEADLVICGKGISGSMPLSAVIGNTELIELDDGYTSTHGGNPLACAAGLGNLEAFEKDNLLDVSKKKEKLFLEILNSWKEKYPSRISMILGKGMLFGVFITKKNSEDLDHDLTNYICERAMEKGVFSICTGRGTL

SEQ ID NO: 124120 - protein, 282 aa, Unknown
  Bacterial polypetide isolated from the Sargasso Sea
AFHGRTAACLSLTHTKWIHKLDFPTFDWPSCPFPKLKYPLDRYERENAAEEARCLAEVEAALDRDADVVGVIVEPMQAEGGDNHASADFFQKLRALTKSRGVRMIVDEVQTGCGSSGTFWAHEAWNLEHPPDVVTFSKKMQIAGFYAVADLAPELPYRIFNTWMGDPAKLVQLEVVLDCIEESNLLDLVKSSGATLLEGLEKLQAKFPKILSNARGVGTLVAVDADTPARRDAILHALLQDGVDIGGCGVSTIRARPGLLFTSAHAAVFLDALERVLDKDVV

SEQ ID NO: 124121 - protein, 213 aa, Unknown
  Bacterial polypetide isolated from the Sargasso Sea
IRNNIDIGSPITYKPCIEFIGSNCLAGTSLDDRVGCGIILEVLEKLKKIKNRPTVHIVFSVQEEFNLRGVLPMAQKLNPDIAIQIDIALATDTPEMSGNGDIKLGYGPSMSLYSFHGRGTLNGVMPHPKLVKLFENTASKQNINLQRSATSGILTDASYVQLLGKGIACIDLGFPIRYSHSPNEVCDIRDIFKLKELLFKTIIRIDNKINLKR

SEQ ID NO: 124122 - protein, 299 aa, Unknown
  Bacterial polypetide isolated from the Sargasso Sea
VAAEQLRRMNSNTRYLHPAQTAFADKILSKLPDHFEVCFFVNSGTEANELALRLARAHTGAKGMVTPDHGYHGNTTGAIDISAYKFNKPGGVGQADWVELVEVADDYRGRFRRDDPDRAQKFADLVDPTIASLQAKGHGVAGFIAETFPSVGGQIIPPTGYLSAVYEKIRAAGGVCIADEVQTGLGRLGDYYFGFEHQGALPDIVVMGKPIGNGHPLGVLVTTKAIAESFDNGIEFFSTFGGSTLSCRIGKEVLDIVDDEDLQTSARNRGAELMSGLKALETKYPCVGDVRGMGLFLGL

SEQ ID NO: 124123 - protein, 314 aa, Unknown
  Bacterial polypetide isolated from the Sargasso Sea
ARRDRHGKHVFLHSGAEANEAAIKLARRYGDQKGIASPQIIVLDGAFHGRTLGALSATGNQKIRQGFGPLLEGFQRVAPDDLPAVEALAAERQDIVAVLVEPILGEGGIRPLAIDYLKSLRRLCDQHGWLLIFDEVQTGNGRCGSTYVFEQLGVEPDVLLTAKGLGNGLPIGVCMAKGVAAEQLGPGDHGSTYGGNPLCCAAAQAVLTALAKDGVMQQATLIREALVSALQDNLCDAKLISEVRGKGLMIGIQPNTETGEIVKRGLDHGLLLNIAGGDTIRVLPPLVMTLEQAGELGAGIAHILNDIAEQEDNA

SEQ ID NO: 124124 - protein, 205 aa, Unknown
  Bacterial polypetide isolated from the Sargasso Sea
EVKVAGGVCIADEVQTGLGRLGDHYFAFEQQQILPDIVVLGKPIGNGHPIGAVVTTQKIAKAFNNGIEFFSTFGGSDLSCLIANEVLEIVDDEMLGDNAKQMGLFLEKGLMELQLASQLIGDVRGMGLFWGVEIIRNFETKEAGTSEANYICNRLREKRILVGIEGPCENIIKIRPPLSLSHDDVKIFLRAFADVLEESYFRVGS

SEQ ID NO: 124125 - protein, 124 aa, Unknown
  Bacterial polypetide isolated from the Sargasso Sea
SGDSGSTFGGNPLAMAVGNCVMDIVNKVDFLSNVEKNGLFFKNQLNKLCEKYPNVIAEIRGLGLMIGIKCSVANNLLANKLYENGILTVNAADNVIRILPPLNIRMSEIKKVMSLFEKSIKEIL

SEQ ID NO: 124126 - protein, 211 aa, Unknown
  Bacterial polypetide isolated from the Sargasso Sea
LLREACDRYGVHLIHDEIAVGFGRTGSLFACEQADIAPDFLCLSKALTAGYLPMAVCMTNDTIYQAFYDDYESMRAFLHSHSYTGNPLACAAALATLDLLERDNVIEANKALSAHMAKATAHFVDHPHVAEVRQTGMVLAIEMVKDKATKEAYPWQERRGIRVYQHALKNQAMLRPLGSVVYFMPPYVITPEQIDHLASVAWEGIQLATRD

SEQ ID NO: 124127 - protein, 174 aa, Unknown
  Bacterial polypetide isolated from the Sargasso Sea
VQCGFGRSGKLFSHEWAKIKPDIMSVAKGIGSGFPLGACMSTNKACVAMTKGSHGSTYGGNPLAMSVGLEVLKVISNKTFLSKIDKTARYFWKNLKELEKTSNIISEVRGAGLLLGIKTNISNIDFSEQLKKNKLLNVPAADNTVRLAPPLIVSYKEIDKSIAIIKRSLKELSR

SEQ ID NO: 124128 - protein, 291 aa, Unknown
  Bacterial polypetide isolated from the Sargasso Sea
SSISSLISKREKNFSSNLSLSYNIPIYFKKAAFQYMYDEKGRTFLDAYNNIPHVGHCHPKTILSSQRQMSKLNTNTRYLYDSLYSYTEKLLSKFPKNLNKVFFVNSGSEASDLAVRMAKWHTRKDKIVVIQQGYHGHTQIGIEISDYKFNNIKGIGKQNHIIRTPIPASNMRIKNSNDYIDGFDNQLLENENQIALFISETILGCAGQVCLPKNFLKNIYSKIRKQGGVCIADEVQTGFGRTGDNFWAYEDQEVVPDIVILGKPMANGHPMGAVITSEEISSSFEEGVEFF

SEQ ID NO: 124129 - protein, 265 aa, Unknown
  Bacterial polypetide isolated from the Sargasso Sea
GSQISDIDGHTTVDAVGGLWCVNLGYSNEAVKKAISEQLNHLPYYSGFAGTTNPAAIEASFMVKEMFKADGMEKVFFTSGGSDSVETCLRLSRQYHRLRGEPTRTKFISLKKGYHGTHFGGASVNGNNRFRIAYEPLLPGCFHLPSPYTYRNPFNETDPQKLALNIAQAFEDEIAFQDKNTIAAFIMEPIQGAGGVIVPDPSFMGLMQEICERNGILMISDEVITGFGRTGSWSGSRHWNVKPDMMSMAKGITSGYFPVGAALMG

SEQ ID NO: 124130 - protein, 275 aa, Unknown
  Bacterial polypetide isolated from the Sargasso Sea
RLWKRRIAEVAKKQIKELAYYNSFFKTSNIPTANLSALLVNITPNGLNHVFYANSGSEANDTIIRMVRHFWNLEGQPKKRIIIGREFGYHGSTIMSASMGGMMDMHKQAANEPDFEHILAPYSFKYQGDETEEHFSEICANWLEEKIIELGNENIAAFVAEPIQGAGGVIIPPKNYFNFIQEICKKHNILFIVDEVITGFGRTGFWFASEPMKLLPDLMTTAKGLTSGYIPMSAVMVGDRVADKLINHGGEFNHGFTYSAHPVAAAVAIENLKII

SEQ ID NO: 124131 - protein, 317 aa, Unknown
  Bacterial polypetide isolated from the Sargasso Sea
FVKGEGVWVTDINDNKYLDSTGGLWFKGAGYGREEIGKAIYEQICEIETPPAMAACIPQIELAAKIAEIYPDKSARSFFTSGGSESVETAVKMAKKYQINTGKSGAYKVISRRYSYHGATAMAVSLGKPSTSDTMGPEMPGAIHVQNWDSYRIPNNMDPVDYAIFCANQFEEAIKHTGPDSVAAMIAEPISVAFGIHIPPKEYWQRLREIADEYNVVLIADEVITGFGRTGKYFATDHWDMMPDITTVAKSLTSGYSPLGAAIATKKISDSFIGTEKEMFLHLITFGGHPASCAAGLKNLEIYDREKLVENSKNMGE

SEQ ID NO: 124132 - protein, 268 aa, Unknown
  Bacterial polypetide isolated from the Sargasso Sea
NVPSAWYSSLENFIVRGKNAEIWDSEGNRYLDYVGGYAVLNTGHLHPRVVDRVKNQLDNFSHSCFAFAPHENAVKLAEELNIRYPIETDTKTFMVNSGAEAVENAVKIARYFTNKKAILSFKGGFHGRTYLAMGLTGKDKPYKEGFGPFPEFVKHAVYPYSYRDISDEDALLSVNKLLNNTLDPNDTAAIVIEIELGEGGYIPASSYFLSQLRDICDKHNILLIFDEVQTGYGRTGNMFGAETVGVTPDMVTLAKGICWWFSFSCSFR

SEQ ID NO: 124133 - protein, 210 aa, Unknown
  Bacterial polypetide isolated from the Sargasso Sea
PRSFMLEAFQIVNEAGGLCVVDEVQIGFGRLGSHFWGFQMSGVVPDIITLGKSIGNGHPLSVVITKKNIADVFNNGMEYFNSFGGNPVSCEIGQAVLDVIKEEKLQENASSIGNHLLDGLKNIQKKYNIIGDVRGRGLFIGIELIKDMDNMVPAADEAEIVVNAMKKKGILISSDGPDHNVLKIKPPLVFNKKNANYFLESFEAVISKNF

SEQ ID NO: 124134 - protein, 119 aa, Unknown
  Bacterial polypetide isolated from the Sargasso Sea
STFGGNPLAMAIGNTVIDIVSNRKFLNNVKKLSKYFLSNLNLLKSKYPRVIKEIRGRGLLIGIQLFKDQTKFIKKLMDNKLLTIRAADNVIRILPPLNVKKSEINQALKIIEKVCASFE

SEQ ID NO: 124135 - protein, 206 aa, Unknown
  Bacterial polypetide isolated from the Sargasso Sea
YLDRLREICTRHGILLIFDEVITGFGRTGASFGAERFNVQPDLMTMAKGLTNGAVPMSAVGINNLIYDALMEGPPEIIELFHGYTYSGHPLACAAALAALEIYENERLFDRCAELELYWEDAVHSLRDRKNVIDIRNIGLVAGIELLPRDGAPAARGYDCFIQCFREGLLLRQTGDTVALAPPLIIEKEEIDRTVEILGNVINSLD

SEQ ID NO: 124136 - protein, 288 aa, Unknown
  Bacterial polypetide isolated from the Sargasso Sea
TLIDLSPYKFNGKGGLGKKDYVHILDMPDPIRGKWKYKDKNWSGQYIDDAIRNIREVSKIKKISCLFSESILGCGGQIILPKKYLKKIFYEIRKNKGLCIIDEVQTGFGRVGNNFWSFQEHEVIPDIVTLGKPMGNGHPLAAVVTTEKIATAFNNGMEYFNSFGGNPVSCAVGNSVLQVIENEKLQKNAHEIGIYFLNKLLKIRNKNKKYISEVRGRGLFLGIDIIKNNNNLEPNPELAKKIINYMRNNGILLSTDGPFNNVIKIKPPMIFNSENVDIVCEKLSNFFK

SEQ ID NO: 124137 - protein, 253 aa, Unknown
  Bacterial polypetide isolated from the Sargasso Sea
YLYRSSQENALSFEAYTTALEESNLFTTDVAAAIIEPVLGEGGYVPAPAAFLEALEKICKSKGILLIIDEIQSGIGRTGKWFAFQHTCIQPDIIVTAKGLGSGMPIGACLAKTKIMNQWPPGAHGGTYGGNPVACAATVATLDIVEKVQQNVPFLSQLASNLLHEGLRDHPNIGDIRVFGLMIGIECVKDKVTKEPLPDLITFTLNESLKRHLIVLSCGIHYNVIRLAPPLIISEKELRSGLATLIEVLHDYY

SEQ ID NO: 124138 - protein, 260 aa, Unknown
  Bacterial polypetide isolated from the Sargasso Sea
MKHLGFKVDSYPYFNNESNSIDFENLTSKIKKISKGDVLVMHGCCHNPTGEDLKAEQWDEVSDIAKSNNLLVICDFAYQGLADGLDDDANGVRKMIRNLDNLIICTSYSKNFGLYSERVGCLIYNSKNESNCAPVLSHMKKTARSNYSNPPAHGSEIVKFILSHNSLRDKWQEDLKNMRDRIKNMRKLLVKELKNKGCGKDFSFIERQKGMFSYTGLSKDQVNTLKKNNSIYIVNSGRINIAGLTTTNVGYVANAINDVI

SEQ ID NO: 124139 - protein, 49 aa, Unknown
  Bacterial polypetide isolated from the Sargasso Sea
GTQGSTFGGNPLAMSVGNAVMNEIFRKGFLSKVKSNSKYFISELNKIKN

SEQ ID NO: 124140 - protein, 308 aa, Unknown
  Bacterial polypetide isolated from the Sargasso Sea
SKASGNYIFDKEGNKILDAMAGLWCVNIGYGRDELAEVAKEQILRLPYYNSFFKTNNIPAAKLSKKLSEITPQGLNHTFFANSGSEANDTIIRMVRHYWALKREPQKRIIIGREYGYHGSTIMSASMGGMVDMHNQAAKENDFHHIPAPYSFKYKGNQSDDLFAETSSNWLEEKILELGKDKIAAFVAEPIQGAGGVIIPPNGYFEHIQEICKKYNILFIADEVITGFGRTGEWFASQKMNLSPDMMTLAKGLTSGYIPMSAVMVGEKVASTFIEEGGEFYHGFTYSGHPVAAAVALENLNIIERENL

SEQ ID NO: 124141 - protein, 299 aa, Unknown
  Bacterial polypetide isolated from the Sargasso Sea
LWLCQIGHGRTEVIEAVTKQMKTLEAYNIFDPFTNEPAAKLAKMVAERSPHPEGRVFLGCSGSEAVDTALKLSRLYQQLIGENEKQIVVRRTNGYHGTNFGGTSAQGIAPNREGWGDLVPHFMEVPNNDLEAAATVFANHGNQIAAMIVEPIQGAGGVYPPVDGYLEGLRKLCDDNGALLIFDEVICGFGRTGKWFGAQYFGVNPDLITFAKGVTSGYLPLSGVIVSRKICEIFEEPDFILRTGYTYSGHPTSCAAGIANLELIESESLLDRASHVGEQIRTGLESLQADGLIESWRGT

SEQ ID NO: 124142 - protein, 84 aa, Unknown
  Bacterial polypetide isolated from the Sargasso Sea
MFETIRGRGLMLGAVLSKAWKGKAPSVVKACQEHGVLVLTAGPDVLRLMPPLNILDEELEAGLNRIGKALKNLHEVELSSSTPK

SEQ ID NO: 124143 - protein, 175 aa, Unknown
  Bacterial polypetide isolated from the Sargasso Sea
DNRLLPIQGEGGNVNFSPATKLEIDLLKWLHDRMNYVPTEEVLSGRGLVNIYDYLVAKKKYVSQFSTAEEIGQAAINGDIISKDAAKLMIEIFATSIANNILITGSQKCVIICGGISVKLHDLFVESRFFERLRNKGRYQEYVDKVPILLSYDKNNGLKGAAEAFYNPFFKNKTL

SEQ ID NO: 124144 - protein, 242 aa, Unknown
  Bacterial polypetide isolated from the Sargasso Sea
MLNAEISRRREAAISRGVGMQTQVYVSRASGAEVWDVEGRRYIDFAAGIAVVNTGHCHPKVMEAVRAQSEVFTHTCHQVLPYENYIRLAERLNDKVPGNFDKKTVFVTTGAEAVENAIKIARVATGRSAIIAFGGGFHGRTFMGMSLTGKVAPYKKGFGAMMPDVFHVPFPADLHGISTSDALTAIEKLFKADLDPDRVAAIILEPVQGEGGFYPAPAELMRGLRELCDSHGILLIADEVQT

SEQ ID NO: 124145 - protein, 214 aa, Unknown
  Bacterial polypetide isolated from the Sargasso Sea
DEIAVGFGRTGSMFACEQAGIRPDFLCLSKALTGGYLPLAAVVATEEVYSAFYDDYPTLRAFLHSHSYTGNPLACAAALATLDIFEEDNVIENNKALAQRMATATAHLVDHPHVSEVRQTGMVLAIEMVQDKATKAAYPWQERRGLKVFEHALERGALLRPLGSVVYFLPPYVITPEQIDFLAEVASEGIDIATNSKVSVAVPKDFHPGFRDPG

SEQ ID NO: 124146 - protein, 278 aa, Unknown
  Bacterial polypetide isolated from the Sargasso Sea
MANTTPTTNSLENYFLPFTANKDFKKDPRLLDRGEGVYYWNHKGDTVIDASSGLFCVPLGHGRKEIAEAVHNQLLKLDYSPSFQVSHLPAFACAEKVANMLPGDLNNVFFTICGSTAIDSAIKIVQAYQHAIGQSHRMKFVSRERAYHGVNIGGTSLSGMIKNREIFTAAMPGVIHLRHTWMEENKFTKGQPEHGAHLADDLQRFVDMYGPESIAACFVEPIAGSTGTLVPPKGYLEKLRATCDKYGIVLIFDEVITGFGRTGKSFGSVKYNVQPDMV

SEQ ID NO: 124147 - protein, 396 aa, Unknown
  Bacterial polypetide isolated from the Sargasso Sea
MKNSQNLQHLWMPFSANRAFKSNPRLMNEAKGMFYKKTDGTSVLDGTSGLWCCNAGHNHPKIVRAIQDQAGKLDYAPSFQMGHPLGFEAARKLLSIAPTDDFQYVFFTNSGSESVDSALKIALGYQQHRGKVDKTILVGRERAYHGVGFGGISVGGLPLNKKHFSVLKNVDHVVTTHNLDKNAFSKGSPKWGMELADDLLRVIEKHGADQIAAFITEPIAGSTGVLIPPEGYLEKVREICTEHDILLIFDEVITGFGRLGSPFAAQYFNVIPDIIVCAKGLTSGTVPMGAVMVKKEIYDTYQCGDPKTIDFFHGYTYSAHPLAASAMIATLDVYLEEGLFDRVTQIASYWEEALHSLKGVDHVVDIRNLGLVGGIEMSSSNGKIGKRGYDVFESAF

SEQ ID NO: 124148 - protein, 227 aa, Unknown
  Bacterial polypetide isolated from the Sargasso Sea
DPKSIACAVIEPVAGEGGFIPASLKAMMQLKEFCNEHDIIMVADEVQTGFGRTGSLFAMSQFGVEPDIFTLAKSIAGGLPLSGVVGRAEIMDSVHVGGIGGTFGGNPVACAAALSVLDIMEDEKLPQRAIQIGEKINTMVKGIMNSCPWISGIRGLGAMQGIVIIDKDHEPDKEHTSRIHQYALENGLIMITAGTDGNVIRTLMPLTIRDNELDQSLEILSNALRVP

SEQ ID NO: 124149 - protein, 246 aa, Unknown
  Bacterial polypetide isolated from the Sargasso Sea
GFGPMPAGIKHHPFNQVDGLKKIINKNTAAVIIELIQGEAGIVPAKKVFINEIKKLCRKTNALIVVDEVQSGVGRTGYLYAYEKYNIKPDILCSAKGMGNGIPIGAILTSNKVAKAMHVGDHGSTYGGNPLACSVSYEVFKEVSKKSFLNSVIKKEKLFLSLLNDLNKKFDCFTAVRSAGLWIGLELNSKMKNLTLQNIMSSAYDEGLMILKANNNTLRLAPALTISEKEIKLGVKKLEKSLSRIL

SEQ ID NO: 124150 - protein, 274 aa, Unknown
  Bacterial polypetide isolated from the Sargasso Sea
MPTQIASVKHAMAPYCYRCPLKLSPENCGTACANDVEELIQTTTTGKIAGILAEPIMGVGGFITPPKEYFSIVADIVRKYGGIFISDEVQTGFGRTGKTWGIEHYGVEPDMITVAKGIANGFPLAAVISTKEIADSLDKNTISTFGGNPVSCASANATIDIIERENLAENAKDMGRILINGMKKIQKQYPETIGDVRGKGLMVGVELVKDETIKDRTPDVESTNKIMEETKKRGLLIGRGGLYGNSLRIAPALNIGSDAIEEALQIINESFGAL

SEQ ID NO: 124151 - protein, 438 aa, Unknown
  Bacterial polypetide isolated from the Sargasso Sea
MSDALPNLEHYWMPFTGNRYFKKNPRMFKKANGMHYTTYDDKTVMDGVSGLWCCNAGHCHPKIVEAIQKQAETLDYATAFQLGHPTIFAMAEKLVDMAPKELTHAFFTNSGSEAVDTALKIALAYHRARGEGHRTRLIGREKGYHGVGFGGISVGGMSPNRKMFGAMLPGVDHLKHTHNLEHNAFSVGQPQWGEHLADQLTEILMLHDPSTVAAVIMEPIAGSAGVYLPPVGYLNRIREICDEHGILLILDEVITGFGRTGSNFGADAFNVTPDIMTIAKGMTSGTVPMGGVLVKEEIYDTFMTGPEEAIEFFHGYTYSGHPLAAAAGLATLNVYEEEGLFENARELAPVLEEEVHKIKGTKHVIDIRNFGLLGAVELDPIEGKPTARAMSVFRECFDRGVLIRTTGDTIAICPPFIASADDVRKVVHTVKESLEAIG

SEQ ID NO: 124152 - protein, 422 aa, Unknown
  Bacterial polypetide isolated from the Sargasso Sea
MSNIDLETIKQNVPDAWIPSLDSLIVKGSNAEIWDKDNNRYLDYVGGYAVLNTGHLNPRVVKNVEEQLKNYSHSCFAFAPHENAVKVAEQINKRYPIEEHTKTFLVNSGAEAIENATKIARYYTKRKNIIAFKGGFHGRTYLAMGLTGKDNPYKNGFGPFPEFIHHAEYPYAYRDVTDEMAIDSVNNILKNKVDIDDTAAFVVEIQLGEGGYIPSSVDFLEELKSIAIKNDILLIFDEVQTGFGRTGEMFGANTVGVTPDIATLAKGIAGGFPLAAVVGKSEIMDSIHEAGIGSTFGASPISCAAALGVLEVFDKDDLLNHTKKQAAIMNESLNLLMNESPFIGDVRGYGTMLGVEIVEDQDSKKPGKEIALKIIDNCKNNGLLLVNCGLEGNVIRFMGPLTTPLDQVEEALNIFNKSVINI

SEQ ID NO: 124153 - protein, 427 aa, Unknown
  Bacterial polypetide isolated from the Sargasso Sea
MKNADLKSRKDAATPRGVGVMCDFYAERAENAELWDVEGRRFIDFAAGIAVCNTGHRHPKILAAIRDQLDHFTHTAYQIVPYASYVELAEKINARAPGDYPKKTAFFTTGAEAVENAIKIARAATGRPGVIAFTGGFHGRTMMGMALTGKVAPYKIGFGPFPADVFHAPFPNPLHGVTTADSLKAIEFLFKADIDPKRVAAIIFEPVQGEGGFYPAPAEFVRALRKLCNEHGILLIADEVQTGFARTGKLFAMHHYDVVPDLMTVAKSLAGGMPLSGVVGRADLMDAAAPGGLGGTYAGNPLAIASAHAVLDIIDEEKLCERATVLGDRVKAKLIALQSEVPQIADVRGPGGMVAVEFCKAGGTEPDAEFTKRVQALALERGLLLLVCGVYSNVVRFLFPLTIQDSVFDEAMGILEAVLKENVAVAV

SEQ ID NO: 124154 - protein, 401 aa, Unknown
  Bacterial polypetide isolated from the Sargasso Sea
VDAVGGLWCVNLGYSNEAVKNAISEQLNHLPYYSGFAGTTNPAAIEASYMVKEMFKADGMERVFFTSGGSDSVETCLRLSRQYHRLRGEPTRTKFISLKKGYHGTHFGGASVNGNNRFRIAYEPLLPGCFHLPSPYTYRNPFNETDPQKLALNIAQTFEDEIAFQDKNTIAAFIMEPIQGAGGVIVPDPSFMGLMQEICERNGILMISDEVITGFGRTGSWSGARHWNVKPDMMSMAKGITSGYFPVGAALMGEKVADVFENSNSPEAGIFHGYTYSAHPVGAAAVCACLSETQRISTKDNAGVRGKQLYEGILKLKKKFNVIGDVRGGQGLMAAIEVVSDQKKKTAMSMDEMKKLHQSTYEAGAMVRLGLNNVLMSPPLVISEAEIDQILDALDYGFSSM

SEQ ID NO: 124155 - protein, 216 aa, Unknown
  Bacterial polypetide isolated from the Sargasso Sea
MLGEGGFVPASKSEMKELKKFCKENEILFIADEIQTGFGRTGTFFAIEQFDIEPDMITIAKSIAGGLPLSGVIGKKEIIDSVHIGGIGGTYSGNPVACEAALAVLEIIEEQELPKKAKKIGDLIRSRINSILPICPWIKEVRGMGAMIGIEIINDKTGEPDKERTNRIHQQALRNGLIMITAGTFGNIIRTLMPLTIDKATLNEGIDILINALKTH

SEQ ID NO: 124156 - protein, 465 aa, Unknown
  Bacterial polypetide isolated from the Sargasso Sea
MPNHSLIEADRKHLIHPVISYRAHEARGVTVLESARGAFLRDAAGNELLDAFSGLWCVNVGYGQQSIVDAATEQMKKLPYATSYFHFGSAPAIELAQKLVEVSPASLQHVYFTLGGSDAVDSAIRFITHYFNATGRPAKKHIIALQRGYHGSSTMGAGLTALPAFHRNFDLPLPNQHHLPSPYAYRNDFADDAALIAASVAALEAKVAELGADNVAAFFCEPIQGSGGVIVPPVGWLKAMRDSCRKLGILFVADEVITGFGRTGPLFACQGENVEPDLMTVAKGLTAGYAPMGAVLMSDEIYQGIADGDAEAVVGHGHTYSAHPVSAAIGLEVLRLYHEGGLLANGVACGPRFARGLDALLAHPLVGDSRHRGLLGALELVSDKDSKAGFDPSLKLSERIAAASYENRLIFRAFGDNILGFAPALSYTEAEFDLMFERLEKTLDDVLAQADVRAALNVKIHATAC

SEQ ID NO: 124157 - protein, 461 aa, Unknown
  Bacterial polypetide isolated from the Sargasso Sea
MDGTPRDNDISKIVEADRAHIWHHLIQHKPFETNEPRIIVEGKDMRVWDQNGKEHIDGVSGGVWTVNVGYGRERIANAVRDQLLKLNYFAGAAGSVPGSIFAEKLIEKMPGLSRVYYCNSGSEANEKAFKMIRQIAHKRYGGKKNKILYRDRDYHGTTISTLSAGGQDERNAQYGPYTPGFIRVPHCLEYRAQWDLSGEEYGQRAADAIEEIILAEGPDTVGGLCLEPVTAGGGVITPPPGYWERVGEICKKYEILLHIDEVVCGVGRTGKWFGYQNFGIKPDMVTMAKGVASGYAAIACLVTTETVFEMFKDDASDPMNYFRDISTFGGCTAGPAAAIENMNIIEEENLLDNTLVMGDRLMANLRELSEKHEVIGDVRGAGLFCGAELVANRLDKTPADEKMVQAVVADCMAQGIIIGATNRSLPGLNNTLCFSPALIAMPDDIDAITESVDIALTKVFG

SEQ ID NO: 124158 - protein, 208 aa, Unknown
  Bacterial polypetide isolated from the Sargasso Sea
IQGEGGIKIPNPEYLSKLRSICDANSWLLMIDEVQSGFCRTGKWFAYQHSTILPDVVTVAKALGNGVPIGACLTNKKASEILTPGTHGSTFGGNFLSTTVGLKVLDIMKEKNLCRNARLMGTYLEQELKNKLMGLSIVKEIRCKGLMIGIELKVKCLDLVEEALNNKLVINVTKENTIRMLPPLIINKSEIDVIVKILYKIISRVRYE

SEQ ID NO: 124159 - protein, 147 aa, Unknown
  Bacterial polypetide isolated from the Sargasso Sea
RTYCCYNAIYDGFYSDDQSHTFLHGHSYTGNPLACAAANASIALFEQNELWNNIEVISKRISYHIEKIQHLKSVRTARSFGMIGAIEIDAGGASSYFNKSGKEVYKKLLKSGIILRPLGNVFAVVPPYIITEKQVDEIFRKLNEVLG

SEQ ID NO: 124160 - protein, 145 aa, Unknown
  Bacterial polypetide isolated from the Sargasso Sea
GIGSGFPLGACLATSKASVGMTTGKHGSTYGGNPLAVAIGREVLKIISNKKFLTDVDFISRYLWKNLKQLHSNYDEILDIRGAGLLLGIKTKQNNVMISNILKKNKLLTVPAGDNVIRLAPPLIINKIHVDQAIKILDQTFKTLL

SEQ ID NO: 124161 - protein, 119 aa, Unknown
  Bacterial polypetide isolated from the Sargasso Sea
TYGGNPLGCSIGLKVIDIISDPNFLYDVNRKAKLFHDGLLELLKKNTSVFEEVRGKGLMLGLKCKVRNIDVVNAGYSKKLLTVPAGDNVVRLLPPLTISEKDITEALKKLDGVMEVLSQ

SEQ ID NO: 124162 - protein, 355 aa, Unknown
  Bacterial polypetide isolated from the Sargasso Sea
LHAHPELSGEEHQTAALVAGELRACGWRVQEGVGRTGVLAEAGPLDGRTVGLRVDMDALPVEERTGLPFASTRQGVMHACGHDLHTCIGLGVARLLGAKPTLPFRVRLLFQPAEELAQGAVWMRDAGATDGLSALFGVHVVPNLPGGSVGIRRGCLTAAAGELEIQIQGEGGHGARPHQAVDAIWLAARVVTELQQAISRRLDALQPVVISFGRVEGGRAFNVIADRVRLLGTVRCLDLELHGRLPAWIDDTVQAICRSGGGEAEVSYRCIAPPVHNDPGLTDLMERRAVQLLGRDQVLPVDLPSLGAEDFAELLRDVPGTMLRLGVAGPDGCAPLHHGRFALDERALGVGIQVL

SEQ ID NO: 124163 - protein, 421 aa, Unknown
  Bacterial polypetide isolated from the Sargasso Sea
MSVKIITNIPGPRSLDLAERRSNSVAQGHGTVCNVYIKKGEGSLLTDVDDNVFIDFAGGIGTINIGHSHPKVTEVVNNQVNNYLHTCFTVAPYESYIRLAEKLSSLVPIKEECKAAFFNSGAEAVENAVKIARSYSNRKGVLVFSHAYHGRTLMTMSMTYKEDPYKKGFGPFAPEVYTLPYPNNENKINFDKVNPENIACAVIEPVLGEGGFIPASKSGMKELKRYCTENEVLLIADEVQTGFCRTGSLFAIEQYDIEPDMITMAKSIAGGLPLSGVVGKRKIMDSVHIGGIGGTYSGNPVSCEAALAVLEIMEEEKLAEKANKIGNILKSQIESIIPQCPWIKEIRGLGAMIGIEIVDEKTGDPDKERTNRIHKKALENGLIMITSGTFGNVIRTLMPLTINDNTLNEGVDILVNSLKNH

SEQ ID NO: 124164 - protein, 416 aa, Unknown
  Bacterial polypetide isolated from the Sargasso Sea
RQSPGPKSLSLAQRRSSSVAKGHGTVCNVYIEKAEGSLLEDVDGNLFIDFAGGIGTMNVGHSHPKILERIKNQLDKYSHTCFSVAPYESYIKLAERLSELVPISGASKAAFFNSGAEAVENAIKISRSFSKRTGVLVFSEAYHGRTLMTMTMTYKDDPYKKGFGPFSPEVYRLPYPSKKNKINFEDLDFDPKSIACAVIEPVLGEGGFIPASKKGMKSVEQFCKQNGILLVVDEVQTGYGRTGSFLAIEQFDIEPDIITVAKSIAGGIPLSGVIGKAEIMDSVHIGGIGGTYSGNPLACEAALAVLDIMSSEKLPENANEIGNVFRTKIDSMIHNAPWIKEVRGLGAMMAIEICDPDTGEPDKDRTNRIHKNALEHGLVMITAGTYGNVIRTLMPLNIDRSTLEEGLEILCDCLMA

SEQ ID NO: 124165 - protein, 440 aa, Unknown
  Bacterial polypetide isolated from the Sargasso Sea
MANTTPTTNSLENYFLPFTANKDFKKDPRLLDRGEGVYYWNHKGDTVIDASSGLFCVPLGHGRKEIADAVHQQLLKLDYSPSFQVSHLPAFTCAEKVAKLLPGDLNNVFFTICGSTAIDSAIKIVQAYQHAIGQAHRMKFVSRERAYHGVNIGGTSLSGMIKNREIFTAAMPGVIHLRHTWLDENKFTKGQPEHGAHLADDLQRFVDMYGPESIAACFVEPIAGSTGTLIPPKGYLEKLRATCDKYGIVLIFDEVITGFGRTGKSFGSVKYNVQPDMITMAKAITNGSQPMGAVGVSDKIYNAIVDNGPEHGVEFFHGYTYSGHPACVAASLATLDIYEKEDIFARAEKMSPYFLDAVFDAFKDVPAVTDVRGDGMMAAIDLAVDKTPGVRGYDAQKKTFANGVHIKFTGDSGIIAPALIAEEKHIDEMLQKIKEVVVKY

SEQ ID NO: 124166 - protein, 391 aa, Unknown
  Bacterial polypetide isolated from the Sargasso Sea
MDQELLNGLDQALPELIELRRHLHAHPELSGEEHQTAALVAGELRACGWRVQEGVGRTGVVAEAGPLDGPTVGLRVDMDALPVEERTGLSFASTRQGVMHACGHDLHTCIGLGVARLLGAREELPFRVRLLFQPAEELAQGAVWMRDAGATDGLNALFGVHVVPNLPGGSVGIRRGCLTAAAGELEIQIQGEGGHGARPHQAVDAIWLAARVVTELQQAISRRLDALQPVVISFGRVEGGRAFNVIADRVRLLGTVRCLDLDLHGRLPAWIDDTVQAICRSGGGEAEVSYRCIAPPVHNDPGLTDLMEGRAVQLLGRDQVLPVDLPSLGAEDFAELLRDVPGTMLRLGVAGLDGCAPLHHGRFQLDERALGVGIQVLTATLLEWMEVQSPR

SEQ ID NO: 124167 - protein, 166 aa, Unknown
  Bacterial polypetide isolated from the Sargasso Sea
QLFAHEWAEIEPDIMMVAKGIGGGFPLGAVLAKENAASGMTAGTHGSTYGGNPLGCSIGLKVMDIISDPNFLYDVNRKAKLFHDGLLELLRKNTSIFEEVRGKGFMLGLKCKVKNTDVVNAAYSNKLLTVPAGDNVVRLLPPLTISDKDINEALNKLDGVMTALSQ

SEQ ID NO: 124168 - protein, 451 aa, Unknown
  Bacterial polypetide isolated from the Sargasso Sea
MKVLILGAGRVGGSLARALVNNGYDVAIIDQDKNALNSLEEKLDILTIEGHASHPVSIKKSSADESTTVIAVTSDDEVNIIACQIAKKSFNVKKTICRITDSAYGNDLTVFGDNAIDILISPENEVKNHLKDLILHPGAHQIEKFADGKVNLVSVRARKKGKLVGRELKGIKDDMPETDAFIASIYRKGKPFIPSGETIIKENDEVYFISSEKNTDQIVDEFRDHEETYSRVMIVGGGKIGMSLAKEIEGEYKTKIIDSDEEKCASLSKQLDKAIVLHGSATDEDLLKSESISNIDIFCALTDDDETNLMSSLLAKKMGAKKTMIILNNPSYLGLVPGFIDIYVAPYRLTVSSVLQDLRDSDVTQDVMLKMDTGAEAVEGIVHANEYTSSLFGKSIKEISLPEGASIGAVIRHGELIMPRSEVELCLNDHLIIFLANKNMMSEVEVLFKTN

SEQ ID NO: 124169 - protein, 120 aa, Unknown
  Bacterial polypetide isolated from the Sargasso Sea
MSNPLACAAANASINLFKNQPRLEQVKNIERDLKKGLEVCKDMNIVVDVRIKGALGVIQVKEMHNLNWLRKRFVEEGVWIRPFLDVIYLMPSFIISNNDLNKLMNAITSIIPEWEHKYKN

SEQ ID NO: 124170 - protein, 75 aa, Unknown
  Bacterial polypetide isolated from the Sargasso Sea
DNNIIKEIRGKGLWIGMELNKHNFNAKDLCLMLLNEGLLCKETHKSVIRFAPPLMITKKEIDWAIEKITKVISSI

SEQ ID NO: 124171 - protein, 206 aa, Unknown
  Bacterial polypetide isolated from the Sargasso Sea
YLNRIREICDEHGILLILDEVITGFGRTGSNFGSDAFGVTPDIMTIAKGMTSGTVPMGGVLVKEEIYDTFMTGPEDAIEFFHGYTYSGHPLAAAAGLATLKVYEEEGLFENAIKLSPVLEEEIHQIKGTKHVIDIRNFGLLGAVELNPIEGKPTARALSVFRECYDRGVLIRTTGDTIAMCPPFIATADDIRKVVHTVKESLEAIE

SEQ ID NO: 124172 - protein, 399 aa, Unknown
  Bacterial polypetide isolated from the Sargasso Sea
MFDHIPAYPGDPILSLNEDFQLDPRPNKVNLSIGIYFDDAGKLPVMDAVRHAETALLGAIGPRSYLPMAGLPLYRDAAQALLFGANHEARAAGRIATLQTIGGSGALKVGADFLKRYFPASQIWISDPSWENHRVVFENAGLTVNTYPYYDERTGGLRFADMIETISRLPEQSIVLLHACCHNPTGVDLSPAQWAELVPVLQRRKLIAFVDMAYQGFGSGLEEDAACVRLLADAGVPLIAANSFSKNFSLYGERCGALSVVCKSRDEAARVLGQLMSAVRANYSNPPTHGARLVANVLSDASLRASWEAELATMRERILAMRGTIHDGLAGRVDEVMRARYVAQRGMFTYTGLSEAQVERLRSEYAVYVLRSGRMCVAGLNARNAGYVASSIAAVVAGA

SEQ ID NO: 124173 - protein, 364 aa, Unknown
  Bacterial polypetide isolated from the Sargasso Sea
DYATAFQLGHPTIFAMAEKLVDMAPKELTHAFFTNSGSEAVDTALKIALAYHRARGEGHRTRLIGREKGYHGVGFGGISVGGMSPNRKMFGAMLPGVDHLKHTHNLEHNAYSVGQPKWGDHLADQLTEILMLHDPSTVAAVIMEPIAGSAGVYLPPVGYLNRIREICDEHGILLILDEVITGFGRTGSNFGSDAFGVTPDIMTIAKGMTSGTVPMGGVLVKEEIYDTFMTGPEDAIEFFHGYTYSGHPLAAAAGLATLKVYEEEGLFENARKLAPVLEEEIHQIKGTKHVIDIRNFGLLGAVELNPIEGKPTARALSVFRECYDRGVLIRTTGDTIAMCPPFIATADDIRKVVHTVKESLEAIE

SEQ ID NO: 124174 - protein, 290 aa, Unknown
  Bacterial polypetide isolated from the Sargasso Sea
FCGISVGGMSPNRKMFGAMLPGVDHLKHTHNLEHNAYSVGQPKWGDHLADQLTEILMLHDPSTVAAVIMEPIAGSAGVYLPPVGYLNRIREICDEHGILLILDEVITGFGRTGSNFGSDAFGVTPDIMTIAKGMTSGTVPMGGVLVKEEIYDTFMTGPEDAIEFFHGYTYSGHPLAAAAGLATLKVYEEEGLFENARKLAPVLEEEIHKIKGTKHVIDIRNFGLLGAVELNPIEGKPTARALSVFRECYDRGVLIRTTGDTIAMCPPFIATADDIRKVVHTVKESLEAIE

SEQ ID NO: 124175 - protein, 454 aa, Unknown
  Bacterial polypetide isolated from the Sargasso Sea
MNKDILISGEKIEELQSLASQNLFMHAQQINDWAGDLRIFVKGEGVWVTDVNGNKYLDSTGGLWFKGAGYGRSEIGQAIYEQICEIETPPAMAACIPQIELAAKIADIYPDKSARSFFTSGGSESVETAVKMAKKYQMNTGKSGAYKVISRRYSYHGATAMAVSLGKPSTSDTMGPEMPGAIHVQNWDSYRIPKNMNSVDYAIHCANQFEEAIKHTGPDSVAAMIAEPISVAFGIHIPPKEYWQRLREIADEYNVVLIADEVITGFGRTGKYFATDHWDMIPDITTVAKSLTSGYSPLGAAIATKKIADSFIGSEKEMFLHLITFGGHPASCAAGLKNLEIYERENLVENSKDNGDYLLNKLEDLKKSKIVGDVRGLGLLAAIELVKDKKTKEKLPAAMEIQKKIPKYLNKSNIFTFRAGDIISLCPPLNINKDEIDFLVEGLSSAISRIEKEL

SEQ ID NO: 124176 - protein, 429 aa, Unknown
  Bacterial polypetide isolated from the Sargasso Sea
MTVKNADLQARKNAATPRGVGVMCDFYAARAENAELWDVEGRRFIDFAAGIAVLNTGHRHPKIVKAIADQLNNFTHTAYQIVPYASYVELAEKINDRAPGDFPKKTAFFTTGAEAVENAIKIARAATGRPGVIAFSGGFHGRTMMGMALTGKVAPYKLNFGPFPGDVFHAPYPNAVHGVTTADSIKAIEMLFKADIDPKRVAAIIFEPVQGEGGFNPAPAEFVRALRKICNEHGILLIADEVQTGFARTGKLFAMQHYDVLADLITMAKSLAGGMPLSGVVGRADVMDAAAPGGLGGTYAGNPLAVASAHAVLEIIDEEKLCERATQLGDVLKAKLNALQADVPQIADVRGPGAMIAVEFLKPGSGEPDAEFTKRVQTRALERGLLLLVCGVYSNVVRFLFPLTIPQAVFDEALVILEEVLKETVGVPA

SEQ ID NO: 124177 - protein, 351 aa, Unknown
  Bacterial polypetide isolated from the Sargasso Sea
MVYIQNDQLQSNVPSAWYSSLENFIVKGKNAEIWDSEGNRYLDYVGGYAVLNTGHLHPRVVKRVKNQLDNFSHSCFAFAPHENAVKLSEELNKRYPIEAETKTFMVNSGAEAVENAVKIARYFTNKKAILSFKGGFHGRTYLAMGLTGKDKPYKEGFGPFPEFVKHAVYPYSYRDISDDDALLSVKELLNNTLDPNDTAAIVIEIELGEGGYIPASSYFLTQLRDICDKHNILLIFDEVQTGYGRTGNMFGAETVGVRPDMVTLAKGIAGGFPLAAVLGKSEIMDSIHDAGIGSTFGASPVSCAAALGVLDAFDNENILKNANNQAKTMNTVLFNLMNEFDFIGDVRGYGP

SEQ ID NO: 124178 - protein, 464 aa, Unknown
  Bacterial polypetide isolated from the Sargasso Sea
NNFPGVGEEYLLKIWEQISLDPNIILKIPETFFTNRSKIKNVLSKRKKNIGLNLSISYKEPLHMLEAKDQFFYDENGRKYLDCVNNISHVGHSNKFVHKALVAQNLKMNTNTRYLYKIINEYSDKLLKTFPKKLNKIFFVCTGSEANDLALRIAKTYTKGTNILVMDNAYHGHTNSLIDISPYKFKSKGGEGKKNYVHVLRMPDSIRGKWTEKNKNWVNKYIDEASVKINKSFNNKNKLSSFFFESILGCGGQVVLPKNYLKNIFKFVRKKNALCIADEVQTGFGRVGDSFWAFEAHGVIPDIVTLGKPMGNGHPIAAVITTEKIANTFNNGMEYFNSFGGNPVSCAVANAVLDFIEKENLQNNAKVIGNYFIKELNKIKSKFPNLISSVTGTGLFIGIDLITNGNPLAPNSKLAKNLINNLRHRGILLSTDGPYNNVIKIKPPMVFNKANVDFVCREIKDFLV

SEQ ID NO: 124179 - protein, 111 aa, Unknown
  Bacterial polypetide isolated from the Sargasso Sea
LAAKVATKAIELLFDEGLIENSNRLGDYFISKLKEIDNKIIKEVRGKGLWIGVELNESKVNAKDLCLMLLKEGLLCKETHKTVIRFAPPLMISKDQIDWAIEKITNVIRSI

SEQ ID NO: 124180 - protein, 335 aa, Unknown
  Bacterial polypetide isolated from the Sargasso Sea
MQQQSDKKSHFFYLSNTDRPMLDVADGVYLYDKSGNRYLDASSGPIVSNIGHSNPNVIAAMKKQMDKTTFGYRLNFLTEPTERLAELTASLMPEGINQIFFTSGGSESVESCIKLARQYAVNTKKESKWKIISLYPSYHGGTLGALAITGMDPFVDPFSKMMKVMPKIPAATCYLDNDELTEEERGIKYADLLEKEILDQGPDSVLAFIFEPIGGASTGAIVPPDSYFKRIYEICKKYDVLIITDEVMTGAGRTGKFLAGEHWNFSPDIIAMAKGFAAGYAPLGVVAAKDEIVEVVNESGGFLHGHTYAGNPLACAAGLAVINEIIDNNLIKNAQ

SEQ ID NO: 124181 - protein, 505 aa, Unknown
  Bacterial polypetide isolated from the Sargasso Sea
FDIIHNHNEIINYINKFNFGNIFKFNLLDKNKSILKLSFDSPLLKGNPDNSLLKKRVNKIFKEDNSNIGIGLYNEKRKVYKGPNFISELNTNERRNIHLGVDIFIDKGTDLFAPIDGKIIILKNNNFKYDYGPTLVLEHSFKNNKFYTLYGHLSKIMFQKLKIGKKIKKGDWIGKIGNSNENGKWLPHLHFQIILDLLGQNENFPGVGEEFLLNIWNKISPDPNLILRIPKSFYSNNNNFRDTLKKRRKNISDNLSISYNKPLHMLEAKDQYFFDRYGRRYLDCVNNISHVGHSNSHVHKAMIEQNLKLNTNTRYLYDTINDYSELLLNKFPKKLNKIFFVCTGSEANDLAYRIAQTYTNAKDVFVMDNAYHGHTNSLIDLSPYKFNSKGGLGKKDYVHVLDMPDPLRGKWRYQNSNWIQKYIDEAKTVIRNKIKETKIACFFAESILGCGGQVILPKNYLKEIFSEIRKNNALCIVDEVQTGFGRVGRNFWSFEEHGVVPDIVT

SEQ ID NO: 124182 - protein, 184 aa, Unknown
  Bacterial polypetide isolated from the Sargasso Sea
GFGRLGSHFWGFEMSGVIPDIITLGKSIGNGHPLSVVITKKNIADVFNNGMEYFNSFGGNPVSCEIGQAVLGVIKEEKLQENASSVGNYLLDGLKNIQNKYNIIGDVRGRGLFIGIELIEDMDNLVPAVDEAEIVVNAMKDKGILISLDGPDHNVLKIKPPLVFNKKNADYFLESFEAVLLKSF

SEQ ID NO: 124183 - protein, 412 aa, Unknown
  Bacterial polypetide isolated from the Sargasso Sea
VKNYYEEPIVVSNAKGSIVKDLDGKSYLDFFGGILTVSIGHANEEVNTAVKTQINHLTHISSLYPSVPVVDLAERLVKLAPQNLEKVFLNATGTEADETAVMLAQLYTGNSEILALRHGYSGRSMLAQSLTAHAPWRAMPTQIASVKHAMAPYCYRCPLKLSPENCGTACANDVEELIQTTTTGKIAGILAEPIMGVGGFITPPKEYFSIVADIVRKYGGIFISDEVQTGFGRTGKAWGIEHYGVEPDMITVAKGIANGFPLAAVISTKEISDSLDKNTISTFGGNPVSCASANATIDIIERENLAENAKNMGRILIKGMKKIQKQYPKTIGEVRGKGLMVGVELVKDETIKDRTPDVESTNKIMEETKKRGLLIGRGGLYGNSLRIAPALNIGSDEIEEALQIINDSFGAL

SEQ ID NO: 124184 - protein, 378 aa, Unknown
  Bacterial polypetide isolated from the Sargasso Sea
TKQLSDLPYYSSFAGTTNPMAIEASYMVRNLFSEDGMSRVFFTSGGSDSVDTCLRLARQYHRLKGEPTRTKFISLKKGYHGTHFGGASVNGNNRFRINYEPLLPGCFHLPSPYTYRNPYNEADSLKLAQNIAAAFEDEIAFQGANSIAAFIMEPIQGAGGVIVPDPMFMTLMRQICDRHGILLISDEVITGFGRTGDWSGARHWGVQPDMMSIAKGITSGYYPVGAALMSDKVAEVFENDDTGDAAIFHGYTYSAHPVGAAAVIACLSETERLDTKVNAQVRGTQLYNGVMELAKKHTIVGDVRGGHGLMLGIELVSDQSKKTPLDMSNMKKIHQKTYEFGAMVRLGLNNILMSPPLTISENEVNQILGALDEGLTAI

SEQ ID NO: 124185 - protein, 270 aa, Unknown
  Bacterial polypetide isolated from the Sargasso Sea
MNPKEARNNIDKHMLADGMSQIIDLNKSHGSWLVDARDSREYLDLFSMFASLSVGYNHPYLIDNKERLMSSAINKPTNSDVYSVEMAEFVSTMGRVAQPDYLPYAFYIEGGGLAVENALKTAFDWKVRKNLSAGKGEKGSKIIHFKECFHGRTGYTMSLTDSPDPRKTLYFPQFDWPRIDNPKINFPLDQNLDLVIEREKHAINQIKDAITNNPDEIAGLIIEPIQGEGGDNHFRKEFLAELRNLANESDFLLIYDEVQTGVGVTGNNVG

SEQ ID NO: 124186 - protein, 136 aa, Unknown
  Bacterial polypetide isolated from the Sargasso Sea
AVLMNKKVSKAMVPGTHGSTFGGNPLAMSVGNEVMDIISNKKFLNNVKNLSKYFLKNLNIIKDKYPNIIKQIRGKGLLIGIQLHRDQTLFIKKLMENKLLTIKAAENVIRILPPLNVKKSEIDVALKVINKVCLEF

SEQ ID NO: 124187 - protein, 121 aa, Unknown
  Bacterial polypetide isolated from the Sargasso Sea
HGSTFGGNPLAMSAGNAIMDVMFKKGFLVNVAKNGKYFLSELNKLKNKYPKIIKEVRGKGLLLGLCLHKNQVPFIDKLLKSNLLTIRAAENVVRLLPPLNVTKQEINLSLKIIDKVCKNYR

SEQ ID NO: 124188 - protein, 290 aa, Unknown
  Bacterial polypetide isolated from the Sargasso Sea
KWPHIHQYSDHEKPEGMSREDWGIKSAQELEKAIYFEGANSVAAYIATPHGCGSEYAVVPPKEYWQEIRRICDHYNVLLIADEVVTGFGRTGKWFAMEHFGVEVDIMTIAKGMSGCYVPMGGVVISDEINEAFIKNNAVFAHGFTNSGNPLACAAASTAIDIYKDDKLIENSAAMGKKIESYKDMLLSHPTVKDMRGWGLMWVLEMVENKDSGEYFSIEKGAEGTFHSIAMQNGLVFYSTMYGRRREPLFKRGLPLMISPPLCINESQIEEMMEKVDHSISLWEAEMGVA

SEQ ID NO: 124189 - protein, 270 aa, Unknown
  Bacterial polypetide isolated from the Sargasso Sea
PDPLRGKWRYKDKDWIKKYIREAKDKVNNQSKIKKFSCLFVETILGCGGQVILPKNYLKEVFKAVRKNKALCIVDEVQTGFGRVGNNFWSFQEHEVIPDIVTLGKPMGNGHPIAAVVTTEKIASSFNNGMEYFNSFGGNPVSCAVGKSVLEVIENNKLQENSLSVGKYFLNKLEKIKNKNKKYISEVRGRGLFIGIDIIKNSNQLKPNKQLAKKIINFMKNKGILLSTDGPHDNVIKIKPPLVFNRENVDNVCKNLDSFFKKNINFTPYK

SEQ ID NO: 124190 - protein, 186 aa, Unknown
  Bacterial polypetide isolated from the Sargasso Sea
ICDKHNILLFFDEVQSGFGRSGKLYSYEWAKIKPDILATAKGIGSGFPLGACLASKKASEAMTKGKHGSTYGGNPLAVSVGREVLKIISDKVFLKKVDSLSRYLWINLKKLEAKYDEIIEIRGAGLLLGIKTRKNNIFISNLLKKNKLLNVPAADNVIRLAPPLVITKKHADEALKIINETFKKLL

SEQ ID NO: 124191 - protein, 280 aa, Unknown
  Bacterial polypetide isolated from the Sargasso Sea
VIEKGKGFYVSDSDGNSYLDFFGGILTVSVGHANDEVNTAVKAQVDRLSHISSLYPSIPVVELAEKLVGLAPDNLKKVFFNASGTEADETAVMMAQLYTGNTEVIALRHGYSGRSLLAQSLTGHAPWRALPSQVGSVKHALAPYCYRCPLKMTYPECGVACAKDVEELINTTTTGKVAGILAEPIQGVGGFITPPDEYFSIVSDIIHDHGGIFISDEVQTGFGRTGKTWGIEHSGVEPDMITVAKGIANGMPLAAVITTKDIADSLQKNTISTFGGNPCK

SEQ ID NO: 124192 - protein, 270 aa, Unknown
  Bacterial polypetide isolated from the Sargasso Sea
ALKIACHYTKRKKILSISHAFHGRTAAAAAVTWGSESWYGFPSKPFEVEFIPRNNSDLARKMINSDIAAVIVEPIQGVAGAFDLSEEFLKSIRDACNDHSVLMIVDEVQSGMGRSGKYFAIQNFNIEPDIMTAAKSLGGGLPCSVIYINSLLDENIKKGELGSTFGGNPVICSAIEFVIQLIKEKNILKNVIEKEKEIREFCITGPVNEIQGKGLLLGLHTELPAQEIQKKLLKKNILTGLSSDPNILRLLPPLVLRSEHIERLSEALSA

SEQ ID NO: 124193 - protein, 253 aa, Unknown
  Bacterial polypetide isolated from the Sargasso Sea
KDKNWSRKYIDDAIKKIREVVKNKNLSCLFVESILGCGGQLILPKNYLKEIFWEIKKNNALCIVDEVQTGFGRVGSKFWSFQEHNVIPDIVTLGKPMGNGHPIAAVVTTEKIATIFNNGMEYFNSFGGNPVSCSVGNAVLEVIEKENLQKNALVVGKYFLAKLEKLKNENKKYISEVRGRGLFLGIDIIKNYDHLKPNKKLANQIINYMRDNGILLSTDGPYDNVIKIKPPLVFNKKNVDFVLHYLYSFFNKI

SEQ ID NO: 124194 - protein, 284 aa, Unknown
  Bacterial polypetide isolated from the Sargasso Sea
DAAFGTLLSQLVLGADSALIAEQRAGATQTPGGTGALRLAGDFIRHCLPGRGIWLSDPTWPIHETLFAEAGLKVGHYPYVGADNRLDVEAMIASLTHLPKGDVVLLHACCHNPTGFDLTPRDWKRVLEVVKARELLPLIDFAYQGFGDGLVEDAWAVRLFAAELPELLITSSCSKNFGLYRERTGALIVCAGDAEKLVDIRSQLASIARNLWSTPPAHGAAVVAQILGDDELKGLWLDELEGMRLRVASLRRGLVEALVPHCLSERFAHIAEQRGMFSYTGLSP

SEQ ID NO: 124195 - protein, 259 aa, Unknown
  Bacterial polypetide isolated from the Sargasso Sea
RVDNPKLEFPITDDVLHHVKIAEDKVIKQIVSAVHNNPDEIACLIIEPIQGEGGDNHFRQEFFQQLRSLADEHEFLLIYDEVQTGVGVTGNMWAHQQFAESCRPDIISFGKKMQICGIFCGNRVDEVENNVFHESSRLNSTWGGNIADMVRITIYLEIIAKDNLVNNASENGLYLLQKLQGIQEEYSDIVSNARGSGLFAAFDLQDSEQRDSLASLIISEGALILGSGKKSIRFRPHLTISKEEIDLADQIIRRAIARL

SEQ ID NO: 124196 - protein, 189 aa, Unknown
  Bacterial polypetide isolated from the Sargasso Sea
RKICNEKKILLILDEVQCGIGRSGDFFAFEGSKIKPDIVPIAKGIGGGFPLGAVLMTKKVAKSMSPGSHGSTFGGNPLAMSIGNAVLDQIFKKGFLKSIKNISKYFFNELNKVKNDYPKLIKEVRGIGLLIGLQLFNDQKKFIQKLENNKLLTIRAAENVVRILPPLNVKKSEINLAVKIIRKVCKECK

SEQ ID NO: 124197 - protein, 138 aa, Unknown
  Bacterial polypetide isolated from the Sargasso Sea
MGACLSTTKASIGMTKGSHGSTFGGNPLAVSIALEVVKILTTSGFLKEVDEKSRYLWKKLKEFEKNFEEIVEVRGAGLLLGIKTKSSNIEINNMFLKNKLLCLLADDNIIRIAPPLIVSKKEIDQALQIIEKALMEYQ

SEQ ID NO: 124198 - protein, 239 aa, Unknown
  Bacterial polypetide isolated from the Sargasso Sea
LDHIEFKNFKPRFPNIRSKIKKNTAAIMLETIMGEGGIKSIPDKCLKYLRKICNEKKILLILDEVQCGIGRTGDFFAFESSKVKPDIVPIAKGIGGGFPLGAVLMTKKVAKSMSPGSHGSTFGGNPLAMSVGNAVLDQIFKKGFLNNLKKISKYFYKELNKIKKDYPNIIKEIRGKGLLIGIQLHFDQMKFIKSLEKNYLLTIRAADRVIRVLPPLNVKKNEIDLALKIIKKVCREYKK

SEQ ID NO: 124199 - protein, 311 aa, Unknown
  Bacterial polypetide isolated from the Sargasso Sea
NCIRLKVRKNIAKGVNGKGSKIIHFKECFHGRTGYTMSLTDSPDPRKTLYFPKFDWPRIINPKIKFPLNDKNLNSVIENEKIAINQIKQALHDNPHDIAGLIIEPIQGEGGDNHFRCEFFKELRSLANQEEFLLIYDEVQTGVGITGQMWCHQSFNPKNCQCTCEDASTAPDIIAFGKKTQVCGIFASKRLDEVDDHVFHESSRINSTWGGSLVDMVRFTLYLEIIENENLVKNANSMGSHLTERLTSLEEKYENKVSNVRNRGLYGAFDLIDSKSRDKLLEIILDEGAMMLGCGTRSIRFRPHLNISPEE

SEQ ID NO: 124200 - protein, 305 aa, Unknown
  Bacterial polypetide isolated from the Sargasso Sea
YIEGGGLAVENALKTAFDWKVRKNLSAGKGEKGSKIIHFKECFHGRTGYTMSLTDSPDPRKTLYFPQFDWPRIDNPKINFPLDQNLDLVIERENQAINQIKDAITNNPDEIAGLIIEPIQGEGGDNHFRKEFLAEIRNLANESDFLLIYDEVQTGVGVTGNMWAHQAFGDTVRPDIISFGKKTQVCGIFAGERLDEVENNVFHESSRLNSTWGGSLVDMVRFTIYLEIIENEKLVQNASAVGEHLSSCLYTLQSNHDNLVSNARNRGLFGAFDLPDSDTRDKAINSISNEGAMMLGCGSRSIRFA

SEQ ID NO: 124201 - protein, 242 aa, Unknown
  Bacterial polypetide isolated from the Sargasso Sea
YLDFVGGYAVLNTGHLNPRVIQRVKKQLNDYSHSCFAFAPHENAVELCEEINKRYPIKKKTKTFLVNSGAEAVENAIKIARYATGKEKIIAFKGGFHGRTYLAMGLTGKEKPYKEGFGPFPKFITHVDYPYHYRDISDEKVLNQIENTLLKKIDPDKVAAIVIEIQLGEGGYIPATENFLKQLKKVAKQHNILLIFDEVQTGFGRTGEMFGADKINVEPDMVTLAKGIGGGFPLAAVVAKLK

SEQ ID NO: 124202 - protein, 224 aa, Unknown
  Bacterial polypetide isolated from the Sargasso Sea
ALIAEPIQGVGGFATPPDGFFGAMHKVLAANDILFISDEVQTGWGRTGDHFWGYEAHGITPDILTFAKGVGNGITLAGCVARAEVMNVLDRTSFTTFGGNPLSVAAGRATLKFVKDHDLQSNAAARGQQMTEMLTGACDTTDWVGELRGKGLMQAIECVQPGSVEPNAAAATQLIEVCKDHGLLVGKGGLYGNVIRLTPMLNVSEEEMSEGCEIIVSALNSVTG

SEQ ID NO: 124203 - protein, 303 aa, Unknown
  Bacterial polypetide isolated from the Sargasso Sea
AEEVAAISGIPDARVLFTTSGSEANDTAILLATNYRQSNQLLAMRNSYHGRSLTAQAVTSHRSWLTSSYSGLDVHFVQGPYRLRSPFRELEDEAFTQACVSDLVQLLDMTDAGGFAALIAEPIQGVGGFATPPDGFFGAMHKVLAANDILFISDEVQTGWGRTGDHFWGYEAHGITPDILTFAKGVGNGITLAGCVARAEVMNVLDRTSFTTFGGNPLSVAAGRATLKFVKDHDLQSNAAARGRQMNEMLAGACDTTDWVGELRGKGLMQAIECVQPGSVEPQCYGRYATHRSLQRPRLVGRQ

SEQ ID NO: 124204 - protein, 266 aa, Unknown
  Bacterial polypetide isolated from the Sargasso Sea
MGGFHGRTMGSVSATAQPQYHEGLGPMVAGFQYAPHGDLDAVEQLIDEHTGGIMVEPILGEGGVVPAPDGFLQGLRRIADERDLLLVFDEVQCGCGRTGKWFGYQHFGVTPDVMTLAKSLCAGVSGGAMLTSVDLAKYLRPGMHAATFGGNPLAAVAGIAAIEMIEKDNLLSHVETIAKIFQEQLSHLKDECDVIVSVRVLGMMIGIELSIDGTAVVQACMERKLLVNCTQGRVIRLLPAMTLSPDEARDGCNRLRDAITEVASRY

SEQ ID NO: 124205 - protein, 140 aa, Unknown
  Bacterial polypetide isolated from the Sargasso Sea
TLVRPDILSVMKKGEHSSTFGGNPLACAAGTATLQALTQDGLIENAKSMGEKFSNGLEELKSKHSVIREIRGKGLMIGVELKFEVKDILMEGIKNGLLLLYSGRNILRFLPPLVISEGDVVKTLQILYKLLTNEENRRNG

SEQ ID NO: 124206 - protein, 270 aa, Unknown
  Bacterial polypetide isolated from the Sargasso Sea
GSWLVDARDGREYLDLFSMFASLSVGYNHPYLIDNKERLMSSAINKPTNSDVYSVEMAEFVSTMGRVAQPDYLPYAFYIEGGGLAVENALKTAFDWKVRKNLSAGKGEKGSKIIHFKECFHGRTGYTMSLTDSPDPRKTLYFPQFDWPRIDNPKINFPLDQNLDLVLEREKHAINQIKDAINNNPDEIAGLIIEPIQGEGGDNHFRKEFLAEIRNLANESDFLLIYDEVQTGVGVTGNMWAHQAFGDAVRPDIISFGKKTQVCGIFAGER

SEQ ID NO: 124207 - protein, 272 aa, Unknown
  Bacterial polypetide isolated from the Sargasso Sea
WVEIIEVPDDYRGSFKKDDPDRAVKFANLVDGAIERLNLKGIGLSGFIMETFPSVGGQIIPPKRYLEQVYSKIRKHGGVCIADEVQTGLGRLGDYYFGFEFQEVNPDIVVLGKPLGNGHPLGAVITTREIGESFDNGIEFFSTFGGSNLSCRIGAEVLDIVDEEKLQKNAKTVGDFLISGFNELKNDFDFIGDVRGMGLFIGIEIINGDGSEATELCAYIKNKMRENRILIGSDGPKDNIIKIRPPLTIEIEDAQMLLTNLSEVLEQTLDWT

SEQ ID NO: 124208 - protein, 207 aa, Unknown
  Bacterial polypetide isolated from the Sargasso Sea
SSILSELIHLAKKYNVITIADEVFTGFGRTGKWFACDHIENKPDIMCLSKALTGGFLPLGLTVVNSDIYDGFYSDNQSHTFLHGHSYTGNPLACAAANASISLFVDDNLWENISLISKRIKFHIEEISSLKTVRSARSFGMIGAIEIDAGGKSSYFNKSGKSIYKKLLKSGLILRPLGNVFAVIPPYIITKDQTDEVFNKLKQVLIN

SEQ ID NO: 124209 - protein, 142 aa, Unknown
  Bacterial polypetide isolated from the Sargasso Sea
PIGAVLMTKKAASGMIPGTHGSTFGGNPLAMSIGNAVLDQIFKKGFLTNVKKISKYFQSELKKIQSEYSKIIKDVRGVGLLIGLQLYKDHTEFIKKLMDNNLLTIRAGENVIRILPPLTVKKKEIDLAIKIIRKVCKLYKKV

SEQ ID NO: 124210 - protein, 260 aa, Unknown
  Bacterial polypetide isolated from the Sargasso Sea
MGRTLAAIHASGSKKMTEGFGPKIPGFDHFIFGNHRSLRKSITKKTAAIMVEPILGEGGIKVIPKWCLKGLRKLCDQKKILLICDEVQCGIGRSGKFFAFEYSGIKPDIVPIAKGIGGGFPLGAVLMNKKVATGMTPGTHGSTFGGNPLAMRIGNAVLDKIMKKKFLKNIQKISKYFLNELNKIKNDHPDIIKEIRGLGLLIGIQLFNDQAKFIKKLEKNKLLTIKAADNVIRILPPLNVKKAEIDISIKIIRKVCKEYK

SEQ ID NO: 124211 - protein, 194 aa, Unknown
  Bacterial polypetide isolated from the Sargasso Sea
KFLNILRKFCSKHDILLFLDEVQSGFGRSGKLYAHEWAKIKPDILATAKGIGSGFPLGACLATSKVSVGMTSGKHGSTYGGNPLAVAIGREVLKIISNKKFLTNVDFISRYLWKNLKQLHSNYDEILDIRGAGLLLGIKTKQNNVMISNKLKENKLLTVPAGDNVIRLAPPLIINKKHADQAIKILDQTFKTLL

SEQ ID NO: 124212 - protein, 277 aa, Unknown
  Bacterial polypetide isolated from the Sargasso Sea
HPYVLDNKDRLLASAINKPTNSDIYSKSMAEFVDTMGRIAQPDYLPYSFYVSGGTLAVENALKVAFDWKVRKNIAKGNPELGSKVLHFEKCFHGRSGYTLSLTDSPDPRKVKYFPKFDWPRVSAPAIHFPLDVHSLEDVKNREQKSIKEIKDAISNNPDDIACIIIEPIQGEGGDNHFRPEFFVKLKEICLENDILLIYDEVQTGVGITGEMWAHQHICKINCECGSLDHCISVEPDIISFGKKTQCCGIFAGQRIDEVENNVFQESSRINSTWGGN

SEQ ID NO: 124213 - protein, 258 aa, Unknown
  Bacterial polypetide isolated from the Sargasso Sea
EQLFSLLPGKIAESCKIQFCSPSGADGVEAAIKLTRHYTGRPTIMAFHGAYHGMTSGALAASGNLTPKSAGGNGRDVHFLPYPYAFRCPFGTDGSATDQLSINYIRTVLSDPESGITKPAAIIVEVVQGEGGCIPAPDTWLIELRELTLRHEIPLIVDEVQTGLGRTGTLFAIEHSGIRPDVLVLSKAFGGGYPLSVVVYDERLDTWPPGAHAGTFRGNQIAMVAGLSTMRIVEREDLSAHADRVGKLLVAGLEKKKR

SEQ ID NO: 124214 - protein, 126 aa, Unknown
  Bacterial polypetide isolated from the Sargasso Sea
MDFGSHGSTFGGNPLACTVGNAVLDIMLKDKFFSEINVVAKKLYEGLQNVITDFPSVIENIRRRGFILGLKCKVENDKFVNLAREKYILTVKASDNVVRLLPPINLTLTECDEALDKIRATCSELK

SEQ ID NO: 124215 - protein, 143 aa, Unknown
  Bacterial polypetide isolated from the Sargasso Sea
PIGACLVTNKVSKGMKFGSHGSTFGGNPLACSVAKRVIEIISEKKFLNDLNQKVTFFTNKLEAIKNTYNHLIDEIRGRGFLLGIKCKINNSIFIERLRNNGLLVVGANESVIRILPPLNVSKKELRIALKIIEKTCIDINNKR

SEQ ID NO: 124216 - protein, 226 aa, Unknown
  Bacterial polypetide isolated from the Sargasso Sea
VVEPIMGCGGQVILPDEFLKRSFELVRDAGGICIADEVQIGFGRVGTDFWGFETAYVEPDIVTMGKSMGNGHPLSVVVTTKDIAEKFNNGMEYFNSFGGNPVSCAVGKAVLRAVEEENMQQNANKIGKYLLQELKELQSEFSLIGEVRGRGLFIGIELIKNSSNLSPASKEAEEVVNKMKRKKILLSTDGPDHNVIKIKPPMIFNRQNADELVLKLSEVLSNIDYE

SEQ ID NO: 124217 - protein, 133 aa, Unknown
  Bacterial polypetide isolated from the Sargasso Sea
MCLHQVNMVQPFGGNPLSAKVAKKSIEVIINEKLSENAFELGCLFRKSLDDYISKSTIAKLIRGKGLLNGLVIDDDSKGNKAWQICVDLMKNGVLAKPTNRNVIRFAPPLVINKTQIQQAIVIIKSTLVKFEN

SEQ ID NO: 124218 - protein, 300 aa, Unknown
  Bacterial polypetide isolated from the Sargasso Sea
ECFHGRTGYTMSLTDSPDPRKTLYFPKFDWPRIINPKINYPLNDKNLNSVIENEKIAINQIKQAIHDNPDDIAGLIIEPIQGEGGDNHFRCEFFKELRSLANQEEFLLIYDEVQTGVGITGHMWCHQSFNPKNCQCTCEDASTAPDVIAFGKKTQVCGIFASKRLDEIDDHVFHESSRINSTWGGSLVDMVRFTLYLEIIENENLVKNANSMGSHLSEHLTAIEKKYEDKVSNARNRGLFGAFDLIDSESRDKLLEIILDEGAMMLGCGTRSIRFRPHLNITSSELDQGFEMIDRALKRS

SEQ ID NO: 124219 - protein, 259 aa, Unknown
  Bacterial polypetide isolated from the Sargasso Sea
DASSIEDVIARENISLNQIKDAIKNNPDDIACIIIEPIQGEGGDNHFRPEFLIALKDLCLENDMLLVFDEVQTGVGITGEMWAHQNLCKVSCDCGSITRCQPMEPDIISFGKKTQCCGIFAGKRLDEVENNVFHESSRINSTWGGNLVDMVRFTIYLEIIEKENLVSKARNNGLYLLEQLNGLQAEFDSISNARGKGLFCAFDLPNTDLRDSLASKLMDNKVIVLGSGKRSIRFRPHLNITKQDIDKGISAIKNCLKSL

SEQ ID NO: 124220 - protein, 145 aa, Unknown
  Bacterial polypetide isolated from the Sargasso Sea
FMPVSVFLSSEEVLQWMNLGSHGSTFGGNPLGSAIAKRSLELLEEEGLIENSRVMGDYFKQSLLELNSPIIKEIRGKGLWLGVEIDQSYITGKDLSKLLLKRGILCKETRDTTIRFAPPLIINKDEIDWGVEIIDSAFKAIEEKA

SEQ ID NO: 124221 - protein, 243 aa, Unknown
  Bacterial polypetide isolated from the Sargasso Sea
YINILKETIKKIQKRGKQLSLFIIEPVMGCGGQIMIPRSFMKEAFQIVNEAGGLFIVDEVQIGFGRLGSHFWGFQMSGVVPDIITLGKSIGNGHPLSVVITKKNVANEFNNGMEYFNSFGGNPVSCEIGQAVLDVIKEEKLQENASNIGDHLLDGLKNIQNKYNIIGDVRGRGLFIGIELIKDMDNLVPAVDEAEIVVNAMKDKGILISSDGPDHNVLKIKPPLVFNKKNADYFLESFKAVLS

SEQ ID NO: 124222 - protein, 261 aa, Unknown
  Bacterial polypetide isolated from the Sargasso Sea
PVIDLDKSHGSWLVDGNTGDEYLDMFSMFASLSVGYNHPYVLDNKDRLLASAINKPTNSDIYSKSMAEFVETMGRVAQPDYLPYSFYVSGGTLAVENALKAAFDWKVRKNIAKGKPELGSKVLHFEKCFHGRSGYTLSLTDSPDPRKVKYFPKFDWPRVSAPAIHFPLNDQSLEDVKKREEKSINEIKDAINNNPDDIACIIIEPIQGEGGDNHFRPEFFIKLKEICLENDILLIYDEVQTGVGITGKMWAHQHICKINCE

SEQ ID NO: 124223 - protein, 210 aa, Unknown
  Bacterial polypetide isolated from the Sargasso Sea
PKNYLKEVFKEIRKNKALCIVDEVQTGFGRVGNAFWSFEEHDVVPDIVTLGKPMGNGHPIAAVITSEKIASVFNNGMEYFNSFGGNPVSCAVGKAVLEVIEKEKLQQNALDIGKYFLKKLQNIKNKNKKYISEVRGRGLFLGIDIIQEANKLKPNKKLAKKIINFMREKGILLSTDGPYDNVIKIKPPLLFNRDNVDNVCKNLEIFFKKI

SEQ ID NO: 124224 - protein, 210 aa, Unknown
  Bacterial polypetide isolated from the Sargasso Sea
MVETILGEGGIKVIPDWCLKGLRKLCSKKKILLILDEVQCGIGRSGDFFAFEKSKVKPDIVPIAKGIGGGFPLGAVLMTKKAASGMIAGSHGSTFGGNPLAMKIGSQVFDIISKKSFLNNVKKNSSFFLKQLYKVKKRYPKIIKEIRGRGFLIGLQLFKDQTNFIQKLMDNKLLTIRAAENVVRILPPLNVKKSELNLALKIIEKVCSTY

SEQ ID NO: 124225 - protein, 245 aa, Unknown
  Bacterial polypetide isolated from the Sargasso Sea
YTNEAIDKIKTISKNNKISCFFAESILGCGGQVILPKDYLKKLFKEIRNFNGLCIVDEVQTGFGRIGSNFWSFQAHNVIPDIVTLGKPMGNGHPIGAVITTEKIASTFNNGMEYFNSFGGNPVSCAVGKSVLEVIQDKKLQKNASVVGKYFMKQLNKIKNKHNKYISEVRGRGLFLGIDLIEDYNNYKPNKKLAKKIINYMRDRGILLSTDGPFDNIIKIKPPLIFNKKNVDHICYALDNFFNKK

SEQ ID NO: 124226 - protein, 264 aa, Unknown
  Bacterial polypetide isolated from the Sargasso Sea
KFRGEHIAKGKSIRQYYIQLLKDTIKKIQQRGKQLSLFIIEPVMGCGGQIMIPRSFMVEAFQIVNEAGGLCIVDEVQIGFGRLGSHFWGFQMSGVVPDIITLGKSIGNGHPLSVVITKKSIAEVFNNGMEYFNSFGGNPVSCEIGQAVLDIIKEEKLQENASIIGDHLLDGLKKIQNKYDIIGDVRGRGLFIGIELIKDSDNMVPAADEADFVVNAMKKKGILISSDGPDHNVLKIKPPLIFNKENANYFLESFESIISKIFYK

SEQ ID NO: 124227 - protein, 290 aa, Unknown
  Bacterial polypetide isolated from the Sargasso Sea
YLHESILDYAENLTRTLPNSLEVCYFTNSGSESNDLALRIARSYSNSNESIVLSSAYHGHTASLIDVSPYKFLGNGGNGKPNFVHLIPVPDKFRGEHKEKGKSIGEYYIQLLKSTIKNIQRRGKQLSLFIIEPVMGCGGQIMIPKSFMLEAFQIVNEAGGLCIVDEVQIGFGRLGSHFWGFQMSGVVPDIITLGKSIGNGHPLSVVITKKNIADVFNNGMEYFNSFGGNPVSCEIGQAVLDVIKEEKLQENASSTGNHLLEGLKNIQKKYNIIGDVRGRGLFIGIELIKD

SEQ ID NO: 124228 - protein, 148 aa, Unknown
  Bacterial polypetide isolated from the Sargasso Sea
MVFLSRKWGYKVKGIPANQAKIIFAENNFWGRTLAAVSSSSDPSAYNDYGPFMPGFVSVPYNNLAALEEELKDENTAAFMVEPIQGEAGVFVPDPGYLKGVRELCTKHNVLWIADEVQTGLCRWKLNTKEEKLNQTMFSSQDWPDALL

SEQ ID NO: 124229 - protein, 277 aa, Unknown
  Bacterial polypetide isolated from the Sargasso Sea
LKKSHGSWLVDARDNREYLDLFSMFASLSVGYNHPYLMDNKERLMSSAINKPTNSDVYSVEMAEFVSTMGRVAQPDYLPYAFYIEGGGLAVENALKTAFDWKVRKNLSAGKGEKGSKIIHFKECFHGRTGYTMSLTDSPDPRKTLYFPQFDWPRIDNPKINFPLDQNLDLVLEREKHAINQIKDAITNNPDEIAGLIIEPIQGEGGDNHFRCEFFQTLRNLADENEFLLIYDEVQTGVGITGNMWAHQSFSPSGCNCDCKNSNTKPDIIAFGKKTQV

SEQ ID NO: 124230 - protein, 195 aa, Unknown
  Bacterial polypetide isolated from the Sargasso Sea
LCLKSLRKLCNKKNLLLILDEVQCGVGRTGDFFAFEQSKVKPDIVPIAKGIGGGFPLGAVLMNKKVASGMIAGSHGSTFGGNPLAMTIGSTVMDIVSNKIFLKNVKKNSKFFHNELIKIKHNFPKMIKEIRGKGFLIGIQLFKDQTKFIELLMKKKLLTIRASENVVRILPPLNVKKSEIKQALKIIQKVCIDLK

SEQ ID NO: 124231 - protein, 280 aa, Unknown
  Bacterial polypetide isolated from the Sargasso Sea
NAVKISKSFTGRSGILVFSHGFHGRTQMTMSMTYKEDPYKKGFGPFLANIYRLDFPDQNLDLAKINFDPKEIACMVIEPIAGEGGFIPVSKDMMVTLRKFCDDNGIVMIADEVQTGFGRTGTLFAMEQFDAEPDLFTLAKSIAGGLPLSGVIGRSRIMDSAHVGGIGGTFGGNPVACAAALAVLDVMLDNKLPQRAFEIGYKICMKVEAIMDLCPWVAGIRGMGAMQGIIIIDPDSGNPDKKRTNRIHKYALENGLIMITAGTYGNIIRTLMPLTIKEDE

SEQ ID NO: 124232 - protein, 236 aa, Unknown
  Bacterial polypetide isolated from the Sargasso Sea
IDGFDQVPFADHEAIKKAINKNTAAIMIETIMGEGGIKVVPDFCLKGLRDLCDENGLLLILDEVQSAYRTGSFFAFEKSGIIPDIVPIAKGIGGGFPLGACLVTKKAATGMTPGTHGSTFGGNPLAMAVGNSVLDILFEKDFFNKVKQKGEYFDTGLNKIKNKFPKIITEVRGIGLMKGIKVSVDNSEFIKKLMNHKMLTVKAEESVIRLFPPLIVENKELDEAIDKIQIVCKEMS

SEQ ID NO: 124233 - protein, 212 aa, Unknown
  Bacterial polypetide isolated from the Sargasso Sea
ASMPIGYNHPLLLENKERLIAPTLNKITNSDIYSTEMAEFVSTMGRIAQPDYLPYAFYVEGGALAVENALKAAFDWKVRKNLAAGIGEKGSKIIHFKECFHGRTGYTMSMTDSPDPRKTMYYPQFDWPRIDNPTINFPLDEESLNKVIQAENTAVDQILEALDKNKNEIAALIIEPIQGEGGDNHFRCEFFQQLRQLADEHEFLLIYDEVQT

SEQ ID NO: 124234 - protein, 275 aa, Unknown
  Bacterial polypetide isolated from the Sargasso Sea
LKNKNKKTIITFKGAFHGRTFAALSAQKNKKYSEGFTPLLSGFKNITFNDEKVLLKNITKETAAIMIEPVQGEGGIRPASLKFLKYIKKICIKHDILLFLDEVQSGFGRSGKLYAHEWAKIKPDILATAKGIGSGFPLGACLATSKASLGMISGKHGSTYGGNPLAVSIGREVLKIISNKKFLTHVDFISRYLWKNLKQLHSNYDDILDIRGAGLLLGIQTKQNNVMISNKLKKNKLLTVPAGDNVIRLAPPLIINKKHVDQAIKILDQTFKTLS

SEQ ID NO: 124235 - protein, 245 aa, Unknown
  Bacterial polypetide isolated from the Sargasso Sea
YIKEAKDKITKQSKNKKISSFFVESILGCGGQVILPKNYLKEIFIEIRKNKALCIVDEVQTGFGRVGYNFWSFQEHDVIPDIVTIGKPMGNGHPISAVITTEKIASTFNNGMEYFNSFGGNPVSCAVGKAVLEVIEKDKLQRNALNVGNYFLNKLQKIKNKNKKYISEVRGRGLFLGIDIINEYDQLKPNKQLANKIINYMREKGILLSTDGPHDNVIKIKPPLVFNKANVDNVCENLEIFFKKI

SEQ ID NO: 124236 - protein, 225 aa, Unknown
  Bacterial polypetide isolated from the Sargasso Sea
ESLKKSITKKTAAIMIEPVLGEGGIKVIPKWCLKGLRKICDQKKILLICDEVQCGIGRSGKFFAFEYSGIKPDIVPIAKGIGGGFPLGAVLMNKKVASSMTPGTHGSTFGGNPLAMEIGNAVLDKIMKKKFLKNVQKISKYFFNELNKIKIQYPEIIKEVRGLGLLIGLQLHKDQTKFIKKLEQNKLLTIRAADNVIRILPPLNVKKLEIDMSIKIIKKVCKEYN

SEQ ID NO: 124237 - protein, 128 aa, Unknown
  Bacterial polypetide isolated from the Sargasso Sea
KGEHSSTFGGNPLACAAGTATLQALTQDGLIENAKSMGDKLSNGLEELKSKHAIIREVRGKGLMIGVELKFEVKDILMEGIKNGLLLLYSGRNILRFLPPLVISEEDITKTLQILDNLLTNEENRRNA

SEQ ID NO: 124238 - protein, 127 aa, Unknown
  Bacterial polypetide isolated from the Sargasso Sea
MEFGSHGSTFGGNPLACSVGNAVLDLMTSPKFFSKVIAVSEKLLLDLNKVANDYPEIIGGIRGKGFILGLKCNINNEDFVKQARTNFILTVKASDNVVRLLPPINLSNSESDEAIDKIRSTCKELSS

SEQ ID NO: 124239 - protein, 248 aa, Unknown
  Bacterial polypetide isolated from the Sargasso Sea
FVCCNNPKHTEGFGPKVEGFDQVPFADHEAIKKTINKNTAAIMIETIMGEGGIKVVPDFCIKGLREICDKHGILLILDEVQSAYRTGSFFAFEHSGIIPDIVPIAKGIGGGFPLGACLVTKKVAVGMTPGTHGSTFGGNPLGMAVGNAVLDIIFKKGFLDNVKEKGKYFSEGLNKIKSKHPKIIGEIRGVGLIKGLKVLVDNVEFIKKLMNHKMLTVKAEENVIRLFPPLIVQNHELDEALNKIEKVC

SEQ ID NO: 124240 - protein, 187 aa, Unknown
  Bacterial polypetide isolated from the Sargasso Sea
HDLLLIFDEIQAGIGRTGKFFSYEHADVIPDIVAVAKGIGGGFPLGCCLATSEAASGMTLGTHGSTFGGNPLACAVGIEVLNQIFAKGFLEAVKAKGKIIRTNLENLVQKNPTIFESVRGKGLMLGLKCKVENFTVINAAYENKLLLVPAAENVVRVLPPLNVTYKEIRVATERFEATVSSLKKNHE

SEQ ID NO: 124241 - protein, 147 aa, Unknown
  Bacterial polypetide isolated from the Sargasso Sea
QRNGGGFPLGACLVTKKVSVGMTPGTHGSTFGGNPLAMSVGNAVLDIIFKKGFFEEVKEKGKYFDEGLNKIKKKYPKIIGEIRGIGLIKGLKLLVDNVEFIKKLMNHKMLTVKAEENVIRLFPPLIVKEKELDEAIGKIEKVCEELS

SEQ ID NO: 124242 - protein, 212 aa, Unknown
  Bacterial polypetide isolated from the Sargasso Sea
IMVETIMGEGGIKVIPDWCLKELRKICNKKRILLILDEVQCGIGRSGNFFAFENSKVKPDIVPIAKGIGGGFPLGAVLMNKKVAKGMTVGTHGSTFGGNPLAMSVGNAVLDQIFKKDFLKNVKKLSRYFHKELNKIKDDFPKIFKEIRGVGFLIGLKLFNDQTKFINKLMINGLLTIKAAENVIRVLPPLNVKKKDLDLAIKIIRKVCKTYK

SEQ ID NO: 124243 - protein, 233 aa, Unknown
  Bacterial polypetide isolated from the Sargasso Sea
SKINKLSCLFVESILGCGGQVILPKNYLKEVFKEVRKNKALCIVDEVQTGFGRVGNNFWSFQEHQVIPDIVTLGKPMGNGHPIAAVVTTEKIASSFNNGMEYFNSFGGNPVSCAVGKSVLEVIENKKLQKNALNVGKYFLNKLEKIKRKNKKYISEVRGRGLFIGIDIIKDSNQLKPNKQLAKKIINFMRNNGILLSTDGPHDNVIKIKPPLVFERQNVDNVCDNLENFFKKI

SEQ ID NO: 124244 - protein, 228 aa, Unknown
  Bacterial polypetide isolated from the Sargasso Sea
FADHEAIKKTINKNTAAIMIETIMGEGGIKVVPDFCIKGLREICDEHNILLILDEVQSAYRTGNFFAFEQSGVIPDIVPIAKGIGGGFPLGACLVTKKVSVGMTPGSHGSTFGGNPLAMSVGNAVLDVIFEKDFMNNVKKKGQYFDQALKKVKDKYPKIINEIRGLGLIKGIKTQVDNVKFIQKLIEHKMLAVKAEENVIRLFPPLTVSDKELDEAITKIEKVCKEMS

SEQ ID NO: 124245 - protein, 167 aa, Unknown
  Bacterial polypetide isolated from the Sargasso Sea
KWFSYQHANIKPDIVTCAKGLGNGVPIGACLGNKKASNLFTPGSHGSTFGGNPLVCSVSSKVIDVIEKNKLCKQSENIGNYLINEIKNKVQDLSVVKEVRGKGLMIGIEINIKNSNIVKDCLDKKLILNLTSENVIRLLPPLILKKSEANFIAKTLHQILQGYSNGK

SEQ ID NO: 124246 - protein, 141 aa, Unknown
  Bacterial polypetide isolated from the Sargasso Sea
PIGAVLMTKKVSKAMVPGTHGSTFGGNPLAMSVGNAVMDEIFKKGFLSKIKINSKYFIKELNKLKNKFPNIIKEIRGVGLILGIQLHHDQTKFIESLMKNKLLTIRAAENVIRILPPLNVNKNEINLALKIINKVCEGYKK

SEQ ID NO: 124247 - protein, 263 aa, Unknown
  Bacterial polypetide isolated from the Sargasso Sea
LKNTFFIEGGGLAVENALKVAFDWKVRKNLENGIKDKGYQILHFKEAFHGRTGYTLSLTNTDPIKTKFFPKFDWPRITNPHLSFPLNENILSNVKEKEKKAINEIKEALKNNLNDIAGLIIEPIQGEGGDHHFRGDFFKELKKLSLEHDFLLIYDEVQTGVGITGKMWAHEHFEDCQPDIISFGKKTQVCGVLAGDRINEVEKNVFKRSSRINSTFGGNLTDMVRFKIILETIKEFNLLDNAKLNGEYLLNKINELEEEFPAF

SEQ ID NO: 124248 - protein, 251 aa, Unknown
  Bacterial polypetide isolated from the Sargasso Sea
MSINFKEARSLINKSMLADGMSPIIDLKKSHGSWLHDGATGKEYLDLFSMYASMSIGYNHPYVLDNSDRISAAAINKPANSDIYSLEMASFVDTVRRIAQPDYLPYAFFIEGGALAVENALKTAFDWKARKNLDKGKKKPKNIVIHLKDCFHGRTGYTMSLTDSPDPRKVMHFPKFNWPRVSNPYLKFPLNKKNIQDVELLEKKSISEIKNILANNPDDVACLIIEPIQGEGGDNHFRSEYFKELKTLSLE

SEQ ID NO: 124249 - protein, 384 aa, Unknown
  Bacterial polypetide isolated from the Sargasso Sea
MSTTNDSLMARRQAAVAGGVGQIHPVFTARAENATVWDVEGREFIDFAGGIAVLNTGHLHPKVKAAVAAQLEDFSHTCFMVLGYESYIQVCEKLNQLVPGDFAKKTALFTSGSEAVENAVKVARAYTKRAGVIAFTSGYHGRTMAALALTGKVAPYSKGMGLMSANVFRAEFPCALHGVSDDDAMASIERIFKNDAEPSDIAAIILEPVQGEGGFYAASPAFMQRLRALCDREGIMLIADEVQTGAGRTGTFFAMEQMGVSADITTFAKSIAGGFPLSGITGKAEVMDAIGPGGLGGTYGGNPLACAAALAVLEVFEEEKLLERANAIGERIKLALNTMQVEHSQIADVRGLGAMIAIELMEDGKPAPQYCAQILAEARNRGLI

SEQ ID NO: 124250 - protein, 450 aa, Unknown
  Bacterial polypetide isolated from the Sargasso Sea
MNKSDIRKVIGQSILADGMSPVIDLEKSHGSWLVDKVTDKKYLDLFSMFASLSVGYNHPYVLEQSERLKIAAINKPTNSDVYSQEMAEFVQTFKRVAQPDYLPLTFFIEGGGLAVENALKAAFDWKRRKNLAKGSSAKGEKVIHFKQCFHGRTGYTMSLTDSPDKRKTMYFPKFDWPRITNPKITFPLADNIDHVIELENQAINEIKDAISDNPDNIASIIIEPIQGEGGDNHFRCEFMQSLRQIADENDIILIYDEVQTGVGVTGKMWAHQHFSNDDCSASQCKCGDGLLAVPDIISFGKKTQVCGVAASTRFDEVDGNVFRESSRINSTWGGSLVDMVRLTIYLELIEKENLVEKAAETGKFLQKNLHDLQNEFPSLVSNARGKGLYCAFDLPSSEDRDKLAELLLDEGSILLGSGNYSIRFRPHLNVTEEDISFGMDCFKRALSKLS

SEQ ID NO: 124251 - protein, 411 aa, Unknown
  Bacterial polypetide isolated from the Sargasso Sea
FWDVDGNKFLDVTGGLWNVNVGHNRKEVKEAIVEQLDKIAYYNTFINNSNPPAIELSTRLMEMLKIEDMGKVMFGSGGSDANETALKLARQYWKLMDEPQKTKIFSLKSAYHGVQFGVLSASGGIQWRKAYEPLLAGFFQVDNPDIYRNPWTESAEELGQICADILDREIQHQGPETVAAFIAEPIQGAGGMIIPPSNYWPLIRKICDKHNILLIADEVITGFGRTGSMFGTRAWGVKADIMSFAKGINSGYIPLGATAISKKVESAWERDHPLSAIMHGYTYSGHPLACAAANANLEIVVRENLSENAEKVGLYFLKELKKLRDKHLSIGDVRGKGLMLAIEFVKDRDTKEPFAFNDPYPALIAKNARNSGVMIRNQGHRIILSPALTFTNDQVDEAIQGINKAITSASK

SEQ ID NO: 124252 - protein, 303 aa, Unknown
  Bacterial polypetide isolated from the Sargasso Sea
MEKVKKVLRLFILKNAFMGRTGYTMSLTDSPDPRKTLYFPQFDWPRIDNPKINFPLDQNLDLVLKREKHAINQIKDAITNYPDEIAGLIIEPIQGEGGDNHFRKEFLAELRNLANESDFLLIYDEVQTGVGVTGSMWAHQAFGDTVRPDIISFGKKTQVCGIFGGKRLDEVDNNVFHESSRLNSTWGGSLVDMVRFTIYLEIIENEKLVQNASVVGEHLTSCLHSLQSNHDNLVSNARNRGLFGAFDLPDSDTRDKAINSISNEGAMMLGCGTRSIRFRPHLNITINELDQGFEMIDKALSKL

SEQ ID NO: 124253 - protein, 333 aa, Unknown
  Bacterial polypetide isolated from the Sargasso Sea
MNKSDIRKVISESILADGMSPVIDLKKSHGSWLVDKVTGKEYLDLFSMFASLSVGYNHPYVLEQSERLKIAAINKPTNSDVYSQEMAEFVHTFKRVAQPDYLPLTFFIEGGGLAVENALKAAFDWKRRKNLAKGSSAKGEKVIHFQQCFHGRTGYTMSLTDSPDKRKVMYFPKFDWPRITNPKITFPIEENLEHIIELEKKAISEIKDAINVNPDNIASIIIEPIQGEGGDNHFRCEFMQNLRDIADENDIILIYDEVQTGVGVTGKMWAHQHFSTGACTNNCKCSDSLTAKPDIIAFGKKTQVCGVAASARFDDVEGNVFRESSRINSTWGG

SEQ ID NO: 124254 - protein, 243 aa, Unknown
  Bacterial polypetide isolated from the Sargasso Sea
VDQILEALDKNKNEIAGLIIEPIQGEGGDNHFRCEFFQQLRQLADEHEFLLIYDEVQTGAGITGSMWAHQQFNPNKCNCDCNNANTQPDIISFGKKTQVCGIFAGKKLDEVENNVFHESSRLNSTWGGNIVDMVRITIYLEIIAKEKLVENASLNGRYLLKKLQGIQEEYSDIISNARGRGLFAAFDLQDSEQRDSLANLIISEGALILGSGKKSIRFRPHLTISKEEIDLADQIIRRAIARL

SEQ ID NO: 124255 - protein, 402 aa, Unknown
  Bacterial polypetide isolated from the Sargasso Sea
MDSFIAKGKNAEIWDKNNNRYLDFVGGYAVLNTGHLNPRVVQRVKKQLNDYSHSCFAFAPHENAVELCEEINKRYPIKKKTKTFLVNSGAEAVENAIKIARYATGKEKIIAFKGGFHGRTYLAMGLTGKEKPYKEGFGPFPKFITHVDYPYHYRDISDEKVLKQIENTLLKKLDPNNVAAIVIEIQLGEGGYIPATEKFLKQLRKVAEQHNILLIFDEVQTGFGRTGEMFGADKINVQPDMVTLAKGIGGGFPLAAVVGKAEIMDSVHDAGIGSTFGASPISCAAALGVLDVFDKDSLLEKVNKQTKIMDKSLGNINDNFDFVGDVRGYGIMKGVEIVESKDNKIPSKDLAMRIINNSKKNGLLLVNCGKEGNVIRFMGPLTTPLTQIREAMEMFNQALEKV

SEQ ID NO: 124256 - protein, 402 aa, Unknown
  Bacterial polypetide isolated from the Sargasso Sea
MDSFIAKGKNAEIWDKNNNRYLDFVGGYAVLNTGHLNPRVVRRVKKQLNDYSHSCFAFAPHENAVELCDQINKRYPINQKTKTFLVNSGAEAVENAIKIARYATGREKIIAFKGGFHGRTYLAMGLTGKEKPYKEGFGPFPKFISHIDFPYDYRGISDDKVIKQLQNLISKKIDPNDIAAIVVEIQLGEGGYIPASNGFLKKLREITKKHNILLIFDEVQTGFGRTGEMFGATKVNVEPDMVTLAKGIGGGFPLAAVVGKSKIMDSVHDAGIGSTFGASPISCAAALGVLDVFDKDNLLQKVNKQELIMKKSLETMKENFEFVGDVRGYGIMKGVEIVENKENKTASKELATKIISNSKKNGLLLVNCGKEGNVIRFMGPLTTPLNQVREAMEMFNNALEKI

SEQ ID NO: 124257 - protein, 404 aa, Unknown
  Bacterial polypetide isolated from the Sargasso Sea
MYAHVPAYPGDPILSLFQTFQQDAHPHKVNLSIGLCYDDTGRIPVLDSTRIAAERLREAGAPHTYLPMEGLAAYRQGVQRLVFGADCAALAEGRIATLQTLGGSGAIRLGAEFVKRYFPDSAVWISDPTWDNHRVIFSAAGLDVHTYPYYDEARNDIRVDAMLATLDALPPRSVVLLQPCCHNPTGLDLGRDAWRAVIDVLARRGLIPFLDMAYQGFGDGLDDDAWAVRAIVDAGLPAIVGNSFSKNFSLYGERVGGLSIVCAGAGEAATVLSQLQAGVRRTYSSPPLFGAQLVSTVLNDDALRARWEGEVAQVRTRIKRMRGALKARLDSRAPGRSFDALVAQRGMFSYTGIAAADVERLRTGHGVYLLRSGRMCIAGLNDANVDHVANAIADVLGGALRQAA

SEQ ID NO: 124258 - protein, 354 aa, Unknown
  Bacterial polypetide isolated from the Sargasso Sea
VIEKGKGFYVSDSDGNSYLDFFGGILTVSVGHANDEVNTAVKAQVDRLSHISSLYPSIPVVELAEKLVGLAPGNLEKVFFNASGTEADETAVMMAQLYTGNTEIIALRHGYSGRSLLAQSLTGHAPWRALPSQVGSVKHALAPYCYRCPLKMTYPECGVACAKDVEELINTTTTGKVAGILAEPIQGVGGFITPPDAYFNIVSDIIHEHGGVFISDEVQTGFGRTGKTWGIEHSGVEPDMITVAKGIANGMPLAAVITTKDIADSLQKNTISTFGGNPVSSAAANATLDIIERDNLKTNSIKMGEILKEGLQKIQSEHKKIIGDVRGKGLMVGLELVIDETTKDRTPNPEAVDR

SEQ ID NO: 124259 - protein, 363 aa, Unknown
  Bacterial polypetide isolated from the Sargasso Sea
MATNPELLKRHSEVLPSWLALYYDPPISMDYGQGRHVYDVEGNRYLDFFGGILTTSLGYDIPEVTQAINQQASKVLHSSTLYLSEPMIELAELVTELSGIPDARVFFTTSGTEANDAALLLATSYRRSNQILALRNSYHGRSFSTVAITSHRSWSPTSLSGLSVNYVHGGYRLRSPFNDFDDDNYTKACVDDLVQVFDMMTSGDVATMIAEPIQGVGGFATPPDGFFGAMKKELDNRGVLFISDEVQTGWGRTGENFWGYQAHGIVPDMMTFAKGVGNGLALGGVVGRAEVMEAMPANSISTFGGNPIASAGALATINYMLEHDTQKNSKEMGERLSEGISKTVSDSPVIAEIRGRGLMLAIE

SEQ ID NO: 124260 - protein, 397 aa, Unknown
  Bacterial polypetide isolated from the Sargasso Sea
MIFSQVVLAPADPILGLTDTFKADPRQDKVNLGVGIYKDEAGQTPVLQSVKKAEALLLEQEKTKNYLGIEGVQTYNRVVQELLFGEGSELVTSGRAATAQAPGGTGALRIAAEFLLRNTPSRTVWVSNPTWANHQNIFETAGLTVKEYGYYNAAAHDIDFDGMMTDLANAQAGDIVLLHGCCHNPTGIDLTLAQWELVANLCVDKQLVPLFDFAYQGFGAGIEEDAAGLRLVAAKVPELLVANSFSKNFGLYNERIGAVTVVAQNADEAVRAFSQVKRTIRANYSNPPAHGALIVSTILSDAALKALWVQELTEMRERIAEMRTLFVQSLKDEGVTQDFSFISRQNGMFSFSGLNKAQVARLKDEFGIYIVGSGRISVAGMTKTNMPVICKAIAQIL

SEQ ID NO: 124261 - protein, 432 aa, Unknown
  Bacterial polypetide isolated from the Sargasso Sea
MNHSESIRKKHKKYLFDAVKNFYKEPLVIEEGKGFYVSDSDGRSYLDFFGGILTVSVGHANDEVNTAIKAQVDRLSHISSLYPSIPVVDLAERLVRLAPGNLEKVFFNASGTEADETAVMMAQLYTGNTEIIALRHGYSGRSLLAQSLTAHAPWRALPTQVASVKHALAPYCYRCPLKMTYPDCGVACANDVKELINTTTTGKVAGILAEPIQGVGGFITPPDEYFNIVADIIHEHGGIFISDEVQTGFGRTGKTWGIQHSGVEPDMITVAKGIANGMPLAAVVTTKDIADTLQKNTISTFGGNPVSSAAANATLEIIERDELKANANEMGEILKDGLIKIQSDHREVIGEVRGKGLMVGLELVVDETKKDRTPNPDAVDRLMEETKDRGLLIGRGGLYGNCVRISPSLNIGRSEIDEALSILASSFRSIDQ

SEQ ID NO: 124262 - protein, 290 aa, Unknown
  Bacterial polypetide isolated from the Sargasso Sea
MSSVLGTYARKDISFIKGKGCYLYTEKGEKYLDFVQGIATNILGHCHEELVKTIKIQSEKLWHVSNAFVIPEQERLAKRLTDNTFADFVCFQNSGTEATEASIKIARKYFHKIGKSEKNRIITFEGAFHGRTLAALFAANNAKHTEGFGPKIDGFDQVPFADHEAIKKAINKNTAAIMVETIMGEGGIKVIPDFCLKGLRDLCDEHDLLLILDEVQSAYRTGSFFAFEKSGILPDIVPIAKGIGGGFPLGACLVTKKAAKGMTLGTHGSTFGGNPLAMAIGNSVLDILFE

SEQ ID NO: 124263 - protein, 365 aa, Unknown
  Bacterial polypetide isolated from the Sargasso Sea
MSLFTAVEMAPRDPILGLNEQFNADTNPNKVNLGVGVYFDDNGKLPLLQCVQAAEKTMMEKPTARGYLPIDGIVAYDNAVKSLVFGADSEPVKSGRVATVQAIGGTGGLKIGADFLKKVSPNAKVLISDPSWENHRALFTNAGFEVDTYAYYDAEKRGVNFEGFLASLNAAAPGTIVVLHACCHNPTGYDITPEQWDQVIAAVKAKGLTPFLDMAYQGFGHGIAEDGAVIQKFVAAGLNFFVSTSFSKSFSLYGERVGGLSVLCTDKEEASRVLSQLKIVIRTNYSNPPTHGGCGGGCRAEQPRAARDVGKGAGRNARAHQGHAPEAGRWPEGRRCEAGHELHHHPDRHVQLLRPVQGPDGAPAQ

SEQ ID NO: 124264 - protein, 448 aa, Unknown
  Bacterial polypetide isolated from the Sargasso Sea
MELSDIRKVIAGSILADGMSPIIDLEKSHGSWLVDKVTGKEYLDLFSMFASLSVGYNHPYVLEQSDRLKVAAINKPTNSDVYSLEMAEFIETFKRVAQPEYLPHAFFIEGGGLAVENALKVAFDWKRRKNLAKGSSVKGEKVIHFKECFHGRTGYTMSLTDSPDKRKTMYFPKFDWPRITNPKITFPLDKNLDHVIALEEKAIAEIKDAIAKNPDNIASIILEPIQGEGGDNHFRCEFMQELRTIADENDIMLIYDEVQTGIGVTGKMWAHQHFAAHACNDCSCGEDSSARPDIISFGKKTQVCGIAVGKRVEEVEKHVFEESSRLNSTWGGSLVDMVRLTIYLELIEKENLVERANETGSYLLNSIYTLQKEYPNLVSNARGRGLYCAFDLPSGEKRDKLSELLLEEGSILLGSGHQSIRFRPHLNVKKEDIDFGMDCFKKALNKLG

SEQ ID NO: 124265 - protein, 425 aa, Unknown
  Bacterial polypetide isolated from the Sargasso Sea
MSTTNDSLMARRQAAVAGGVGQIHPIFTARAENASVWDVEGREFIDFAGGIAVLNTGHLHPKVKAAVAAQLEDFSHTCFMVLGYESYIQVCEKLNQLVPGDFAKKTALFTSGSEAVENAVKVARAYTKRAGVIAFTSGYHGRTMAALALTGKVAPYSKGMGLMSANVFRAEFPCALHGVSDDDAMASIERIFKNDAEPSDIAAIILEPVQGEGGFYAASPAFMQRLRALCDREGIMLIADEVQTGAGRTGTFFAMEQMGVSADITTFAKSIAGGFPLSGITGKAEVMDAIGPGGLGGTYGGNPLACAAALAVLEVFEEEKLLERANAIGERIKSALNTMQVEHPQIADVRGLGAMIAIELMEDGKPAPQYCAQILVEARNRGLILLSCGTYGNVLRILVPLTVPDEQLGAGLGILKACFDAVLKG

SEQ ID NO: 124266 - protein, 576 aa, Unknown
  Bacterial polypetide isolated from the Sargasso Sea
ANERRNIHLGVDIFIDQGTDLFAPIDGKIIILKNNNFKYDYGPTLVLEHSFKKYKFYTLYGHLSKIMFQKLKIGKKIKKGEWIGKIGNSNENGKWLPHLHFQIILDLLGHDKNFPGVGEEFLFNIWNKISPDPNLILRIPKSFYFNNNNFKDTLKKRRKNISDNLSISYKKPLHMLEAKDQYFFDRYGRRYLDCVNNISHVGHSNSYVHEAMTKQNLKLNTNTRYLYDTINDYSELLLSKFPKKLNKIFFVCTGSEANDLAYRIAQTYTSAKDVFVMDNAYHGHTNALIDLSPYKFNSKGGLGKKDYVHVLDMPDPLRGKWRYQNSNWIQKYIDEAKTVIRNKIKETKIACFFTECILGCGGQVILPKNYLKEIFSEIKKNNALCIVDEVQTGFGRVGKNFWSFEEHDVVPDIVTLGKPMGNGHPIAAVITSEKIASTFNNGMEYFNSFGGNPVSCAIGKAVLETIDNNKLQKNALLVGNYFLKELKKIQLKYKKYISEVRGRGLFLGIDIIQNSNVSKPNKKLAKLLINYMRNQGILLSTDGPYENVIKIKPPLVFTKLNVDQVCKNLETFFKKL

SEQ ID NO: 124267 - protein, 397 aa, Unknown
  Bacterial polypetide isolated from the Sargasso Sea
MIFSQVVLAPADPILGLTDTFKADPRQDKVNLGVGIYKDEAGQTPVLQSVKKAEALLLEQEKTKNYLGIEGVQTYNRVVQELLFGEGSDLVTSGRAATAQAPGGTGALRIAAEFLLRNTPSRTVWVSNPTWANHQNIFETAGLTVKEYGYYNASAHDIDFDGMMTDLANAQAGDIILLHGCCHNPTGIDLTLTQWELVANLCADKQLVPLFDFAYQGFGAGIEEDAAGLRLVASKVPELLVANSFSKNFGLYNERIGAVTVVAQNADEAVRAFSQVKRTIRANYSNPPAHGALIVSTILSDASLKALWVQELTEMRERIAEMRTLFVQSLKDEGVTQDFSFISRQNGMFSFSGLNKAQVARLKDEFGIYIVGSGRISVAGMTKTNMPVICKAIAQIL

SEQ ID NO: 124268 - protein, 425 aa, Unknown
  Bacterial polypetide isolated from the Sargasso Sea
MSTTNDSLMARRQAAVAGGVGQIHPVFTARAENATVWDVEGREFIDFAGGIAVLNTGHLHPKVKAAVAAQLEDFSHTCFMVLGYESYIQVCEKLNQLVPGDFAKKTALFTSGSEAVENAVKVARAYTKRAGVIAFTSGYHGRTMAALALTGKVAPYSKGMGLMSANVFRAEFPCALHGVSDDDAMASIERIFKNDAEPSDIAAIILEPVQGEGGFYAASPAFMQRLRALCDREGIMLIADEVQTGAGRTGTFFAMEQMGVSADITTFAKSIAGGFPLSGITGKAEVMDAIGPGGLGGTYGGNPLACAAALAVLEVFEEEKLLERANAIGERIKSALNTMQVEHPQIADVRGLGAMIAIELMEEGKPAPQYCAQILAEARNRGLILLSCGTYGNVLRILVPLTVPDEQLAAGLGILKSCFDAVLKG

SEQ ID NO: 124269 - protein, 146 aa, Unknown
  Bacterial polypetide isolated from the Sargasso Sea
MEGVFPIGAVLMTKKVSKAMVPGTHGSTFGGNPLAMSVGNAVMDEVFKKGFLLKVKTNSKYFISELNKIKNKFPNIIKEIRGIGLILGIQLHQDQTKFIQSLMKNKLLTIRAAENVIRILPPLNVNKKEINLALKIINKVCESYKK

SEQ ID NO: 124270 - protein, 441 aa, Unknown
  Bacterial polypetide isolated from the Sargasso Sea
MNKSDIRKVISKSILADGMSPVIDLEKSHGSWLVDKVTGKEYLDLFSMFASLSVGYNHPYVLEQSERLKVAAINKPTNSDVYSQEMAEFVQTFKRVAQPDYLPLTFFIEGGGLAVENALKAAFDWKRRKNLAKGSSAKGEKVIHFQQCFHGRTGYTMSLTDSPDKRKVMYFPKFDWPRITNPKITFPIEDNLDNIIELENKAIAEIKDAINANPDNIASIIIEPIQGEGGDNHFRCEFMQALRDIADENDIILIYDEVQTGVGVTGKMWAHQHFSTAICTSNCNCGDGLSAKPDIISFGKKTQVCGVAASTRFDEVEGNVFRESSRINSTWGGSLVDMVRLTIYLELIEKENLVDKAAQTGLFLQQSLHDLQNEFPSLVSNARGKGLYCAFDLPSSEDRDKLANLLLDEGSILLGSGNYSIRFRPHLNVTEDDIQFRYGLF

SEQ ID NO: 124271 - protein, 399 aa, Unknown
  Bacterial polypetide isolated from the Sargasso Sea
MFETLQQAPPDPILGLTTAFNEDSNPNKINLGVGVYKDAEGNTPVFASVKTAEQRILASEDTKNYLTIGGDADYADAVQHLLFGADHEIVTSKRAITVQTPGGTGALRVAGDFIHQLFSSATLWLSDPTWANHPKVFGAAGVRINTYPYYDTEKNELDFDAFLKALGEVPAGDVVLLHGCCHNPTGMDPTPEQWSEIAHVVERQKLIPLVDFAYQGLGDGLDADGRGLQALTATGCEMFVASSFSKNFGLYRERIGALTLVTPDQDAAKVAQSHVLITIRTNYSNPPAHGSSIVTEVLKDPDLRAQWDNEVTEMRDRINGMRRLLVDTLDRKGVKRDFSFIARQRGMFSFSGLTPEQVDALREKHSIYVVKTGGRINVAGIREENIDYLCESIADVLST

SEQ ID NO: 124272 - protein, 450 aa, Unknown
  Bacterial polypetide isolated from the Sargasso Sea
MKIEFGEARKTIGQHMLADGMNPVIDLEKSHGSWLVDGSSGKEYLDLFSMYASMSVGYNHPYVLENKERLTKASINKPANSDIYSPEMAAFVETVSRVSQPGYLPYAFYIEGGALAVENALKAAFDWKARKNLSKGKKIPKNLVVHLKDCFHGRTGYTMSLTDSPDPRKVQYFPKFDWPRISNPAMIFPVNEENTNAVIKLEKRSIEELKTVLHDNPDDVACLILEPIQGEGGDNHFRSEYFKALKTLSLENDFLLIYDEVQTGVGITGEMWAHQHFCMPECENGCQVHCKGIEPDIISFGKKTQCCGIFAGNRLNEVDDHVFKESSRINSTFGGNLVDMVRFTIYLELIEKDELVGAASANGEYLLGCLLDLQNKYGDLMSNSRGKGLFCAFDLPSPEQRDKFITEMEELGVLILGCGHRSIRFRPHLNITKGDIDIGISMIGNALSQL

SEQ ID NO: 124273 - protein, 409 aa, Unknown
  Bacterial polypetide isolated from the Sargasso Sea
RRTIHLGIDVFCKKNTKVFCPYYGEVVLVDNCQERLDYGGFIVLKHFTNNKSCFFSLFGHLDPKSINLKVGQRVKKGKKIGKIGNNKVNGGWEPHLHIQLSLGLGQGKNWPGVCNAKELKFWEKYCPNPAPFLGINPKKIRYESIEKKTLVQNRKNHYSGNLKISYKKPLTIIRGYKNYLFDETGNCFLDCYNNVPHVGHSHPRIAKLVYNQLKLVNSNTRYLHPIQKVISENILSRFPKKFSALYLVNSGSEANELALRLAKTYTKSEDFITFDHGYHGNTNGVLEVSPYKFNKPSGIGRKPWVHLMDCPDPFRGVDPRYQIDEILNKLVSKKRGIAGFISEIFPSVAGQIIPQNGVTSYIYKKVKKAGGLCIADEVQTGLGRLGEFYFGYEQQKVDPDIVVLGKPIG

SEQ ID NO: 124274 - protein, 406 aa, Unknown
  Bacterial polypetide isolated from the Sargasso Sea
MSINFKDARNVIDQHMLADGMSPVIDLERSHGSWLVDGVTGKEYLDLFSMYASMSVGYNHPYVLDNIDRLTRAAVNKPANSDIYSPQMAEFVDTVGRLAQPSYLPYSFFIEGGGLAVENALKTAFDWKAKKNMSQGKNSPKNLVIHLKDCFHGRTGYTMSLTDSPDPRKVQYFPKFNWPRVLNPSIKFPLDEKSIDEVITLEEKSLSQIKKVLLDNPDDVACMILEPIQGEGGDNHFRAEYFKQIKQLSLENNFLLIYDEVQTGIGITGKMWAHQHFCETNCILECISHCKSMEPDIVSFGKKTQCCGIFAGKRLDEIDDHVFRESSRINSTFGGNLVDMVRFTIYLELMENENLVDLASKNGSYLLSSLASLQNEETNLVTNVRGKGLFCAFDLPSNEFRDKLIS

SEQ ID NO: 124275 - protein, 389 aa, Unknown
  Bacterial polypetide isolated from the Sargasso Sea
MSSILGTYARKPIAFKEGKGSYLFAENGEKHLDFVQGIGTNILGHCHEHLVKTIQEQAKKLWHVSNAFMIPEQEKLAKRLTENTFADFVCFQNSGTESTEASIKIARKYFHKIGKPEKNRIITFQGAFHGRTLAALFAANNSKHTEGFGPKVDGFDQVSFADHEAVKKAINDKTAAIMIETIMGEGGIKVVPDFCIKGLREICDENNILLILDEVQCAYRTGNFFAFESSGIKPDIVPIAKGIGGGFPLGACLVSKKVSIGMTPGTHGSTFGGNPLAMSVGNAVLDIILEKGFLNNVKKKGKYFDQALNGIKNKYPKIISEIRGVGLIKGIKLLVDNVEFINKLMNHKMLTVKAEENVIRLFPPLIVSNEEIDEAISKIEKVCDEMSKK

SEQ ID NO: 124276 - protein, 231 aa, Unknown
  Bacterial polypetide isolated from the Sargasso Sea
IEELKSILYNNADDVACLILEPIQGEGGDNHFRTEYLSKLKELSLENDFLLIFDEVQTGVGITGKMWAHEHSNVTPDLMSFGKKTQCCGMFAGNRLNEVDDHVFKESSRINSTFGGNLVDMVRFTIYLELIEKDELVSAASVNGEYLMGCLLDLQNKYGDLMSNSRGKGLFCAFDLPSPEQRDKLITEMEELGVIILGCGHRSIRFRPHLNITKGDIDIGISMIGNALSQL

SEQ ID NO: 124277 - protein, 335 aa, Unknown
  Bacterial polypetide isolated from the Sargasso Sea
PCFTVAPYELYVTLARRLSQLVPISAECKAAFFNSGAEAVENAVKISKSFTGRNSVLVFSHAFHGRTQMTMSMTYKEDPYKKGFGPFISNIHRVEFPEKELDLKSLEIDPRSIACAVIEPVAGEGGFMPVSFDAMRQLRDFCDEHDIIMVADEVQTGFGRTGSLFAMSQFGVEPDMFTLAKSIAGGLPLSGVVGRSDIMDSVHVGGIGGTFGGNPVACAAALAVLDIMENEKLPQRAIEIGEKIRTMVEGVMSSSPWISEVRGLGAMQGIVITDKNNGPDKKHTSRIYQNAMKNGLMMITAGTYGNVIRTLMPLTIKNDELDQSLEILSNALRVP

SEQ ID NO: 124278 - protein, 234 aa, Unknown
  Bacterial polypetide isolated from the Sargasso Sea
GDIEKIRETVTDQTAFVILEPIQGESGIHVAPDGFLQDVRKLCDEKGILLIFDEIQAGLGRTGKMWAHQHWETEPDILCLAKGIAGGVPMGATLVRPDILACISKGEHSSTFGGNPLSCAAGAATMQALTQDKLVENSANMGKLFRQGLEQLKEKHSVIREIRGKGLMIGVELKFEVRDILMEGIEKGLLLLYSGRNILRLLPPLVITEEDVTKSLEILDVLFTNEENRRNAQG

SEQ ID NO: 124279 - protein, 224 aa, Unknown
  Bacterial polypetide isolated from the Sargasso Sea
AITKNTAAVLFEPIQGEGGIIEPPENWLPDIREICDRNNVLMILDEVQSGLGRTGKLFAYEHANIRPDGLILGKALGGGFMPVSVFLSSEEVLQWMNPGSHGSTFGGNPLGSAIAKRSLELLEEEGLIENSRVMGDYFKQSLLELNSPIIKEIRGKGLWLGVEIDQSYITGKDLSKLLLKKGILCKETRDTTIRFAPPLIINKDEIDWGVEIIGSAFKAIEEKA

SEQ ID NO: 124280 - protein, 248 aa, Unknown
  Bacterial polypetide isolated from the Sargasso Sea
NKKYSENYGPLLSGFKKVEFNNITKLKSAISKKTAGILIEPIQGEGGIRPADLKFLKFIRKICDKKNILLFLDEVQCGFGRSGKLFSYEWAKIKPDIMAVAKGIGSGFPLGACLSNKKACIAMTKGSHGSTFGGNPLAMSVGLEVLKIISNKSFLKRVDKLSRYFWQKLKDLENQFDYIEEVRGAGLLLGIKVANNHIEFSNILKSQKLLNVPAADNTIRLAPPLIVTHKEIDKSISIIKKVLTKYND

SEQ ID NO: 124281 - protein, 247 aa, Unknown
  Bacterial polypetide isolated from the Sargasso Sea
MAQEILNDLSHYHLDLEKKYGAHDYHPLPVVLAKGEGVYLWDVNGKKYYDFLSSYSAVNQGHCHPKLVELIKEQAEILTLTSRAFHNNKLGEYMEYATKLFGYDQLLPMNTGAEGVETSIKISRKWGYLKKRVEDNKAKIIVCDNNFHGRTTTVISFSSHAGSKDYFGPHTPGFIHIPHNDLNALENILAKEKNVVSFLVEPIQGEAGVIVPDDNYIKGVRELCTKYNILMIADEIQTGLGRTRFIA

SEQ ID NO: 124282 - protein, 131 aa, Unknown
  Bacterial polypetide isolated from the Sargasso Sea
MIEKTSKDLSQFHLDLEKKYGAHDYHPLPVVLEKGEGVFMWDVNGKKYYDFLSAYSAVNQGHCHPELVSLIKNQAETLTLTSRAFHNNKLGEYMEFATKLFGFDQLLPMNTGAEGVETSIKLSRKWGYLKK

SEQ ID NO: 124283 - protein, 170 aa, Unknown
  Bacterial polypetide isolated from the Sargasso Sea
MGRTGKLFAYEWSEVNPDIMTIAKAIGNGFPLGACLTSKKVGEKMDFGSHGSTFGGNPLACTVGNAVLDIMLKDKFFSEINVVAKKLYEGLQNVISDFPSVIENIRGRGFILGLKCKVENDKFVNLAREKYILTVKASDNVVRLLPPINLSLTECDEAIDKIRATCSELK

SEQ ID NO: 124284 - protein, 277 aa, Unknown
  Bacterial polypetide isolated from the Sargasso Sea
MSSSLQDNYIKKESLYGAKNYAPLSVVLNRGEGAYLWDVDGNKYLDMVSAYSAVSHGHSHPELVKTVQDQANKLAITSRAFYTEPFGDFLEQLTKVTGYENVLTMNTGAEAVETAIKAARRWGYSTKGIKEDKAEIIVADGNFHGRTTTIVGFSSEDSYKDGFGPFGGGFVEAKYCCSECSAEESLKSFKSKINKNTCAILIEPIQGEAGIRVPEEGWLKMIRDLCDENNVLLILDEIQSGLGRTGKLFAYEHENIKPDGLILGKALGGAMLPISAF

SEQ ID NO: 124285 - protein, 267 aa, Unknown
  Bacterial polypetide isolated from the Sargasso Sea
FVRRSFSGRTLTTLSAGDSEKYREGFGPRPGGFHHVAFGNLNEMRAAMSAKTAAILVEPIQGEGGINPASTAYLRALRDIADEFNALLIFDEVQCGMGRAGKLFAYELADVTPDIMGLAKGIGGGFPVGAVLATEKAASGMMPGTHGSTYGGNPLAMAAANAVLDVINEPDFLSSIIKKGNKLRDDLTSLVEKHPSVLESVRGVGLMLGVKSIGPNLELMTALRENKLLTVVAGENIVRILPPLNVSEDELDEAVQKIDQVCNKITG

SEQ ID NO: 124286 - protein, 90 aa, Unknown
  Bacterial polypetide isolated from the Sargasso Sea
MITKTSKDLAKFHLDLEKNYGAHDYHPLPVVLEKGEGVFMWDVNGKKYYDFLSAYSAVNQGHCHPKLVDLIKNQAETLTLTSRAFHNNKL

SEQ ID NO: 124287 - protein, 331 aa, Unknown
  Bacterial polypetide isolated from the Sargasso Sea
MVSAYSAVSHGHSHPELIKTIKDQSEKLAITSRAFYTEPYADFLELLTKLSGFESVLTMNTGAEAVETAIKAARRWGYFSKGISKDKAEIIVADGNFHGRTTTIVGFSSEESYKKGFGPFANGFVTAKFCWSGCNLTESIKSFANKINKNTCAILVEPIQGEAGIRVPDKGWLKELRKLCDKENILLILDEIQSGLGRTGKLFAFQHEDIIPDGLILGKALGGAMMPISAFLSSKEIMNHFNSGSHGSTFGGNPLASKIATRALQLLYQDFLIENSNNLGSYFKESLQAIDNKIIKEVRGMGVWIGMELNESKINAKDFMFIIVERKTSLQ

SEQ ID NO: 124288 - protein, 321 aa, Unknown
  Bacterial polypetide isolated from the Sargasso Sea
SAYSAVSHGHSHPELIKTLKNQSSKLAITSRAFYTEPFANFLEKLSNISGYESVLTMNTGAEAVETAIKAARRWGYFSKGIPEDKAEIIVANGNFHGRTTTIVSFSSDLSYKDGFGPFTPGFKNADYCGSCECGSIESCSSIKSFEKKINKNTCAILVEPIQGEAGIRVPSEGWLKELRELCTAKNILLILDEIQSGLGRTGKLFAYEHEDIIPDGLILGKALGGALLPISAFLSSKDVMQHFNPGSHGSTFGGNPLASKVAAKAIDLLFEDKLIENSKKMGDYFLSKLKQIDSKAIKEVRGKGLWIGMELNKSDINAKEF

SEQ ID NO: 124289 - protein, 295 aa, Unknown
  Bacterial polypetide isolated from the Sargasso Sea
LWDVDGKRYYDFLSSYSAVNQGHCHDEIIDELVKQSKTLTLTSRAFHNNKLGEYMKYASNLFGFERLLPMNTGAEAVETAIKVSRKWGHTIKRIPSNSAQIIVCKNNFHGRTTSIISFSSDESSKNHFGPHTPGFIEIEYNNIKSLNLELKNNPNVAGFLIEPIQGEAGVNVPDLNYLTEAKKLCQKYNVLFIVDEIQTGIGRTGSLLASCGNCSCDNKCERQKNSYIRPDILILGKALSGGTYPVSAILCDSEIMDVIKPGQHGSTFGGNPLGSAMAKRALEVIIEEKLIKTQG

SEQ ID NO: 124290 - protein, 229 aa, Unknown
  Bacterial polypetide isolated from the Sargasso Sea
IFGDLDKVKEEISEDTAAILIEPLQGEGGVIEAPIEFIKGIRKLCDENNILLIFDEVQCGIGRTGKMFAHQWLDVVPDIMTVAKAIGNGFPLGACLTTEKAGSTMNFGSHGSTFGGNPLASAVGNAVLDIMLEKDFFLNVKEVSQNLFSGLQEISQEFPSVIELVRGRGLMIGIKCKIKNTDFVEKARVNKLLTVKASDNVVRLLPPLILNSNECEEGLSKIRSTCEMF

SEQ ID NO: 124291 - protein, 276 aa, Unknown
  Bacterial polypetide isolated from the Sargasso Sea
KKYLDFLSSYSAVNQGHCNSKILRSFTRQARRLTLTSRAFYNSELGDSLEYITKTFGYDKMLPMNSGAEAVESAIKICRKWGHEVKGIKKDVAKIITCNGNFHGRTTTIISFSSSKGSKENFGPLTPGFEIIDYNNIKQLEDVLKKDKNIAGFLVEPIQGEGGVVVPDDGYLSKAKKLCEKYNVLFIADEIQTGIGRTGKLLASWHEDIIPDIVILGKALSAGFYPVSGVLTSKEIMNVMQVGSHGSTFGGNPLAGVVAKASIKYTLDYKLSENAE

SEQ ID NO: 124292 - protein, 162 aa, Unknown
  Bacterial polypetide isolated from the Sargasso Sea
DYFEFLDHNIAPDVVTTAKGLGNGMPIGVCLARGEAAGLFEPGNHGSTFGGNPLACAAALAVIDTIEQESLCSRARILGDRILSGFNKSLTGNNQVKEIRGKGLMLAIELNEDAPNLVNDALEAGILINVAQGNVIRLLPPLTLTDEEADSIVESVSNLISD

SEQ ID NO: 124293 - protein, 252 aa, Unknown
  Bacterial polypetide isolated from the Sargasso Sea
RWGYFTKGIPENKAEIIVADGNFHGRTTTIVSFSSDSSYKDGFGPFTPGFESANYCGSCDCGFINNCISIESFERKINKNTCAILVEPIQGEAGIRVPKDGWLKELRKLCTEKNILLILDEIQSGLGRTGKLFAYQHENIIPDGLILGKALGGAMMPISAFLSSKEIMNHFNAGSHGSTFGGNPLASKVATKALELLYADNLIENSDKLGRYFKSQLQSIDSSIINEVRGKGLWIGMELNESKVNAKDLCLL

SEQ ID NO: 124294 - protein, 199 aa, Unknown
  Bacterial polypetide isolated from the Sargasso Sea
IPEDCLKGLRKLCDERNILLILDEVQCGLGRTGKLFAFEWAKIKPDIVPIAKGIGGGFPLGACLMNKKTASTMTPGSHGSTFGGNPLAMSIASVVLDYVLSKDFLKNVTKVGNYLKNKLEEEVIQKYPTLVSGIRGKGLMLGIESKIKNEILIKEMINQKLLTVKASQNIIRILPPLILEEKHVDEAISKINKAFRNLK

SEQ ID NO: 124295 - protein, 284 aa, Unknown
  Bacterial polypetide isolated from the Sargasso Sea
EGAYLWDVDGNKYLDMVSAYSAVSHGHSHPELLKTLHEQSSKLAVTSRAFYTEPFSTFLEKLSKVSGFESILTMNTGAEAVETAIKAARRWGYFSKGIPEDKAEIIVANGNFHGRTTTIVSFSSDASYKDGFGPFTPGFNSAEYCGSCDCQSIDSCLSIESFEKKINKNTCAILVEPIQGEAGIRVPTDGWLKQLRALCTSRNILLILDEIQSGLGRTGKLFAYEHENIKPDGLILGKALGGALLPISAFLSSKEIMSHFNPGSHGSTFGGNPLASKIAIKAID

SEQ ID NO: 124296 - protein, 294 aa, Unknown
  Bacterial polypetide isolated from the Sargasso Sea
DMMSGYSAVSHGHAHPELLRVFHEQSSKLSLTSRAFYTDTLGPYLEKITKMSGFEMCLPMNSGAEAVETAIKSSRRWAYRTKKVEPEKAEIVVAEGNFHGRTTTIISFSTDENSRHDFGPHTPGFVTVKYGCSKSLESAINKNTAAVLIEPIQGEAGIVVPPENYLPEVRDICSKHNVLMILDEIQSGLGRTGKLFAYQHCNIQPDGLILGKALGGGFMPVSCFLSSKEVLHWMNPGSHGSTFGGNPLAAAIAKRSIELLEEDGLIENSRIMGDYFKESLLNLNSKIIKEIRGK

SEQ ID NO: 124297 - protein, 212 aa, Unknown
  Bacterial polypetide isolated from the Sargasso Sea
MLEPIQGEGGINISNNDFLKKVRKLCTSNKWLLIFDEVQCGIGRTGNWFAFQKAGIKPDVLTLAKGLGSGIPIGALLVKGSYADILGPGDHGSTFGGNPLAMRAGLTTLDVIQEEKLLENARNRGNQILKRLKYELRNYPNILSIRGIGLMIGIQLKVECSQITKIALDNGLLVNVTNSNVIRLLPPLIISQREVEILLSKLILSIKTFFEK

SEQ ID NO: 124298 - protein, 282 aa, Unknown
  Bacterial polypetide isolated from the Sargasso Sea
YRTKNVESNKAEIIVADGNFHGRTTTIISFSSDSNSKDDFGPHTPGFVSVEYGSSEAIEKAINENTAAVLIEPIQGEGGIIVPPENYLPEVREICTKHNVLMIMDEIQSGLGRTGKMFAFQHSNIQPDGLILGKALGGGFMPVSCFLSSKEVMQWMNPGSHGSTFGGNPLAAAIAKRSLELLEEENLIENSRVMGDFFKESLIDMNSSVIKEVRGKGLWLGVEIDPNFISGKELSEIFLNEGILCKETHETTIRFAPPLVIKKEEVEWALEIIKKVFTQISN

SEQ ID NO: 124299 - protein, 312 aa, Unknown
  Bacterial polypetide isolated from the Sargasso Sea
MSSSLQDNYIKKEILYGAKNYAPLSVVLNRGEGAYLWDVDGNKYLDMVSAYSAVSHGHSHPELVKTVQDQANKLAITSRAFYTEPFGDFLEQLTKVTGYENVLTMNTGAEAVETAIKAARRWGYSSKGIKEDKAEIIVADGNFHGRTTTIVGFSSEDSYKDGFGPFGEGFVEAKYCWSECNAEESLKSFKSKINKNTCAILIEPIQGEAGIRVPDEGWLKMIRDLCDENNVLLILDEIQSGLGRTGKLFAYEHENIKPDGLILGKALGGAMLPISAFLSSKEVMNHFNAGSHGSTFGGNPLATKVASKALKL

SEQ ID NO: 124300 - protein, 215 aa, Unknown
  Bacterial polypetide isolated from the Sargasso Sea
MHDEVAAIIIEPIQGEGGDNHFPLEFFKNLRRIADERDSLLIFDEVQTGLGLTGKMWAYEHFDVVPDMMCFGKKTQVCGFCSTDRIDEVKNNVFNTSGRINSTWGGNIVDMVRFQYIIEAIKEHGLVENARDVGQHLIWELRKLPLIDNVRGRGLMIAFDLPDEQARDTMMSLLQENMLALKCGIRSIRLRPPLTFSLEDANSARNFIYEAITKL

SEQ ID NO: 124301 - protein, 243 aa, Unknown
  Bacterial polypetide isolated from the Sargasso Sea
MKAPFNPIVPNFEHVPFGKIDPIKNKDLNEVAAILIEPIQGEGGIYSASKSYLNDLKNLCLENDILLIFDEVQCGFGRTGEWFASQYFDIEPDIISIAKAQGGGVPIGAVIFNDNLKFEKKMHGSTYGGNPLACAVGISVIDFIIENDILNNVKKMGEYFKTELNNLLNLYPNILKDVRGVGLMIALQFRGPAGPALMGLLDKGVLALTAGKPNLRFLPPYIITKDEIDFAISSLKEVLGEVS

SEQ ID NO: 124302 - protein, 178 aa, Unknown
  Bacterial polypetide isolated from the Sargasso Sea
ILDEIQSGLGRTGKLFAYQHEDIVPDGLIIGKALGGALLPISAFLGSKDLMQHFNPGSHGSTFGGNPLAAKVASKAIDLLFEDKLIENSKNMGDYFISKLKQINSKIIKEVRGKGLWIGMELNESEVNAKDLCLMLLNEGLLCKETHKTVIRFAPPLMISKNDIDWAIEKITKVITAI

SEQ ID NO: 124303 - protein, 227 aa, Unknown
  Bacterial polypetide isolated from the Sargasso Sea
MFDRKGEIIACFMVEPIQGEAGVIVPDDDYLPRVSELCKKYNILLSVDEVQTGFGRTGANFAHQLSGIVPDIMGCGKAAGGGILPVSFVAGRKDVINVLTPGSEGSTFGGYPLASVVGTFAIKVLIEDKLALNAKEQGAYLVSHLNSIMNDFPDKIKEVRGKGLLTAFEMHNEPKLDGHAVSVGLLNHGVYAKETHHTTVRIAPALTINKNQIDALAEAIRTVIKDL

SEQ ID NO: 124304 - protein, 213 aa, Unknown
  Bacterial polypetide isolated from the Sargasso Sea
YYHDFAAVILEPIQGEGRVIIPPDGYLKAVREVCNENGVLMIMDEIQTGIGRTGYWFGCEHEDVIPDIICSSKMLGGGIPIGAMIASSKISFQRGKHGSTFGGNLIGCEAASAVIDFMLAHNTLEHVKNVGEKAINYLKTQTANITKVKEVRGRGFMIGIELYEPAVPYLRAIFNEKILALSAGKKIIRLLPPLVTSEDDLMDGLNKIIRVLK

SEQ ID NO: 124305 - protein, 256 aa, Unknown
  Bacterial polypetide isolated from the Sargasso Sea
KDGFGPFTPGFNSAEYCGSCDCQSIDSCLSIESFEKKINKNTCAILVEPIQGEAGIRVPTDGWLKQLRALCTSRNILLILDEIQSGLGRTGKLFAYEHENIKPDGLILGKALGGAILPISAFLSSKEIMNHFNPGSHGSTFGGNPLASKIAIKAIDLLFEEKLIENSKKMGEYFLTSLRQIDSKIIKEVRGKGLWIGMELNKSDVNAKDLCLMLLNEGLLCKETHKTVIRFAPPLMISKEDLDWAINKITKVLRAI

SEQ ID NO: 124306 - protein, 391 aa, Unknown
  Bacterial polypetide isolated from the Sargasso Sea
MLEDEILGNLYQKLPVTLEKGLGSHVWDIDGNEYIDCMGAYGVAITGHRNQRVNNAIKNQIDKIISVHSSFYNKTRENFLETISHVAPKNLSNVYLGNSGTEAIEAAIKFSRKYTGKKGMIAMKGSYHGRTMGSLSLTFTPKYKKSFEPMVENTQFSEFGNITDLESKINSETGFIILEPIQGESGIHPAPDGFLQQVRKLCDEKNIVLVFDEVQCGLGRTGKMWACENWNVVPDILCTSKGLAGGIPFSATLTKPEILDSMEKGEQSSTFGGNPLACAASAATLTALTDDGLIDNAAKIGSLLWSGLEKLKNKHKIIREIRGKGLMIAIEFEIDVRELLLHAIERRIIFLFSLYSDKNILRLLPPLVLTENDVSEILSVLDEIITNEENI

SEQ ID NO: 124307 - protein, 299 aa, Unknown
  Bacterial polypetide isolated from the Sargasso Sea
VFFTNSGAESIECGIKIIRGYHSYYKTNKTEIITFDGAFHGRTYGALSAQKNKKYSNGFGPMLRGFKQIEFNNEKKLISAINKKTAGIIIEPIQGEGGIRPANLSFLKLLRKICNEKKILLFFDEVQCGFGRSGKLFSHEWAKIKPDIMSVAKGIGSGFPLGACMSTNKACVAMTKGSHGSTYGGNPLAMSVGLEVLKIISNKTFLTKVDKTARYFWKNLKKLENSSNIISEVRGAGLLLGIKTNISNIDFSEQLKKNKLLNVPAADNTVRLAPPLIVSYKEIDKSITIIKKSMKELSK

SEQ ID NO: 124308 - protein, 369 aa, Unknown
  Bacterial polypetide isolated from the Sargasso Sea
KYLDMVSAYSAVSHGHSHPELVKAIKNQSEKLAITSRAFYTEPFANFLESLTNISGFESVLTMNTGAEAVETAIKAARRWGYFTKGISENKAEIIVADGNFHGRTTTIVGFSSEESYKRGFGPFSKGFVEAKFCWSGCSKEESIESFKEKINKNTCAILVEPIQGEAGIRVPEKGWLHELRELCNENDILLILDEIQSGLGRTGKLFAFQHEDIIPDGLILGKALGGAMMPISAFLSSKNVMDHFNSGSHGSTFGGNPLASKIATRALELLYEDNLIDNSCELGSYFKSKLRSIDNNIIKEVRGKGLWIGMELNKHNFNAKDLCLMLLNEGLLCKETHKSVIRFAPPLMITKKEIDWAIEKITKVISSI

SEQ ID NO: 124309 - protein, 278 aa, Unknown
  Bacterial polypetide isolated from the Sargasso Sea
MNNQYFIELEKENGAHDYNPLPVVLSKGKGVFLWDVNGKKYYDFLSAYSAVNQGHCHPKIIKVLKDQASKLTLTSRAFHNDKLGEYMEFTTQLFGYERLLPMNTGAEGVETAIKIVRKWGHTIKGIPDHSAKIVVCDGNFHGRTSTIISFSGDKGSKEFFGPHTKGFYNVPFDDLNSLEEVFNQDKNIAGFLVEPIQGEAGVVVPKEGYLEGVRKLCTKHNILFVADEIQTGLGRTGKLLATQYEDSKPDILILGKALSGGTIPVSAVLCNSENNGCN

SEQ ID NO: 124310 - protein, 348 aa, Unknown
  Bacterial polypetide isolated from the Sargasso Sea
MNSLQSLQLHRELFIQNLFSTFLEKLSKVSGFESILTMNTGAEAVETAIKAARRWGYFSKGIPEDKAEIIVANGNFHGRTTTIVSFSTDASYKDGFGPFTPGFNSAEYCGSCDCQSIDSCLSIESFEKKINKNTCAILVEPIQGEAGIRVPTDGWLKQLRALCTSRNILLILDEIQSGLGRTGKLFAYEHENIKPDGLILGKALGGALLPISAFLSSNEIMNHFNPGSHGSTFGGNPLASKIALKAIDLLFEEKLIENSKKMGEYFLTSLRQIDSKIIKEVRGKGLWIGMELNKSDVNAKDLCLMLLNEGLLCKETHKTVIRFAPPLMISKKDLDWAINKITKVIKAI

SEQ ID NO: 124311 - protein, 373 aa, Unknown
  Bacterial polypetide isolated from the Sargasso Sea
MSENQKKYMDQESIHGPDNYKPLPVVLSEAKGVWVWDVDQNKYLDMMSAYSAVSHGHAHPELVKVFHEQSNTLSLTSRAFYTNTLGPYLETITKMTGFEMALPMNSGAEAVETAIKAARRWAYRSKKIEKDKAEIIVADGNFHGRTTTIISFSSEPNSKDDFGPHTPGFISVEFGNSQAVEDAITKNTAAVLFEPIQGEGGIIEPPENWLPDIREICDKNNVLMILDEVQSGLGRTGKLFAYEHANIRPDGLILGKALGGGFMPVSVFLSSEEVLQWMNPGSHGSTFGGNPLGSAIAKRSLELLEEEGLIENSRVMGDYFKQSLLELNSPIIKEIRGKGLWLGVEIDQSYITGKDLSKLLLKKGILCKETRTQ

SEQ ID NO: 124312 - protein, 436 aa, Unknown
  Bacterial polypetide isolated from the Sargasso Sea
MEKLEYLKQVESNARTYATSFPRLFTHAKGIRVRDADGQEYIDCLSNAGTLALGHNHPEVNEAVMRFLSSDQMQQALDLATPAKHAFVEQLFSLLPGKIAESCKIQFCSPSGADGVEAAIKLTRHYTGRPTIMAFHGAYHGMTSGALAASGNLTPKSAGGNGRDVHFLPYPYAFRCPFGTDGSATDQLSINYIRTVLSDPESGITKPAAIIVEVVQGEGGCIPAPDTWLIELRELTLRHEIPLIVDEVQTGLGRTGTLFAIEHSGIRPDVLVLSKAFGGGYPLSVVVYDERLDTWPPGAHAGTFRGNQIAMVAGLSTMRIVEREDLSAHADRVGKLLVAGLEGLAERFPCLGQIRGRGLMIGAEVVVPGTHGRAGPPHTERAKAIKRNCLRNGLIVETGGRNGAVLRFLPPLIVSEADIHDILNRFEHAVETACRA

SEQ ID NO: 124313 - protein, 349 aa, Unknown
  Bacterial polypetide isolated from the Sargasso Sea
AHPELVKVFHEQSNTLSLTSRAFYTNTLGPYLETITKMTGFEMALPMNSGAEAVETAIKAARRWAYRSKKIEKNKAEIIVADGNFHGRTTTIISFSSEPNSKDDFGPHTPGFISVEFGNSQAVQDVITKNTAAVLFEPIQGEGGIIEPPENWLPDIREICDRNNVLMILDEVQSGLGRTGKLFAYEHANIRPDGLILGKALGGGFMPVSVFLSSEEVLQWMNPGSHGSTFGGNPLGSAIAKRSLELLEEEGLIENSRVMGDYFKQSLLKLNSPIIKEIRGKGLWLGVEIDQSYITGKDLSKLLLKKGILCKETRDTTIRFAPPLIINKDEIDWGVEIIGSTFKAIEEKA

SEQ ID NO: 124314 - protein, 197 aa, Unknown
  Bacterial polypetide isolated from the Sargasso Sea
EKGWLRKIRDLCKDNNVLLILDEIQSGLEGTGKLFAYEHDNIKPDGLILGKALGGAMLPISAFLSSKEVMNHFNAGSHGSTFGGNPLATKVASRALQLLYEDNLIENSAVLGEYFKSRLQSIDNKIIKDVRGKGLWIGMELNEAEVNAKDLCLMLLNEGLLCKETHKTVIRFAPPLMISKDDLDWAIKKITKVIRAI

SEQ ID NO: 124315 - protein, 412 aa, Unknown
  Bacterial polypetide isolated from the Sargasso Sea
SLQDNFIKKESLYGAQNYSPLSVVLEKGEGAYLWDVDGNKYLDMVSAYSAVSHGHSHPELIKTLHDQSSKLAITSRAFYTEPFANFLEKLSNISDFESVLTMNTGAEAVETAIKAARRWGYFSKGIPEDDAEIIVANGNFHGRTTTIVSFSSDSSYKDGFGPFTPGFETADYCGSCECGLIDNCLSIKSFEKKINENTCAILVEPIQGEAGIRVPSEGWLKELRELCTAKNILMILDEIQSGLGRTGKLFAYQHEDIIPDGLILGKALGGALLPISAFLSSKDVMQHFKPGSHGSTFGGNPLASKVAAKAIDLLFEEKLIENSEKMGNYFLSKLRQINSKVIKEVRGKGLWIGMELNTSDVNAKDLCLMLLNEGLLCKETHKTVIRFAPPLMISKDDLDWAIDKITKVLRTI

SEQ ID NO: 124316 - protein, 270 aa, Unknown
  Bacterial polypetide isolated from the Sargasso Sea
MSKSIQDELIKKESFFGAQNYSPLSVVLERGEGACLWDVDGNKYLDMVSAYSAVSHGHSHPELVKTIKEQSEKLAITSRAFYTEPFAKFLEKLSTVSGFESILTMNTGAEAVETSIKAARRWGYFTKGIPKNKAEIIVADGNFHGRTTTIVGFSSEESYKKGFGPFGEGFITAKYCWSECGIEESIESFKSKINKNTCAILIEPIQGEAGIRVPENGWLKELRDLCTSNNVLMILDEIQSGLGRTGKLFAFEHEDITPDGLILGKALEAR

SEQ ID NO: 124317 - protein, 267 aa, Unknown
  Bacterial polypetide isolated from the Sargasso Sea
ADGNFHGRTTTIISFSSDSNSKDDFGPHTPGFVSVEYGSSEAIEKAINKNTAAVLIEPIQGEGGIIVPPENYLPEVRKICTKHNVLMIMDEIQSGLGRTGKMFAFQHSNIQPDGLILGKALGGGFMPVSCFLSSKEVMQWMNPGSHGSTFGGNPLAAAIAKRSLELLEEENLIENSRVMGNFFKESLINMNSSVIKEVRGKGLWLGVEIDPNFISGKELSEIFLNEGILCKETHETTIRFAPPLVIKKEEIEWALEIIKKVFTQISN

SEQ ID NO: 124318 - protein, 440 aa, Unknown
  Bacterial polypetide isolated from the Sargasso Sea
MLIKGYGDDLSINGTRIGDLTPHEHEKIEKQKGGQNYAPLEDVVISKVKDSSTLIARKPDPGDVSKYVESEVLDGLCCYSAVNQGQLNQTIVDAVIHHLDKEKLPTVPRSIRHKYMSAFLLSATAVTEMDRVIPKVAGVESWELSFKICRRWGYEVKGIPDDKAIIIGATGNFHGRSLAAVSFSDDPDSKENFGPFVPGIELVPYNNIEALETLFEEKGEHIAAFMVEPIQGEAGVIVPDDDYFLKVSDLCKKHNILLSMDEVQTGFGRTGENFAHQLFGVKPDIMGCGKAAGGGILPVSFVAGRDDVLGVLTPGSEGSTFGGYPLASVVGTYAIKVMIDAKLAENAKIRGDQLMKNLNNIKDQFPDKIMEVRGKGLLTAFEMFDEKKLDGHKVSVGLLDRDVYAKETHHTTVRLAPALTISSQQIDQLSDAVKDVVSSL

SEQ ID NO: 124319 - protein, 416 aa, Unknown
  Bacterial polypetide isolated from the Sargasso Sea
MPSSLQDEYIKKESLYGAKNYSPLSVVLNKGEGAYLWDVDGNKYLDMVSAYSAVSHGHSHPKLIEVIHEQSKKLSITSRAFYTEPFADFLEKLSNLSGFESVLTMNTGAEAVETAIKAARRWGYFSKGIPEDKAEIIVADGNFHGRTTTIVSFSTDDAYKKGFGPFTPGFDAANFCGSCECDSIEKCLSINTFEKKINENTCAILVEPIQGEAGIRVPREGWLKELRALCTEKNILLILDEIQSGLGRTGKLFAYEHENIKPDGLILGKALGGALLPISAFLSSKEIMNHFKPGSHGSTFGGNPLASKVASKALDLLFEEKLIENSKTMGDYFLSKLKDIDSKIIKEVRGKGLWIGMELNNAEVSAKNLCMMLLNEGLLCKETHETVIRFAPPLMIGKKDIDWALNKITKVITSIK

SEQ ID NO: 124320 - protein, 142 aa, Unknown
  Bacterial polypetide isolated from the Sargasso Sea
MITKTSIDLAKFHLDLEKKYGAHDYHPLPVVLKKGKGVYMWDVNGKKYYDFLSAYSAVNQGHCHPKLVDLIKSQANTLTLTSRAFHNNKLGEYMEYATKLFGFDQLLPMNTGAEGVETSIKLSRKWGYLKKNVDEDKAKIIV

SEQ ID NO: 124321 - protein, 264 aa, Unknown
  Bacterial polypetide isolated from the Sargasso Sea
MSENQKKYMDQESIHGPDNYKPLPVVLSEAKGVWVWDVDQNKYLDMMSAYSAVSHGHAHPELVKVFHEQSNTLSLTSRAFYTNTLGPYLETITKMTGFEMALPMNSGAEAVETAIKAARRWAYRSKKIEKNKAEIIVADGNFHGRTTTIISFSSEPNSKDDFGPHTPGFISVEFGNSQAVEDAITKNTAAVLFEPIQGEGGIIEPPENWLPDIREICDRNNVLMILDEVQSGLGRTGKLFAYEHANIRPDGLILGKALGGGFMP

SEQ ID NO: 124322 - protein, 411 aa, Unknown
  Bacterial polypetide isolated from the Sargasso Sea
MSQSLQDDYIKKESIYGAQNYSPLSVVLEKGEGAYLWDVYGNKYLDMVSAYSAVSHGHSHPELVKTLQDQSSKLAITSRAFYTEPFADFLEFLSKISGFESILAMNTGAEAVETAIKAARRWGYFTKGIPDNKAEIIVADGNFHGRTTTIVGFSSDDAYKKGFGPFGDGFITAKFCWSDCSIQDSIDSFSSKINKNTCAILVEPIQGEAGIRVPDHGWLQELRKLCDNENILLILDEIQSGLGRTGKLFAHDHEDIKPDGLILGKALGGAMLPISAFLSSKEVMDHFNSGSHGSTFGGNPLASKVAKRALELLYEDSLIENSLTLGEYFKSSLQSIDNKIIKEVRGKGLWIGMELNESKVNAKDLCMMLLNEGLLCKETHKTVIRFAPPLMISKKEIDWAIKKITKVIRSV

SEQ ID NO: 124323 - protein, 160 aa, Unknown
  Bacterial polypetide isolated from the Sargasso Sea
DHEGIKPDGLILGKALGGAMLPISAFLSSKEVMDHFNSGSHGSTFGGNPLASKVAKRALELLYEDSLIENSHVLGEYFKSSLQSIDNKIIKEVRGKGLWIGMELNDSEVNAKDLCMMLLNEGLLCKETHKTVIRFAPPLMISKEEIDWALEKITKVIRAI

SEQ ID NO: 124324 - protein, 429 aa, Unknown
  Bacterial polypetide isolated from the Sargasso Sea
DDHEQIEKEKGGQNYAPLENIVVSKVKDSSTLMARKPDPNDVKKYIETELIDGLCCYSAVNQGQLNQTIVDAVVKHLEEEKLPTVPRSIRHKYMSAFLLAATSITEMDKVVPKVAGVESWELTFKICRRWGYHVKGIKDDHCIIVGATGNFHGRSVAAVSMSDDPDSRDGFGPFVPGIELVPYNDINALESLFNEKGDRIAAFMVEPIQGEAGVIVPDEDYFIKVSDLCKKHNILLAMDEVQTGFGRTGANFAHQIFGVKPDIMGCGKAAGGGILPVSFVAGRKDVINVLTPGSEGSTFGGYPLASVVGTYAIKVLADERLADNAKVQGEHLIGNLNKIMNEFPDKIKEVRGKGLLTAFEMHNEKHLDGHTVSVELLNHGVYAKETHHSTVRLAPALTINNNQIDQLSDAIRSVVKVYRYGFLKKTWNR

SEQ ID NO: 124325 - protein, 415 aa, Unknown
  Bacterial polypetide isolated from the Sargasso Sea
MSSSLQDEYIKKESLYGAQNYSPLSVVLEKGEGAYLWDVDGNKYLDMVSAYSAVSHGHSHPELLKTLHEQSSKLSVTSRAFYTEPFSIFLEKLSKVSGFESILTMNTGAEAVETAIKAARRWGYFSKGIPEDKAEIIVANGNFHGRTTTIVSFSSDASYKDGFGPFTPGFNSAKYCGSCDCRSIDSCLSIESFEKKINKNTCAILVEPIQGEAGIRVPTDGWLKQLRALCTSRNILLILDEIQSGLGRTGKLFAYEHENIKPDGLILGKALGGALLPISAFLSSKEIMNHFNPGSHGSTFGGNPLASKIAIKAIDLLFEEKLIENSKKMGEYFLTSLRQIDSKIIKEVRGKGLWIGMELNKSDVNAKDLCLMLLNEGLLCKETHKTVIRFAPPLMISKKDLDWAIDKIKKVLRAI

SEQ ID NO: 124326 - protein, 220 aa, Unknown
  Bacterial polypetide isolated from the Sargasso Sea
KINKNTCAILIEPIQGEAGIRVPEDGWLKELRDLCTSNNILMILDEIQSGLGRTGKLFAFEHEDVTPDGLILGKALGGAMLPISAFLSSKEIMNHFDSGSHGSTFGGNPLASKVATKAIELLFDEGLIENSNRLGDYFISKLKEIDNKIIKEVRGKGLWIGLELNESKVNAKDLCLMLLKEGLLCKETHKTVIRFAPPLMISKDQIDWAIEKITNIIRSI

SEQ ID NO: 124327 - protein, 298 aa, Unknown
  Bacterial polypetide isolated from the Sargasso Sea
KKVKPGKAEIIVADGNFHGRTTTLISFSSDENSKDDFGPHTPGFISVKYGCSKSLEAAINENTAAVLIEPIQGEGGIIVPPENYLKEVRDICTKKNVLMLLDEIQSGLGRTGKLFAYQHSCGNCSCDIGCKPNQPQESKPDGLILGKALGGGFMPVSCFLSSKEVMQWMNPGSHGSTFGGNPLAAAIAKRSIELLDEDKLIENSKAMGEYFKKSLIDMNSKIIKEVRGKGLWLGVEIDPKYISGKDLSKLCLENGILCKETHETTIRYAPPLTISKKELDWAINKIKSVFEEVEKKAA

SEQ ID NO: 124328 - protein, 371 aa, Unknown
  Bacterial polypetide isolated from the Sargasso Sea
MTQSLQDDYIKKESIYGAQNYSPLSVVLEKGEGAYLWDVDGNKYLDMVSAYSAVSHGHSHPELVKTLQDQSSKLAITSRAFYTEPFADFLESLSKISGFESILAMNTGAEAVETAIKAARRWGYFTKGILDNKAEIIVADGNFHGRTTTIVGFSSDDSYKKGFGPFGDGFITAKFCWSNCSIQESIDSFASKINKNTCAILVEPIQGEAGIRVPDHGWLQELRKLCDKENILLILDEIQSGLGRTGKLFAHDHEDIKPDGLILGKALGGAMLPISAFLSSKEVMDHFNSGSHGSTFGGNPLASKVAKRALELLYEDSLIENSHVLGEYFKSSLQSIDNKIIKEVRGKGLWIGMELNDSEVNAKDLCMMLLN

SEQ ID NO: 124329 - protein, 226 aa, Unknown
  Bacterial polypetide isolated from the Sargasso Sea
RLINNKNIVGFLVEPIQGEGGVVVPDAGYLKKCKKLCEKHNVLLIADEIQTGVCRTGKLLASHHENIQPDIVILGKALSGGFYPVSGVLTSKEIMSVMKVGQHGSTFGGNPLACVVAKEAIKFSVDNNLSEKAHKLGLMFRNYLDEIKDDIPIMKSVRGKGLLNAIVLDCDENSDIPWNICLDMRDNGLIAKPTQGNKIRFAPPLVISKKQLKKALLIIENSLRKF

SEQ ID NO: 124330 - protein, 244 aa, Unknown
  Bacterial polypetide isolated from the Sargasso Sea
MEAAINENTAAVLIEPIQGEGGIIVPPENYLKEVRDICTKKNVLMLLDEIQSGLGRTGKLFAYQHSCGNCSCDIGCKPNQPQESKPDGLILGKALGGGFMPVSCFLSSKEVMQWMNPGSHGSTFGGNPLAAAIAKRSIELLDEDKLIENSKVMGEYFKKSLIDMNSKIIKEVRGKGLWLGVEIDPKYISGKDLSKLCLENGILCKETHETTIRYAPPLTISKKELDWALKKIKSVFEEVEKKAA

SEQ ID NO: 124331 - protein, 408 aa, Unknown
  Bacterial polypetide isolated from the Sargasso Sea
SLQDKLIKKESLFGAQNYSPLAVVLERGEGVYLWDVDGNKYLDMVSAYSAVSHGHSHPKLVKTLKEQSEKLAITSRAFYTEPFAKFLEKLSNVSGFESILTMNTGAEAVETAIKAARRWGYFTKGIPENSAEIIVADGNFHGRTTTIVGFSSDDSYKKGFGPFAKGFVTAKYCWSECNIEESIESFKAKINKNTCAILIEPIQGEAGIRVPSDGWLKALRDLCSSNNILMILDEIQSGLGRTGKLFAFEHENIIPDGLILGKALGGAMLPISAFLSSKEIMGHFDSGSHGSTFGGNPLAAKVATKAIDLLFDENLIENSNNLGKYFMSELEKIDSKIIKEVRGKGLWIGVELNDSKIHAKDLCKLLLKKGLLCKETHKTVIRFAPPLTISKNEIDWAITKIVEALKET

SEQ ID NO: 124332 - protein, 359 aa, Unknown
  Bacterial polypetide isolated from the Sargasso Sea
GHSHPELLKALHEQSSKLSVTSRAFYTEPFSIFLEKLSKVSGFESILTMNTGAEAVETAIKAARRWGYFSKGIPEDKAEIIVANGNFHGRTTTIVSFSSDASYKDGFGPFTPGFSSAEYCGSCDCQSIDSCLSIESFEKKINKNTCAILVEPIQGEAGIRVPTDGWLKQLRALCTSRNILLILDEIQSGLGRTGKLFAYEHENIKPDGLILGKALGGALLPISAFLSSKEIMNHFNPGSHGSTFGGNPLASKVAIKAIDLLFEEKLIENSKKMGEYFLTSLRQIDSKIIKEVRGKGLWIGMELNKSDVNAKDLCLMLLNEGLLCKETHKTVIRFAPPLMISKKDLDWAINKITKVIKAI

SEQ ID NO: 124333 - protein, 127 aa, Unknown
  Bacterial polypetide isolated from the Sargasso Sea
MSIISDSLKRIKPSPTIAVTQKARELRAAGKDVIGLGAGEPDFDTPENIKKAAIKAIKRGDTKYTAVDGTPELKKAIIKKFKRENKLNYSLDQITVGTGGKQVLYNAFMATLNKGDEVIIPAPFWVS

SEQ ID NO: 124334 - protein, 314 aa, Unknown
  Bacterial polypetide isolated from the Sargasso Sea
MEHQALKKAIVAKFKRENKLKYSVDQITVGTGGKQVLYNAFMATLNKGDEVIIPAPFWVSYPDMVLLAGGKPKIVKCTEQEGFKLTAKKLKKAISKKTKWVIINSPSNPTGAGYSKKEIQDLAKVLIKNKKIHILSDDIYEHVRYDNFNFFTIAQISKLKDRTLTMNGVSKSYAMTGWRIGYAAGPKDIIKAIGKIQSQSTSNPSSISQAAAVEALNGKQGFIKTRANAFKARRNFVVKCLNSIKGINCLTPNGAFYVFPSCKGLLNKKTKLKTDTNFVQKLLEKENVAVVQGSAFGLDGYFRISYATSMQNLK

SEQ ID NO: 124335 - protein, 285 aa, Unknown
  Bacterial polypetide isolated from the Sargasso Sea
VIYNLMMATLNKGDEVLIPAPYWVSYPDIVLLAGANPIVIECSEEQNFKLTAKDLESKITNNTKWLILNSPSNPTGACYSEQEIKNLSQVLKRNPHVNILSDDIYEHVTYNNFKFFTIAQVPELKSRVVTMNGVSKSYAMTGWRIGYAAGPKEIIKAIAKIQSQSTTNPSSISQAAAVEALNGVQDFIFIRSKAFEERRDFVVNSLNSIDGINCLKPDGAFYVFPSCKSLIGKKDKNGKKIENDTDFVQSLLENHGIAVVQGSAFGLDGFFRISYATSMNNLKKQ

SEQ ID NO: 124336 - protein, 310 aa, Unknown
  Bacterial polypetide isolated from the Sargasso Sea
KINYTTDQITVGTGGKQVLYNAFMATLNKGDEVIIPAPFWVSYPDMVLLAGGKPKIVKCTEEEGFKLTANKLKKAITKKTKWVILNSPSNPTGAGYSKKEIEDLAKVLIRNKKVHILSDDIYEHIAYDNFNFYTIAQNSKLKDRTLTMNGVSKSYAMTGWRIGYAAGPKDIIKAIGKIQSQSTSNPSSISQAAAVEALNGNQGFIKKRSKAFKERRDFVVKSLNSINGINCLTPNGAFYVFPSCKGLLNKKTKLKTDTEFVQKLLEQCNVAVVQGSAFGLDGYFRISYATSMQNLKKAMDRIKSFCESFF

SEQ ID NO: 124337 - protein, 321 aa, Unknown
  Bacterial polypetide isolated from the Sargasso Sea
GIPECRQAVTRWIKKRYNVDIDFERIIIMPGGKPTMSYAIQCFGEPGAEIIHPTPAFPIYESMINYTGSTSVTYDLTENKDLKFDPDKILSLITDKTRLLVLINPNNPTGSFVEKKDIDVLADGLKKHPHVTILSDEIYSRQIFDGKEMPTFFNYPELRERLIVLEGWSKAYSMTGWRLGWSFWPQHLVEHVNKLLINSVSCVNAAAQFAGIAALDGPDDSIDAMMEKFTQRRDIIYKGLNDLPGVECSLPGGAFYAFPKVIGTGMNGAEFARKAMHEAGVAIVPGSAFGETCQNYVRFSFAASRDNISQALENVKKMLTK

SEQ ID NO: 124338 - protein, 315 aa, Unknown
  Bacterial polypetide isolated from the Sargasso Sea
VDGTPALKKAILKKFKRENKLNYKLDEITVGTGGKQVLYNTFMATLNKGDEVIIPAPFWVSYPDMVLLAGGKPKIVKCDEKDGFKITPAKLKSAITKRTKWIILNSPSNPTGSGYSKLEIQKLAKVLIKNKKVHILSDDIYEHVKYDNFKFFTIAQISKLKSRTLTMNGVSKSYAMTGWRIGYAAGPKEIISAIRKIQSQSTSNPSSISQAAAVEALNGKQDFIKKRAKSFKERRDFVVKSLNNIDGISCLKPNGAFYVFPNCKKLLNKRTKLKKDTDFVQKLLEKQNVAAVQGSAFGLDGYFRISYATSMAKLK

SEQ ID NO: 124339 - protein, 245 aa, Unknown
  Bacterial polypetide isolated from the Sargasso Sea
MTESRDFFINPDKILSLINEKTRLLILNNPHNPTGGFTEKTIIDKLAFGLKNFPDLAILSDEVYDRLIFDNKKIPTLLNYPELYDRLIVLNGWSKTYAMTGWRLGWGVWPEKLLDHVFKFCVNSHSCVNTPAQFGAIAALDGPEDHLEKMMEEFNKRRKLIVSGLKSLKGVSCSLPGGSFFVFPNIKDTGMNGEEFAKKCLDEAGVAVIPGVAFGKFATDNVRLNFATSRENISKAIEKIDKILK

SEQ ID NO: 124340 - protein, 293 aa, Unknown
  Bacterial polypetide isolated from the Sargasso Sea
LYNTFMATLNKGDEVIIPAPFWVSYPDMVLLAGGKPKIVKCTEQEGFKLTPAKLKKAITKKTKWVIINSPSNPTGAGYSKREIQDLAKVLIKNKKTYILSDDIYEHVRYDNFNFFTIAQISKLKDRTLTMNGVSKSYAMTGWRIGYAAGPKDIIKAIGKIQSQSTSNPSSISQAAAVEALNGKQGFIKSRANAFKARRNFVVKSLNDIKGINCLNPNGAFYVFPSCKGLLNKKTKLKTDTDFVQKLLEKENVAVVQGSAFGLDGYFRISYATSMQNLKKAMNRIRSFCESLSR

SEQ ID NO: 124341 - protein, 294 aa, Unknown
  Bacterial polypetide isolated from the Sargasso Sea
SAGEPDFDAPKEVIEATSKAIFDGFTKYGPAAGNLDLRKAIANKLQIQNDLNYEFENVMVTNGAKQAIYNLFQVLLNTGDEVIIPSPYWLSYPQMVRLAGGKPIFTNSSAEDGFKINIEDLKSKISSKTKFIIINSPNNPTGRVMSKEELLQIADLARENPNINILSDEIYELILKKEFKHYSLSSLANDLKDRIFIINGFAKGWAMTGWRIGYLVGPKDVIKASSALQSQSTSNVCSFVQKGALEALKINNEFFSMINSHYDQRRRLLYEGLNNINGIYIEEPNGAFYAFPNY

SEQ ID NO: 124342 - protein, 286 aa, Unknown
  Bacterial polypetide isolated from the Sargasso Sea
GDEVIIPSPYWVSYKDIVEFAEGIPNLIDCSIENGFKLTSDDLESAINKSTRCLIINNPTNPTGSVYSHDELKSISNVLVKYTNVFIISDDIYEYLVYDNAKFHTIAQIDENIKMRTLTCNGMSKSFCMTGWRLGYGGGPKILIDAMSKLQSQSTFHPSTISQYAAIAGLNGSREFITQQKKSYEERRNITISYLNNIDGVSCNTPEGSFYAFPSCIDLYGKRTPNGEILKNDVDVCKYILQKAEVSVTPGSFFGKKDYFRVCYTAEKKLLLDALERISNALTLNN

SEQ ID NO: 124343 - protein, 282 aa, Unknown
  Bacterial polypetide isolated from the Sargasso Sea
MELLALKKAIVEKFKRENNLNFNIDQITVGTGGKQVLYNAFMATLNKGDEVIIPAPFWVSYPDMVLLAGGKPKIVRCDEKDGFKLTAKKLQKAISKKTKWLILNSPSNPTGAGYTKDEIEDLAKVLVKNKKIHILSDDIYEHIKYDNFNFFTIAQISKLKDRTLTMNGVSKSYAMTGWRIGYAAGPKDIIKAIGKIQSQSTSNPSSVSQAAAVEALNGSQDFIQERSRAFKERRDFVVQSLNNIKGISCLTPNGAFYVFPSCKGLLTKKTKLKTDTDFVQKL

SEQ ID NO: 124344 - protein, 149 aa, Unknown
  Bacterial polypetide isolated from the Sargasso Sea
SMTGWRLGWSFWPKNLVDHVNKLLINSVSCVNAAAQFAGIAALDGPDDSINEMMEKFTQRRDLIHKGLNELDGVECSLPGGAFYAFPKVIGTGMNGAEFARKAMHEAGVAIVPGSAFGETCQNYVRFSFAASRDNISQALENIKKMLTK

SEQ ID NO: 124345 - protein, 138 aa, Unknown
  Bacterial polypetide isolated from the Sargasso Sea
MSIISNNLKRIKPSPTIAVTQKARELRAAGKDVVGLGAGEPDFDTPINVKNAAIKAIRDGDTKYTAVDGTPALKKAILKKFKRENKLNYKLDEITVGTGGKQVLYNTFMATLNKGDEVIIPAPFWVSYPDMVLLAGGK

SEQ ID NO: 124346 - protein, 310 aa, Unknown
  Bacterial polypetide isolated from the Sargasso Sea
RWIKRRYNVDIDFNRILIMPGGKPTMSYAIQCFGEPGAEIIHPTPAFPIYESMINYTGSTSVPYDLTEDKDLKFNPDKILSLITDKTRLLVLINPNNPTGSFVEKKDIDFLADGLKKYPHVTILSDEIYSRQIFDNKEMPSFFHYPELRERLIVLEGWSKAYSMTGWRLGWSFWPQHLIEHVNKLLINSVSCVNAAAQFAGIAALDGPDDSINVMMEKFTQRRDLIYKGLNDLPGVECSLPGGAFYAFPKVIGTGMNGAEFARKAMHEAGVAIVPGSAFGETCQNYVRFSFAASRDNISQALENIKKMLK

SEQ ID NO: 124347 - protein, 317 aa, Unknown
  Bacterial polypetide isolated from the Sargasso Sea
AIREGDTKYTAVMGTPALKKAIIKKFKKENNLKYSKEEITVGTGGKQVIYNTFVATLNRGDEVIIPAPFWVSYPDMVLLAGGKPKIVKCSESDNFKLTPKKLINAISKKTKWLILNSPSNPTGVIYTKDEIKKLSKVLIRHKTINILSDDIYEHITYDEAKFFTIAQISKLKNRTLTMNGVSKSYAMTGWRIGYAGGPKEIIQSIRKVQSQSTSNPSSVSQAAAVEALNGTQKFIKKRSKEFKKRRDFVVRSLNKIKGINCLTPNGAFYVFPSCKKLLGKKTKLKTDSEFVEKLLQKGNVAVVQGSAFGLSGHFRIP

SEQ ID NO: 124348 - protein, 239 aa, Unknown
  Bacterial polypetide isolated from the Sargasso Sea
MSIISDSLKRIKPSPTIAVTQKARELRAAGKDVIGLGAGEPDFDTPENIKKAAIKAIRRGDTKYTAVDGTPELKKAIIKKFKRENKLNYSLDQITVGTGGKQVLYNAFMATLNKGDEVIIPAPFWVSYPDMVLLAGGKPKIIKCTEQEGFKLTPKKLKKAISKKTKWIILNSPSNPTGAGYSKKEINDLAKILIRNKKIFILSDDIYEHVRYDNFNFFTIAQISKLKDRTLTMNGVSKS

SEQ ID NO: 124349 - protein, 243 aa, Unknown
  Bacterial polypetide isolated from the Sargasso Sea
IANKLQIQNNLNIEFENVMVTNGAKQAIYNLFQVLLNAGDEVIIPSPYWLSYPQMVRLAGGDPIFTNSSAEDGFKINIKDLKSKISSKTKFIIINSPNNPTGRVMSKEELLQIADIARENPNINILSDEIYELILKKEFKHYSLSTLANDLKDRIFIINGFAKGWAMTGWRIGYLAGPKDVIKASSALQSQSTSNVCSFVQKGALEALKINNEFFSIINSHYDQRRSLLYETLKNINGIYMKN

SEQ ID NO: 124350 - protein, 221 aa, Unknown
  Bacterial polypetide isolated from the Sargasso Sea
ELKKAIVEKFKRENNLDYSIDQITVGTGGKQVLYNAFMATLNKGDEVIIPAPFWVSYPDMVLLAGGKPKIVKCDEKDGFKLTPKGLKKAISKKTKWLILNSPSNPTGAGYSKDEIENLAKVLIGNKKVHVLSDDIYEHIKYDNFNFFTTAQISKLKDRTLTMNGVSKSYAMTGWRIGYAAGPKDIIKAIGKIQSQSTSNPSSVSQAAAVEALNGTQDFIDE

SEQ ID NO: 124351 - protein, 293 aa, Unknown
  Bacterial polypetide isolated from the Sargasso Sea
MHFLATVDKGDEIIIPSPYWVSYPDMVLLVEGEPKVLECSLENNFKINPQDLEKIITNKTKWLILNSPSNPTGSMYTEQELMNISKILSKHPHVWVLSDDLYEHIIFDNLKFKNILQADNSLKNRSLIVNGVSKAHAMTGWRLGYAGGPKELISQMNMVQSQSTTHTSSISQAAAIEALKNSKDFIEKNKKIFQERRDIVCSKLNEYDGFQVFNPQGSFYVYVCCNDLMNKKKEDGNLINNDVELSDYYLDDAGVAVVPGEAFGLSNFFRISFATSISLLEEGCNKIIESSKN

SEQ ID NO: 124352 - protein, 164 aa, Unknown
  Bacterial polypetide isolated from the Sargasso Sea
MSIISDSLKRIKPSPTIAVSQKARELRAAGKDVIGLGAGEPDFDTPKNIKNAAIKAIKRGDTKYTAVDGTPALKNAIIKKFKKENNLKYSSEEITVGTGGKQVLYNAFMATLNKGDEVIIPAPFWVSYPDMVMLAGGKPKIIKCNESDNFKLTPKKLKKAIQKK

SEQ ID NO: 124353 - protein, 274 aa, Unknown
  Bacterial polypetide isolated from the Sargasso Sea
GDTKYTAVDGTPALKKAIIKKFKKENNLKYSNDEITVGTGGKQVLYNAFMATLNRGDEVIIPAPFWVSYPDMVLLAGGKPKIVKCNETDNFKLTPKKLKKAISKKTKWLILNSPSNPTGVSYTKSEINKLSKVLIKNKKIHILSDDIYEHITYDKAKFFTIAQISSFKNRTLTMNGVSKSYAMTGWRIGYAGGPKEIIKAIRKVQSQSTSNPSSVSQAAAVEALNGTQKFIKTRSKEFKKRRDFVVKSLNKIKGISCLTPNGAFYVFPSCKDLL

SEQ ID NO: 124354 - protein, 172 aa, Unknown
  Bacterial polypetide isolated from the Sargasso Sea
MPTFFNYPELRERLIVLEGWSKAYSMTGWRLGWSFWPQHLVEHVNKLLINSVSCVNAAAQFAGIAALDGPDDSIHEMMKKFTQRRDLIYKGLNELPGVECSLPGGAFYAFPKVIGTGMNGAEFARKAMHEAGVAIVPGSAFGETCQNYVRFSFAASRDNISQALENIKKMLG

SEQ ID NO: 124355 - protein, 188 aa, Unknown
  Bacterial polypetide isolated from the Sargasso Sea
MSIISDSLKKIKPSPTVAVTQKARELKAAGKDVIGLGAGEPDFDTPDNIKQAAIKAINDGDTKYTPVDGTPALKKAIVEKFKKENNLDYTTDQITVGAGGKHVIYNAMMATLNEGDEVIVPAPYWVSYPDMVLLAGGKPVIMECDEKQAFKINPSDLEKFITPKTKWIILNSPSNPTGACYTEQDIKA

SEQ ID NO: 124356 - protein, 224 aa, Unknown
  Bacterial polypetide isolated from the Sargasso Sea
MSIISDSLKRIKPSPTIAVTQKARELRAAGKDVIGLGAGEPDFDTPNNIKNAAIKAIRGGDTKYTAVDGTPALKKAIIKKFKKENNLKYSNEEITVGTGGKQVLYNAFMATLNRGDEVIIPAPFWVSYPDMVLLAGGKPKIVKCNEEDSFKLTPQKLRKAISKKTKWLILNSPSNPTGASYTKSEIKKLSQVLIKYKKIQILSDDIYEHITYEKAKFFTIAQIS

SEQ ID NO: 124357 - protein, 223 aa, Unknown
  Bacterial polypetide isolated from the Sargasso Sea
MHQVSERMNRVLPSATSAVLNLAAKLKEEGRDIISLGAGEPDFDTPLHIKDAAIKAIKDGHTKYTAIDGTLTLKKAIINKFKQDNDLIYDYDQIIVSSGAKQTLFNLCMGLLQHGDEAIIPSPYWVSYPDMVRIADATPRFIETSIESNFKISPKTLKDSLNNKTRLIFLNSPSNPTGSCYTKKELLEIGDVLVNYPNVIIASDDIYEKIHWGKSKFYNIGTA

SEQ ID NO: 124358 - protein, 150 aa, Unknown
  Bacterial polypetide isolated from the Sargasso Sea
MSIISDSLKRIKPSPTIAVTQKARELRAAGKDVIGLGAGEPDFDTPNNIKNAAIKAIRGGDTKYTAVDGTPALKKAIIKKFKKENNLKYSAEEITVGTGGKQVLYNAFMATLNKGDEVIIPAPFWVSYPDMVLLAGGKTKIVKCNEVDNF

SEQ ID NO: 124359 - protein, 204 aa, Unknown
  Bacterial polypetide isolated from the Sargasso Sea
MSIISDSLKRIKPSPTIAVSQKARELRAAGKDVIGLGAGEPDFDTPNNIKNAAIKAIKGGDTKYTAVDGTPALKNAIIKKFKKENNLKYSAEEITVGTGGKQVLYNAFMATLNKGDEVIIPAPFWVSYPDMVLLAGGKPKIVKCSENENFKLTPAKLKKAISKKTKWLILNSPSNPTGASYTKAEIVKLSKVLTNYKRIHILSR

SEQ ID NO: 124360 - protein, 200 aa, Unknown
  Bacterial polypetide isolated from the Sargasso Sea
MSIISDSLKRIKPSPTIAVTQKARELRAAGKDVIGLGAGEPDFDTPDNIKEAAIKAINEGDTKYTAVDGTPALKKAIVKKFKRENNLDYSLDQITVGTGGKQVLYNAFMATLNKGDEVIIPAPFWVSYPDMVLLAGGKPKIVKCEEKDSFKLTPKKLQKAISKKTKWLILNSPSNPTGAGYTRDEIESLAKILIKNKKIS

SEQ ID NO: 124361 - protein, 229 aa, Unknown
  Bacterial polypetide isolated from the Sargasso Sea
ITDKTRLLILINPNNPTGSFVEKSDIDVLADGLKKHPHVTILSDEIYSRQIFDGKEMPSFFNYPELRERLIVLEGWSKAYSMTGWRLGWSFWPKNLVEHVNKLLINSVSCVNAAAQFAGIAALDGPDDSINEMMEKFTQRRDIIHKGLNELDGVECSLPGGAFYAFPKVIGTGMNGAEFARKAMHEAGVAIVPGSAFGETCQNYVRFSFAASRDNISQALENIKKMLTK

SEQ ID NO: 124362 - protein, 114 aa, Unknown
  Bacterial polypetide isolated from the Sargasso Sea
MILNDPEMRAQWLKELIDCLSCDELIAVTERIDWMRNDPIAREMRKLLKEKLEKVGVKGNWDRSMRAWSMISIDRDHVTKQIGMFTFTGLNKELGVRLNKEQSEAMVAEHHALA

SEQ ID NO: 124363 - protein, 277 aa, Unknown
  Bacterial polypetide isolated from the Sargasso Sea
PYGSKVVVLLPSWPNIPAVQRIMGAKVEGVPIGMKEGKWRLDMEKVFDACDSKTAAIIINSPNNPSGWTMSNQEQRTLLEFTRKKGIWIVSDEVYARISFNANHAPSFCEVMEEDDRVIIVNSFSKSWAMTGWRLGWITAPAHLGVQFEKLNEYNVAGPPPFIQQAGIAALKEGEAFIQESNNRYLNALSHFTEWAKAQERIEFAPPIAAFYAFFKIREGNDSLEMAKDLLKKGVGLAPGRAFGPQFDSYLRLCFASSIPKLERGLNRLEDWLMDFK

SEQ ID NO: 124364 - protein, 292 aa, Unknown
  Bacterial polypetide isolated from the Sargasso Sea
MGGKPTMHYAIQCFGEPGAEIIHPTPAFPIYESMINYTGSKPVPYDLTEDKDLKFNPDKILSLITDKTRLLILINPNNPTGSFVEKRDIDFLADGLKKHPHVTILSDEIYSRQIFDGKEMPSFFHYPELRERLIVLEGWSKAYSMTGWRLGWSFWPQHLIEHVNKLLINSVSCVNAAAQFAGIAALDGPDDSINAMMEKFTQRRDLIYKGLNDLPGVECSLPGGAFYAFPKVIGTGMNGAEFARKAMHEAGVAIVPGSAFGETCQNYVRFSFAASRDNISQALENIKKMLSK

SEQ ID NO: 124365 - protein, 235 aa, Unknown
  Bacterial polypetide isolated from the Sargasso Sea
SIVSNNLKRIKPSPTIAVTTKAREMRAAGKDVIGLGAGEPDFDTPDNIKTAAIEAIKKGDTKYTAVDGTPALKKAIVEKFQRENNLSYTTDQITVGTGGKQVLYNTFMATLNKGDEVIIPAPFWVSYPDMVMLAGGTPKIVKCDEKDGFKISAKKLKKVISKKTKWLILNSPSNPTGAGYTKKEIEELGEVLLKNKNVFILSDDIYEHIRYDNFNFYTIAQIPKLKERTLTMNGV

SEQ ID NO: 124366 - protein, 306 aa, Unknown
  Bacterial polypetide isolated from the Sargasso Sea
LESLRKEISRTTLKYSGVEITENNVVVSNGGKQAIVTALMSILDSGDEVIIPAPYWTTYPEAVKLAGGEPVFIKPDKKDNFKISVSDLEKAKNSQTKLLIWCSPSNPTGVVYSKEESEEIYNWVFENDIWILSDELYEHLVYEGKTSPSPGQYDKELKNTIIINGVSKAYAMTGWRVGWLVANLNVIGLAKKIQSQISSNVSNISQIAAETALKNGLDVTEEMKISFNRRRLYAIEKINEINNISVGNPTGAFYLFVDVSQYCNGNYEGINSSIDFCNWLLDKYFIAFVPGEVIGAPGVYEIILCP

SEQ ID NO: 124367 - protein, 273 aa, Unknown
  Bacterial polypetide isolated from the Sargasso Sea
AMMATLNDGDEVIVPAPYWVSYPDIVLLAGGKPVIMECNEKQGFKINPNDLEKYITPKTKWIILNSPSNPTGACYSEQDIKAIADILEKHNHVYILSDDIYEHVTYEGFKFFTIAQIENLKDRVLTMNGVSKAYSMTGWRIGYAAGPKDIIKAIAKIQSQSTTNPSSISQAAAVEALSGTQDFIKERANSFEERRNFVVKSLNEIEGVECLNPDGAFYVFPSCKGLIGKKDPNGNEIKSDTDFVQSLLENSGIAVVQGSAFGLEGFFRIFLCN

SEQ ID NO: 124368 - protein, 281 aa, Unknown
  Bacterial polypetide isolated from the Sargasso Sea
IIPAPYWVSYPDIVLLAGATPIVVECSEEQGFKLTAKDLEAAITNNTKWVILNSPSNPTGACYSEQEIKNLAHVLKRKPHVNVLSDDIYEHIIYEGFKFFTIAQIPELKNKVVTMNGVSKSYAMTGWRIGYAAGDKEVIKAIAKIQSQSTTNPSSISQAAAVEALNGNQDFIPTRSLSFQERRDFVVNSLNAIDGINCLKPDGAFYVFPSCKELIGKKDINGNKIENDTDFVKSLLENNNVAVVQGSAFGIEGYFRVSYATSMENLDKAMKRIKEFCESLS

SEQ ID NO: 124369 - protein, 247 aa, Unknown
  Bacterial polypetide isolated from the Sargasso Sea
ALKNAIIKKFKKENNLKYSAEEITVGTGGKQVLYNAFMATLNKGDEVIIPAPFWVSYPDMVLLAGGKPKFIKCSEADNFKLTPTKLRKAITKKTKWIIFNSPSNPTGASYTKSEINKLSKVLAKNKKIYILSDDIYEHITYDKAKYFTIAQISNLKSRTLTMNGVSKSYAMTGWRIGYAGGPKEIIKAIRKVQSQSTSNPSSISQAAAVEALNGTQKFIKTRSKEFKKRRDFVVKSLNNIKGINCLT

SEQ ID NO: 124370 - protein, 123 aa, Unknown
  Bacterial polypetide isolated from the Sargasso Sea
MSAFASVPKAPENKIFNLNTLFKADTFPQKLNLGVGAYRDHLGRPYVFNVVKNAETHLYNATMGGDLNKEYLPIRGDDGFTRACGELLYGADSVVFKEKRIASVQSISGTGALRLAADFLSKW

SEQ ID NO: 124371 - protein, 276 aa, Unknown
  Bacterial polypetide isolated from the Sargasso Sea
MGYPIYESQIEYQGGIAIPYGYIETETGFSLDLEAIKSSITPKTKAIIYNNFQNPNSAESSDREMEELAELCIKNDLWVLSDEAYFEIQYSGNPLSIVSLPGMKERTVILYTCSKRFAMTGWRLGAAVGPKNAIDIISKFNTNIESCTTHFIQRGMTEAIEGSTAGPDGILSELRKRRDATVEGLNAIDGISVTAPNSTFYLFPNVSEVMQRKNISDVNILMEQALTETNVSFCTRKHFGRLIENEVGDYLRFAYSGIDVEDINEGMKKLKLFFES

SEQ ID NO: 124372 - protein, 245 aa, Unknown
  Bacterial polypetide isolated from the Sargasso Sea
MKLSNRIKLIQPSSTMALTSKANELRSQGEDIIVLTVGEPDFDTPEYIKEDAKKAIDMGETKYTAVDGTVDLKKAIIRKFQNENNLDYSLDEIIVSAGCKQSIFNFLQVIIDDGDEVIIPQPYWVSYADMVKYSGGIPIMLSTNYEDNFSIDIHKFKSLITERTKLFMINSPNNPSGKYYDAEMLKKLSEVLNEHNNVFISSDDIYEHIHWGSEKFHNILNVNPELKSRTIILNGVSKAYSMTGW

SEQ ID NO: 124373 - protein, 244 aa, Unknown
  Bacterial polypetide isolated from the Sargasso Sea
QAAIKAINDGDTKYTAVDGTPALKKAIVEKFKKENNLDYTTDQITVGAGGKHVIYNAMMATLNEGDEVIVPAPYWVSYPDMVLLAGGKPVIMECDEKQGFKINPIDLEKFITPKTKWIILNSPSNPTGACYSEQDIKAIAAILEKHNHVYILSDDIYEHVTYEGFKFFTIAQINSLKDRVLTMNGVSKAYSMTGWRIGYAAGPKDIVKAIAKIQSQSTTNPSSISQAAAVEALSGTQDFIKERA

SEQ ID NO: 124374 - protein, 253 aa, Unknown
  Bacterial polypetide isolated from the Sargasso Sea
MNLIADRIKRIKPSMTVGINIKAKAMKEDGKDVIVLAAGEPDFNTPKNIRDAANKAMEEGKTKYVPGKGTPELQKAIQKKFKEDNNIDYSLDEIICGVGGKHIIYNAMMATINSGDEVIITAPYWVSYPDIVLLAEGKPVIVECPEIQNFKIKPEQLEKHITNKTKWLMLNSPSNPTGAVYSKEELQDLAKVLNKYPNVLIMCDDIYEKIIYDGLEFHTLASVEPSLKNRCLTLNGVFKSYCMTGWRLGYCGA

SEQ ID NO: 124375 - protein, 255 aa, Unknown
  Bacterial polypetide isolated from the Sargasso Sea
TGSKSVPYDLTEDKDLKFNPDKILSLITDKTRLLILINPNNPTGSFVEKRDIDFLADGLKKHPHVTILSDEIYSRQIFDGKEMPSFFHYPELRERLIVLEGWSKAYSMTGWRLGWSFWPQHLIEHVNKLLINSVSCVNAAAQYAGIAALDGPDDSINEMMEKFTQRRDLIHKGLNDLPGVECSLPGGAFYAFPKVIGTGMNGAEFAKKAMHEAGVAIVPGSAFGETCQNYVRFSFAASRDNISQALENIKKMLSK

SEQ ID NO: 124376 - protein, 303 aa, Unknown
  Bacterial polypetide isolated from the Sargasso Sea
EISAKANQLSAEGVDICNLSAGEPDFDAPKEVIEATSKAIFDGFTKYGPAAGNLDLRKAIANKLQIQNDLNYEFENVMVTNGAKQAIYNLFQVLLNTGDEVIIPSPYWLSYPQMVRLAGGEPIFTNSSAEDGFKINIEDLKSKISSKTKFIIINSPNNPTGRVMSKEELLQIADLARENPNINILSDEIYELILKKEFKHYSLSSLANDLKDRIFLINGFAKGWAMTGWRIGYLVGPKDVIKASSALQSQSTSNVCSFVQKGALEALKINNEFFSMINSHYDQRRRLLYEGLNNINGIYIEEP

SEQ ID NO: 124377 - protein, 129 aa, Unknown
  Bacterial polypetide isolated from the Sargasso Sea
GEPDFDTPDNIKQAAIKAINDGDTKYTAVDGTPALKKAILEKFKKENNLNYSTDQITVGAGGKHVIYNAMMATLNEGDEVIVPAPYWVSYPDIVLLAGGKPVIMECNEKQGFKINPNDLEKYITPKTKW

SEQ ID NO: 124378 - protein, 273 aa, Unknown
  Bacterial polypetide isolated from the Sargasso Sea
HYAPSMGIYEFREAIADATNTSRGFKPNIDQVLVTPGGNPIIFLTIACATNPGDEVIVPDPGFPSYFTSIEICGAKAVSVPLKEENNFQLAPEDVFKAVTDKTKLIIINSPSNPTGGSMSKSELEEIASFANKKGIYLLSDEIYARLVYGKENFFSPSVIDECKENTIILNGFSKAFAMTGWRLGVAVGPEKIINKMNLMLNTIVSCVPPFIQVAGIEAINGNQDELIDMKNRYFNRMNIFVDGLNSIKGISCIKPKGAMYAFPNIKETGLSS

SEQ ID NO: 124379 - protein, 205 aa, Unknown
  Bacterial polypetide isolated from the Sargasso Sea
MKNPLSERVIKVKPSATIAISSKAMEMRSAGVDVISMSAGEPDFDTPEYIKDAAKMAMDSGMTKYTQVDGVPDLKQAIINKFSEDNDLIYDPENILVSTGAKQTLYNLFQAILGPGDEVIIISPYWVSYPDMVLLADAKPVIVDTFQENDFALDISAFANAINDKTKLVIINSPSNPTGITFSRSDYESIGAILQNHPRCIYRNR

SEQ ID NO: 124380 - protein, 222 aa, Unknown
  Bacterial polypetide isolated from the Sargasso Sea
MSIISDSLKRIKPSPTIAVTQKARELRAAGKDVIGLGAGEPDFDTPDNIKNAAIKAIKKGDTKYTAVDGTPALKKAIIGKFRRENKLKYSTDQITVGTGGKQVLYNAFMATLNKGDEVIIPAPFWVSYPDMVLLAGGKPKIVKCTEQEGFKITAKKLKKTISKKTKWVILNSPSNPTGAGYSKKEIQDLAKVLIRNKKVFILSDDIYEHIRYDNFNFFTIAQ

SEQ ID NO: 124381 - protein, 208 aa, Unknown
  Bacterial polypetide isolated from the Sargasso Sea
MSIISNNLKRIKPSPTIAVTQKARELRAAGKDVVGLGAGEPDFDTPINVKNAAIKAIRDGDTKYTAVDGTPALKKAILKKFKRENKLNYKLDEITVGTGGKQVLYNTFMATLNKGDEVIIPAPFWVSYPDMVLLAGGKPKIVKCDEKDGFKITPAKLKAAITKRTKWIILNSPSNPTGSGYSKLEIQKLAKVLIKNKKVHILSDDIYE

SEQ ID NO: 124382 - protein, 281 aa, Unknown
  Bacterial polypetide isolated from the Sargasso Sea
GDEVIIPAPFWVSYPDMVLLAGGKPKIIRCSESDNFKLTPKKLRKVITKKTKWIIFNSPSNPTGASYTKSEIKKLSKVLEKNKKIHILSDDIYEHITYNKANYFTIAQIPSLKNRTLTMNGVSKSYAMTGWRIGYAGGPKEIIKAIRKVQSQSTSNPSSVSQAAAVEALNGTQKFINTRSKEFKKRRDFVVSSLNKIKGINCLTPNGAFYVFPSCKKLLGKKTKLKTDTEFVEKLLEKSNVAVVQGSAFGLPGYFRISYATSMQKLKVAMARIKYFCESFS

SEQ ID NO: 124383 - protein, 135 aa, Unknown
  Bacterial polypetide isolated from the Sargasso Sea
MSIVSNSLKRIKPSPTIAVTSKAREMRAAGKDVIGLGAGEPDFDTPDNIKEAAIQAIKKGDTKYTAVDGTPILKKAIQGKFKRENNLSYELDQISVGTGGKQVLYNVFMATLNPGDEVVIPAPYWVSYPDMVLLA

SEQ ID NO: 124384 - protein, 194 aa, Unknown
  Bacterial polypetide isolated from the Sargasso Sea
HPHVTILSDEIYSRQIFDGKEMPSFFHYPELRERLIVLEGWSKAYSMTGWRLGWSFWPQHLIEHVNKLLINSVSCVNAAAQFAGIAALDGPDDSINEMMEKFTQRRDLIHKGLNDLPGVECSLPGGAFYAFPKVIGTGMNGAEFARKAMHEAGVAIVPGSAFGETCQNYVRFSFAASRDNISQALENIKKMLSN

SEQ ID NO: 124385 - protein, 273 aa, Unknown
  Bacterial polypetide isolated from the Sargasso Sea
NIRQAALKAMEQGKTRYVPGKGTPELQKAIISKFKNDNNIDYSEEEVMVGVGGKHIIYNAMMATLNPEDEVIIPAPYWVSYPDIVLLAEGKPIIVPCEEKNSFKITPKNLEKNITSKTKWLFLNSPSNPTGSVYTKEELLAIGEILKKYPKVFILTDDIYEKIIYDENKFYTIVSLIPELKNRTLTLNGVSKAYCMTGWRLGYCGASKEIVKAMNKIQSQSNSSTSSISMAASVEALLGNQDFISLHNIEFKKRRDMVVDKLNSIDGISCAKP

SEQ ID NO: 124386 - protein, 159 aa, Unknown
  Bacterial polypetide isolated from the Sargasso Sea
MKLSKRISNTKTSATIAMSMKARELKAQGKDIISLSAGEPDFDTPNHIKDSAIESINKGNTKYTPVDGMHSLKESIVKKFKNENNLDYDHSQILVSTGCKQSIYNLCQATLDKGDEVLIPSPYWVSYPEIVKLSDASPVFIETDSDNDFKITGKMLLEN
